United States Patent Application Publication US 2005/0228172 A9 - sequence listing, part 175

SEQ ID NO: 783216 - DNA, 585 bp, Homo sapiens
tttccctgaaatccttcggtacagatgtgttttataaatcagaatttcttgattttagaaaggtaatagagttcacattttataacactcctaacggagtctggtacagtacccattaaccacaaatcaatcacattaatagtatgcagcaaaacatagtgaaatacacccagttgagataaattaaaactataaacagtctcatcagtttagatgagatttttccaccaaaakaactacctttaaaaaaaagaatttcctcctctgtagacttggaagactttggaatttatttcagagttgcagagccaggggttgggcagggaggtggggtaaagagtggatgacagagctgtgtttaccttgtaaggctgctgtgaggatgaaatggatcaaagaatacatggaatgcacttagaagaatgcctgagacataacagaagtgcatttcggatattcttattcaatccaaaaaagaaaaaacacaggctacttcaaaggccattatttgtatgtcaaaattactgctaggatgtttactactacagggaattagaagacatcttcagaagaattctgaacaag

SEQ ID NO: 783217 - DNA, 617 bp, Homo sapiens
catgatttcaagtggactctagtttctaggagttagccacatgctgaaattgggattaaatgtaacattcattaatcttgagtttggtgggaagtatttccttctattctttttttttttttttactttaagttctgggatacatgtgcagaatgtgcaggttttttacataggtgtacatgtgccatggtggtttgctgcacctattaacccttcatctaggttttaagccccacatgcattaggtatttgcactaatgctttccctccccttgcccccaacccccgacaggccctggtgtgtgatgttcccctccctgtgttcatgagttctcattattcaactcccacttatgagtgagaacatttggtgtttggttttctgtttctgtgttagtttgctgagaatgatggcttctagcttcatccgtgtccctgcaaaggacataaactcattcttttttatggctacatttctttayattcttaacatttgcatcctattcacaactttggatttataacaccaaattgattttcttatgagttaatggaatgaaaatcatggtttcattgaatgcattttatagaatcagtgcgcgaaatgacaatttttc

SEQ ID NO: 783218 - DNA, 613 bp, Homo sapiens
agactatatatggatccctgggcagatggcctggctgtctggtcaggggtcggaaataaatggcctggcagatggaagacgaggaggtgttgggtaggggcatgtcatgggcacatgggagtgggcacgaatatgcctatcagaaagcgtccagcatggaaagcacagaacagccaagctggcaaaatgccttggccacttgacacttgtcacactatgctactgaccccctggaactggcatgaaggatggtgtggccctgggggcaacgatggaggygacatctatgcccagcatgaaccctcactcaccaaggccaactgagctgctcctgcctctgacttcccagcccgccagcaccaatgccaagcctcttggtgggatggctctgcgaggacagccacccacgactccattcagtccagtctacttatgcaccaccccctgcgactgctaagctgggcaaactgcgcccatagaagccccttctgtactcaatctctgctgctggacagtgagggtgtccgtgcctgtgggtagggcacacagcgccatgtctgtgcccagaattcctgcaggctgcttccagccacgaaccagcacagtgggtgct

SEQ ID NO: 783219 - DNA, 613 bp, Homo sapiens
agactatatatggatccctgggcagatggcctggctgtctggtcaggggtcggaaataaatggcctggcagatggaagacgaggaggtgttgggtaggggcatgtcatgggcacatgggagtgggcacgaatatgcctatcagaaagcgtccagcatggaaagcacagaacagccaagctggcaaaatgccttggccacttgacacttgtcacactatgctactgaccccctggaactggcatgaaggatggtgtggccctgggggcaacgatggaggtgacatctatgcccagcatgaaccctcactcaccaaggccaactgagctgctcctgcctctgacttcccagcccgccagcaccaatgccaagcctcttggtgggatggctctgcgaggacagccacccacgactccattcagtccagtctacttatgcaccaccccctgcgactgctaagctgggcaaactgygcccatagaagccccttctgtactcaatctctgctgctggacagtgagggtgtccgtgcctgtgggtagggcacacagcgccatgtctgtgcccagaattcctgcaggctgcttccagccacgaaccagcacagtgggtgct

SEQ ID NO: 783220 - DNA, 555 bp, Homo sapiens
tggaatcaatgtcagctcagagccagtgtccagtaggccctgaaatgtctgatcatttcccttcccccaatgcacagttaccctgctaaaaggccggaggtctccttggggaaggatgggagagcgattcactgcataaattgtcagtaatatagtgaggtccttcctcaaggggacccggcctccccttcattcaaggggttctgggtctgtaaactggctcaagtctggaaattgattgatgggctgtgattctctgtttctktaattcaaattagtcttttgtgcattcgacctagaagttttctgcttatataaattaagtaggaatgcagtaggcttcctatcaatttcacttctaggaacaccatgattaattagcaaatgccagagctctacacgagtcagactattctgattgcagtagtctgaaagcaatagtcagactattgctttgcctctgctgtccattacggtagctatgcccaccttgcctttgatggttgagtgctgccacttggcccctgccacctcaggatccaattattcccatta

SEQ ID NO: 783221 - DNA, 667 bp, Homo sapiens
tccctgtaggaaggaaatagtgacacgaagtatggccgtactaactacctgcagcactgttctcccctctcagagaagtctaccccccagaggcagaatgcacctcctcacagtgagaatgggctaccagagaaaagcctgaaatttacatgactaatctttgaagtgctttaagtactttttttccattgctgaaggaaaggaatatagaggtacacgtgcacttaaccaaagtcaataccatacaaaaaccattagacaatttctaaaaatcatttagcagtgaaaatgggataggggctgggtgcagtggctcactcctgtaatcctggcactttgggaggccaagatgggtggatcacttgacagcaggagttggagaccaggctggccaacatggtgaaaaccccatctctactaaaaacacaaaaattagccgggcgccgggcacagtggctcaygcctgtaatcccagcactttgggaggccgaggcgggtggatcacgaggtcaggagatcgagaacatcctggctaacatggtgaaacccgtctctactaaaaaatacaaaaaattagccgggtgtggtggcatgcgcctgtagtcccagctactcaggaggctgaggcgggagaatggcgtgaacctgggaggcggaacttgcagta

SEQ ID NO: 783222 - DNA, 605 bp, Homo sapiens
aggaagtgtaattgctacttggagtatgcagcatcattcaactttaggaattactgacaaagagtttcctaaagtggttttatcagttttactattgccagcagtatgagcatcctaaatacttggtgttaacattctytgtcaagtttatgattctggtgaatgcctattgatagttcattgactaccatagttgagtttcttgttatatgtttatcattaacttgcatgtcttcttgggtaaattgcctattctagtctttcttctcttggcttgtctgtcttttttgtaattgatatcttacaaatattatggatggtagtcttttattggatataagtattgtaaatatttaccctactctaagaattcttttttactcctttaagggtgattttttaaataggacaccacacatatacaaccatttaatctttgacaaacctgacaaaaacaagcaatgagaaaaggattccctatttaataaatggtgctgggaaaactggctagccatatgcagaaaactgaaactggaccccttccttacaccttatataaaaactaacccaagatggattaaaaacttaaatgtaagacctaacaa

SEQ ID NO: 783223 - DNA, 642 bp, Homo sapiens
acatatatatagagaaataccttcaaaatacataaccataattaaaatcctagttattttttttaacgtgggcgttattcgaaaagtcctagacattgcaaggtaaaccgttcccacggaccgttccctgtcattgaacgggcaacagcgccctctstcggaattttatagacgcaaaccctgcaagtctccttgatttctttttcggcaaaggtttctttccgttcttgaaaacctggtattgagaggaacatttttaaagttcacttcttatgatatttactaattttagaaacgatcgttccagcatctaaaaagttcaaacgcccgaagaaacgcacaataaaagctcagccgctacggagaaaatttttcctaacttgaacctacctctcttgcttttactttctattacctttcgcgttatcactcaatcacatgacgtagggaaactattcccgcaagaactcagtaaatggaaacacaaaggcaaaacaaactctggatttgaaggaaattaaacgagtaaaatatgcattttcctcgttattttatcttgccttatgtccatatttctttttcaggttacgcacatgctctcctaggtggaaccgcacttgagacatcccagatagttaacac

SEQ ID NO: 783224 - DNA, 636 bp, Homo sapiens
ttttcgaagtatgttcaggactgttttttaaaaaatgtacagaaaaatatcattattaaatcaaggtcaactaggagcactttcatgtcttctttcatctttcttctaaaaatctaattatgaattatctaaatttatttgacttccttccttccactagccctcacctttgcacctgtgggttaacactccatgaactatcttcctttgcagatgcccactgtaccaccttttctttttccattacacagtctccctgggtttcccctttccatctacccaacgcacaaaaataataaaattagaaaagtcaagaattagaattattgtgccaagtttgcaccctggcctttctcattctaggcggtggggcaggctatttaatagcctgaggttcagtgcactgaactacaaaatggaaatgattgtgaaaatttattaaaatagtatctgtgggwaaatatatgtggtactattgcttcataaacaatttaacttatcatcattgtctcaaaacacttagcggggggtcaggaaagtggaggcttctaaaaaccagggatttgcaataaactcctggttagaaagtggaggtgggaaacccaatataggtcttcagactgtgtactcaacgct

SEQ ID NO: 783225 - DNA, 636 bp, Homo sapiens
ttttcgaagtatgttcaggactgttttttaaaaaatgtacagaaaaatatcattattaaatcaaggtcaactaggagcactttcatgtcttctttcatctttcttctaaaaatctaattatgaattatctaaatttatttgacttccttccttccactagccctcacctttgcacctgtgggttaacactccatgaactatcttcctttgcagatgcccactgtaccaccttttctttttccattacacagtctccctgggtttcccctttccatctacccaacgcacaaaaataataaaattagaaaagtcaagaattagaattattgtgccaagtttgcaccctggcctttctcattctaggcggtggggcaggctatttaatagcctgaggttcagtgcactgaactacaaaatggaaatgattgtgaaaatttattaaaatagtatctgtgggtaaatatatgtggtactattgcttcataaacaatttaacttatyatcattgtctcaaaacacttagcggggggtcaggaaagtggaggcttctaaaaaccagggatttgcaataaactcctggttagaaagtggaggtgggaaacccaatataggtcttcagactgtgtactcaacgct

SEQ ID NO: 783226 - DNA, 462 bp, Homo sapiens
tccctccccacaaacctctccacagacaccaaccaccagtcccctagaaaatccccaaactttggggatctcttcattcaggcccccttcccagggaccccactacattcagtgctcaccctcagggtcccccaagtgtcccatcgggatcatttcagtaatctgtaaggaaatactcatgtgggtgaaagcttcttttatggatttttttgaagactgagtctgtgaccyttttttgtcttcatttctcatacattcattgaatatttaatgtttgccaggaactgtgcccagtattctctctctctctctctctctctctctgtgaagcccagagagattgagtctctgaatgattctgccctccacccacagcctcctaccttgtccaccactttctgtggcactttctgtgtcatgggtgttgcaatgaaccctgggaggacagagttacagcggatc

SEQ ID NO: 783227 - DNA, 497 bp, Homo sapiens
catgactggtagggtgagggctgctatggtgggaaagaccaaatggaagccattagagctgcctctatctagaaaaatagtaaatctaaaacactcagtcatcaaaggaaaggtgagtgtagtgaccctgatgaactgaggagtcaaagcagcaattagaatagtctgactctcatagacctatggctttggctagttgatcatggtgttctcagaagtgaaatagataggaaggacactaaattctttttttttttcctagcagaatgatgtttttattttaccatcatgcataaaagggaagataaatatgccartggtgcacttctaatttgtcagagcaatttcacaatatttatgcaatttaggaatgagacacatcagttattaagttgttactagggcaaattatcaagtaagacaatcaactacttgatctgtataaacagaaaactaccagatcaagtgaaaaaaagtctaacttgataaaaacagag

SEQ ID NO: 783228 - DNA, 591 bp, Homo sapiens
accaatgtgcctattgaaaatggtttacttttttggtattttctctttccattctcatttttagtaataaacttttattttagaatagttttacatttacagaaaaattgcatagatgggctatttcccacataccccacattcaatttctcctaytactagcagcttacattagtatatttgttacaattaatgaatcaatagtgatacgttgttattaactaaagtccatactttaaaatccattctcagattttattagtctgtacctagtctcctttttctgtttcaggatctggtccaggatatcccattacatttagttgccttgtctccttaatccctcttggctatgaacatttgtctgtattttaaaatagttatactgtatctgtgttgccaaaactacaaccattacatgctctactctctccagtttaaccctcctttagacttagttgaacaagcagttgtatgtttatgcttaccaccagtgcttatgttaatgtctctctggacatttggtgatccgaacctcagtctgtagtagattccttaggaatattttcccttcttaaatgttgacagtag

SEQ ID NO: 783229 - DNA, 640 bp, Homo sapiens
tctgaaaaaaacaaaacgggacctttttgagactttgcttttaggatcttttctttaccctggtgttctgaaattgtatagtgatgttccttgcctagagtttcttatttgttttatcctctttctccaccttctttcctctcctcctcccctacccctctgcaccttctccacaaccacctggattatgacccggtactttatttttgactccccatgttatccatgtctgtcttttttgttctactttatgaagatttccttaattttagcttttcatcctttactgattgcttttatttctggtgtcattaatttccaagagcttgtacttattttttgtctttttaaaaaaaatcctgtttactttctttgcagttttctgtatttcatcagaatgytttttttttcatgttatgtgttcatttttggcctctgtcttctatgttagaggcttccttcaaatctctgatttttttttttttttttttttttttgctgtccattcacattgaagagtcttgtaccaaaatttgattatgaaagtccttgttgacatggcttgtcaactgacagccgttaactgggtgcttaagtaagcagcattttcttcagatgaagaatttctttaatctttttt

SEQ ID NO: 783230 - DNA, 622 bp, Homo sapiens
atagaacaagcaaaatgcataaacaaaagaaggcaaaacaaaaataatgactcataattatatgaaaagaagctcatcttcatagatgagcagataaatgcaaattaaaaccaccctgagatgctttttacatccatgagcctgataaaagttagagtctaaaagtaataattaacaaagatgggaagtaacagaaaatcttgtccattactggttaaagtataaactgatacagctactttatagaatattacattatagaataaagttgtgagtatgtatatgcagtgactcagcatattcattgctagtatgtactcaagagaaacttacaggagtggactaggaagtaaatacaaaatgattacaacattgtttgttatatcaaaaaataaaaaagacacccaattttccagcaaaaaaaaataagtaaaaataaatcctggtgtattctaacaatggaataatatatagccattaaaataaatcaacyattactgtacatatgaatgtaagtatcagcaaaacatattgtttagtgaaaaactaagaagctgaagaagaatatatacaatatggttacatttatatgaagtccaaaaacttgcaaaataatgtattt

SEQ ID NO: 783231 - DNA, 565 bp, Homo sapiens
agaaactcaaaagagtgcaaccatttgtctctcacctacctgtgacctggaagcccctccccacttcgagttgtcccattttttctttgagttgtcccacctttcctgaccaatattcattttacatatgttgattgatgtcttatatctccctaaaatgtataaaaccaccctgtgctctgactatcttaggtacatgtcgtcaggacctcctgaggctgtcataatcgtgtgtccttgaccttcgcaagataaattttctaaattaactgagacctgtctccaatttttggggttcatacaggttaaattgtaaaagatctgtgtcagaggaggaagtccattcagagggttggggggccttmttttatttttggtttataggattctgaccctttttattatttcaagttggcaatgaaaaaaacagcaaaagtatataggactaaggattctaggctgggtacagtaattcacacctataatcccagcactttgggaggccaaggtgggaggattgcttaagcccaggagtttgaggccaaccggggcaacatatgagacc

SEQ ID NO: 783232 - DNA, 600 bp, Homo sapiens
caggatgctgcctgtgcaggagctttagcaaatatcagtagctctattagctcgcgtctgagccaggtactgttctgtgcaattcatacaagttttaacactgtgaggtcaacaataatattatccccatgttacagttgaggaaattgatgctcagggggctaaatgaactgccaggctcacatagcatccctagttcagagtgatgtgcctgaggcacggcaggagggcaatagtgagatttctaggcatgagtagctttccttgtcgtttttagcaaaaccaggtgccaccagattggtaatcaaatttagtaccctgactattcctactgggatttggttctccatccctatgagcttgaaattccttcrgcgcgtctttagttgttgcaaatcctagcacattggttctcgagcctcagccaggccagaatgcgctgaaactcggattaccgggcctcacccccagagtctctgattgagcaggtcttgggtgaggcctgagaatctgcctttctaacaagttcccaggtgatgctggtccaaggatcccagttcaagaaccactgcactagtttaatgattctcaaaccacctg

SEQ ID NO: 783233 - DNA, 591 bp, Homo sapiens
tttatcttatattaacaggtcagtgatacactgtaggatttaaagtatatatagaaataaaatacagagcaaaaatagcttagaagttgaaagaagaacaatggaattaaaatgttctaaggtccttgcattgtccagggaaaaatagaaggattaatttatattagacattaataagtcgaggatacatactacaatctcttgtataaccactgaaagtttataaaagcgtacaaaatcaccatactaataggaagggaaaatgagtataaaaataatcaatccaaaagatatcaggaaaggagagaaaaaagaattgtaaagaaagctagtatactatgttgctatcagacaaagtagacttaaaaattaaaaaaaaaaaaacccagttctagcaaycaaaaacatccttcataataacaaaatgatcaatttaacaagcctccaaacatgagcaaaaaattgacaaactgcaaaaaactaaacccagaagtgaaaaactaaacaaaaagcaagcaatacagaaaaattgaacacaattaacatattgactaacagacatatataatggatcagttgtgcctgacaagt

SEQ ID NO: 783234 - DNA, 630 bp, Homo sapiens
ggatttgtcaccccaaaaccagtctccaggtaggtgttatggactgcactgtatccccaaaagtttctatgtagaagtcctacccccaagaacctcataatgcagccttggagatgaggtctctacagaggtcatcaagttaaaatgagggcattagagtggccctgagccaatatgactgatgtccttatttaaaaagggagatttggatacaggcacacacagagggaaaaagccrtgtagagatgaagaccgagatagggggatgcttttgtttttgttttttgtttttttgtttttttgtttttgaggtagagtctcactctgtcgcgcaggctggagtgcagtggcgctatctcatctcactgcaagctccgcctcccgggttcacaccattctcctgcctcagcctcctgagtagctgggactacaggtgcccgccaccacgcctggctaattttttgtatttttagtagagacgggttttcaccatgttagccaggatggtctccatctcctgacctcgtaatccgcccgccttggcctcccaaagtgctgggattacaggcgtgagccaccacgcccggctggggggatgcttttacaggtaaagtgaggctaatgattgcc

SEQ ID NO: 783235 - DNA, 630 bp, Homo sapiens
ggatttgtcaccccaaaaccagtctccaggtaggtgttatggactgcactgtatccccaaaagtttctatgtagaagtcctacccccaagaacctcataatgcagccttggagatgaggtctctacagaggtcatcaagttaaaatgagggcattagagtggccctgagccaatatgactgatgtccttatttaaaaagggagatttggatacaggcacacacagagggaaaaagccgtgtagagatgaagaccgagatagggggatgcttttgtttttgttttttgtttttttgtttttttgtttttgaggtagagtctcactctgtcgcgcaggctggagtgcagtggygctatctcatctcactgcaagctccgcctcccgggttcacaccattctcctgcctcagcctcctgagtagctgggactacaggtgcccgccaccacgcctggctaattttttgtatttttagtagagacgggttttcaccatgttagccaggatggtctccatctcctgacctcgtaatccgcccgccttggcctcccaaagtgctgggattacaggcgtgagccaccacgcccggctggggggatgcttttacaggtaaagtgaggctaatgattgcc

SEQ ID NO: 783236 - DNA, 565 bp, Homo sapiens
aagctctctctttgccccctgccatccatgtaagatgtgacttgcttctccttgcctttggccatgattctgaggcctccccagccatgtgagactgtaagcccattaaacctctttcttttataaattgcacagtttcaggtatgtctttaccagcagtgtgaaaatggactaatacagcaggatatgtaacttctctttgccattgatttgcatcgtatggtctgcattatcagacaattatcagagactgaccacaaacacatttgtgaaatacatttatgggaatgatatccagagtagactgtactgtcaaacagtcctgttggatatgtgtttgaggaaaagtaaacttttttttttgaagacagagtcttactgtgtcacccaggctagagtgcagtggygcactgactgctcactgcagccttgacctctcgggctcaagctgggactataggcatgcaccaccatgtccagctaattttttcattttttgtagaaacaaagttttaccatatttcccaggctggtctcaaactcctgacgtcaagtcatctaccca

SEQ ID NO: 783237 - DNA, 607 bp, Homo sapiens
ttgcttcgcactccattgatattagtcattagatatgctgcacagtccaatcttgtttcttgagttaataaagaatatatatatatattcctatggaaatttgatttatagtattttgaaagctatatttaaatataattgctattcttcgtaataaattatattttattttatgcatttaaaaatgttattttgagaagagggtctgtaggttttccagactgccaaaggggtccatggcacacaaatatttaacaactctagtgttaccatctctacaacaagctgtcgccatctattcaccattacttgagacattttttgcactctgyttgttacctttgaaagccacatgtaaaatttataatataaaacaattctgtgggaagaagtggtatcagttggggtagtgtcaggactgagaaaccattctggatattttaagcaggaagagatgtaatgtaaggagttatagactggagctgagggagcaaaggtcaaagaatactaccactgacattctggaaatcagaaagtttaaagaactttaggaagccttcactaaccttcttagctgctacaacaccaaggggtatgattggtggca

SEQ ID NO: 783238 - DNA, 616 bp, Homo sapiens
ggttttcctacgcagagggccctgccgccttctgcagtgtttgtgtccctgggtacttgagattagggagtggtgatgactcttaaccagtatgctgccttcaagcatctgtttaacaaagcacatcttgcaccgcctktaatccatttaacccttagtggacacagcacatgtttcagagagcatggggttgggggtaaggttatagattaacagcatcccaaggcagaagaatttttcttagtacagaacaaaatggagtcgcccacgtctacctctttccacacagacacagcaacaatccaatctctccctcttttccccacatttcccccttttctatttgacaaaaccgccatcgtcatcatggcccgttctcaatgagctgttgggtacacctcccagacggggtggcggctgggcagaggggctcctcacttcccagacagtgcggcagggcagaggcgccccccacctcccagacggggcggcggccaggcgggggctgccccccacctccctgtcggggcggctgcccggcggaggcgctcctcacttcccagacggggcggctgccgggcggagggtctcctcaattcccagacggggtcgcggc

SEQ ID NO: 783239 - DNA, 616 bp, Homo sapiens
ggttttcctacgcagagggccctgccgccttctgcagtgtttgtgtccctgggtacttgagattagggagtggtgatgactcttaaccagtatgctgccttcaagcatctgtttaacaaagcacatcttgcaccgcctgtaatccatttaacccttagtggacacagcacatgtttcagagagcatggggttgggggtaaggttatagattaacagcatcccaaggcagaagaatttttcttagtacagaacwaaatggagtcgcccacgtctacctctttccacacagacacagcaacaatccaatctctccctcttttccccacatttcccccttttctatttgacaaaaccgccatcgtcatcatggcccgttctcaatgagctgttgggtacacctcccagacggggtggcggctgggcagaggggctcctcacttcccagacagtgcggcagggcagaggcgccccccacctcccagacggggcggcggccaggcgggggctgccccccacctccctgtcggggcggctgcccggcggaggcgctcctcacttcccagacggggcggctgccgggcggagggtctcctcaattcccagacggggtcgcggc

SEQ ID NO: 783240 - DNA, 603 bp, Homo sapiens
ttttgtaaatctttgttttctaattttttgttgttgatataaagaaattaaacatatttttatatattcattttatatccaatagacttgataaattaatatttaattctaatcttttatctgagattctttttttttttttggagatggagtctcactctgttgcccaggctggagtgcagtggcacgatcytggctcactgcaagctccacctcctgggttcacgccattctcctgcctcagcctcctgagtagctgagactacaggcacccaccaccacacctggctaactttttatatttttagtacagacggggtttcaccgtgttaaccaggatggtcttgatctcctgacctcatgatctgcccgcctcggcctcccaaagtgctgggattacaggtgtgagccaccgtgcctggtctatctgagattcttttggattttctatacacatgatcataacgtctctgaaaaacaagggttttctttctttctttgtcttttttcttgtcttattgtactaatgaaggcattcaacacaatgttgaaatggtgatggtaagctctttgaagtttttttttaaatcatgaatggtgttg

SEQ ID NO: 783241 - DNA, 603 bp, Homo sapiens
ttttgtaaatctttgttttctaattttttgttgttgatataaagaaattaaacatatttttatatattcattttatatccaatagacttgataaattaatatttaattctaatcttttatctgagattctttttttttttttggagatggagtctcactctgttgcccaggctggagtgcagtggcacgatcttggctcactgcaagctccacctcctgggttcacgccattctcctgcctcagcctcctgagtagctgagactacaggcacccaccaccacacctggctaactttttatatttttagtasagacggggtttcaccgtgttaaccaggatggtcttgatctcctgacctcatgatctgcccgcctcggcctcccaaagtgctgggattacaggtgtgagccaccgtgcctggtctatctgagattcttttggattttctatacacatgatcataacgtctctgaaaaacaagggttttctttctttctttgtcttttttcttgtcttattgtactaatgaaggcattcaacacaatgttgaaatggtgatggtaagctctttgaagtttttttttaaatcatgaatggtgttg

SEQ ID NO: 783242 - DNA, 603 bp, Homo sapiens
ttttgtaaatctttgttttctaattttttgttgttgatataaagaaattaaacatatttttatatattcattttatatccaatagacttgataaattaatatttaattctaatcttttatctgagattctttttttttttttggagatggagtctcactctgttgcccaggctggagtgcagtggcacgatcttggctcactgcaagctccacctcctgggttcacgccattctcctgcctcagcctcctgagtagctgagactacaggcacccaccaccacacctggctaactttttatatttttagtacagacggggtttcaccgtgttaaccaggatggtctygatctcctgacctcatgatctgcccgcctcggcctcccaaagtgctgggattacaggtgtgagccaccgtgcctggtctatctgagattcttttggattttctatacacatgatcataacgtctctgaaaaacaagggttttctttctttctttgtcttttttcttgtcttattgtactaatgaaggcattcaacacaatgttgaaatggtgatggtaagctctttgaagtttttttttaaatcatgaatggtgttg

SEQ ID NO: 783243 - DNA, 632 bp, Homo sapiens
tttcaaagtcaaaggtgtctttcgtgacagcaggccagctgtggcactagtatcactcaggatacatctggtttggagtaaagttagagttctcaaagcaagatgaaaaggcttaactgggaggagaaaagtataaagtacatgttaaatgactcctataaaatttttaaaaattacaatctgtaatagattgtgttggtaaggaagaggaatcgatggataatggcaaagttgttatcttaagaatggccaagtgcaggccaggtgcggtggctcacgcctgtaatcccaacactttgggaggccgaggcaggcagaacacgaggtcaggagctcgagaccagactgaccaacacggtgaaatcccatctctactaaaaatacaaaaattagccaggcgcggtaccaccgcgcctgtaattccagctactcaggaggctgagacaggataatcgcttgaacccaggaggcggaggctgcagtgagcctaratcccgccactgcactccagcctgggtgacagagcgagactccatctcaaaaaaaaaaacaaaagaatagccaagtgatgctatgtgtgagatggtgaaggtcgactggaattagacctcagctctgctgcatatgtgcct

SEQ ID NO: 783244 - DNA, 634 bp, Homo sapiens
aaaggcaaaaattgacaagtagaatctaaataaactcaatagcttctgcacagcaaaagaaactatcaacagagtaaacagaaaacctacagaatgggagaaaatatttgcaaactatgtatctgacaaaggtctaatatccaacatctataaggaacttaaacaaatttacaagaaaaaaagtctcagtctcatccgagacaagtccccattaaaatgtggcaaaggcatgaacagacatttctcaaaagaagacatacatgcagtcaacaagcatatgaaaaaaatctcaatatcacygatcattagagaaatgcaaatcaaaaccacaatgaaatataatctcacaccaatcagaatggctgttattgaaatgtcaaaaaataacagatgttgatgaagttgtggagaaaagggaacacttatacactgttggtgggaatgtaaattagttcaaccattggggaaagcggtatggcaagtcctcaaagagctaaaagcagaactaccatttaacccagcaattccattactggatatttaccgagaggagcataaagcattctagcataaagacacatgcaaacgaatgttcattgcagcactatttacagtagcaaagacatggaataac

SEQ ID NO: 783245 - DNA, 529 bp, Homo sapiens
taatctaaacttttacctcaagaacctagaaaaggaagaagaatcccagagcaaaagaaggagtgaaataataaagataagattttaaaaatcagtgaaatttaaaacagaaaataatatacacagaaataaactctttttaatgaaaaaagagttggttctttgacaagatcagaaaatagataaacgcaactagactagcagaactagaaacatcaggaataatacaggggattgaaaggagaataacagaatactgtgaatacacgcatacatttgaygactttgaggaagtgatctatttcatctaaaaacatatattaccacaactcatccaatatgaaatagattatttcaatagccctataactattaaataaatgaaattcataatgttaaaaaaaactcccaaaaaggatatctccaggcccaaataaatttacttgaggattctaccaaacatttaaagaagaattaacactaattccacacaatctcttccaaaaaacagaaaagaagagcatactcc

SEQ ID NO: 783246 - DNA, 578 bp, Homo sapiens
tggactcctgggcaaaggcaccatcgggaacattaagaaagcaatcccacctcaaacccacaaccaaaatattttataagaaccctcccttccccccccactctctttttgtcaagtaaaggatacacacggcctttctacttgtaacctggccaagaataatttgtggcaggaaagtttgagcatttgtcaaaataaaataaaaatgtaaaaaaaaaaattgcgagcacttgagtgtacatttgtgtgaaactaaacagagggaaagttatttaggtggtaaaatgtctctgcgtttccctcctgccccctgtcccctgacacacggcccccctccccaagtgttgaaaaygtgattgttcgggtatttgttttgttaatctcccaccagggctgaggggctgcaggctgggtttcttcttgttcacgcagggccctggctgccaaacaagtttccccccacctagcccagggccagggactggtgcacctgttccctgcccgtctagggaaacggtggggttgggggagtaagtttttgtcctttcagcaaaggtagctttgccccacctgagacc

SEQ ID NO: 783247 - DNA, 667 bp, Homo sapiens
tcagttttgtcctctggtcattgctgagctgaaatctctaactctaagggcccgagctgtgccagtcttggattctagactcaattcatttgcagtgtggtggaggggcttgaggtacagcatagaggtgggcaagccatggccgaatccagctgggcrcctgcatttgtgaaaaaaataatgtctctgcactgtctatggctacatcagcaaagtggagtacttgcaacagagactgtctggccctcaagtgctaaaatattttctctctggcccttagaggaaaaggttgttggctcccccacactaatgggcagatttcaggtgtaagtcactggccagttgggaattagaggagaggtatttgtttggcagggggcgtgggaagggcatattttgatggaagttttttctagtgcactggtcaggatctcaaactcagattcctctctacggcctcagtttccctgtgtgtgaatggaaatcgctgtacctgcctggcacagtgggtaaggagggaaagtctcgtgcctgggccaggctggcggagctgggttatttatggtttccgccgggaggggggctgcaggccgcgggccgtgtctgacctgaattcttacacttacaggaaattagagcccttggaagcaggtgcgctgggatccta

SEQ ID NO: 783248 - DNA, 490 bp, Homo sapiens
tctgagtgaagtgctgttcaacttggcgctaataggagcgggattcaggtttgtgagctctggaactcgaagtcgacttgcctgttagagaagggggttttggattctgtatagcctgtagtcttttaaatgtaagaatccycagggagtctgctttgaagggtagtcggggctaggctggaacaatgcttcctggacagatcaggtcaaaaattcccagtgcgcggggtattcttagagcccacacatcctcttaagagtttagctgatccagccaacagccttgcggcatacagagcatgggctgtcatcctgttttatggctgagaggctgaagaccctgaaaagggatgtgaccaaccccaggtcccaccagtttaaattgtgatgcctagacttaaacctcccctccccactccaagggtgatgttctttctgtgacatcatttgaaggctagtgggtgataacttagaggaagagttttcactt

SEQ ID NO: 783249 - DNA, 603 bp, Homo sapiens
ttaaataaatgaatttatgaacaaaggaatgaactgcattgttagtgttatgtaggcaaactaactatacagtaccttcagatctataccaggtataccactaaggcataccaaagaaaaatgcagcatgttaagaaataatggctgtaaatcactgtaggcagtgactgaatgtggcaaaataatctactgacaaacaattagatgtgttcccaaagtcactcctagtcaccctcaatcgggcaaatcacactttgtttcttccttttattattactattattcccagaggtgcatcagacccaccactggccccacggggaagtaccattagctcctccaagagttctatgagctaaaaaggcactggttaygactctcaaccccacagtcatgatccatagatcactggttactacaaggtaacaattccttagaacctctatcagaagagagcaggaccaggctggcataaaagaacactggcctaaaaacagaggcctgaagtgtagtcaccaaacagctgtacaactctaagcaaattgttttccttcccagagaccatacccttattttaaaatgtaatgaattatcacccttggc

SEQ ID NO: 783250 - DNA, 600 bp, Homo sapiens
aagaacacacagcagaattgaaatggcaaatggcaatggcttaattttacagaaaaggatgcaaggttaaagtgtaaagcattacagaacaacagtaacagagcctaaatcagactttgtcttaaggtgatagagcaccagtgcttagtgaataccatggctgaacaatatagttttctgctctattagaaattgttctggactttagtataatggctaatgccaaatctttgatttaaaaaatatttttctaaaattgcaaaaagggacgccacattggtgrcagaaagcctggtttcacttcacggaataagcagtttgagatcaatgtcccagaagagttttgacattcaggacttaaaatagcagcagcagcagcagaggtagctgaaatggcaagtaatgaaaattgctttagtaaaaatattttggactgaaggtatgagaaactaaaagtagaaactagtaagacacaaagcataacatgaccaggaatctgatacagtagtgaacaagcggtaaaagttatttgcaaacaaagaaataaaggaagataaggaaacaaacattaagtgaataatttttaggagagtaagagaa

SEQ ID NO: 783251 - DNA, 585 bp, Homo sapiens
gtattggcctgtttctggctgtgaagtccttgctccttcttgtttctagctttttttttttttttgagacagggtcttggtttgtcacccaggctggagtgcagtggcgcaatctcggctcactgcaacctccatctcacgagttcaagtgattctcatacctgagcctcccgagtagctgggattacaggtgtgcrccaccacacccaggtgatttttgtatttttactagagacagggtttcaccatgttggccaggctggtttctaatatttcttaacatctgttttgtctggtatgagtacagccattcaagctctcctatgacagctgatgtttgtacgctgcgtcttttcctgttctctagcagacagcatacagttagatcttgtttttctatctgataatctgccctgtctgtttggggcacagagacctttcacatgtcatataattacacgtacagttggatttactttccttgctttgttgtgtcttttttattcttccctttttgattttaaattacatacgtttagcataccattttaatttatttgtactttttagaacactaagaaaaca

SEQ ID NO: 783252 - DNA, 530 bp, Homo sapiens
ctactttgcccaggctgggctcaaactcagggctctctggcctcagcctcccgagtagctgggtctgcaggtggctgtcaccgtgctgggcctggggtgtgcgtattaatgattttggaatagtgtctggaagcctgtgtgcyttcctctcttcctctccccagaaggacctcccacctcgtcctcccaaagtgttgggattacaggtgtgagccaccatgtcccctctctttgctattttgcctgggaggagtgtattaataattttaattttaaatttctttgattatgttctagtttgattattgatcatttacttcttagctatttatattcttccttgagtcatcggtttctgccctttgacaatttttctgtgaatgttttgtgttgattatatgagctttgactgtattgagaacatccacgcattgtattattgcaactgttttcctagttgagaacatcgacctgctgtattattgcaaatgttttcctgcttgcatgtagtcatttgttatgcatattaa

SEQ ID NO: 783253 - DNA, 524 bp, Homo sapiens
tacacatctctacccgccccaaccttaaccctaacgctaccacattcgacactgaactctgggttttccctcccagatctatcccaccccaatgttccccatctcagtaaatggcaccagcagctgctgagttgtgccagatgagaaccttgaagtcatcttgaccctctcccaccccacgtgcagtctatcagcaaatyctgtcaattctgctattaaaatatagtcaggatccaatcacttcccaccaccctcacagctattgtcctagtctgagtctggatgatggccatcactgctgctctggtctccacctgcttcctctcttgccccttcagtcttttctgaacccagaagccagagtatcttaaaacataagtcagatcatagctctcctctgcccaacactccctagttctccctgtatttctcagagtaaatccaaagtcctttgggatactgaggcacagtaaaggggcttcatgcttttttttgtaaacgtgcatcatttcatgtgattaatt

SEQ ID NO: 783254 - DNA, 524 bp, Homo sapiens
tacacatctctacccgccccaaccttaaccctaacgctaccacattcgacactgaactctgggttttccctcccagatctatcccaccccaatgttccccatctcagtaaatggcaccagcagctgctgagttgtgccagatgagaaccttgaagtcatcttgaccctctcccaccccacgtgcagtctatcagcaaatcctgtcaattctgctattaaaatatagtcaggatccaatcacttcccaccacyctcacagctattgtcctagtctgagtctggatgatggccatcactgctgctctggtctccacctgcttcctctcttgccccttcagtcttttctgaacccagaagccagagtatcttaaaacataagtcagatcatagctctcctctgcccaacactccctagttctccctgtatttctcagagtaaatccaaagtcctttgggatactgaggcacagtaaaggggcttcatgcttttttttgtaaacgtgcatcatttcatgtgattaatt

SEQ ID NO: 783255 - DNA, 524 bp, Homo sapiens
tacacatctctacccgccccaaccttaaccctaacgctaccacattcgacactgaactctgggttttccctcccagatctatcccaccccaatgttccccatctcagtaaatggcaccagcagctgctgagttgtgccagatgagaaccttgaagtcatcttgaccctctcccaccccacgtgcagtctatcagcaaatcctgtcaattctgctattaaaatatagtcaggatccaatcacttcccaccaccctcacagctattgtcctagtctgagtctggatgatggccatcactgcygctctggtctccacctgcttcctctcttgccccttcagtcttttctgaacccagaagccagagtatcttaaaacataagtcagatcatagctctcctctgcccaacactccctagttctccctgtatttctcagagtaaatccaaagtcctttgggatactgaggcacagtaaaggggcttcatgcttttttttgtaaacgtgcatcatttcatgtgattaatt

SEQ ID NO: 783256 - DNA, 494 bp, Homo sapiens
ctctagtaaaaacctggaggggatcctgatccagccttagggtgaagttgctctacctctggtcacctcctcacagggcagcccaggactctgcctggggcactacagtgcatctgaggaaggccaccagcctcagcatccccatccctcagtactggacagtccagtcccctggcatgagctttasggggcttgggacttagttctaaccctgcagccaacttcccggaactgtgctcccatccatgtgcctggcagaaggtctggtacatggtaagtgtcaaggaaggaaggaagagagagagggatgtagggagggaggaagggatgaaagaggaagaaaagaaggaaggaattggagtttcctcattttctacaatggccccagccactggccactgagtgtaaactgaatgtgtggagccccagagaataaagccagggccaggagctacagggaagtggaaggtggaaagtggatactttattgacca

SEQ ID NO: 783257 - DNA, 494 bp, Homo sapiens
ctctagtaaaaacctggaggggatcctgatccagccttagggtgaagttgctctacctctggtcacctcctcacagggcagcccaggactctgcctggggcactacagtgcatctgaggaaggccaccagcctcagcatccccatccctcagtactggacagtccagtcccctggcatgagctttacggggcttgggacttagttctaaccctgcagccaacttcccggaactgtgctcccatccatgtgcctggcagaaggtctggtacatggtaagtgtcraggaaggaaggaagagagagagggatgtagggagggaggaagggatgaaagaggaagaaaagaaggaaggaattggagtttcctcattttctacaatggccccagccactggccactgagtgtaaactgaatgtgtggagccccagagaataaagccagggccaggagctacagggaagtggaaggtggaaagtggatactttattgacca

SEQ ID NO: 783258 - DNA, 671 bp, Homo sapiens
acaagactagttttatataatacttgggaataagaaaaaacagaatattaatatctaataatgttggaggttttgatttagagatcataatagaaatatcagggttggttataggaacagttagatggggacaaaggagagactttagggcactgtgccagaaagagttattctaaaaggaaattaaaagttccaaattctcccctgcaccaaaaaaatttaaaaaggctgtccaggcttcacattttcragcaaaacctcaaattcctgactgactcacatgagcaccaagacctttcatccttcccatgagtaaatgtatataatggggtgaccatccgctagtggggctcagagcttcaacacaaagaatgaagaaggaagagaaaagagaacaatcatggccagagtagcagaatttaataataaagatcactaacacttttatccaaataatccacagtgagctgtgtctgtaattagactaaggtataatctgcatgtgaattggggaaagttttaaaataatttcaggccaggcacagtggctcatacttttaatcccagcactttgggagactgaggcaggaggactgcttgctcccagaagtttaagaccagcctgggcaacatgaagagacctcatctcacaaagaaaatttaaaaaaatt

SEQ ID NO: 783259 - DNA, 539 bp, Homo sapiens
atttgactacattatattgtggaaaagatggaaaggcttgaaaaggcttgcatccaaaaaaaagtctttgaaaaatgtcattcttattgttatagtgccctgtgagtctctacagtttttctttgcctcttggagtttttgtattaaaattacaatacccttggtttttacaattttttttttaccattatttgtcaagaactaagtattgcttttttacctatgacaacaatttgaaaaggaaaatctgtgtggagtcaggaagtaggtgctcctgactggagaaaaagatccaggaggacaagtgggaagatgctagaggaaacctatggttgcttcacaaatttcttcaaggacagccttaccytacaaaacagacatcgtccttatgacctaacactttggtaatcaagatataaactcatccactttcttgcttgcatggaaagaaggaagagaatgcatatatagtcaatatctgtgaattattaggtgtttttgcaaatgatctttcatgtacttaaaacaattgcatggta

SEQ ID NO: 783260 - DNA, 678 bp, Homo sapiens
cctgtaatcaggcacatgcctgaggtcaggaggtcgcgaccagtctgactaacatggtgaaaccccgtctctactaaatacaaaaaaattagcccggcatggtggcgcatacctgtaatcctaactacctgggaggctgagacaggagcatcacgtgtacctgggagtggaggttgcagtgagcagagagagtgccactgcacttcagcctgggcaacaagaacaaaactccatctcaaaaaaaaatttttttttccaatactttcatgggtacacatggtttttggctacmcagataaattatatagtggtgaagtctgggcttttaatgtacccatcacctgaacagtgtagattgtacacaacaggtagcttttcatcccttagccctctcccaccctccccacttctgaaactccaatttccattataccactctgtatgccattgcatacccatagcttagcttccacttaaaagccacgtgtggtgtttggttttctgtttctgatttacttcacttaggataatggcctccagttccatccaagttgctgtaaaagacatgatttcacttttttttggctgagtaatattccatggtatatagacatcatattttctttatccactcatttgttgatgggcacttaagttgtttccataactttgcaatta

SEQ ID NO: 783261 - DNA, 544 bp, Homo sapiens
ggcaaaaacggttttgtggactgggccgagggtccctgtgctgtgtgcagcctagggacttggtgccctgtgtcctagccactccagttgtggctgaaagtggccaatgtaaaactcagaccatggcttcagagagtgtaagtcccaagccttggcagcttccatgtggtgttgagcctgcgagtacatagaaatcaagaactggggtttgsgagcctctgcctagatttcagaggatgcatgaaaatacccggatgcctaggcagaagtttgctgcaggggcagtgtcctcatggagaacctccactagggcagtgtggaagggaaatgtgggatcagaatccccacacagagtccatactggggcactgcctagtggagctgtgagaagagggccaccatcttccagacctcagaatggtagatccaccaacagcttgcaccatgcacctggaaaagctgcagacactcaatgccagtccatgaaagcagctagtcatgcttagacatatatgattcaccaagcataatctgattagtcatg

SEQ ID NO: 783262 - DNA, 544 bp, Homo sapiens
ggcaaaaacggttttgtggactgggccgagggtccctgtgctgtgtgcagcctagggacttggtgccctgtgtcctagccactccagttgtggctgaaagtggccaatgtaaaactcagaccatggcttcagagagtgtaagtcccaagccttggcagcttccatgtggtgttgagcctgcgagtacatagaaatcaagaactggggtttgcgagcctctgcctagatttcagaggatgyatgaaaatacccggatgcctaggcagaagtttgctgcaggggcagtgtcctcatggagaacctccactagggcagtgtggaagggaaatgtgggatcagaatccccacacagagtccatactggggcactgcctagtggagctgtgagaagagggccaccatcttccagacctcagaatggtagatccaccaacagcttgcaccatgcacctggaaaagctgcagacactcaatgccagtccatgaaagcagctagtcatgcttagacatatatgattcaccaagcataatctgattagtcatg

SEQ ID NO: 783263 - DNA, 516 bp, Homo sapiens
gtgatattgacttagtttttttcaaagtggttagagtattagactgaatggtctaaaaatttcatagatggaagtaaaggtatgttcaaaaatagactttctctgaaatgttataattgaacttagaacatttatgttagtggttttattctgtaaatgataatactcattcctgtaattctctttatgttgtcagtgtgtttcattaactatatctgcttgatctcaaaccttgattatttctctaactgcgtaacacatggcagttggaggttcaagagagtctaattragtcacttatccacctgtctgaggtgttttttttttttttttttttggagatggagtctgtcactctgttgcccagcctggagtgcagtggcatgatcttggctcactgcaccttcacctaccaggttcaagtgattcttgtgcctcagcctcccaagtagctgggattataggcacatgccaccatgcccagctaaattttgtatttttattagagacagggtt

SEQ ID NO: 783264 - DNA, 650 bp, Homo sapiens
aagagaaagtctccttgacattagtcttggcagtgatttcttggatgtcacaccaaaagctcaggctacaaaagcaaaaacaaataaatgggactatttaaaactgaaagccttctgcacagcaaagtaaacaatcaacaaaaggaaatgacaacctacagattgagaaaaatatttggaaaccacatatcatataaagggttaatatccaagctttataaataactcatacaaccaggccgggcgaggtggctcacacctgtaatctcagcattttgggaggccaagacgggtggatcacctgaggtcaggagttcaataccagcctggccaacatggtgaaaccccgtctctactaaaaatacaaaaattagccaggcatggtgatgcgttcctgtaatcccagctacttgggaggctgaggcagaaggatcacttgaacctgggaggyggaggctgcagtgagccaagattgcgccactgcactccagcctgggtgacagcaagactccatctcaaaaaaaaaaaaggggggggggcaaaaaatctgaatagccatttctccaaagatgacataataatggctaccaagtgcatgaacaggtgctcaacatcactaatcatcaaggaaatacaaatcagaaacatta

SEQ ID NO: 783265 - DNA, 538 bp, Homo sapiens
catctgtaaaaagatctaattcctaacttttggtaatgttggggagagtgaatgaaataatgtgagagtgcttcgtaaattgcaaaagtgttataaagaagttactggtaagagctacgagtgtctcgctgcactctagcatgggcgacagtgcgaggccctgtctcagaaaaaaaaaaagttacttataatgacattttcagacatgagaaatggcataaaattaaaaacagattcaagagaatagtatgttgagattgtagagacagatgtagctaatggaaaaaagctaaataagtctctctacagatgtttattgagtacttaytgcatatactatgcttgccaaaaaatgtaaaagtgtacatttagttacaatgaagcagcacaagttattattagtgattattgttataattaagtattgatcacacttaggggctgcagtctatttccttccaagagcctggaagttgggttgccctcagaaataaataaaaatctacatagaggaaattagctaagagtgatattaagt

SEQ ID NO: 783266 - DNA, 746 bp, Homo sapiens
atgcctcctagcaatccccaggaggatcctttaatcccaataattttcctttttctccccaccttcccactccccatttacttttttttgagacagagttccccctgtcactcaggctggagtgcagtggtgcgacctcggctcactgcaacctccgcctcctgggttcaagtgattctcgtacctcagcctcccgagtagctgggactatagttgtgtgccaccacacctggctaatttttgtatttttagtagagatggggtttcaccatgttggccaggttgatctcgaactcccagcctcaagcaatccacccaccttggcctcccaaaacactggtacaggcatgagccaccgcacccagctcccatttacattttaattcatgccctcagcagggagactactggttttacatgcctccagcaaatattaattattctgtcctctctgtcagtgggtggaattcaaaacactggagcccaagagtggaactgaccagtcctaagcaaggttaaatatacaagttggggcaggcacgaccctaggaaagacttcatacagtatcctcccgggctgcagaagaacccaggactccaggagtctatytggaagtttatataggcagatgccaggccctagaacagagtttctcaacctcagaaacctgctgacatttcgggcctgacaattctctggcgcaggggctgtcctgtgcattgaaggcgtgtagcagcatccctgg

SEQ ID NO: 783267 - DNA, 470 bp, Homo sapiens
acaaccagtgcctccaaagatccagcctatcaagcatcacattctgatgagtctgagaggaacagaatgagtgttctgtgtgtgtccatcattccccaaagcccagtggtctctctgaagctgtttcatgcaatgtatggaaaagggctcaagcatttcagaaacccagtgcttttttgtcagcaaactctacttcattaaraaagtaagtaaagggcggacgtggtggctcactcttgtaatcccagcactttgggaggccaaggcgggtggatcacgaagtcaagagttcgagaccagcctggccaacatggtgaaaccccgtctctactaaaagtacaaaaattagctcggcatggtggcgcacgcctgtaatcccagctactcgggaggctgaggcaagagaatcgcttgaactcggcaggtggaggtttcagtgagccgagatcacgccactgcattccagcctg

SEQ ID NO: 783268 - DNA, 596 bp, Homo sapiens
tcaggtactgtgagcaggccctcggaaccacaccccaaatggagaaataggtttccttctgagagctgggctaggaaaccaatataaaacttccagagtctggggcttagggaggtacacctgcctaggggagggatctggtggtcagggtggcagggccaccttcctcaggcaggtggcagcctctcccttatcatctttgtgggactttctgggtgaaacctctcctggaacagagccactcattcaaacacgttctgctkgcctggtctgtgccacacagaatgctgggtgctggagctgcaaaaaagatgtggccccgtcctcaagtttgcaacagcgaaagcaaacacacgtgtgatggccatggcagtgaggtggaaggtggtgaggatggttgcttgggttcaaactcttgctgtacttattatctgagtaaccgtgggcaagttgcttaacctctctaagccttggttttctcgtctgtaaaatggcgatgatgttagccgtataagcctccttggattggtgtgaggatttaacaagatacagtctctttgccttaaacatgtcacagatgaccaacctcacatgtg

SEQ ID NO: 783269 - DNA, 626 bp, Homo sapiens
gttaatatactaaaaatcgctgaattgtacacttaaaatggtgaattttatggtatgtggattattatatcttatggtatgtgaattattacattttccagtaaatgaattattatattgcaaaataagaaaagtggaaaaagcccctttattccatgtatatcccatcctgggtcaagaaattcaggaatgctgccaggcatggtggctcacgcctgcaatcccagcactttgggaggccgaggtgagcgcatcacttaaggtcgggagttcaagactagcctgaccgacatggagaaaccccgtctttactaaaaaaaaaagaaaaaaacaaaattagctrgacatgtggcacatgtttgtaatcccagctacttgggaggctgaggcaggagaattgcttgaacctgggaggcggaggttgcggtgagtcaagattgcgccattgcactccagcctgggcaacaagagtgaaactctgtctcaaaaaaaaagaaaaaagaaaaaaaaagaaattcaaggaatgccaagatatggtgactcagttataggagaccatattccacaaagaaagaaaagaatcctttgacaaatggtggttaggagatgtcatctactccgtgcct

SEQ ID NO: 783270 - DNA, 582 bp, Homo sapiens
acctccaaaacaaaagatgcctgagccaaggccagagtcgtttctgttttttttttttaaattctttttttgtgatggagtctcgctctgttgcccaggctggtgtgcagttgcacgatctcggctcactgcagcctcagcctcgcgagtagctgggattacagacatgtgccaccacgcccagctaatttttatatttttagtagagacagggtttcaccacgttggccaggctggtctgcaactcccaacctcaagccatctgcccgctttggcctcccaaagtgctgggattacaggtgtgagccaccgtgcccagcctaaaaattctttatcctcaagttcaacagtcatttytaagaatgatatcttttgtctgcttcatgtaactgatgcccagcagaatcctacctggcttatcaacttgacagatgcccccatcacagggtttctcatccactttcatctcttcctggttatttgctaaatggtgaaacagtttgtcttcagaggcccctgaacttctttctctcactctttttgagacagtctcactctgtcacccaggctggagtgcagcgg

SEQ ID NO: 783271 - DNA, 604 bp, Homo sapiens
cttgagctaagaaaatgtttacagccaggggtggtcgctcaggcctctagtcccagcagttagggaggctgaggccagcagatcacttgagtccaggatttcgagaccagcctaggcaatgtgatgaaactccatctctacaaaaaatacaaaaattacctgggcatggtggcatgcacctgtagtcccagctactcaggaggctgaagtgggaggactggttgagcccaggaggcagaagttgcagtgagccaagactgtgccactgcactccagcctgggtggcagagtgagaccctatctccaaaaaaaaaaaaaagtttataaatggagcaatgggaaaaaacttggatgcttttyttacctgccccagggtagtcctagaaatcagtgagaattcccatttgtcctcagagattcctgcaacataggagtgcaagagaggagacagtaagcagaggcacaaggcattactcccaaatcacagctaagccaccctgcaaccctggccggctccttacaaacccagctcccttagcaactgcagtttcccatccaaccagacgagggcgccgagctgacagtcttgctgctggcaatagtg

SEQ ID NO: 783272 - DNA, 614 bp, Homo sapiens
gaggttcagagaaattaagcctcttccaccagcatgcgtgtttggtaactgtcagggtaagatttgattcctttgctcctgcttgtttgactacatcgtggcaactcccacaaagttcatggcagccttacttagaggcacaatagatagttgggttttccaaatttatgagttcagacatagcttattgcagrcaatgctgattagaattagagctgtgctggtagctgaggtttgcagctgtacaaccttgtatagtctctgacttgtggtggtttaacttacaattttttgacttgacgatgacgtaaaagctatatgcattcagtagaaactgtacttcagattttgagttttgatcttcctgggctggtgacatgtgatccgattctgtcgcagtgctgggcactagggcagccgcagctcctagttagccacgtgatcatgaagagggaacaaatactctacagtgggccctgctgccagatgacttcgcccagctgtcagctaatgtaagtgttccgggcatgtttagatatgttaggtgtatgaaattcatttttacttaaagccttttcaacttaaaaatgggcttacccggacgtaatcccatc

SEQ ID NO: 783273 - DNA, 623 bp, Homo sapiens
gtattacctaatccttacagcatctttgtagggaatatttgtatccccattttgaaaaggaggaaaacagaggcccgcaaaggttacttgtctgtgatctcatagctgttgggtgtcacagtcaaaattcaaactcaggtgtgattatctttctattatgccacatccatacttccctactgaggtcttgaaggcaagagacagaaaccacttctgatttctgattctctgtctstagcctgccgtacaagtagggcttctgcacatgttggattgcttggttgactgggtgtgtagtggatttgtacttgctcatatcgggactcatttttccttcgtctgaataatctggacctctatctccaggctttacttgtcacaagacagtgggaggatgggatcatgaaggatggcctgggccagtcactccctacatgatggtgtagctcttttgggtatctctgccctgttttgatgaccatcttcaaagtcaaggacctgggtaaaatagtgcttccaagcttcagagaagagcaaggccagagggcacccatgatgagcaccactggaattccctccctccacagcccacttgttttctgctgtctttgagggagaaataa

SEQ ID NO: 783274 - DNA, 371 bp, Homo sapiens
aggatttgagaagattgactctaattttgaaagaagttttactgtgggtaaaataccatcaaacagcatcacatgctacagagaaatctttcatgaagggaagagtcaattgatgtggcagacttcattgtcgtatttyaagaaattgccacagccaccctaaccttcagcaaccaccatcctgatgggttagcagccatccacactgaagcaagaccctccactaccaaaaagattatgttttgctgaaggcttatatgatcattagtgtttttagcaataaagtgttttttaattatgtacattttttacacataatgctattatacacaacctacagtatagtgtaaacataacttctgtatgcactg

SEQ ID NO: 783275 - DNA, 371 bp, Homo sapiens
aggatttgagaagattgactctaattttgaaagaagttttactgtgggtaaaataccatcaaacagcatcacatgctacagagaaatctttcatgaagggaagagtcaattgatgtggcagacttcattgtcgtattttaagaaattgccacarccaccctaaccttcagcaaccaccatcctgatgggttagcagccatccacactgaagcaagaccctccactaccaaaaagattatgttttgctgaaggcttatatgatcattagtgtttttagcaataaagtgttttttaattatgtacattttttacacataatgctattatacacaacctacagtatagtgtaaacataacttctgtatgcactg

SEQ ID NO: 783276 - DNA, 666 bp, Homo sapiens
tgaatgccttaattttaagtgcaatcttttccttaagaggatgtttgtgtccctccaaaatctcttccttaagagctttatttttctgtgcttctttctcttcccagcataaaccagtccagccagcctcagcagctttctttccttyccccaactcattatcgcagccctgcacaagggccaaggaatccacctaacaaagataaaatgtcctcagcagctggaaggcagcaaagctatgcagtttcacatggtcagccatgagtcagaagttcccagagcgtctcctgccaaagctgcctctaggaacacctggtgagcaactgctggctctgaggagaagggtctggagggcatggtgaatgagaaaacatatataatcttccgccacatttctggtagcttcttatagtctaaaaagcagtttgccttagatttcatgtaatccttataagaagcccaagaggtgaccattaggttcacccccatttaacagatgaggaaatgaagaatcagaaaaataagaatgggttgtccaaggctagagccagagacctagaaggaccctgccacttgaccactgcacacatgaatgcctgcttgagtgtgcatgtgcacacctgcatacatgaacaaatgcctccaacacatacacatgtttcaaca

SEQ ID NO: 783277 - DNA, 666 bp, Homo sapiens
tgaatgccttaattttaagtgcaatcttttccttaagaggatgtttgtgtccctccaaaatctcttccttaagagctttatttttctgtgcttctttctcttcccagcataaaccagtccagccagcctcagcagctttctttccttcccccaactcattatcgcagccctgcacaagggccaaggaatccacctaacaaagataaaatgtcctcagcagctggaaggcagcaaagctaygcagtttcacatggtcagccatgagtcagaagttcccagagcgtctcctgccaaagctgcctctaggaacacctggtgagcaactgctggctctgaggagaagggtctggagggcatggtgaatgagaaaacatatataatcttccgccacatttctggtagcttcttatagtctaaaaagcagtttgccttagatttcatgtaatccttataagaagcccaagaggtgaccattaggttcacccccatttaacagatgaggaaatgaagaatcagaaaaataagaatgggttgtccaaggctagagccagagacctagaaggaccctgccacttgaccactgcacacatgaatgcctgcttgagtgtgcatgtgcacacctgcatacatgaacaaatgcctccaacacatacacatgtttcaaca

SEQ ID NO: 783278 - DNA, 555 bp, Homo sapiens
agagatccaaagcatgagaatgatttgaagtgccattgctggtttgaagatgaagggggcaatgtgacaaggaacacaggctgccttaaggagctgagagaagctgacagccagcaagaaaatgagggcctccagccacattgaactggattctgccagcaactcggctgatcttggaagctgatgccgtccccagagcctccagaaactgaggctctatcaacaccttgactttggtcttttgagacactaaccagytgagccccacagtgctagacttccgaccaaagaagtgtgaggttataaacgggtgttgttttaagcctctaaatttgtagtaatttgttacggtagcaataagaaacaaatacaccctcaaagcctaaaatatatgctatctgaccctttccagataaattttaccaaatcctgatctggatccttgttactcaaattgtggttttcaggccagcagcatcggtatcacctgggagcttgttggacatgcagaatctcagacctcaccaagacctactgactctgaatttgcatttt

SEQ ID NO: 783279 - DNA, 486 bp, Homo sapiens
tctcacatctaggccacacggactcaatggatggtctcccaaaaccttaggcagctctgctcccgtggctctgaagggtacagctcccatggctgctttcacaggctggcattgagtgcttgtggctttttcaggcacagagtgcaaackgccagtatatctaccattctggggtctggaggaccatggccctcttcttgcagctccattaagcagtgccccagtgaggactctgtgtggggctccaaccccacatttctcctctgcattgccataatgaaggttctccatgaagattccacccctgcagcagacttctgcctagacatccaggcattttcatacatactctgaaatctaggcaaaggctcccaaacttttaccttctgtgcacctgcagacacaacaatacatgggagctgcaaaggcttggggctttcaccctctaaagcaactgcctgagctgtaccttgtccccttttaggc

SEQ ID NO: 783280 - DNA, 655 bp, Homo sapiens
tgaaatggctgcaccattttatatttcactagctatggatgagtgttctcatttctttttattccatttttttttttttgatggagtctcgctctgtcacccaggctggagtgcagtggcgccatctcagcttgctgcaagctctgcctcctggrttcacgccattctcctgcctcagcctcccgagtagctgggactacaggagcccgccacagcgcacggtgagaaggggtttcaccatggtctcgatctcctgacctcgtgatccacccgcctcggcctcacaaagtgctgggattacaggcgtgagcacctcgcccggcctccattgttttaattataaccattctagtgaatatgcattggtatctcatggtagttttgatttgtatttatttcactaacagttaatgatgctaagtatctgtcatgtccttattgtctgtttcgataccttctttgaagaaatgcctattcaaatactttgttcatttttaagttggattacttgtattttcattaccaaatgtaagagtttttaaatgtattttgtaaatagtctccttctcaaatatatgattctcaaatattaaaaaaaaaagaaaagaaaacatttattcagccaacaaacatttttaaaaaagctcattatcac

SEQ ID NO: 783281 - DNA, 655 bp, Homo sapiens
tgaaatggctgcaccattttatatttcactagctatggatgagtgttctcatttctttttattccatttttttttttttgatggagtctcgctctgtcacccaggctggagtgcagtggcgccatctcagcttgctgcaagctctgcctcctgggttcacgccattctcctgcctcagcctcccgagtagctgggactacaggagcccgccacagcgcacggtgagaaggggtttcaccatggtctcgatctcctgacctcgtgatmcacccgcctcggcctcacaaagtgctgggattacaggcgtgagcacctcgcccggcctccattgttttaattataaccattctagtgaatatgcattggtatctcatggtagttttgatttgtatttatttcactaacagttaatgatgctaagtatctgtcatgtccttattgtctgtttcgataccttctttgaagaaatgcctattcaaatactttgttcatttttaagttggattacttgtattttcattaccaaatgtaagagtttttaaatgtattttgtaaatagtctccttctcaaatatatgattctcaaatattaaaaaaaaaagaaaagaaaacatttattcagccaacaaacatttttaaaaaagctcattatcac

SEQ ID NO: 783282 - DNA, 593 bp, Homo sapiens
cagaactccaaaataaaccatcacctatgtggtaaaacatattttcgcaaagatgacaagaccattcaatgaagaaaggatggtcttttcaacaaatattgttggctgaggcaggagaatggcgtgaaccccagggggcggagcctgcagtgagccgagatcgcgccactgcactccagcctgggcgacagcgagactccgtctcaaaaaaaaaaaaaaaaaaaaaaaaacaaatwttgttaacatacaaaacaatgaaggtgtacctttaccatataccccacaaaaatttactgaaaatggttccatcacctacagttaagagctaaaactataaaattactagaagaaaacactctgggcaattttcatgacattggatttgataaggccaaaaaaaaaaagcacagagaacaagagaaaaactagataaattaagcacttttatacatcaaagagcactatgaacagagtaataatgaacccaactattgaaagaagtgtctgcaaacaaagtgtcaaatatatgtgataaggaattaatatccagaatacataaagaactcaactaaaaaaaataaaattgggcaaac

SEQ ID NO: 783283 - DNA, 593 bp, Homo sapiens
cagaactccaaaataaaccatcacctatgtggtaaaacatattttcgcaaagatgacaagaccattcaatgaagaaaggatggtcttttcaacaaatattgttggctgaggcaggagaatggcgtgaaccccagggggcggagcctgcagtgagccgagatcgcgccactgcactccagcctgggcgacagcgagactccgtctcaaaaaaaaaaaaaaaaaaaaaaaaacaaattttgttaacatacaaaacaatgaaggtgtacctttaccatataccccacaaaaatttactgaaaatggttccatcacctacagttaagagctaaaactataaaattacyagaagaaaacactctgggcaattttcatgacattggatttgataaggccaaaaaaaaaaagcacagagaacaagagaaaaactagataaattaagcacttttatacatcaaagagcactatgaacagagtaataatgaacccaactattgaaagaagtgtctgcaaacaaagtgtcaaatatatgtgataaggaattaatatccagaatacataaagaactcaactaaaaaaaataaaattgggcaaac

SEQ ID NO: 783284 - DNA, 531 bp, Homo sapiens
caaaggcgtcaaagtggtcttgcccccaaacatctgtcatccagcctctagatcagagggtcattacacatggaaccctatggaaagggttgtcaatgctatggaagataactttgatagagagarcatcatgaaaatctggaaagattgcaccattgaagaggccattactgttataggaaaagccatgcgggccatcaaccctgaaacaattcccactggagagaactgtccagagttgtgcatgacctcacgggatttatgacagggccaatcaaggaaatcatgaaagagatcgtggatatggcaaaaatggtttcaagctatggatcttggagaaattcaagagctaacagacaccacaccagaggagtgcttcaaaccaatgccagacagtgaggaagaagacatggaagaagcagtgccaggaaacaaattgacattaaacaatctggaagaagggttctgatgactcaatgcttttgatgtctttcacgacacggatccttctatgatataggcactgaaacg

SEQ ID NO: 783285 - DNA, 524 bp, Homo sapiens
actatgttctcttctaggagttttatgattttaggcctttcatccattttgagttgatttttatgtatggtaaaataaaggtccaatttcattcttttgtgtgcagaaatccagttttcctaacaccatttattaaagagattatcctttcctcattgtgtcctcttgatggccttattgaaaattagttgtccatatacatttagatttatttctgagctctatactctgtctaattggtctgtgtttktgttttttggcagtaccacattgttttagttattatagctttgtaatataatcttaaatcaagtgtgatgcctccaactttatttttcttaagtgaaaaagcaacctatggactgggaaaaattatttgcaaaccacatacctgataagggtttaatatccaaaatttataaagaactcttgcaactcaatagcagaaaaacaaatgacctgattaaaaaatgagtaaaggacctggatagacatttctccaaagacaatataaaaatggccaa

SEQ ID NO: 783286 - DNA, 571 bp, Homo sapiens
gccctcccatgttcattagcattagtcacaacagccaagctatagaaacaacctaaaagctcatcaatgaacaaattaataaaaaatatgatataggagtgtgtgtgcctatgtctgtacacacatgtacacacaacggtatagcctgccatttgccacagtgtggatggacctggaggacattatgttaagtgaaataaaccagacacaaaaagaaaaagactgcaggatctcacttctgtgtgaaatctgtatcttaacaagagctcaaagacacaagatagatgatggaaggaagtgtggttaacagggtagacataggcggggagggggagatgtgggtcaaaggataygaaacagcagctgcgaggatggagaagtccaggtatctaacgtgcaacatgagtgctcaagttagtaaaaccatggtgtattagggattttcctgaactacatagattttagctgttcttgtcacaaatacaagtagcgatgtgagatgatagatatgagagtccacctctccacagtaactagtactattatcttcatatctgtaggcatggatccc

SEQ ID NO: 783287 - DNA, 630 bp, Homo sapiens
ccagcagtccttctggtatatgctcaaaggagaggcaatcagcaccacttaaagtcacctgccctcccatgttcattagcattagtcacaacagccaagctatagaaacaacctaaaagctcatcaatgaacaaattaataaaaaatatgatataggagtgtgtgtgcctatgtctgtacacacatgtacacacaacggtatagcctgccatttgccacagtgtggatggacctggaggacattatgttaagtgaaataaaccagacacaaaaagaaaaagactgcaggatctcacttctgtgtgaaatctgtatcttaacaagagctcaaagacacaagatagatgatggaaggaagtgtggttaacagggtagacataggcggggagggggagatgtgggtcaaaggatacgaaacagcagctgcgaggatggmgaagtccaggtatctaacgtgcaacatgagtgctcaagttagtaaaaccatggtgtattagggattttcctgaactacatagattttagctgttcttgtcacaaatacaagtagcgatgtgagatgatagatatgagagtccacctctccacagtaactagtactattatcttcatatctgtaggcatggatcc

SEQ ID NO: 783288 - DNA, 624 bp, Homo sapiens
aagaccagcttgggcaacatagtgagaccccgtctctacaaaacatacaaaagttaaccaggcgtggtggcgcatgcctgtggtctcagctacttgggatgctgaggtgggaggattgcttgagcccaggaggtcaaggctgcagtgagctgtgattgagtcactgcactccagcctgggcaacagagaaagaccctgtctcaaaaataaaataaggccaggtgtggtggctcacacctgtaatcccagcactttgggaggctgaggcgagtggatcacttgaggttagcagttcaagaccagcctggaaatcatggtgaaaccycatctctactaaaaatacaaaaactagcctgagtatggtggcacatgcctgtagtcctagctactcaggtggctgaggcaggagaattgcttgaacccaggaggtggaggttgcaatgagccgagattgtgccactgcactccagcctgggtgacagagtgataccctatctcaaaataaataaataaataaataatataaaatacaataacaataaaaataactcagaatgacacacaagcattaactggatctgtgggcccagtagcctagactaccatttcatgtactcagtggac

SEQ ID NO: 783289 - DNA, 584 bp, Homo sapiens
gtgctctgttgtggaacaatggcctcatctacttactcacggacgtggtgtgagtgtattctgagctgcacggtgcggactcatgtggaaagcggcgtgatgtcatcctcaggatcaccttccaggtcagaggcaggaggtgtattcagtttatgaagtagtctgtggggcctctgaacaaggcggggtcagggaaggtgttccccaggaggtggtcctggggctgagccttgaaggaggaggggacagctgcaccagcaggaggggcctggrcctgaccccccaccgcccactgtgtggcccagagaaggcagcaggagcctggcacagcctgctgtgttctgcacctagccccacaggcaatgcaaccccccttggctggtgcctctgcagccaccctgctcactacagcacagcccccctctgtcaccctctgtgggtgtgcaaagcctcaggaaggcgacacccacacccgcataggtgcaggtgtgggaggcctagcgctgccgtcttctgtcccacctatggcctgcagttgctccccagcagctgtccccgcgggcttgtctccgcctatcatcacc

SEQ ID NO: 783290 - DNA, 604 bp, Homo sapiens
ggtctgacaggtcgggagcttctggggaagaagaagggaaagcaatggctgagagcgagctggggcttttgtgtcctgaaatctgctcttgaagctctcacagggctgccccacaggactttcaaattctaaatatgatccctgaaagggctactagacagacaaactaagtgtcctaacacgtaktttaaattggcattagtttaaattggcatttgatggctgagtatggagaaataagcaccttgtggtttgatggggaagagagaatgggtgcgtctggcttcttgtctggaatcaacaccacctaagggcttttaatcagcacctgcccacagcgcctgtggctacaccggggtatgtgtatggacttgaccgtagctctgctctgctactcaatagaattgtaaacttgggcaaaatcctctctgaacctctgtttcattatttataattaaaggtattagattctaatggttcttactcaggctgcccctcagaattacttggagaacataatatatcacataccaagaccaggcctcacccagagaattattcactggcagacgggcagagacatatgtttttcaagctccctaga

SEQ ID NO: 783291 - DNA, 565 bp, Homo sapiens
acagatgcagaattcttgaagatttttactatattttcccccaatcttttagagcagttttgcccacagttaaccaatagcttttttttttttttaaatttttaaagtcaacaaacttttatctagtctttccaaagtatttaacttggctttaacagaaactasaactcttcacgcttgcgtccttggctcatattatcatcataaaaagttcacctggcataatcagtttgtttggtaactgtatttgtttcctagagcagttgtaacaaattaccactccacaagtggcttaaaatgagaaatttattctctcacacttccggtggctagaaatccaaaatcaaggcgtcagcagggccatgctccctctccaatctctgcctagtcgtcacatggccttctgtctctgtgtccttttctgtcatttataaggatactgtcattggatttagaacctactcatatccaatatcagcttatctcaatacttacctattacatctgcaaagacatgatttccaagtgagaatacattctgaggttgcaggtggacataaattac

SEQ ID NO: 783292 - DNA, 549 bp, Homo sapiens
gagtgtgctctgcctgttgatgcactagcaaggcagagtgcctgaaggagaggaagtgggggagggtgatggcagataagatcagagaggcgataggagccagattttataggcccttgtaagcatctatgggacctggccttctctctgagactggaagccattggagaaatgtgaccatgggagtggcattattatttaaaagtatactctgattgctttgtggtgaataggttaaagggtagaaatagagacctattaagaagctactgaaataatccaggcaggggcgagacaatggaaactaaaargatgagggttgccacagagaggataagaagtggacagattctgaatatatttcaaagatgcagaggatgatatctgctaatgggttggctgtgactataaaagaaggggaaactaagggcttcaaggttttgggcttgacaaccacctaaaggatgaagctgccgttaactgagatgggaaagaccatgggtggagctagttgatagcaaaattttaaaactcaggatttcagttttg

SEQ ID NO: 783293 - DNA, 568 bp, Homo sapiens
cccagattctctttctcacttccccattagtttgacttggctttaaagatagcttatgcaaactaaaccccctctcattttccacctatccccctgtgatatccactcagctcataaactagagcattctaggcaactcagctacccattctctcttttttttaagacagggtctcactctgtcactcaggttggaatgcagtaatggaatcatggttcactgcaaccttgacctcctgtgctcaagcaatcctctcgccttagcctcmtgagtagctaggaccacaggcacgtgccaccacacctggctattttttttttctttgtagagatgtggtttccatatgttgcccaggctggtcttaaactcctgggctcaagcgatcttcctgcttcagtctcccgaagtgttaggattacaggcatgagtcaccgtgtccagccccattctcttttaattcttcacttttaaatcacaacatgtagtatatgtctttacacattgtcccttgtaacataagtgattagggcttctaaaaggaagactacatgcctaaaacataatatg

SEQ ID NO: 783294 - DNA, 568 bp, Homo sapiens
cccagattctctttctcacttccccattagtttgacttggctttaaagatagcttatgcaaactaaaccccctctcattttccacctatccccctgtgatatccactcagctcataaactagagcattctaggcaactcagctacccattctctcttttttttaagacagggtctcactctgtcactcaggttggaatgcagtaatggaatcatggttcactgcaaccttgacctcctgtgctcaagcaatcctctcgccttagcctcctgagtagmtaggaccacaggcacgtgccaccacacctggctattttttttttctttgtagagatgtggtttccatatgttgcccaggctggtcttaaactcctgggctcaagcgatcttcctgcttcagtctcccgaagtgttaggattacaggcatgagtcaccgtgtccagccccattctcttttaattcttcacttttaaatcacaacatgtagtatatgtctttacacattgtcccttgtaacataagtgattagggcttctaaaaggaagactacatgcctaaaacataatatg

SEQ ID NO: 783295 - DNA, 520 bp, Homo sapiens
tttggaggcacaggacagaaagggaggcaaaagtaaaattaaaaagatgctgttattttaataaatggactcaaccttcaacaattacttgctatacgcattcattctaagcaatggtatattgaccctaaactgcgtaagcaagacttcatgaggaaaagcacatctacacattttagataaacacagcagtaactatcctcatgaaatagatgcaacccccatttttgacccacctcctgctttttctatcaccattcctttcatatgagtatttctacaggataagcaaatccataatcagcactrtatttcccaagacgatcaggagactctgctaagaagaaataattgaagggcatactatgcggcaggcatgctgtttgcctgcccaaaagtcgtatttacgtaatttcccagcttccactacagctgcgacagggatgtgagatccatgctggccaagggaacttgagggaaagccaactttggggactgtggaaatggtttccctcctaat

SEQ ID NO: 783296 - DNA, 520 bp, Homo sapiens
tttggaggcacaggacagaaagggaggcaaaagtaaaattaaaaagatgctgttattttaataaatggactcaaccttcaacaattacttgctatacgcattcattctaagcaatggtatattgaccctaaactgcgtaagcaagacttcatgaggaaaagcacatctacacattttagataaacacagcagtaactatcctcatgaaatagatgcaacccccatttttgacccacctcctgctttttctatcaccattcctttcatatgagtatttctacaggataagcaaatccataatcagcactatrtttcccaagacgatcaggagactctgctaagaagaaataattgaagggcatactatgcggcaggcatgctgtttgcctgcccaaaagtcgtatttacgtaatttcccagcttccactacagctgcgacagggatgtgagatccatgctggccaagggaacttgagggaaagccaactttggggactgtggaaatggtttccctcctaat

SEQ ID NO: 783297 - DNA, 548 bp, Homo sapiens
cattttcaatgacaaagataaggttgttcttcctcaactgacccaactgcctattctcaaagaaaaccatgatcatcccaagcaagaagctttagaataaccccaaactgacctttcactttgactctgtatttaccatgcyacctcatcatgacactactctccttcctgtatttgtcctttcccattccattctcgtcactgtcattttcatctttcttgggctagaataacacctgaaaagttctctttcccagtactttcttttgcttaactgccattttgacaccatcacacccccccataggccctgaagccctgtgacatcttcccaacacaatttctgcttctccccaccctctcaaacaagcctgctcagccccctttgtgccatcggcccactctcaccttggtctcaacttggagccttttaagcatccccaggcccataaattccttcttgccacatgagatcatatggttcttaagagctcttagaatgtgtcctgctgtatcttaagagctcctaaaatgtgttatccatgtga

SEQ ID NO: 783298 - DNA, 558 bp, Homo sapiens
atctgcagggcagtaggtaatagctattcaaatggtgatgatgctgcttgacactgttccagcacttcacatacactaactcatttaatcctcacaacactagcacgctccttttacagatgaggaaacagaagcagagttcacaaagctcctaggcagcagggctgggggcaggacatgtttttaacattacattgcccagagggtcttccacatggtcagtaaaaaataccagttgtcctgtcagtttggccttgaaagtgggtagccacccacaataaatctgtcccttcactgccaccctcttataaggacctccatactgttccagctggctcttcacccsctccccatcattcttagaactatcaagagcaattctgtctacatgagtattaattttttccccttgtgatgtgctcctgctctactcctcagtgccagtggccttctctagataaaacaaggctgaatgggggctaaattgaacaaaaacattaaagctagcagtttaaactaatgaaaagccttctcaagagatattctctataaaaagct

SEQ ID NO: 783299 - DNA, 463 bp, Homo sapiens
catgaggcttcatttcaccaatgaatcctctcttctgtgtctctatcctcttctattccacaagattcctcccctctgtctacgtgtatgctcaagcctcccttggttacgccttcacttgatggttgtactcagatctctccatcttctttcattcttttcatttargcatcaacgatgtaaaacaggacagcaaaggctcttgctctcatgcaaattaacttctaatttgctgtggggcgagactacaggggaaaatgaggaatgataaacacatccataaacaagatgctttaacatagtgataaatactttaaagacaataagacaaggtgatatggaaagtgagtgagcggtgagacagaggacttactagagattgtgaagcctaaaagatttctctgaggaaatgacatttcaacagagacttgaaattataagtcagatccagcctctcaaagtt

SEQ ID NO: 783300 - DNA, 478 bp, Homo sapiens
gaggcatggagatggataagatgcaattttgaaatgagatcaacagtatctgcggatggaagcacaggattctaagaatgaattccaggtctctggcttgagtgcttgtgtgtgtggagataacgatgactaagatgggggaagctgagggaggtacaggtttgaatgttcatgaaggataaggatctgggtttggcctgcttctttacattgtatctgtttcaaataaatattataatttccatgtggggtagggggaactaccacatcttttccatttccaggtggtagaacttcstattagactgataccattgacctctctctgcccctccttttctgggagaatcaatcgcttgattagaacctttctgagaaagagctggtgtgcttagttctgcttctcccaccaacttttctccttgagatttgccttcatttgggttcatcatctggaattactgtgatccttcacttc

SEQ ID NO: 783301 - DNA, 467 bp, Homo sapiens
gatccagcatcatatacagacccctcagtatccataggggattggttccaggactcccatagataccaaaatttgtggatgctcaagtcccttacatgaagtggcacagtatttgcatataacctatgcacatcttcctgtatattataaatcatstctagattacttatgagactcagtgcaatgtaaatgctatgtaaacagttgctatgctgtgttgctttcttaatttgacttattcttattggtgcattgttgtattttttattcaaatatgtttgatctgttgttggttgtatctgagatgcagaatccatggctacagagagccaaccgtacatgtggatttgttaagaagactcaggtaactaaagtaaactttattccccactcacaaaacttccagaggagcttaactacttctccttaagtaataaagcagaattcaaggttaaatttaacattcc

SEQ ID NO: 783302 - DNA, 542 bp, Homo sapiens
aattaaacctctttttgttctaaattatccagtctctggcagatttttatagcactgttaaagtggaccgatacagtaaattggtactgtaaagagtagagtattggataaagatatcctaaaatgtggaagtgactttggaactgggtaacaggagagcttagaacagtttggagagctcagaagaagacaggaagatgtgggaaagtttaraacttcctgtagacttgtgaaatgattttaactaaaatgctgatagtaatatggtcaatgaagtccaggctgaagtggtctcaaatggagatgaggaacttattgggaactggagcaaaggtcacacttgctatgctttagcaaagagactggcggcattttgtccctgccctagagatctgtggaactttgaacttcagagagattatctgaaattggaacttatgtttgaaaaggaagcagagcataaaggtttggaaaatgttcaggctgacaatacaatagaaaagggaaacccattttctggggtaaaattcaagccaactgca

SEQ ID NO: 783303 - DNA, 542 bp, Homo sapiens
aattaaacctctttttgttctaaattatccagtctctggcagatttttatagcactgttaaagtggaccgatacagtaaattggtactgtaaagagtagagtattggataaagatatcctaaaatgtggaagtgactttggaactgggtaacaggagagcttagaacagtttggagagctcagaagaagacaggaagatgtgggaaagtttaaaacttcctgtagacttgtgaaatgattttaactaaaatgctgatagtaatatggtcaatgaagtccaggctgaagtggtctcaaatggagatgaggaacttattgggaactggagcaaaggtcacacttgctatgctttagcaaagagactggyggcattttgtccctgccctagagatctgtggaactttgaacttcagagagattatctgaaattggaacttatgtttgaaaaggaagcagagcataaaggtttggaaaatgttcaggctgacaatacaatagaaaagggaaacccattttctggggtaaaattcaagccaactgca

SEQ ID NO: 783304 - DNA, 633 bp, Homo sapiens
cagttggtcgaaaatattcccgaagaaattataatgtaaggaaaagagtcctatattgggtattaggaaatcgattattttatttggacaatgtcatttcctagtaagtcattcagtgactcaacaatttcctaatttctattccctaatcagtcgaataaggaacctgaactaaattatttgtatagtcttttcatttcttaaaatcttgtgaatgtagtaacttttccctattcagttagccaggtaagcactgcttacagttgtcttagaaaaattctgtgtaactataagcagattgaaatcccctgaaaaaccataaagttgaatataagccacctaatattattgtttgttccagcaaattttcatgccattattcacttataaaaagtaaaccttaatgygagtacagcaagacaattaacaaaacaagaaaattttatttaggaacgaggttattgcagagagactagcaattgccatttgcaataatgatagttaccgtttgaactaacaaaaaagagcattaataactattgtttttatgacctaggaggcgtggataaaagaaatcaaaagggagggtataaagatcagggaggattttggaagtgtttaatttatactttt

SEQ ID NO: 783305 - DNA, 625 bp, Homo sapiens
aaatgtgcatagctattttcctgggttagtttaaatgtactgcagtccttctggaactgaataactaaatcagtggcttcccagagcctctacagctctaatagttgtataagagcacaacctatggttgtaaccaatggttaacaatcattaacctaaaaagtaaagcctttttgattatgcattgtgctaagggctttagaattattgttaaatggattcagtccctgctttttaggaacttaagagaaaaatttttaaaagtaaataaaagaaatctaccgtttatggtgtactactaagaagcattaaaacaagtatgagaatcacttcagagaaacattaatgaatttacaaatatcagtatttcagaaaagtaatatctactttgattttacaaatgagatatgtatggacaagaaaaatctattcatgacatgtctactccaaatagcttcattartatttttcaggcgaaaagaagtaacaaaatgaaaaagaaaaagaaacattacactgcattgaggcaaaagattaagaaataagtttgtcagaaaaatgtgaaggtttgatgcttatctttgcagtaattttaagtaaaatgatgaagaaagaaaaatgtttg

SEQ ID NO: 783306 - DNA, 646 bp, Homo sapiens
caccatgaagtcctgcccgcccttatgacatcatgtaaatctaattatctcccaaaggccccacctccaaataccatcacattgggggttagtgcttcaatatatgaattttgagggaacatattcagtccataacaacaggtgttaccatatttaatatttacaacgatccaatgaaaggtactattcttcccatttatacataaggaaaccgcgatagagatagctttaaaactttcccaagattagtggctgcagggtgagggtgttgagaagcagccagggtttgaagccaaacagattcctaggaaaaatattcttaactcattctckgagtttaagtagggtattagcagtttaatgatgatggggtaacagttatatgtaagtatgagtgtgtgaatgtgtttatctgtctatctgagtgaatgagagagtgaagaggcagggagagagagcataagcaataataacagaaggtaggatagtaatttaccactcttactatgaggtgtgggtgtactgttctagatgtgtaactaaaaggaataattttaacctgattattttcatcatacccacttggtggtcattttgtaaactcccacagctcttgtaacagtatatctcaatagtaaaaaagtct

SEQ ID NO: 783307 - DNA, 646 bp, Homo sapiens
caccatgaagtcctgcccgcccttatgacatcatgtaaatctaattatctcccaaaggccccacctccaaataccatcacattgggggttagtgcttcaatatatgaattttgagggaacatattcagtccataacaacaggtgttaccatatttaatatttacaacgatccaatgaaaggtactattcttcccatttatacataaggaaaccgcgatagagatagctttaaaactttcccaagattagtggctgcagggtgagggtgttgagaagcagccagggtttgaagccaaacagattcctaggaaaaatattcttaactcattctctgagtttaagkagggtattagcagtttaatgatgatggggtaacagttatatgtaagtatgagtgtgtgaatgtgtttatctgtctatctgagtgaatgagagagtgaagaggcagggagagagagcataagcaataataacagaaggtaggatagtaatttaccactcttactatgaggtgtgggtgtactgttctagatgtgtaactaaaaggaataattttaacctgattattttcatcatacccacttggtggtcattttgtaaactcccacagctcttgtaacagtatatctcaatagtaaaaaagtct

SEQ ID NO: 783308 - DNA, 667 bp, Homo sapiens
actgattgtggtttaatgtgaaaggactcaattgcaatgaaaaagaaagttatttagctacagttttcaagagtaactcccaggaaagaaaaataggtaggataagtactaagaaactctttccgaagctgagtgtaagatttcaagaaaaacgttcaaaaatattattacttcgttctaaaataaaatacattctgaaaaatattaggagccatataaaataatgtaatgatgaatcatactctcaacataaaacaaatgatcagtactttctaattttctataatttgtatgtcaaatctcgttaatatttttttaggtgtgttgtactgttgctgaggttgttttattatttgttttggagaaaaagactgtttagaaggttaaactgatgaattmacagacaattatacaagcttgtgctattaatattgttaaataattgcatacaacttagcacttgagcaagaacaagtgttatttgttactgagtctcttcctgtgatcaggtgattagcattacatattcccaagaataaatgattccacacctcagggatcaggaaaataaccacactttcacagtcagaatgtagataagcgctgtcttgtaaactgtagtaaagccaaacatttatagcatcttttaaagacagtcttatgatct

SEQ ID NO: 783309 - DNA, 629 bp, Homo sapiens
tcaacagaacatggtaggtgtagagtttgaatgtaagttgtcaggaagcatatcatagaggtgaaaagcatggtctcttctccagaattgggctagcctgtgtttgaatcctggtttcaccatttattagttatgctatttcaggcaatttacctaatgtccctgtctcttgttttcctcatctgtaaaatgggaattattatagtctttatctcagagggctgtgatgagggttatgagagtcaatatttgtaaagcacttartgtctggaatatgccaagtgtttaataaaatgaattaaataaaatttagggcagagtacaaagaaacttaaatttctcagtttgagggataatgtggctggccttgttttctccttaccagttctgattttacttgttcatacatgatcttcccctttctgtcactttcagttcagggtttatttaataaaagcaaagagaaggaaatcgtgagaatggcctttcagggtaattatacagcccggcatcttaccaccctctcaactaacttcccacacatatccggagcttcagctttgcccagggtcagtcacctctgtagtggctagggctaagtcatgacctgataagtgggccttaggtat

SEQ ID NO: 783310 - DNA, 609 bp, Homo sapiens
gaactagcatggagagggctgaggattgaggagatattgggcaaagaatataaaatttcagccagtcaggaagaacaagttcaagatatctattgtacaataagataactatagttaataacaatgtatgatatatttgaaaattgctaacagagtaaaygttaagtgttctcactgcaaataaatggtatgtgaggcaatgcatttattaattagcttgatttagccattttacaacccattcatatttcaaaacatcatattgtacaccataaatatatgtaattttaatttgccaatttaaaaataaaaaagaagaaagctcattttgatcacccccaaaggatgccttatgccccagtaagtccccagccacagaggcaatcatttttctgatttattttaccaataattagttttgcctaatctaaaaattcatataaattgaatagctcattttaaaaaatagaataaaatgttctaagggataagatagatgtgcagccatcaaggatattgctcaatatatataaaatcaaaagaaaaaccaagagtagatgagcggaagactgtggtcagctactccaatagaaagtcaggattccttgc

SEQ ID NO: 783311 - DNA, 491 bp, Homo sapiens
actgtccccttggattttggacttgcatggagcctgtagcccttttgttttgaccaatttctcccatttggaatgggagcatttatctaatgcttgtaccctcattgtatctgggaagtagctaacttggttttgattttacaggctcttaggaggaagggagttgccttgtctcagaagagactttggacttggacttttgagttaatgctgaaatgagaaggctttggggaactgttgggaagggctgattggttttgaaatgtgaggacatgagatttgggggtgtcaggggcagaatgatatggttagamtttgtgttcccacccaaatctcatcttgaattgtaatctccataatcctcacaatccccacgtgttgagggagagacctggtgtggggtgattggatcatggggatggttttccccatgctgttcttgtgatagtgagtgagttcccatgatatctgatggttttataagggaattt

SEQ ID NO: 783312 - DNA, 638 bp, Homo sapiens
ttttcatgttgtattttgtaacattgctccaaccataattcttcattctagaaagagcagttggttccagtagagcagttggttacagtttcatttgtttgtttcttgaaatggtgttttgctcttgtcgcccaggctggagtgcagtggtgtaatctccactcactgcaacctccacctcccatgttcaagtgattctcccgccatcgcctcccgagtagctgggattacaggcgcccgccaccatgcccagctaatttttgtatttttagtagagacggagtttcaccatgttggccaggctgatctygaactcctggcctcccaaagtgctaggattacaagtgtgagccacagtattagctgtgtattatttaaactatcaaaaaatcagaaaagaactaaatgtaaatcaagaggagagatttaaataaaatatcaaatgtcaaataccatggaatggtatataacaattaaaaaaagagagattggctcatgtaagaatctgaaacaagctccaaaatttactgttaaatgaaaatacatggcacagaacagtgaatgcatcatggtttcatttttatttaaagtgatacatgtataggtatataacagaaaaaagatagaaatcttcatcc

SEQ ID NO: 783313 - DNA, 585 bp, Homo sapiens
tcaaaatgtaaatatccttgggaaaattaaataagttgccattaattcattaaagtgaattgatttaatcaaattgcttccacccagcagatataacctcgttgaagaaattggcatttccattctgaagcttatgcccttaatgggaaggtggaaaagggcatttcatgtgaggccaggcttgggtaggcaccatgagaagctttgtacatccaaaaaacagcacgaaggggtggatgtgttcatttggaagaagagatggtgataatttagatagagagtccagaaagagaagctgaagtgtagaaacatgtggcttaractgggctcagtggctcatgcctgtaatcccagcactttgggaggccgaggcaggtggatcacgaggtcaggcatttgagaccagcctggccaacatagtgaaaccccgtctctactaaaaatacaaaaaattagccgggtgtggtggcaggcacctgtagtcccagctactcgggaggctgaggaaggagagtcacttgaaccagagaggcaggggttgcagtgagccaagatcgcactgctgcactccagcccgggcaacag

SEQ ID NO: 783314 - DNA, 603 bp, Homo sapiens
cgcaatcactttcaaatctatgggattataaggccaggtcatcccatgccctcaaagctgaattccaacttaaatcaaaaccgttttctgacttaaatcacaagtgccctgactggtatgctcacaactttctttcctaatgactaaaatggtctgtgtgtgtgtgtgtgtgtgtgtgtttttctcagtttggctctccccctttcccccctcgtcccatctttctccttatctcaacaaaaccatcaatttgccaagtaaccactgtggaaatttcattagagctgctgtattttactgtaaatatcacccacccagggcatccggttgagcrgcaccagatgtgctttcctggccgatcgccagcctctgctgagccatcgccctagaaggacattttcacctctgtgagttcgtcacatcaagagtagctctttccagagacttctgttaataacagagaaagtctgtcttgctttgtgctttaaattgtgtgccccatgtgctggagctgcatctgcacaacagtctaaaggcgaacaattgggctctgtggtgttttgtggtgtataaagtgagattctcattctgtcctaatgagat

SEQ ID NO: 783315 - DNA, 498 bp, Homo sapiens
cacgaatgagctaagactacggagaaggacaggaaggagagagaaaatgcacaaagctatttagaagaggaagtttcagtacaaatataattgaagcaagaagtgatcagaatatgcagcaactgttattttaaggaaaataaattcatgagattcaaacttcagcatgatggagaaaaaagcgaagttttttrcattttccacaagatgttcagcaagacgaatctgtcaagaaatggggggaaaggtcacacagaagccaatggaaagtggtggatggaattcattgtgccacacggcatcatctcaattaaaatataactgggagattgtcaattaggctcacatcttttcagaatcttctatatggaacattgacaggggttgtttatttgataacagaacctctcaagtcttccccttaggtttgcagtctgagataattaatgtgtgaaatggtctattgactttattttgacaggagctgtctccgatatg

SEQ ID NO: 783316 - DNA, 592 bp, Homo sapiens
ttgacacatggagattattacacttcaaggtgagatttaggtagggacacagccaaactgtgtccagtattggtgggttcttggtctcactgacttcaagaatgaagccgcggacgctcgcggtgagtattacagttcttaaaggtggtgtgtccgcagtttgttccttctgatgttcggatgtatttggagtttcttccttttggtggattcgtcatctccctggcttagtagtgaagctgcagaccttcgcggtgagcttacaggtcttaagcctrcatgtttggagttgttagttcctcccaatgggttcgtggtctcgctggcttcagaagtgaagctgcaaaccttcccagtgagtgttacagctcataaaggaagtctggatccaaaaaatgagcagcaccaagatttattgcacaaagcaaacaaacaaagcttccacctctgcaatggaaccccagcaggttgccactgcaggcttgagcagcctgcttttattctcttatctggccccacccacatcctgctgattggtccattttacagagagccgattggtctgttttacagagagctgattggtccgttt

SEQ ID NO: 783317 - DNA, 592 bp, Homo sapiens
ttgacacatggagattattacacttcaaggtgagatttaggtagggacacagccaaactgtgtccagtattggtgggttcttggtctcactgacttcaagaatgaagccgcggacgctcgcggtgagtattacagttcttaaaggtggtgtgtccgcagtttgttccttctgatgttcggatgtatttggagtttcttccttttggtggattcgtcatctccctggcttagtagtgaagctgcagaccttcgcggtgagcttacaggtcttaagcctacatgtttggasttgttagttcctcccaatgggttcgtggtctcgctggcttcagaagtgaagctgcaaaccttcccagtgagtgttacagctcataaaggaagtctggatccaaaaaatgagcagcaccaagatttattgcacaaagcaaacaaacaaagcttccacctctgcaatggaaccccagcaggttgccactgcaggcttgagcagcctgcttttattctcttatctggccccacccacatcctgctgattggtccattttacagagagccgattggtctgttttacagagagctgattggtccgttt

SEQ ID NO: 783318 - DNA, 592 bp, Homo sapiens
ttgacacatggagattattacacttcaaggtgagatttaggtagggacacagccaaactgtgtccagtattggtgggttcttggtctcactgacttcaagaatgaagccgcggacgctcgcggtgagtattacagttcttaaaggtggtgtgtccgcagtttgttccttctgatgttcggatgtatttggagtttcttccttttggtggattcgtcatctccctggcttagtagtgaagctgcagaccttcgcggtgagcttacaggtcttaagcctacatgtttggagttgttagttcctcccaatgggttcgtggtctcgctggcttcagaagtgaagctgcaaaccttcccagtgagtgttacagctcataaaggaagtctggatccaaaaartgagcagcaccaagatttattgcacaaagcaaacaaacaaagcttccacctctgcaatggaaccccagcaggttgccactgcaggcttgagcagcctgcttttattctcttatctggccccacccacatcctgctgattggtccattttacagagagccgattggtctgttttacagagagctgattggtccgttt

SEQ ID NO: 783319 - DNA, 595 bp, Homo sapiens
ttactaaatcaaatcaacaatccttacatttaactaatccatacccaaaattaaagactgtcaggataatttattccttgggtaaaaaaaataaaaaataaaaaaatagtaaaagccatattgtaggtggagcatgaaattacagcaagaaaagaagaaatgcttactattgtggatacagtttatttcagtaatgtgaaattttctaaactatatggctttgatgtccccagctcccattcccaaatcaaaataaataaaaactgaaaacaaaacaaaaccaccaagactaaaaataactcacattataaagaacttatctacacattaaatcctgagtatttcaaccaagtatctctaaataggtcaattcttggtataattcatamgtatatactattaacatgaaaatcaatgatttctattaaattccacttctccctgccaaaaatggtagttttcttccttagctatgttatcttctatacatttaataagtagtcactgaacattctactgcaaaatactatttttcaatgacagaaaaatcatgtaggataaaataccaaattttatagtacatttggctgctcac

SEQ ID NO: 783320 - DNA, 595 bp, Homo sapiens
acaactttttctttctttctttttctgaaagtaaaggagaactccatatgtctggaaaaataattcgaattaaccttcacatcggacaatgcacaaacccaggctttcccactactgtagatttgggttgctgagtttcaggttacattgctgagacattaatgctgttggggtctgaatttcttgaatcattgttgagtactggtgactaaaataaacaatgtgatatggtttagaaactttgttacrttctatacacttgtttatctacgtgtacatgttctaaaaatgtttacatatatgtgctatggtttgttctgttttgataggatgaatgggtgtttgtggctgggaattctaagaagcaaaatgtaaaaaaataaattatttgtagtaatcaaaacataattaagtgctagagagcacagtcatggatttcatcatggcttttagcatagtgagtgtgatgaaatggtagaggtttcctgtaatgccttagaaaaagcctgtatcacacttcactgcatagggacagtaactgctatcatataaaaccaatgctctgcaaaactagacatgagcctttgagatttat

SEQ ID NO: 783321 - DNA, 612 bp, Homo sapiens
ttgtctgtaacatcagacctaattgaatgtagctgtctcttgaaacattctcttccctaatattcgagtcaccatttgttctgattttattactaattttcctgctacctttctgggtattcctctgcagtcccctttatatgctcctgtttctcgctgtctcaaaatatgttagcatttctgaattgtatcttagagagcctcctcttcttactgtgaataaactgactatgtgtggtctttcatctcaatggcttcaaaccccatttatgtgctataggccataccttttctctgagctccaaatggattagtttagctgctattgcacggctttgtttgaatgtcttacatcaarttcaacattttcaaaatgaaaattcttatctttttcctcaaaggtgtttctacattaatcttccctatcacagtaaatccccatctctaaaacagaaacctgggagttacccttgattcatttctctgtgtgtctttctctacgtctctctgtctctctccacattccaccacattcaccatattcctcacatccaatcaatcacggagtctccaactaacctcttatggttttttttttaatctatcacttct

SEQ ID NO: 783322 - DNA, 606 bp, Homo sapiens; identical to SEQ ID NO: 769094

SEQ ID NO: 783323 - DNA, 606 bp, Homo sapiens; identical to SEQ ID NO: 769095

SEQ ID NO: 783324 - DNA, 575 bp, Homo sapiens
gaagtgatatctgattgtggttttgatttgcatttacatgttgattagtgacgttgagcatcttttcatatatctattaaccatttttatatcttcttttgagaaatatctatttaggtcctttgcccattttcaaattgggttatttgcttttttcctcttgagtcgtatgagttccttataacactttatcagatatatggtttgcgaatattgtctcccattcataggtgtcttctctctattgtttccttcattgtgcagatgtatttagtttgatgcaatcccacttgtcaagttttgcttttattgcctgtgcttttggagtgaaatccaaaaaatcattgttcagaacaacgtcagtargcgttttctctatgttttctttcagtagttttatagtttcaggtcttacatataagtttttaatccatttcaagttgatctatttctggcatgtggtatgagataatgtccaattttattcttctgcacatgtatatccaattttcccaaccccatttatttgagatacttctttattgtgtgtcattggcactctgtaaatgcatgga

SEQ ID NO: 783325 - DNA, 623 bp, Homo sapiens
ctattttattattttcactattttaaatcgtgtaacatcgtcatccacatcaccatttccacattaagcactcctttcttaggccgatccccagaggtggggcacctgagtcacagatgtgagcatctctgggacagctcagcctctcaatcctccaccattgtgctgtgcatgggatctatttgackagatcaataatttcctaatgctccagaaggtgtaaatggaacaagggaagttccacggtccaagttggattaagcaacatgaaaccacattttttaaaagcaggactgaggtgaaaataaaagtcgagtcaaacaatgtaaaggtagaaactccttttacagcaggacctctgtgagcctttattaagctgggagggctttggcactgggaggatttcagcacaccacatttacaaagctaacttgaccttagacgctttgctaatagagcctcttatggggccagttttccagggaaggcgttttgggagaagctggactaggagatcttgaagatttctttacgctctgaggttccgaggttttcgatctaagtaacaaagccagctgctgctgccgctttggaactccagggctcattcttccagtccattt

SEQ ID NO: 783326 - DNA, 627 bp, Homo sapiens
ctataaatcaatggcatttgatgacccaagaatgacaaacagttccagaagatttggtttttacaatcatttaaaacaatcctctgacctgggccaggcaggcctggctgaggcggcgccgctgtccaccggctggtattggacacgaatgatgcactagagatgaaatgcttgcgggggcctaagtagtccacgatctcatactgaccaggacctgggaaaggtggcttcggaggcagaggcgaaggctgagcagagaagttcaggatggggtttttcctttgggaaagataaaacgggaagatgtcactaaggcagtctagtggggaaggcacagtttctagacacagccaagacctgcacagcagcaagctgtctggaagaggactggtcacggcacyggggcagagccctagctccactggtagtgagctggggacccctggatctgtttcttcatctgcacatggcaatcatgatgggacctactttgaggtcagggttgtcaggataaatgagatgacgtacctaaaacacagtactcaggataggcctggcacacagtgagagctcagtgtgcattgctggagatgtggagctaaccagaaatggcaggccgtgtatatc

SEQ ID NO: 783327 - DNA, 637 bp, Homo sapiens
agcaacacttagaagaaaatgtatagccttacgtggttatatcacaaagaatgaaggatgaaaactgagttaaatatctacttaaataactccaaagaaagtggaatgaaggaaatgatagagtagaaattaatgaaatcgagaacatacattttagatgattaatatatctaaaaacgaattagttgaaaaaaaccaataaacctgaatctaaatcatgaagaagcaatcagacaaattcgaatttaaggatgcattaattttctattgctgctttaacaaattaccgcaaatttagtggatgaaaacaacatgaatgtattattttacagttctgtaggtcagtagtctgagatggatctcaccaggctaaagtcaaggtgtcagcagggctgtatgcctttctgtgggccctaggggagsatccgttttcttcctcattctggttattggcggaaatcagctccttgtggttgcaagactgaaatccccatttccttactggctgtcagcttagggccatttccagcttcaaggggccacctccatttcttggctcacatcccctcttccatcttcaaagccagcaacagcaggttgagtccctctcacgctttgaatctctcctccttccacc

SEQ ID NO: 783328 - DNA, 613 bp, Homo sapiens
cttcctcattctggttattggcggaaatcagctccttgtggttgcaagactgaaatccccatttccttactggctgtcagcttagggccatttccagcttcaaggggccacctccatttcttggctcacatcccctcttccatcttcaaagccagcaacagcaggttgagtccctctcacgctttgaatctctcctccttccacctcatctctctgacccagcccataaaggttctctactttgaaggacccatgtgattagatggagcccaccttgataatctagaattctcttactatctcaagggcccttaatcacatctccaaagtctcttttgccatataaggtaacataaccacaggttcctgagattagggcatggatatctttgcaagtccatttttctgtctatagagggacattctgttaactgytctgaacctttcaaaaatgccaatgttataaaagacttaaaaaaaaaaaaggctggtaacctgttgtagattaaaggagagcaaagaagcatgacagttgaatgcaatatgcaatacctgattaaatcctggattaaaagagataaaacagctataaagttcattattttgacactgg

SEQ ID NO: 783329 - DNA, 537 bp, Homo sapiens
tttcttttaggaaatatatgattaattgtttctgggtagagtgtcatgagatctctaacttaccctaaaataactctgaaatcaatgagagaaagagagagggcagagggagagagaagagagaaagaggagagagagaaaaaaaagagaagagagagaaagtgggcatagatgtagcaaaatgttaacatttggtgaatctacgtaaataatgaataagtcttgcaacttttgataggtttcaaacttttcaaaatatgttgtgtcagaatttatgctgaaagagacaagattaacaaaactgaaagatgttctgacaaaactgatttttaaaactgaaaattcaaataataatagaaatgaraaagaggtcataactgcagatgctatggagaatgaaaagataaggagcagatattacaaacaatttgaatgcttagacaaattagacgaattccaaggaagaagtataaattaccaaaactgactcaggaagaaatagaaactctgaataaccctaaaactatttaaaatttt

SEQ ID NO: 783330 - DNA, 614 bp, Homo sapiens
atgagccaccgtgcctgaccaagatctttaaatagtaataaaacagacatttattaagtgcatctcatgtgctgtgcgctgttccaagtgcctacactccccatctcagttaagcacacaccaccccacgggcaggcagctgctatcattatccctttctcatggtggggaagtgaagatcagaaaggctgaataacttgctcaagatcacaagtctggacttgactgcaggcctggctgatcccagagcccagatcaagagtctcccctggtgcctctcccctaaaaccacctcagaaaccccctggtgtgtaactctaaaccatgcctgcggcaaactcagcccatttcctcttctcgcatcttaagcccagatggggtctgagtgacacttatctcataccctgtcatagagctggagccccacaggaatgtggaactccccayggacagagggcaggaggaagtgaccgccggcccgaagggggcttggtccactgggtccaaaggtgccgtctggccctggctgccacatgcctcgtgtccacaaagcagaagtcacagggacagggaaggaagcccggcaggcagactgtcatcacaggtggtgtgtc

SEQ ID NO: 783331 - DNA, 626 bp, Homo sapiens
tccggagccagtgaacttgtgatccggagccagtgaacttgtgatccggagccagttaacttcacagctaatgtgctgagcagcattccagccagcgtctgaagccagagcagggaggcggacgggccccaggagttcgaggtccgggaagccgaagcaccaccaaactgagcgaggttccaactctccctcccaggaggtccggctgcctcccaccagcagcccaaccacagggtcctgctccagacgttactatttyctctttttcagtgtgtccagcagcaacctcgactgccaacaacaacgtgaaaaataactgcagggccgggcgcggtggctcacgcctgtaatctcagcacttttggaggccgaggcaggcagatcacctgaggtcaagagatcgagaccagcctggccaatatggtgaaaccccgtctctactaaaaatacaaaaattagctgggcgtggtggcacatgtctgtaatcccagctactcaggaggctgaggcagggagaattgcttgaacccgggaggcggaggttgcagtgagccaatatcacgtcattgcactccagcctggcgacagagcaagactccgtcttaataaataaataaataaataaa

SEQ ID NO: 783332 - DNA, 648 bp, Homo sapiens
agacatgaagctcctggagtcatggatccatgaatacagttggtaaatggatgagtccagactcaaatataaggattataggacacaaaagcctacaccctttaaatagcaacatgttctctctccaccacagggwacaaagactaaaggggaaaaagaaagaaccccacaacatggaaacaagcaccagcatccctgcagattagccaaagtattgaaaaggtttaatcttccagttttcctatgttcttcacacaaaccacccagcacatggcaccactgcaataatccccacttttcccaggaaacacagcactgagaactgttcctgttcgaatcgcacactcagctataaaatgggcaggaacgtgggctccagaagatagaaaaatctgtacccttcactcttttattgactttttatctacagtgataaaactttcagcattacaccattaaatttagcctcagatatagtaaaagctaagcatcagactagtttaaatacatggcaaggccaacgaccctacctcaaagcttcatctctggttctgagatcaactgtaccatttaaggctcagaatcacacgctgctcatcaaacacatgctcggctcatatccacttgacacatccatccatccttcca

SEQ ID NO: 783333 - DNA, 634 bp, Homo sapiens
gatatggtttattagcaagtatatagtgtttaatttaatatgtaacccaccatttcagatactgacatatactttttaggtaaaataacattgccacactttcgtagctgttaatgttatgtaaggacattagtgaaaactaaaytactgatcaattttaataaatgatgtttaatttgttgtctggatatggaaactataacttgatgtctaccttatatccccaaatcataattctaaacagcaaagtaaaactttctacatatactattaaacatatatatatatatatatatatatatatatatatataattttttattttttattttttcctgagacagagtcttgctctgttgcccaggctggtgtgcaatggcatgatttcagcttactgcaacctctgccgcccaggctcgggcaattctcctgcctcagcctcctgagtagctgtgattacaggcacatgccaccacgcctggctaatttttgtatttttagtagagacggggtttcagcatcttggccaggctggtcttgaactcctgacctcatgatccacccgtcttggcctcccaaacttctggtattacaggcgtgaaccaccacacccggcctatttttatgattgcta

SEQ ID NO: 783334 - DNA, 563 bp, Homo sapiens
gtgaaatttatttgtctgactcaattatacatcaaataccctctgactcataaatatgagataggaatatccaccagtcactttcaaattcacgctttaaacttaatctctctagtctcaccctcatttgatttagactatctctargaaagattgctcacttctacttagaggtccctgaaactcaaacgtgcctcaaggtactaggctggcatgacagctgaaagaaatctgctgaagcctatgttggagaaagatttctactaggcgttgaattgacattgctcttgtttgcacactgtaggggctcagaaaacgataccccaaagtatggcactttggcatgctgaaactttgaactaaagaacactggaaggcctcaaaagcagcctcaaaaccaaggtccctctgaccttctcctcccctcctgtctttaactccacattcttccctgaagtgagtcatagtaaccagaattcttcttcttcaaggtaggtcatagaaaccaaaaaccctctcctccaaagccaaccataaaagccagaattataactctgtatttt

SEQ ID NO: 783335 - DNA, 562 bp, Homo sapiens
tcccagttataataaaaagcctataaactcttcagtggtttacacagcacctggaacaatgtgacagatgacagaggactctgtcttcagttagtggaaactgctatattaacattcctatcaaaaatctatttttccttatatttgcatggtctcaaatgtatttctagttttatatgygtaattttaagcacatcactcataaaataatatgtttcagtacagtaaaatttaatgatttcagattgcactgaaaggcatctttaaaagatactaaaaaatcaatttctgtggcgtttaccttgtcctaaaatatgcctatttaacatgtgcctcaaaagctgaattctagtccaagcacaaaatattgtccttaaaattgtacatcttctttattatcaattatggcataccgaattatatacttagtatgtttaaaaattctgctttttaaaatacatgcccttgcatacaaattgaatgatttaatgttttaagctattaatgccaaaaatgtctgagttatttggtattgatattcatcttggcacccatagaatcg

SEQ ID NO: 783336 - DNA, 626 bp, Homo sapiens
aagggcttcttcatttctgttacaatgtttgttttttaaaaactctagcatttcctggctgggcacagtggctcacgcctataatcccagcactttgggaggccgaggtgggcggatcacaaggtcaggagatcaagaccatcctrgctaacatggtggaaccctgtctctactaaaaatacaaaaaattagccgggcgtggtggtgggcgcctgtagtcccagctactcgggaggctgaggcaggagaatggcgtgaacctgggaggcagagcttgtagtgagccgaaatcgcgacactgcactccagactgggcgacagagcgagactctgtctcaaaaaaaaaaaagcaaatctagcatttcctttcgattctttttaacattgcaatctctcttcttatattacccatctgtgggtatcgtggaggaataataccctccatacagatctcacactctacttttattaatatttaggttggtgcaaacataattgcggtttttgccataactttgcgggtttttgccctggaaagtaaaggcaaaagccgcaattacatttgcacgagtctaatactaccgagttttacataaaccttttcatttcctacattatattgctga

SEQ ID NO: 783337 - DNA, 626 bp, Homo sapiens
aagggcttcttcatttctgttacaatgtttgttttttaaaaactctagcatttcctggctgggcacagtggctcacgcctataatcccagcactttgggaggccgaggtgggcggatcacaaggtcaggagatcaagaccatcctggctaacatggtggaaccctgtctctactaaaaatacaaaaaattagccgggcgtggtggtgggcgcctgtagtcccagctactcgggaggctgaggcaggagaatggcgtgaacctgggaggcagagcttgtagtgagccgaaatcgcgacactgcactccagactgggcgacagagcgagactctgtctcaaaaaaaaaaaagcaaatctagcatttcctttcgattctttttaacattgcartctctcttcttatattacccatctgtgggtatcgtggaggaataataccctccatacagatctcacactctacttttattaatatttaggttggtgcaaacataattgcggtttttgccataactttgcgggtttttgccctggaaagtaaaggcaaaagccgcaattacatttgcacgagtctaatactaccgagttttacataaaccttttcatttcctacattatattgctga

SEQ ID NO: 783338 - DNA, 609 bp, Homo sapiens
ctatgtgggacattacattttatactcatagcaactctctcaaattcaaaagtagttggaatataaatatgaggggactttaaaaagatcttggaaaaatggaattaaaaaataaaagtaaaggccgggtgcagtggttcaagcctgtaataccagcactctgggaggccgaggtgggcatatcacttgaggtcaggagttcaagaccagcctggccaacctagtggaatcctgtctctactaaaaatacaaaaattagccgggcagttggctcacgcctgtaatcccagctactcgggaggctgaggcaggagaattgtttgaacctgggaggtggaggttgccatgagccgagatcgcgccactgcgctccagcctgggcaacagagtgaaggcttcatatcaaacaaaaaaagataaaaataaratatataaattttatttctcaacataagcttcatcaagttcaagacacttttgtaagtaatgataacagccatttagtccatccccaaagaactgagggtcctaagaatttaaccatgtaaatgcaggtttttttttacattattaactgaagaaaactgggtgtccattaaagatttttaa

SEQ ID NO: 783339 - DNA, 614 bp, Homo sapiens
ccacagaagtgaaagacctctatactgaaaactataaaacactgatgaaagaaattgaaaagggtaccaaaaaattgaaagacattccatgttcatggattagaagaatcaatattgttaaaaaatccatactacccaaaacaatctacatattcaatgcaatctctaccaaaataccaaagacattcttcacagaactagaaaaaacaaacctgaaatttatatggatctacaaaaggctcagtatagccaaagctatcctaagcagaaagaacaaaactggaggaatcacattacctgacttcaarttatactacagagctatagtaacccaaacagcatggtactggcatagaaatagacacataaaccaatgtaacagaatggagaatgcagaaacaaatccatacacctacagtgaactcgtttttgacattaataatcagtaatccatacatgatgctgggaaaattgaacatccatatgcagaagaatgaaaccagtccccatctctcaccataggcaaaaatgaaatcaatggattaaagacttaaatcaaagacctcaaactatgaaactactataaaaaaacattggggaaactccccagaaca

SEQ ID NO: 783340 - DNA, 580 bp, Homo sapiens
agaggctcagattcaatgatttactccatttgccagaacatgtaccagatgagccattatgtcctgtctcttgcatgtgcatgtgtgtacctgaagccaggtgggtaaataccgaagaatgttttgcttaaacttactctggtctcctgtaagtaactgcaatcctccatctgatgcctggagccaagagcattctgtaggcaacaactgcctacctgatttaataagcaaaccagcatacaacaacttgcttgccctcaaagacatgtaagtatgatatctcccaaactctcccaaagataatctttgaaaataacaatgatggctccatctgcagggcatagckggcctccacctccctcaggctgttctccaagctggccttcagatttctcgtggagtccaggtcgatctctaaggactggactctatgtctcagctctgtgagcgtcatctcagcagctccaaccttggcggactgtgtggtaaccactctggtgctctcctcgatttgctgagaccagtacttgtccagctcctctcggttcttccgagcaagcttgtcatattgggcccggga

SEQ ID NO: 783341 - DNA, 513 bp, Homo sapiens
cccacccctccattttataaaatctctggtgtctgccaccagctggaagcagtcaactctttgcttaccagttgattgcctgctcctcccactcacgagggctctatcaaggcagggccttgcttgtctcgttccctggtgtgtggcctggacgtagtaggtgctcaagaaaaatgtactgaatgaatgagtgcgtgaatgagtgagcrtgtgggatcaccacactgctgtgaggctcatgtgaggaagggaatggaagctgctcggttctgggcctgtgcacagaaggcacccagccttagctgcccgggtcactgtcgtctgcttgacctgaaagcccacactctaaatgtctatgttgacgacgaactgagctgaattccagcaacccactccggcttctggacctttaagtaaggaggattgcaggcctcggctgggggacagcggtggctgcagagcggacagccaggcacaacgcgggcatgcacaagaccagctcacccgtccaca

SEQ ID NO: 783342 - DNA, 594 bp, Homo sapiens
tgcctgtaatcctagctacttgggaggctgaggcatgagaattgcctgaacccaggaggtggaggttgcagtgagccgagatcgtgccactgtactccagcctgggtgacagcgcgagactccgtctcaaaaaaagctgggtgtggggaacacctgtggtcccagctattytggagactgaggcaggaggattgcttgagctcaggagttctggctgcagtgagctatgatcatgccactgtattacagaatgggtgacagaatgagagcgacactgtctcaaaaaaaaaaaaaaaaaaaggccgggagcggtcgtttgtgcctgtaatcccaacactttgggaggccagggtgggcggatcacttgaggccaggagttcaagaccagcctggccaacatggtgaatccccatctctactaaaaaaattaactggacatggtggtggacacttgtaatcccagctactcaggaggctgacacatgagaattgcttgaacccgggaggcggaggttacagtgagccgagatagcaccactgcactccaacctgggcacagagtaaggctctgtctttaaaaaaaaaaaaaaaaaa

SEQ ID NO: 783343 - DNA, 477 bp, Homo sapiens
aattttattttatttattttatttattttaatttttacagacggggtctcactctgtcccccaggctggagtgcaacggggcaatctcagctcactgcagcctcaacctcctgagctcaagtgatcctcccacctcagccccctaaatagctgggactacagtgcacgccaccacacctagcttatttttgtattttttgtagagatggggttttgccatgttacccaggttgatctcaaactcctgagctcargcagtctgcctgcctcggcctcccaaagtgctgggattacaggcgtgagccaccacacctggccaataacttgcaaattttagaaaaccattaggttttcaaattgattatcagagaattacacgcagtatttccttgtaatacctttaattttcctctatgctcatgtctattgcattttctctttgcaatgaaaaaaaaaacaaacaaactttccaaatac

SEQ ID NO: 783344 - DNA, 500 bp, Homo sapiens
gcttggccatctgcacctgcctgacaacaactcactggatcctaccatggtgggcaccatccttggcactgaggccatgccctctccaccggatgagccacccaagctctgggcgtcgctgtcctctttcataaaattggagaaactgtayctgtgtatcggggttcagggatgattaagagaccagcatacaactcagcctaatgaataccttaaaactctcctgccaccatggccagtcccaggaaaggcaggggaccaaggacaggaacagagttagtcacagcctccaggaagccacggctgctggaggccttctcaagccctggtctggaagcactgctggccctgccagaaccagccccagtgctgtctcagaggccggcccactcaccacaaacacgtcacccttgacgctgtccttctccaccacgtaccagggctctctcaggccacctatgtttgctctctggcccaaggtatacaggaaccaacctaca

SEQ ID NO: 783345 - DNA, 541 bp, Homo sapiens
agaagatattttcagtacctgtgatcaacagaggatttatatccagaatacaatgcagaactcctactaatcaataagaaaaagacctagtagaagaaaaaaatgctcaaaagaaacatagaaatttcacagtagagaaaatccaaatggccaataaatgtggagggggaratacaacttaattagtaatcaaggaaatgctagttaaaccacaatgaggtcccattttatactcataaaattggcaaaaattaaaagaattaagaaaataccggccaggagcagtagctcacacctgtaatcccagcactttgggaggctgaggtgggcagatcacgaggtcaggagatagagaccatcctggctaacacggtgaaaccccatctctactagaaaaatacaaaaaattagccgggcatggtggcgggcgcctgtagtcccagctactcgggaggctgaggcaggagaatggcgggaacccgggaggcggagcttgcagtgagctgagatgcgcccgtctctccagcctgggcaatagagt

SEQ ID NO: 783346 - DNA, 619 bp, Homo sapiens
gcctagtgtgtgttctgagtgcagttgctcaccaggggaaggatccgtccagatcacctgtgagaagagggagtcaggaaagacttcacagaacaggtttccctaagcctgcatcttgaaagttgggaagaaatttgtcctgtccgtgggaaggcagtccaggtgcaaacagcacgttcaacggcacgcgaaaccacgtggtgctcaagggaaatggaaaacaattgggctttggaggcgaaggcagtggggcgagcagggaccggggtgagcagggaccaggcctcgccgaccrcagtgggaatggggttttatctacagggtggttgaggcacattgcaaaggcagtaaggatttctactttttaaaggtaattctagtggtgtaggggaggggtgggtcttgagggtaggaaaaccagttgaaaagataactagcttaagagtggtgagaagctatgccagaagcagggcagtcagtggcagtaggaataaggaagtatatactagaatagttgggaattagaactgacagtttggtgagaggaaggaactgctgatgttcacagacttctgatttgagtgggatggcagtattcccaagtgaggcagaagaacac

SEQ ID NO: 783347 - DNA, 627 bp, Homo sapiens
cagcatctgcctcctgggttccagtgattctcctgcctcaccctcctgagtagctgggattacaggcgcatgctgccatgcccagctaatttttgcatttttagtagagatggggtttcaccatgttggccaggctggtctcgaactcctgacatcaggtgatcctcctgccttggcctcccaaagtgccgggattacaggcgcgagccactgtgcctggcctgcattttatttatatactcaacagttgatgaatatttggatgattcccaccttttgactgctatgaacattaataatattatgaaatgaacattwtaatgctgctttgaacatttgtgtacaagtttttgtgtggaatatattttcatttctcttagttatatacctaggagtggaactgctgggtcatatggtttaactttttgaggaactgccaaactgtttttcaagtgactacaccattttatattctcaccagaaatgcacgagggttccagtttgtctgcatcatcaccaatacttgttattgtcatccaaaagctttaacgttttagcccccacagttaggtctgtgatccgcctcaaattaagttttgtatatagtatgtgacatagaggtcatgg

SEQ ID NO: 783348 - DNA, 627 bp, Homo sapiens
acagacagtgaacaaatgagcaaattggagcctgctctggggaggcaagtggctgaaaggagagagcattttcaggcaggaggaacagcaggtgcaaaggccctgtggtggggacgagcttgtcgcattggggaagtgagtgaggaggcgccgcaggagctgtggtcagagaagccgggtgctgggtctgcttccctctcccctccccgcctctgagggaccagctggggtactgatctaccatctccctgtccctgccttgtgacctcagaccctgtgcccagcccccacttccccttccagctgtgacccagaagtggagggcacgtccttccctagactacatctccgtccccagggtgggcctgaaacttccagagcctcagtggactcagcagctgtccccactccctgacccacccacctgcccccagcagcgtcagaccctcaaaaactccyctcctttgctttccccaaccctcccagaaaccatggagattccccagatgcatcagacatttccccagcccggaacgccctgtctgccctcctccatctgaccaaatctcaacgtcacctccttctggaagtccctgggttatgagcagaaaatgagtcttgctcgtc

SEQ ID NO: 783349 - DNA, 474 bp, Homo sapiens
aatacattttatagaacagacctgaagaaaaatgacaatgtaaaggacccatgcagaaaatgagaaattaaagcatatccaagtataaaattttgtaggtatgggagatgaatgtcacttgctgccttaagtatattcagaggaagagaaaggttcaatacatgattaatatatgagaagcttgtgcaagcatatgataatcagaaacaatcccaacatataaaggggcaaaagtyatccacaggcccattacaaatagaaaatgttatttgttaacaaacaaatgggaaaatcagtcttaacagtcttcaaataaatgcaaatgaagtgactgatatagtgactggagcctactgtaaagagtagttttgcttgcacagacttttcacacagatcgaattcaaatcccaacatcaccatttggaagctgtgtgaccttaggcctgctacttggcttctctgaaattcctcatg

SEQ ID NO: 783350 - DNA, 630 bp, Homo sapiens
gcagtgcagtgaaattaaagaacagggtactgggcaatcagtaagtggagcaagggtattcgggaaggcctctctgaggaaataatattacagcagtgatccaagggtacggaggcagggaacagaacagcaagcagagggaacagcatgactacaggtcctaagacagcaaaagacttaacgtgcttgagccactcttaggcctccagcatggctagactgcagtgaccaaacatggagagagrgcagaaagaccacatgggccccaccttatacgtcacagagtttagattttattctttggatgatgggaagccactgaaagctttaaaaaggggaatggcacaacctgatttcagttttacgaccattctggctttgtgtgaaaaattaattggagtgggaaagaatggatgcaattattgagttaattgcaaaaattaactcaaaatggataaagacttaaataaaaactaaaactataaaattcttataagaaaatacagatgtaaatctttatgatcttggattgggcaatgatttctttgatgacaccaaaagcataaactacaaaaagaaaaaataaattggacttcatcaaaatcataaactatttttttctttggtttt

SEQ ID NO: 783351 - DNA, 509 bp, Homo sapiens
aaatgtctgaatgtcgtacattaacctaaaagaatccttttggtatcttctctctggagtgaaatctgacactaggtaataaaaagtcttaaaagctgttcatatcctaccctgtaccctgtaacctggtaattccacttttagaaacatatcctattaatcaagtaaagaaatgataccacagatttatctgttaacagcaaaaatctggacttattaattattaactgaaatacccactacaggagacaggtgaaatacttcataggccttccatacgatgggctattatgcatacagccattaaaaaacatttttttccagcggtacagtggttcacacytgtaaacccagtactttgggaggccgaggcaggtggatcacctgatgtcaggagttctaaatcagcctggccaacatggtgaaaccccgtctctactaaagatacaaaaattagctggtcatggtggcgggtgcctataatcccagttacttggaaggctgaggca

SEQ ID NO: 783352 - DNA, 592 bp, Homo sapiens
cgtggggatcccaccctgccgccctgctgggcctgttttctctgcccaggcctgagccactgggggcaggggtgggggctgcttcctggggtccgcccacacctcggctttaccagatgtggatggcccccgggggatcctgggtgggccttggcggcccgtgggtctgtgtccacctctggtccacctcsgctccacacccggggcctcaggccagccacccaccacgcatgggatgtggtttctggtgggaacagagacaggcaggtcccagcaccgctgtcctgcccaccccacaccctgtcatcgggcagagccagtggcgcagcctccaggatcccaggatggggtgcccatcgccctgtctcttgctggcagagccgagggcgcaatcggggagaagcaggtatgccaccccctgtggagccccacagaggccccgggtacagggtgggtttctgtcggcctccgtctccgtctcacttgctccaagcagcatgacctcagggggcctcaggtgcaccctgaaggccagagtcctggggtctgctgagggggcaccaggccctggagtgctggagggtgaggctgg

SEQ ID NO: 783353 - DNA, 628 bp, Homo sapiens
aagaatctgaaagcatcctgcagacacatacatttcaatgaggtgcgaagcttttcaccacataaagccaatctccatccagaggaagagatgtgagataaattttacactcaggattccttcccacagattctcacaaatgccgttcaggtactggcagcaaccaaaagttcattgcagtttttttttttttttttttttttttaatatcacttgttccaggaattggggagggtgaaggctgggatggaagacttttccttggggccctaaatctacacagctgctttcaaatgagwctaaaagcattatacagcataacttctatttatttcctttttttgttgaaaattttgttttaaaacttttctcctttctgtgtctctctgagctattatgccaggatgggccttggaaacacaagtagttcaagcaattagaacaaatgaaggaccttttcaaaccattctactttcttttgttcaattcatttaatgtatccattcattcagtaaaccattcacccattcattccttcatttgttgaacaaatttttaggagtgcctactacgtaccagacacagttctaggcattacaaatacatcagtgaggccaagcgccgtagc

SEQ ID NO: 783354 - DNA, 628 bp, Homo sapiens
aagaatctgaaagcatcctgcagacacatacatttcaatgaggtgcgaagcttttcaccacataaagccaatctccatccagaggaagagatgtgagataaattttacactcaggattccttcccacagattctcacaaatgccgttcaggtactggcagcaaccaaaagttcattgcagtttttttttttttttttttttttttaatatcacttgttccaggaattggggagggtgaaggctgggatggaagacttttccttggggccctaaatctacacagctgctttcaaatgagactaaaagcattatacagcataacttctatttatttcctttttttgttgaaaattttgttttaaaasttttctcctttctgtgtctctctgagctattatgccaggatgggccttggaaacacaagtagttcaagcaattagaacaaatgaaggaccttttcaaaccattctactttcttttgttcaattcatttaatgtatccattcattcagtaaaccattcacccattcattccttcatttgttgaacaaatttttaggagtgcctactacgtaccagacacagttctaggcattacaaatacatcagtgaggccaagcgccgtagc

SEQ ID NO: 783355 - DNA, 586 bp, Homo sapiens
gagaggcaatgggcatgtgtttttttttgttttttgtttttgagatggagtaccgctctgtcacccaggctggagtgcagtggtgcgatctcggctcactgcaagctccgcctcccaggttcatgccattctcctgcctcagcctcccgagtagctrggactacaggcacctgccaccacgcccggctacttttttgtatttttagtagagacagcgtttcaccgtgttagccaggatagtcttgatctcctgacctcgtgatccacccgcctcagcctcccaaagtgctgggattacaggcatgagccaccgcgcccggccatgggcatgtttaaaacaaaagaatggttattcttcttctcttttactacctcttttccggaaacaaattctgacagtccttttgctctacccccatttctggataacaagaggaagaagagtaatcaaaagaaggtgagaagcagcagaggtgaggggtggaatgggagggcatcccagagagcatatctacatttttatagcactgggaactttttttttcaaaagggatacttcctgtgaagtagatagtatgaaagtata

SEQ ID NO: 783356 - DNA, 512 bp, Homo sapiens
tacaaaattcattctataggctttcacctatgtcttcaaaataatgagcaacattatacctgattagacttccattcataaatggccattcctgattagtacccatcatctctgctgcaacactgacacactgttatggtctgaaagtttgtatccccctgaattcttatgctgacattctagccctcaatatgatgcttttaggaggtgaaatctttgggaggtaataagggttagatgaggtcatgaatgtggggccttcatgataaaactaatgaccttataaagagaaggagacacaagacctctctctgctctctcttgagggcaccttgagaagatggcastctgtaacctggaagaggcccctccccagaacctgaccatgctggcactccactctcatctcagacttctagcctccagaattgtaagaaataaatttctggttttttaagccacctggtccatcggtattttgttatatatagcagcctgaactgaataataca

SEQ ID NO: 783357 - DNA, 644 bp, Homo sapiens
ttctcaaactattaaaaatagaattaccatgagatctagcaatttcactgttgattatttacctgaagaacatgaaattagtatctcaaaaatatatctgtactctgacatttattgctgcattattcacaatagccaagatatagccacaacctgtgtttgtggatgtatggatgaataaagaaattatggtatgtatacaatgaaatattattcagccataaaaagaaggaaatcttgcgatttgcaacaaggtgaacttggaggacatatgctatgtgaaataagggcagaaaaaaatgaaagacaaatgttgcatgatattatgtgtggaatataaaatgttgaacttatagaagtagggagtagaatagcggttgccaggagtggtataaatggggagttgttggtcagagagtakgaaccttcagttatagagatctaacgtacagcatggtaactgtagttaatattaatgtcctttatacttgaaacttgctgagggagtagatcataagtgttctcatcacaaaaaaaagagactactatgcccggtgatggatatgttaattatatcaaaataccgtgttgtatatcttaaatatatagaatgtttttatttctcaataatacctccataaaaa

SEQ ID NO: 783358 - DNA, 626 bp, Homo sapiens
tatttttggaatttaggtgtaggaaaaatttatgtgaaaaggcactctaaaatttatgtgaaaaggcaatggatttagaatagctaaaacaatgttgaaaaggaagaatgaagtaagaggaataagtctaccagactgaagacttattaaatagctacagtaatcaagatagtgtggtgttggtgttgggatagacacgcagattaatggaacagaatagagacttcagaaatagacccacacaaattgctcaactgattttgacacagtgcaaaataattcagtggagcaaagatagtcttttcaacacatgggtsttagaacaagtggacaaaaataatggaaagaaaaaagaagaaaaagaaccttgacataactttacaccttatgcaaaataaaatgcaaatagatgatgaatttaaatgtgaaacacaaaataataaatattttacaaaaacatacaggagagtcttcaggatgaaaggctaggaggagttcttagatttgacgttaaaatcgtgtgccttaaaagacacaatttgataaatttgacatacaaaattttaaaattttgctctgagaaagatgctgccaagaggatgaagagacaggctgcacatcgagaa

SEQ ID NO: 783359 - DNA, 636 bp, Homo sapiens
ccgtcacatccattacaagcattacaatgtaacagataacctgaattttcttatatattttgtttcttatattcttaaaatttagtagcaaatacatgttcattcaatttgcctattgaaaatttatcatatttagctttggggaaatatttttaatttttgagattgaaatataaaatactctgttagtacaattcctagaatatatttaacttctgtactccatatgtttagaagaatgagaagtgtattgaaaattgtatcttatagttgttctactataaaaccaattgyaaatatcattcaatggataaattattattatcattgttgttattgttatttaatcccaaattggtctacttaatgtggctaaaatttctcatagactctaattcagaaaatatattttgttttaagttatttgcactaactacttgtgatagatatttaaaaatatatgtgactcatcctgaatagtgattttatgcacagctgtagatgcaaatgaagtatatttattaactaacaaatgctataagcatttttatgttggtaaattaagactgggttgcatgatagttgaatttaattcatagaacacaattatcaactaccctaaaataatttacataa

SEQ ID NO: 783360 - DNA, 533 bp, Homo sapiens
ctaaattatatattttttatttgtgcagaggaatgcagttgtaaagaaaataaataaatttatattttgaaatggggcaaaaaagatgtcaaatattgagatataaaaagtagtaccagataaaagatgcatagataaccctaagaatgagaatcacattttatatgtagggctaagccatttcctakatatattttctggctgactaattagcaatggtaaagatcaagttttacatcaatgctttcaaatcatggtgtttattttttctacttgctgagcccgtactttggaattatatattactatattttattgtgtgccctcttgaatgtatttattcatgtagcaaaaataaaaattaattaattaataagataaaggtaattatgtaagattaagaaagtcacagaaacatagaaactgacctaagttagtgcgtactataataaaacctacttatttctttgtctatgtctaaaaatgcatttctttctctatgtctaaaaatgcacaattcaaattccagataa

SEQ ID NO: 783361 - DNA, 619 bp, Homo sapiens
aactacttacttcaaagaccaataagtaatttgaaagaattaagcatttatcctgcctctccagtaagagctgtatttctagtaatcaaatagctcttgttgatgagggaaagctatattttactgaattgtattctgcaacgcctaaagaatttattgattcaggcaaggaccataatttgtgttaaaaccattaaggatgtgattgacatggaaccagatatttgttacttggcaaaagtaacaacatacagaccaatttgaatatgaaagtgaaaaatcaacactgtccaataaaaagaccagacagtcgtcactttaattcacttgtgaatctgaatagcaagggacatccagatattaaatgacttctgatgtgatgcagtataaagaacacagcttcagctctgatacatttttgccaagattattagtgtacrtcaataaagccataagaactaacttcctacgtacaaaataaattggtgaggaagcaaaaggaaactagaaaatcagaaggtggatcagtgtaaaaacaactggctcaatgttttcaacaaatcagtgtgacaaaatggggactgtgctagactgaaagagatcaaagggatataaataa

SEQ ID NO: 783362 - DNA, 604 bp, Homo sapiens
acgccattgctcaggaccctaaactctacccctatttgccctgcttccctattgcccctggaaactggacatcataatggactcctttgttaagataaattatctactgttccttcttcctggaatcttgagcacctgattcaaaaaatagkatggagtcatctgattggctgaacctacccacgtgtccatattctagctgcagggaaggcagaaaaacaacaattgaatgttttgcagccttgaactccaagactcaatcaatcctcccatcttggccccctgagtagcagggactacaggtgtgtaccaccacacttggctaattaaaaaatttttttgtagtgatgaggtcacatatgttgcccaggctggtctggaactcctgggctcaatctggttccccccttggcctcccaaagccctggagttacagggacttgggtttcctccccactagatcacttctcatagccttactcaatgtataagttatttatctataattatttattaaagtaagctatatttatttgtctacagatatttattaaatattatttaatatttaatgtcaggtatgttagagattgctagaactcca

SEQ ID NO: 783363 - DNA, 571 bp, Homo sapiens
aggtacaatgactcccctgttggatttcagacttgcatggggtctgtagcccctttgttttggacaatttctcccatttgaaacaggtgtatttacccaatgcctgtaccctcattgcatctaggaagtaactaacttgctttcaattttacaggctcatgggcagaagtgacttgccttgtctcagatgagactttggacttggacttttaattaacgctggaatgagctaagacttttggggactgttggaaaggcatgatcrtgttttgaaaagtgagaacatgagatttgggagggaccaggggccaggggtttgtctgtgttctcacccaaaatctcatcttgaattataatccccacgtgtcaagggtgggaccaggtggaggtaatcagatcatgggggcagtttcccccatgctgttctcgtgatactgagtgagtctcacgagatctgagttttataagcatctggcattttccctgcttgcactcactccgtcttgccgccctgtgaagaaggtgcctgcttctcctttgcctctgccatgattgtaaatttcctgaggcc

SEQ ID NO: 783364 - DNA, 657 bp, Homo sapiens
ttgtgacagttgattctatgtgtcaacttggctaggccaccatctttttaaagatgaaattagtatttaaatcagccgaattgagtaaagcagatcacgaaggtaaagcagcagacagagtgaagcaatctgattaccgtgtgggtgggccttggtcaatccattraaagccttcataggaaaggactgagttctgccagcaggcggccttcagacttgaactgcaatgtcagctcttttctgggtctccggcctgccagcctagcctgcagatttgggacttgccagcctccagtcatgtaagccaattccttaaaataaaataaatctctcccctcttctctgctctctctgtctctctctctgtctctctctacacacatacacacacacacacacacacacacacacacacccctattggttctgttttctgtttctctggagaaccctaatacgagcctatatacagaagagtgcacatcactgtacaacttgatacatttttacaaactgaacccatcagatcacgaaacaggaacatgaccatcaccccggaagttccccttgtgcttccatccaccctccatcccccacaggtaatcactgtcctgccttttaatagcatggatgagttgtgctgattctagaactttc

SEQ ID NO: 783365 - DNA, 582 bp, Homo sapiens
ttcaatagcagagtagggtgactatagttaacaaccatgtgttgtacatttcaaaatagccagaagtgaggacttgaaacattgtttacacatagaaatgataaattctggaggtgatgaatatcttaaattccctgacttgatcattaaagtgtatgygcataacaaaatatcacgtgtcccataaatatgtatgaatagtgtgtatcaataaaaaataacaaagtaatcaacaaatctaaaatgtatggtttaatgctttcgtacttatatttgcaaccatgtaaacatctcctagatcaagatctacaatatttccaacacaggtgaaagttcccttgttttcctttccccagatataagcacattctgacttctatcaccacagagttagttttacctgctcttgaacttcatataaatggaatcatacagtatgtatacactccttgtgtctggcaattttctgtcagcataatatttctgagatgcacccattttgttatgtgtagccatagtacattcctttttattactgactactgttccattatatgaacatatgccacaatttatccattc

SEQ ID NO: 783366 - DNA, 582 bp, Homo sapiens
ttcaatagcagagtagggtgactatagttaacaaccatgtgttgtacatttcaaaatagccagaagtgaggacttgaaacattgtttacacatagaaatgataaattctggaggtgatgaatatcttaaattccctgacttgatcattaaagtgtatgcgcataacaaaatatcacgtgtcccataaatatgtatgaatagtgtgtatcaataaaaaataacaaagtaatcaacaaatctaaaatgtatggtttaatgctttcgtacttatatttgcaaccatgtaaacatctcctagatcaagatctacaatatttccaacacaggtgaaagttcccttgttttcctttccccagatataagcacattctgacttctatcaccacagagttagttttacctgctcttgaacttcatataaatggaatcatacagtatgtatacrctccttgtgtctggcaattttctgtcagcataatatttctgagatgcacccattttgttatgtgtagccatagtacattcctttttattactgactactgttccattatatgaacatatgccacaatttatccattc

SEQ ID NO: 783367 - DNA, 664 bp, Homo sapiens
ctcaacattctcttatcttttcttttgcaatgtccaatcatctggcaagcccatctcattatttttaacaaaaaatatatgtatgcttattgtttttctccagaagttttatttgatttgtttttatatcttgcttctttctttgatagaaaaacataaatatcaagttctgttttgatataaaaacctaactatcaaaacayaacttgatatttatgtttttctttaaatctttgagcttatttataggtctttaaaactccctctctcttatactattatctttatttttactatttctattcgcagatttttttttcttctggttatgtgtcataatttcctgattctttatatgtctcactgtgtttgattacattgatattggtaatttgatgataaatttgatggtaatttgattggtaaattcaatgcttttgagagtccagattttgttatttacctttaaaaaatgttgaactttgtttggacagtagttaagtaacttacaaatcagttcaatcacttccatgctggtttttaagatttgttaggacatgtctgtactattttttatcatagggctacttgagtcttaactactgaagttaactcttctatgcttcctacaacatgtttgatgtattcattgaaataactgcat

SEQ ID NO: 783368 - DNA, 664 bp, Homo sapiens
ctcaacattctcttatcttttcttttgcaatgtccaatcatctggcaagcccatctcattatttttaacaaaaaatatatgtatgcttattgtttttctccagaagttttatttgatttgtttttatatcttgcttctttctttgatagaaaaacataaatatcaagttctgttttgatataaaaacctaactatcaaaacacaacttgatatttatgtttttctttaaatctttgagcttatttataggtctttaaaactccctctctcttatactattatctttatttttactatttctattsgcagatttttttttcttctggttatgtgtcataatttcctgattctttatatgtctcactgtgtttgattacattgatattggtaatttgatgataaatttgatggtaatttgattggtaaattcaatgcttttgagagtccagattttgttatttacctttaaaaaatgttgaactttgtttggacagtagttaagtaacttacaaatcagttcaatcacttccatgctggtttttaagatttgttaggacatgtctgtactattttttatcatagggctacttgagtcttaactactgaagttaactcttctatgcttcctacaacatgtttgatgtattcattgaaataactgcat

SEQ ID NO: 783369 - DNA, 551 bp, Homo sapiens
tttcttagattgttctgtgtgcccatattttatcttaccctctcaggaattgaggaaattcttgctagtaaatggtaaaacatgggggaaacctggagatgtagatttgcgatcattttctagggacaaaatccagttttctgacttgccagtctagttaaatagtaggaaatcctctgtagaatttatctcattacaggagaagttatcagattacagatgctgaagttgtagagtaaaacagtcatttcttttttaattctgaaggaatcttgttgaaatctgggaaagttggagtcactgagatagaacaatttcaaagycatgttagtggatattcttactcccctgggtttaccatcagcccttgctgttgtaggaataaatggtatttttggatgttttaatttgggcagagctggttatgtaggctgagtgcctctttcaagttcaagaatttccatattatgctttgaccttttgggatagaaaataatgaagaattagcatacactagactacacccaattctgcaaattactttagagaca

SEQ ID NO: 783370 - DNA, 470 bp, Homo sapiens
ttggtggatcactttgtgcctacgttagatgtctaaggttgggggagatccatacttacctctacttcctttttaaaaaaaattctctcttaatgataatccaattagactctcattctcatcactgtgccagtacagctcatgttaaggtgaccaataaccttcatgtttccaagtccaatggctagtgctagtgctagttattatcttacttgacttaatagcaacatttgaacaattgtttrcttattcctccttgaagtgtttttatttttttcacttaacttccaagataccatactcctgatagctcctcctcagccccttttgctagtttctcctcatttccttgacttctaaaggttggaatatcctaggactcaggcctgcagacatattccctatctacatttgctacttaggtgatcccactcagtctcatggctttaaataccactataggctgatga

SEQ ID NO: 783371 - DNA, 428 bp, Homo sapiens
tctccagggctgggattgagaagagaggagacgtatggtcaggaaaggttgtacttggcgggtactgtcatgagctggtgttactagtctctgggattggcagctgttcaaagctgagtcttaactctccttgaccgaatctatcttccttctgtctggccatctggtattctatctcttctgttgggaatcccatcccagctgtttcctcccagtcattcttgggagaaatccaagatgaccctggtatggcacccctccaagggctgctcaaaacctatatttttcctyagcctttggagaaggccagaaagcatttaattttatcaatctcatacagtctggctgcttgtattggaggcagtcggctggtgtaaaggttcagggtggctttagagcccactctaataaacattgagaagctttgc

SEQ ID NO: 783372 - DNA, 553 bp, Homo sapiens
agatagagaaagatgcctgaggagcccaagttgtttcagccccacctatgtgatcttcccaactcaggcctccaagatgcaagtgagccatccatccatccactgattgcagcgccagccactgtttgatggcaaccacatgacagacctcaagtgagaaccacctagctggtcccagccaaccccagaaatgtgggaaataagaataatatgattattggtytttcagactgctcagttttggggtgattgttacagatcaatagataactgaacacaggttgagagtataagatttggaaagctgagtttatgccctctgtctctgatgaggctatgaggccttttgtccttgcatttttctgtgccctatgctttcttcatctgcatctctctgcagctgagatttctgttgcttaggactcctctgttctccacaacttcagctttgactcatttggctctggctttggtattgaactcctaccatctcctaccggacccaaactctggttcacttggttcagatcctcagtagagtgaacttgaccac

SEQ ID NO: 783373 - DNA, 553 bp, Homo sapiens
agatagagaaagatgcctgaggagcccaagttgtttcagccccacctatgtgatcttcccaactcaggcctccaagatgcaagtgagccatccatccatccactgattgcagcgccagccactgtttgatggcaaccacatgacagacctcaagtgagaaccacctagctggtcccagccaaccccagaaatgtgggaaataagaataatatgattattggtctttcagactgctcagttttggggtgattgttacagatcaatagataactgaacacaggttgagagtataagatttggaaagctgagtttatgccctctgtctctgatgaggctatgaggccttttgtccttgcatttttytgtgccctatgctttcttcatctgcatctctctgcagctgagatttctgttgcttaggactcctctgttctccacaacttcagctttgactcatttggctctggctttggtattgaactcctaccatctcctaccggacccaaactctggttcacttggttcagatcctcagtagagtgaacttgaccac

SEQ ID NO: 783374 - DNA, 493 bp, Homo sapiens
tagctgattgtcagaaatattcattttgtgttcatggtgttacacatggtgttacagtaggtagctagtcaggcatgagcggggcaggaaagggctccccgcacaccccaccaagaaagtcaggtgaccctgggcaggtggctgttaactgtctctctaaaataataattggtcrcagccagcaccagggaaaggcagtctccctatatagataggaaatacctgaaactggtgatgcgcagcttcctcatgagatctcaggagttgggcgagtgagctcacacatgtacattaagaggcaaaatggcaaagtttaactggtatatgaccttcggagggcattccaccggaaaagggacaaaagatgcaggaagtaggacagcatgtaaaaactgtaagtccgggatcaaacagtgcacttgacctccaagatgtccacatgaccctcttccaagtgtactttactttcttttcatttctgctctaaagcttt

SEQ ID NO: 783375 - DNA, 493 bp, Homo sapiens
tagctgattgtcagaaatattcattttgtgttcatggtgttacacatggtgttacagtaggtagctagtcaggcatgagcggggcaggaaagggctccccgcacaccccaccaagaaagtcaggtgaccctgggcaggtggctgttaactgtctctctaaaataataattggtcacagccagcaccagggaaaggcagtcwccctatatagataggaaatacctgaaactggtgatgcgcagcttcctcatgagatctcaggagttgggcgagtgagctcacacatgtacattaagaggcaaaatggcaaagtttaactggtatatgaccttcggagggcattccaccggaaaagggacaaaagatgcaggaagtaggacagcatgtaaaaactgtaagtccgggatcaaacagtgcacttgacctccaagatgtccacatgaccctcttccaagtgtactttactttcttttcatttctgctctaaagcttt

SEQ ID NO: 783376 - DNA, 635 bp, Homo sapiens
ataatgcaatgtagtttaaataaataatcaaaaagttacaaggaatactcctttttttatagatacaaaaacatacttctaaacaattcatggatcaaaggagaaataatggaaatcagactgtattaacaagtagattatagcaaatatattaggtatcaaagcttgtaagatgtagttaagrcttaagaagaaatggtcttaaatatttactttagaaaataagacagacttgaagttagggaatgctgcatccaatttaggcatttaaaaatataactgacaaatacctacatccaaagcatatgagagatgctttatgagtcaataagaaaaaatccaagaaactcaacagagaaaaacaaatgtgcagaacacttgaaaagatacttcatagaagtgaaaacctgaataaacatccgaaaagatgctcaactttgttagtccagaacattcacattttaatcacagtgaaatatgatttcatacacaccagattgaaaagcttgacactgacagttatgagcaaggatgtggagccacacagctctcctccactcctgatgggaagataaatgagaactatctggaaaacagtaactaattatacatagctaggctgaaaatactcatag

SEQ ID NO: 783377 - DNA, 532 bp, Homo sapiens
gctaaataagactgtggctatttagcatgttatgaaaataaactcagagactttcaacattattgtacttacatgtataaaagggaaactatctctgatagagtaggttgttgttctgaaatgatcactcatttctgttcacttccataggagatgacacttctctgctccatttatgttgatcttggccatgtgacttgctttggcctcattgtgggcaaaattaacacaagttgagcttaactatgtaactggctttggccagagtaatattatcagaagcaatgaagcggaggcttgaaatgtgctgtcatggttgaatgtgttctcatgtgcttgggtcactgccaggaggacctgggctcagaggggacatgtgagatgatgayacggtttggctgtgtcccagaccaagtctttctagaattgtagctcccataattcccacgtgttgtgggaggggcttgatgggaagtaactgaatcaggggggagggtctttcctgtgccattttcatgttagtgaacaagtc

SEQ ID NO: 783378 - DNA, 632 bp, Homo sapiens
ctcctgctcctcctctggggaaacggagacagccaggcagaggtgtctgcccagtggaggtggaccttgggcaagctgcatctccccggggggtgccctggggctgagctgctgccacctcgccatgtgacttgcagggtcaggttcactcacaaggcctgccctcctatctctcttccttcctttcctgcccagtgcccagcaatgaggcctcatcctcccactgcctccaaggcattgcatgatctagtccctgcctgctccacacctgccttacctggaaatccctccctgaatccctcactggttcagccacactggcctctcatttcctaaaacaaaacaaaacaaaaaccgagctctgatcctccaggcctttgcacacactgtttcctatgcccggagccttctttcttcccattcttgggctggcaaactcttcttcatccttyaggttttagccaaaatgtcacctcctctgggaggccttccctgattgccctaatctccattgagcttccccatctattctctccacactaccctgcatttctgcttttgtcctttacagcagcacttactttgttacccatggagctacttgttcctgagggcatgaaactatttgtcag

SEQ ID NO: 783379 - DNA, 592 bp, Homo sapiens
cactcatgttcgtcacagcatgattcacaatagctaaaacatggaggcaacccaagtgtccatcaatgaatggatgcataagtgaaacgtggtatagacatacaatggagtacattcagccttaaaaaggaaggaaactctgacacatactacaacatagatgaaccttgaggacattatgctaagtgaaatatgccagtcaaaaaaagacaaatactgtatgaatccacttcttgtttttttaagatggtgtctcactccgtygcccagggtggattgcagtggtacaatcttggctcactgcaacctcagtctcctgggttcgagcgattctcctgcctccaccacctgagtagctgggattacaggcgtgagccaccacacccagctgaatccacttttcatttatttatttatttatttgaggtgcagttttgctcttgttgcccaggctggagtgcaatggcatgatctcagctcatcgcaaactccgcctcctgggttcaagcgattctcctgcctcagcctcccaagtagctgggattacaggcatgcaccaccatgcccggctaattttgtatttttagtagag

SEQ ID NO: 783380 - DNA, 587 bp, Homo sapiens
gtgagaaaaaatggggagggagctagcaggtgaggctgggagagaatcaggcctccaaggaagcgaagaaagaagagagggagggagggaggaaggttggaagtttctattgctgagcagcctttgaaagttcatcaaggcccctgggaggcctcagccaaagttggctgtcaggagtcccctgtctctcaggaatggccggtcttcatatcccctggggcttagtcactgactgggagcagccctagcaagacgccctggcaaacacwgctagacctcaactggaagccgctggcactctcagtcagttactctgttggaggcctgcaaggtgcattgtcatggccaccacacaagcgattacaaaattatttgtgctatagaaatatgtgcgcttttcattaacaattaaagaggatctaacagcaggcctcacagctaccacaatttcaaagtcaggaggagcataaacaatattttgagatatctgcaacaattgtaatgtgatgtcgaaatcactgtgatctctttagatggcaaagtcacgggcatggctaacactcctatgatttgttgcattcctaata

SEQ ID NO: 783381 - DNA, 613 bp, Homo sapiens
tccaattccatctctggctttcttacaattttcaattacgcattttacgttgttttcctcatctgtaaagcacaagggcaggaaccatcagttttatacacccccggcactctctcagtgtctgccatcgttgataagccaggagctaacgacctgwcactgaagtgagcaggcaaaatcctgaaccacagtctgtgccagaactgcaaaatttgctcccccatctccccggactgtttcaatttcccacaaggctgagttatacagctgtgacctcctgcctgatctctatcaggaacaaggtaaaggccttaaaggaaaacggaacaggcctccagggctgcactgagaaaatttcaacttaccagagaggctgagatccttctgcagggccctcaggccctctcgattctgattccttttagtgtccaggtccacaatctgaaaaccacagggacaggagggaactcagctatctcttgccccaagctgtcacctcttgacagacaagggttgcagaggcaatgcattattcctgattacattcaacgtcctgcctaaaatggattgatgtgtgaatgtatttcttctctcactcagcttcctggtctta

SEQ ID NO: 783382 - DNA, 516 bp, Homo sapiens
ggatccacattggtcagattttgctgtgacaatgatgcataaaagacaacttccagaagcctggtgcttacagcagtaaacattcacttcttgcccaggggtctgtgggtcaagctggggctctgcagggctttctggggctagctgggctgggctccaggctttggggtgagtaggtggctgtctcatatatcttctcatttggagtccaggctgaaggagcctycactgtctgggacttgtggttctcatggccgaggacagttgctcaaagggatgaatggaaacactttgtgccttgggcctggcccctgtgacttccacacatattctcatggccaaagcaagtcacgtggccaagtgcaatatcaacagggtgaggaagtatattccttccgtggtggtgggggctggggaaagtaaatatttgctgaacagtaatacaatctaccaaatcacccaattctttttttcccccagatggctatgtttattgagtcatccctccacattctt

SEQ ID NO: 783383 - DNA, 585 bp, Homo sapiens
tattagcccaggaacagtcaaatggaagggatgcacaggaaaagctatgaaggtggagcttggagcttccatgtcccctccaggtgcaccatcctcccaacatctcaatgtgttcaccagcttggaagcttagtcatttaaggttttttatggaggcttcatacataggaatgtttaagtcattggccattgatgcttaactcagtctccagcttctctcccctccgcagaagactagggtaaggctgaaagttccaaccrtctaattacatggttggtccttccagcaaccaactcccatcctaaagctatgtagaggcccactgagactcaccttattagcagaaagtcaggcacgattgaaagaggcttgtttcaaatagcaaaggacagtcctgttacggctgtcactcaggaagttccaaggttttgtttttgttttgagaagctctgcatcagggacctgggacaaataccaaatacatatttcttattataatctctcccttgtacttacacctttctattcctcaatcccaattcccttggtcaggcaggttcatttttcatgaggaaccgtctgtt

SEQ ID NO: 783384 - DNA, 500 bp, Homo sapiens
caaaaaaaacaaacatgtggaccaacggaagagaacagagagcccagaaataaatccagacatttacagtcaattggtcttttacaaagatgctgaaaaccaccaatgggagaaatgacagcctcttcaataaatagtgttggcaaaactagatgtgttagttcattttgcattgctataaaggaatacctaagactgggtaatttataaagaaaaaggcttacttaggtcattattctgcaggctgtacaggcatggtgccagtatcttcttgacttctgtgagatctcaggaagttttaactcatgatagaaggcataaggggagcaggcatgtcacagygaaagagcaagagagagaggggagaggttccagagtctttctaacaaccagattttgcatgaactcattaccatgggagagcaccaagtcattcatgagggatttacccctcatgatctgaacacctctcactaagccccacttccaacattgcaaat

SEQ ID NO: 783385 - DNA, 643 bp, Homo sapiens
tgaacatggataaacctggaggacattaatctaagtgaataagctagtcacagaatgacaagtattacgtgattccacttacatgaggtatacaaaatagtcagacacacagagagtaaatagtggttgccaaaacctggagggagggggaaatcggggagttgctattcaatcagctttaagttatagttttgaaagatacttctagagattttcctgtacaacactatgtttataattaacattgcattgtacacttaaaattttaagcagatctcatgttaagtgttcttacacaataaaaaataagaataattaagaagacatatttaggtttccatttctaccacgttcttctctgagcttcagtttacttctctggaagtagtgataataccaacctagtgtcattatgagaactaaatgtgataatgtttattggatgtctggcacgtcagtgacagaaaatgratgccagttttatgcccattagagaggtgtgcaaggcttagtgtaagcaaaggctctagagctgaattctgcctttgttacttgtgtggttttgaggaagtcttttaatctcttgctctttgactcagtttccccatcagttaaataggggcaataatattatctaaaatag

SEQ ID NO: 783386 - DNA, 609 bp, Homo sapiens
atgatcttggcacactgcaacttctgcatcctgggttcaagcaattgtagggcctcagccacccgagtagctgtgattacaggtgtgcgccacaacacccggataatttttgtattattagtagagacagggtttcaccatgttgtccaagctggtctcgaactcctgacctcaagtgatccgcctgccttggcttcccaaagtgctgggattataggcgtgagccgtgcgcccagcctaatttaacttttaagttcagggatacatgtgcaggtttgagaacacaatatatttccagtgaagtcaatatctgtgwctctgcttatcctaaccaattctatgaactacaaaaaagaagagtagtaaatcctttaacagccaatccctaacaatatcatggaattgcaatttatttttactcagcttcatcttatgcagtctataaccacaggcttgaggtggtgacatgccttcaaatcctgcttcatcttcccttgaagtaaagccaaagatgatttcctgggcagaatgtggccaatgaggtctgcagcagagagaacaggagtgggcagagggggatagggtgggaccagctgcaaaatacttcct

SEQ ID NO: 783387 - DNA, 609 bp, Homo sapiens
atgatcttggcacactgcaacttctgcatcctgggttcaagcaattgtagggcctcagccacccgagtagctgtgattacaggtgtgcgccacaacacccggataatttttgtattattagtagagacagggtttcaccatgttgtccaagctggtctcgaactcctgacctcaagtgatccgcctgccttggcttcccaaagtgctgggattataggcgtgagccgtgcgcccagcctaatttaacttttaagttcagggatacatgtgcaggtttgagaacacaatatatttccagtgaagtcaatatctgtgactctgcttatcctaaccaattctatgaactacaaaaaagaagagtagtaaatcctttaacagccaatccctamcaatatcatggaattgcaatttatttttactcagcttcatcttatgcagtctataaccacaggcttgaggtggtgacatgccttcaaatcctgcttcatcttcccttgaagtaaagccaaagatgatttcctgggcagaatgtggccaatgaggtctgcagcagagagaacaggagtgggcagagggggatagggtgggaccagctgcaaaatacttcct

SEQ ID NO: 783388 - DNA, 628 bp, Homo sapiens
atgaggttcaggttgatgatcattttcgtttgtctactaatatccaactgcttcagtataatttgtttaaaaggctatcctttatttaattgcttttacacctttgtcaaaaattaattgggtacattcatgcaggtctatttctgggttttctgttctttcccattggtcagaataaattactatagctatacaggaaaccttaatattggtagaataataaaatgaaatgaaacaatttattcttctttgttcaagattgttttagctattatagggcttgtgcctttccatataaattttaggataaacttgccttactrtatacacacacatgcaccccttatgagtacaggcatatcttgttttattgtactttgatttattgtgctttacagatattgtgttttctacagattgaaggtttgtgacaaccttgtgtcaagtaagtctcttagcgacattttttccaacagtttatgctcatttaattagcatttttaacaataaagcatccttaaaaattaatgcataatatgtgtacacattttgggggtacatgtgatattttgatacatgaatataatatttggaatattcatctctttaaacatatatcttttcttta

SEQ ID NO: 783389 - DNA, 527 bp, Homo sapiens
tcaagtctggtactgattactgtgttagggctggagagggaaatcccacggtggtattttagaaaaccatttgacaatatcattctcatgcttcaagtccttgaatgactccttttcacaccaaggataaaaatacaaactcctaaactttgtgcccaagattcttcacaatcttttgcctatttacttcctttgccccatcttctgccatgaaccctgtgcttcaggcatactgagctttgaaccaatgcyccaacatatcttttatgcttctgtgagtgtgttctacctgttaagtcttaatatcatttattcattctgggcctgatcaaattcttctcattcttcactttcatgtcactgcttttgggttgatttcctgaactcctctaggtaaggttagatggtaaatctatgtattcccatatcaatttgtacatcctttaaaatacttatcattttgttttaattacttgctatacgtctttcaggttccaaattcatattctttctggtgagaagggaca

SEQ ID NO: 783390 - DNA, 605 bp, Homo sapiens
ataacagctcctgcctctttggttgttactgagggaggggaggttaatacacgtatagactttggaatagtgcctgcactcaggaaggactcaatagccatgctatgattgagtgccgactgtatgtgctgggcactgttctaggtgctgggtcacaagagtgaaggcagcacacaagctccccaccctcctggagctgacatttcagctggagagaataataattgagtgagataagtttcaggtggtgataactgctatgaagaaaagaactcagggagggagggatagccctgggaaaaatacctaatgtaaatgacgggttgatgggtgyagtgggccagcagggcacatgtatagctacgtaatgagcctgcacgttgtgcacacgtaccttagaacttaaagtataataataaaaaaaaaaaagaaaataactcagaatacaaggtgaagaggggccagtttaggcaggatggttctgagtggagtgaaggaaggagccgtgtaggcctctggtggatgcagaagaaagaatgaatgcaaaagtcctaaggcaggaacaaactcttcctgcatggcagaaaaagataggcaggggcttg

SEQ ID NO: 783391 - DNA, 565 bp, Homo sapiens
aacaccatttcatatttgacaatgcttcctgtatgatttttataccaaataagccaaatatgtcatttttggactttaggggacctaatagctataagattaattaggtcagaaaaagacataatttataatttggttttggaaagtttgttactatcaaaggtttaaaacacttgatattatagaagagaatcataggccaccataagtcatctagccaaaataactcaaaaattttaaaaaggcaaaaaactttattcatggaaaatcttgttcaagagaaagccaaatttcacctttgcattagtgtactattaatatcaaacccaattcttagtagaaccttagacaaatctcttcaattttaatgttygaccctaaggtaagattcttataaatcttatgaccctttacaatttttgttaaagagcagatcagtgctccaaggaaatccttttgtgcttttattccaatgttcaatttacagaaaaactgaataatgtcactttagctttagccaatatgttcacatataaaatttcttttaccagattaatctttcaca

SEQ ID NO: 783392 - DNA, 516 bp, Homo sapiens
aaagaaatactacagaacaagacaatgaatgatcttactgtgagtttcattgcaagacaacccagagtcaatcagcccattctgtgatcagcctatcccccacggaagccttatctcagtggtggggtgggggatggggaygtttccataccttccaggtggctgagagcacgcctctctgatccaaacgtgcagagagccaagtatcccgccataactgccactggccatgcccaaaagtatatttgctacctagttattacacaccaaagctcactcataatgtgaagtaatttctgatactctaaaaagtaaaaaatgtcaaataacgcaatgcaaaacagaacagagccttagcttttgagagagatctatctgcttccaatccctgggtcttaatgaggaaaacagatgttttccctaaaacggggtctgtggcacctcctctgtttttctcaaggagtccaaggctattagaaattatcttaggtcctctcacatgtgcatcaagagtgg

SEQ ID NO: 783393 - DNA, 516 bp, Homo sapiens
aaagaaatactacagaacaagacaatgaatgatcttactgtgagtttcattgcaagacaacccagagtcaatcagcccattctgtgatcagcctatcccccacggaagccttatctcagtggtggggtgggggatggggatgtttccataccttccaggtggctgagagcacgcctctctgatccaaacgtgcagagagccaagtatcccgccataactgccactggccatgcccaaaagtatatttgctacctagttattacacaccaaagctcactcataatgtgaagtaatttctgatactctaaaaagtaaaaaatgtcarataacgcaatgcaaaacagaacagagccttagcttttgagagagatctatctgcttccaatccctgggtcttaatgaggaaaacagatgttttccctaaaacggggtctgtggcacctcctctgtttttctcaaggagtccaaggctattagaaattatcttaggtcctctcacatgtgcatcaagagtgg

SEQ ID NO: 783394 - DNA, 633 bp, Homo sapiens
tttttgtttgtttgtttgtttgtttgtttgtgatggagtttcactctgtcgcccaggctggagtgcagtggtgcgatctcggctcactacaacctctgcctcccaggttcaagcaattctcctgcctcagcctcccgagtagctgggattacaggcacataccaccacacccggctaattttgtatttttagtagaggtggggttaccatgttggccaggctggtctcgaactcctgacctcaggtgatccacccgcctcggcctcccaaagtgctgggattacaggcatgagccaccgcgcccagccaccccctatggcttagaagggactctaatttttctaagttaagcctttaacccaggtttggtcaagygtcgttgctttttattaacaggggcctttaagcctctttgtcttaggagggactctaactctcctaagttgggcttctaacccaatcccatcctttacccaggtaaaacgtaccccaccacatatccagagttggccaattggtgctgcagtctttttctttgggtcagaagtctcttcagtatagtcgcttcatggtggccaggaagatgttaccagaaaggagtccggatccagaccccaagagagggttctcaga

SEQ ID NO: 783395 - DNA, 633 bp, Homo sapiens
tttttgtttgtttgtttgtttgtttgtttgtgatggagtttcactctgtcgcccaggctggagtgcagtggtgcgatctcggctcactacaacctctgcctcccaggttcaagcaattctcctgcctcagcctcccgagtagctgggattacaggcacataccaccacacccggctaattttgtatttttagtagaggtggggttaccatgttggccaggctggtctcgaactcctgacctcaggtgatccacccgcctcggcctcccaaagtgctgggattacaggcatgagccaccgcgcccagccaccccctatggcttagaagggactctaatttttctaagttaagcctttaacccaggtttggtcaagcgtcrttgctttttattaacaggggcctttaagcctctttgtcttaggagggactctaactctcctaagttgggcttctaacccaatcccatcctttacccaggtaaaacgtaccccaccacatatccagagttggccaattggtgctgcagtctttttctttgggtcagaagtctcttcagtatagtcgcttcatggtggccaggaagatgttaccagaaaggagtccggatccagaccccaagagagggttctcaga

SEQ ID NO: 783396 - DNA, 601 bp, Homo sapiens
ttattgcccaggctggagtgcaatggtgcaatctcagctcactgcaacttttgcctcctgggttcaaacaattctcctgcctcagcctcccgagtagttgggattacaggcatgcaccaccacgcctggctaattttgtatttttagtagagatggtgtttctccacgttggtcaggctggtcttgaactccygacctcaggtgatccgccctccttggcctcccaaagtgctgggattacaggcgtgagccaccgtgcccagcctgtgcttggtttctaaaggagctcctcatttatcaggtttagaccatacaaaatctggatctgcactggctccattcttcagcatcttaacgacaactttaccaaagtaacaatgtcactagcattctcaatttgcaggattttcatactctctcccttttttggtgtcaccagaaaatgcaatggctttttgttctctgaaaattgcatatagagagatgtgagtgtatgtcaatatcagcatattgcagatgtgaattattcagcctcggagagatcggaccccacagagcactttattaaggcaactgaagccttcatacaaataaatggggg

SEQ ID NO: 783397 - DNA, 601 bp, Homo sapiens
ttattgcccaggctggagtgcaatggtgcaatctcagctcactgcaacttttgcctcctgggttcaaacaattctcctgcctcagcctcccgagtagttgggattacaggcatgcaccaccacgcctggctaattttgtatttttagtagagatggtgtttctccacgttggtcaggctggtcttgaactcctgacctcaggtgatcygccctccttggcctcccaaagtgctgggattacaggcgtgagccaccgtgcccagcctgtgcttggtttctaaaggagctcctcatttatcaggtttagaccatacaaaatctggatctgcactggctccattcttcagcatcttaacgacaactttaccaaagtaacaatgtcactagcattctcaatttgcaggattttcatactctctcccttttttggtgtcaccagaaaatgcaatggctttttgttctctgaaaattgcatatagagagatgtgagtgtatgtcaatatcagcatattgcagatgtgaattattcagcctcggagagatcggaccccacagagcactttattaaggcaactgaagccttcatacaaataaatggggg

SEQ ID NO: 783398 - DNA, 637 bp, Homo sapiens
caaaatacgcactccatatgtgctacctgatatcattacagtaaaaaaaaattacacaaaatgtaatttttactaattttaattacaaaatgtaattaaaactaagtcttccttccaccctagaccccacgcctctccccaggcaaagtactgtaaaaagacccttgtgcttcttctcagaactactctatacttaccatcaagtccatccctctcttctgtgcaaatgggagcccactatccactctattctacatattgccttttttgcttaacaacatttcttgggaatgagttcattgctagtttcatayctcattctttgccagagctgcagagttttgcatcatatgggtgcaccagaatttctttaactcatccccagtgttggagatttaggttgtttctaatatttcactattacagtcactgccagaatgaatatatttaaatatacatctttcattcatatggaagaatatctttagggtagagtcttagaggtggaattgctgggtcaaacagtccattcatgtttattttgatagatattgccaaatttctcttcaaagagattgtgccaacttccataccaaccaaccacatacagaagcacctgtgtcccctcattctcaaa

SEQ ID NO: 783399 - DNA, 667 bp, Homo sapiens
tcaaaataataagctctcttgaggatcctacagacagaggaagaattcccgtcgtttatacatgattttaatgaacaccctggctctcacaaacattgaaaatgaggtttttcactttgtgaaagtcctttaaaaatctgtttaccagtctcccctctaaataagagttgtggaggtgatacccacatattgggttgtcttgactcaacacatctcakaatctctccgtggattttagatgtagagaaacatgttttaatagcctgcccttctagagagactttagctgagcatgttgattctttcctcttcgggaatgccttctttcccccaagaaggaaaaagaaatgctgatgaagtggcctttggcctttcaagggccagtcccaatgcaacaaaactagggtgggggtattgacatcactttccacttcataatgtttccttttaggtttcaggaaataaatctctctgtagtctctggaatagccacagatatgcttctttgaacaactcatttatcttgtggacactgtaactataactgactatatatccccttttacgtgggctactaggaagctcagataaaatctagggcaaaagagaggcatatggatgctaagtttatccttagtttcatcttaatcttcttgggaacaaagca

SEQ ID NO: 783400 - DNA, 643 bp, Homo sapiens
tggaagtccagagtgaagaagtcaagagaccacactccaaatgtccctcccttacccactaagaggggccagggtgtcagggagtgtgcaacacccagaggcgcggcattctgccggccaggcctggctcacttccccctttcctcagaggcgcagcattctgccggccaggcctggctcacttccccttccctccctttgtctattgcatgcrgaagacacccaaaccctgccctcaaggagatcacaggcaaggagggaagaccaaccctaagaaggtaaatgtaaaatatctgatggattaaatgcttaaaaaatgatgttttgatccagggcaacacagcaaagacctcatctctacaaaaaataaaaaactggctgggcatggtggcacatgcctgtagacccaattatttgggaggctcaggtgggagggtcacttgagcccagtaggttgaggctgcttggcctgtttataagtgagctgattgtgccactgtactccagcctgcctgggcaacagagggaaacctgactccaaaaaaaacattttactaaaatgttttgaagctgtaagcctgggggccagaggaagcttctctaaggaactgacgtttaaatcggtaaccaaaagataaacagg

SEQ ID NO: 783401 - DNA, 645 bp, Homo sapiens
ctcttttgttattcctaagtagtacccagtttctatcctggatcctaatgaacctgtgccttcattttctggaaagcaagaggaggacaggaggatttgggaagaggaacacaatgatgtcagcgtcccagcctccacactctctctggagtaaatattctatatttatagcacgtgggtgcaagggcaaatgccaaggggcgtgggaatgtgtgtgtttgtgtggggagagtgcatcattctgtggacagtctccagccctcttgcttttggaaagccctcttgctctcttcctcatcacaccaagcaagcaagaaccttgctccatctctgtgggagacacagaatttggaccttcctctctctatcacatctttttatagcccaccagtcccactaactaatagccactcttctagtcccctgtcctaaaactgctctacatttctcaattcyttcatctctacctagactggctagactttaaaaaaaaaaaaaggatgattccttccgagttgtacacatgttctctctcacacagtaaccttttgctgcattctccttacgaactcccaccctgcatcttccaccttggatcttcctcagtgctggtcttcttcgtttcttcattcaggctgagcatta

SEQ ID NO: 783402 - DNA, 646 bp, Homo sapiens
gttgccagtttatgctctttcaggaatttgatatagtgatgatttccaggatatatttctttcaccattattaagcaacaaaaatgtaaatacattattttcttagccctttctaatgctatttgaattatttcctccaactaaagtgaatataaataaatatgtggaattttttttttaagcaaagcaaggactgtacatcataggtcatgaaatttactcttgacagttaaacttgggtccatttggtcataaaatttaactctgaatttcagtctatctttaaaaggagattcctttcctccgtttttgaatgttttgtgtttaaacaaaatttttgaatggatcaaaaaaatatcaaagraaaggaactgtcccattgttgaatgcagagctttgacacaagtctcaccttctctggatgaggtaatcttctaggatgtcgaggcagcgcaccatctgggagaagatgagtactttgtggccacctgcaatcagcttagggagtagtttatcaatcaacacaagctttcctgctgcctgaatcatggcctgcagctgaaagtcaggggcatcagggctgtgggtttttcggaaatcttctagaattttctcctctgctcctgaaaaggaatggaacaaaact

SEQ ID NO: 783403 - DNA, 628 bp, Homo sapiens
tgataaggaaatcagataggtgttgttcacaagtccccagccaggagtccatctaaaccatgcatagtttgaatgcccaaaggaaactctctgctatttttcagacttaatttcaccttataatttgagttctagcacagattgaaggtaatgattctgatgcacctaagacaagcgctactaggcaggacacagctttgtttttcagactgtcttggtgttgccatcacatttcaagagcagagctgcatcatgttagagcacttcttaaatgtcttccaagtgtctctgctgtttttgaaacctctggagagaccactggctttcctctgattgaaatcgtttaatttttaccttaattataaaaaccartgtgcaggacaaacacacaactatattcagctaagtgacagcacttaaaaacttaaagagaaaatgttgctgttgggtttctaatgatttgaaacctattttctctttatccttctctgtcaaatctgttaacctcctctccaaactccctggctgggaatccattctctgtatagtaattcttttgctcactttcttcactgaacacataacaattcagataaaatcttctgcatataaaagtaacttcataaac

SEQ ID NO: 783404 - DNA, 624 bp, Homo sapiens
ttatgtaagcttaaacataaatctagcgattgtgcacatccaggcacagcaccttttcttaaacttatttatgacagagtctttgctcacatgttcctctgctgaccctctccccaccttcaccctatagccccgccacactcccctcgcagagatagtaaagatagtgatcaataaatatggagggaaccagagaccagtgccagtgcaggtcctcacttgctgagtgccggtcccctgggcccacttttcttcctctatactttgtctccgtgtcttatttcttttctcagtcgctcgtctccatcttgygagaaatacccacaggtgtggaggggcagcctcccttcaaaaatgcattaaagacttaaatgtactccaaactgtagaactactagaagaaaacatggggaaacactctaggatatgggtctaggcaaagactttatgactaagacctcaaaagcacaggctacaaaaacaaaaatagacaaatgggactattttaaactaaaaagtttctgcacagcaaaggaaacaacagaatgaagaaacaacctgttgaatggtacaaaatatttgcaaaccattcatctaacaagggattaatatccagaatataca

SEQ ID NO: 783405 - DNA, 562 bp, Homo sapiens
ttacttcaacaacaacaaaaaatcactaagcaaagagacagcagaaataaacttagaacgagagagtctctatagtatctcctggcttggttctacagagacttgtggccgctatttatcatgatttggagaatttgaaaaattgtttctttrgtattggataccagctatttggctttctgctccaaaaatagcctgaaaatatatagctaagatttatctgggtggccgctttgtaacaagcagctttaacttcagtgcaaatagagtccaaaggtcagagtggtatcctgtgtgaatctgtgacctcaagctgtctgctacgtttctcttgatttttccatctactctgacctcaaagattctcctatagaatctgggggctatttctgctctaaggtcaagtaaaaagattcaaaaaaaggttatacattaagaaggactttccaaagggaaagcgctaaacatttgctcctttacgtggacatgtagtgtgtgtgtgtctacacacactacacatatgtgtaaacaaaataaatatatgtgtagcaaacacaataaa

SEQ ID NO: 783406 - DNA, 562 bp, Homo sapiens
ttacttcaacaacaacaaaaaatcactaagcaaagagacagcagaaataaacttagaacgagagagtctctatagtatctcctggcttggttctacagagacttgtggccgctatttatcatgatttggagaatttgaaaaattgtttctttggtaytggataccagctatttggctttctgctccaaaaatagcctgaaaatatatagctaagatttatctgggtggccgctttgtaacaagcagctttaacttcagtgcaaatagagtccaaaggtcagagtggtatcctgtgtgaatctgtgacctcaagctgtctgctacgtttctcttgatttttccatctactctgacctcaaagattctcctatagaatctgggggctatttctgctctaaggtcaagtaaaaagattcaaaaaaaggttatacattaagaaggactttccaaagggaaagcgctaaacatttgctcctttacgtggacatgtagtgtgtgtgtgtctacacacactacacatatgtgtaaacaaaataaatatatgtgtagcaaacacaataaa

SEQ ID NO: 783407 - DNA, 514 bp, Homo sapiens
tggcatttcaagtcactaggagaaaaaagtggaattttacaactgaaggctctatcacatcaaaaatctagacacactggcaataaaatcagaagaaaacctctgcccacctttccaggaattttcacttaatctttctgtgactrttacctgcctgacaaactcctattcatccttcaaatcccaactcagatgttaactcttctgggaagttcttcctaacctcctcaccctccttctatgttccttttactgttctattactttggttcacttcaatttaaatattggtcatgtttatttcccctgagatcacatttgccattctagcacgaagtacatggcagggctctttagaagcatgaaaatgtctgttgaagtgacttgaaacacgactactactggacatgccttacaatttatatgcccaactctagagtcccaaaataagtggtatttcctagataaggcacagtctgtacttatgaagagggagtgaaaaaactataaatat

SEQ ID NO: 783408 - DNA, 500 bp, Homo sapiens
atgagaaggtagtccagcaggttctctctacctccttgcttttttttccccttaatgctttggcagagggttttattgcatattaccctggcatgcgcccttgctttgatgtgaattttcctgtgttctgttgtctggttgtacagcccagctcaatggctcctcttacaggactactggaaaacagaacaccttttttcattgtcctcatctccagagagagaaggaagcgctgtaggttcccacaaacgttgactctgtcagactgcctgcctgactttgttgtgttggtaaagttatgaagagttgcagttgttgtagaccaattaaaaagaggctattgggatarcaccagctcttccttgctattttggttttaaaacaaatgatatgaattttgcaagatagttgttaactctggttgcatgatgattttcagtttctttttacccatatacttttacagggtgttgggaaattagccactcatttacaagaaa

SEQ ID NO: 783409 - DNA, 494 bp, Homo sapiens
aaaaatgaagcagaaaaaaaaaaacaagagctttactaactaaagtcactaatgttgaagtaacccagtacatttataaactgcctgtcttgactgcataagacattttttaggagtctccttaaaacaaaccgtaaggggaagtcttagataaacagagtagcataaccggaattatcactgaaatargcttgcacagtatcgcaatttcatggaagtttaattttgcaagagtgacttagctatttttaatatcaacaaaggaacctaaacacagcctggccttgttattcagcattctgttaatcaaagtatttgccaacccatagtttagcattctgtagtatgatgattgaagaaaaaatctaaactaacttttagatccttaaaatagataaaataatgttaagtgctgttttaatagtaaatatttattcattagaatagtaatattatgttagtgatggtaagagcatagatggtaacactttgtt

SEQ ID NO: 783410 - DNA, 605 bp, Homo sapiens
attagttttagaaatttttttgaagattctttgggattttgttgttgtagatgttgatgtggcaaataggctcagtttaatttcttcctttctgatgtgtatgccttttattcccttttctaccttattgcactggctagaacttccagcactatgttgaataagagtggtgagagcagatatcctgccttgttcccggtcttaggggggtaagtattcagtctttcacaattaagaataatattagctgtacagtttttgttgttattgtttggttggtttttgccggtttgttttttgtagatgctttttaacatgttgaagaagttctcttccatttctatttctgggagttttttaatttctgggtgctgatgtttgtgaaatgtgttttttttwaatcagttaatatgatcatgtgatttttcttctttagccatttaatatggatagattacattgattttttttttttttaatattaagccagccccgcatctcttgaataaaccttacttggtcatggtgttgtaaaattctatttacatattgccaaattctacttgctaatattttgttaagaatttttctgtctgtatttgcca

SEQ ID NO: 783411 - DNA, 631 bp, Homo sapiens
gagactgctgagtttggagttggagaggctctggctgtgtacataccgggtcagtcatggccatgggaccagaactgtctaagcttcagtttccttgtgtatagaatggggagaaattggccgggcacagtggctcatgcctataataccagcactttgggaggccaagtagggatgattgcttgagcccacgagttcaagaccagcytaggcaacatgctatctctacaaaaaaatttttaaaaattagctaggtgtggtggcacgcgcctgtagtcctagctatttgggaggctgaagtggaagaattgcttgagcccgggagattaagactgcagagagctgagatcacaccattgcactccagcctggggtgacagaatgagaccctgtctcaaaagaaaaaaaaaattacttgaaaatgttttcatgaccctttaatactataacatatgactatataattaatcatatttccttgtgagatatctcagttatttctaatattttaccattataaatattgttacttcaagggttgagttattaggttaaaggctaaagagtttgaagaatcttaaaactttttttctttttgcacttctctgaggttgaacattttcatgtttat

SEQ ID NO: 783412 - DNA, 582 bp, Homo sapiens
agtaatcagtaaaacacctttatatgatcttcaatcttatctactgatgaagtgttttactctgtaggagaaaattgtccttatttatttttctgcccttctacctggtaaacagatacacgtatgtcattgtctatctccaagatttaatctactctcacagagatttcaaaattgcttttcaaggtgtggcttccttgttagctaaggtcattaggtatcaraaaagtagggaaggctgggcgcagtggctcatgcctgtaatcccagcactttgggaggcccaggcgagtggatcacctaaggtcgggagttctcgaccagcctggccaacatggtggaactccgtctctaccaaaaatacaaaaattagctgggcgtggtggctcatgcctgtaatcccagctacctgggaggctgaagcaggaaaatcactggaacccaggaggtggaggttgcagtgagccaagatcgtgccattgcactccagcctaggcaacagagcgagactctgtctcaaaaaataaaataataaagaaacataggggatgctccttatatctcatagatatgttgactgct

SEQ ID NO: 783413 - DNA, 550 bp, Homo sapiens
tacctacatatggttttactgtgatgtgcctaggtgttcactggtctcaggcggcttctttaatatgtagcttgatgtcttatatcagtttaccaaattctcagccattttccctttctttgctctattctgtctttcttctccttctgcatctccaattacacatatgttagttctctcactatatgcyatatgtcacattcattcttttctatactttctagtattattttcctctccctgttttagtctggatatgttctgctaacttatctttcagtttgatcaacctctcttcagctgggtccaggcttctctaaatagcatacactgattattttatttttatcattgtatttttatttttgggattttgattattttcttttttattataatgagtctcttgaatacagcacacaggtggattttgactctatctggcttgccactctgtgtccttaaattgggggcatttaacccatttacatttaaagttaatattgttatgtgtgaattgtatcctgatatcatgatgcctgttggttat

SEQ ID NO: 783414 - DNA, 618 bp, Homo sapiens
aaaattcttcctaggatacaggcatacctcggagatattgcaggttcagtttcaggctaccataaaaaaggtaatattgcaataaagtgagccaagtgcacttttttggtttcccagtgcatatgaaaagtatgttttcctgaagtcttttatttatatatttatttaaactagaaaatgaaatatttaatagttgaaagttgtttctctgaaaaagctagtaaaatttgcaaacttctgatacaaatctgtatatgtttcagtatacaactgtacctctttcatattctaaacagtttctaatagttttcttatgatgaatttcattattacttattaaaatattaaaaaggtatgtttacactatgctgtagtctgtcaagtgttcaatagcattatgtataaaaaayaatgtgcataccataattttaaaatactttactactaaaaattgctaatgattatctgagccttcaacaagtcatcatctttttgctggtggagggtcttccctcaatgttgatggttgttgactgatcagggtggtggttgctgagggttggggtagctgtggcaatttattaaaataagaacaatgatgtttgccacatcaattga

SEQ ID NO: 783415 - DNA, 595 bp, Homo sapiens
atatagatagagacagaacactgtggacctgcagaatcctctgctcccctaacacacacacaagtctggctgattgtggacactcagacacaagtctgggtgattgtggagtggaaggaggatctacatatctattttttttctaacattgtgtgaggaccttcataaagtctcatccatctttatattaatttctccattgstagcatcagcctaacaccaccttatcagcaatctcttgtgacttttgtgaggaaaagagagatctcttccaagagggcttcgaaaatatcacataacatgtagattttaaatatatagacttaaactatactcaaatcctacatcccacttactctaggaaagtcactaatcatctctgtgcctcaatttcctcatttttaaagtgagaatagcagtactttcttcataggatttttgggaggattccatgagttattttgtgttaaacactgagacccaatgtctggcatataagcagtgctatgtatggtttgctaaataaaccaataaaacacttattgaagtgttcagaatcacccagttggacaccaaattcactatgagtcaaata

SEQ ID NO: 783416 - DNA, 535 bp, Homo sapiens
agacagtattcttaggaacgcacatctagccattaaatggccgcctctccacccttggaatgtctgctgtccgtgtcagagacccggttgctgacactgcatggttggcccttggtccgtctgttcttccttcgtgtgcatttccacggacttggtggcttaacaaggcacaaaagtgcgatgttttagttttagaggttggaagaggaaagggtctccttgggctakgaatgaggtgctggcagggctgcagggccatccagaggccccgaggggagctccctgcctcaccttctccagtggccttgacttgaggcgtccttccatcctggaagccagccctggatggccgagtcctcctcatgtcaccttactccaacactgactcttctgcctccactttctacctctaaggacacttgtgattacgttgggttcctctggagaatccagaataatctacagtcagagaacgagcagccttcattccccctgctgtgtaatgtcacatagtctctgttagaggccagtattg

SEQ ID NO: 783417 - DNA, 607 bp, Homo sapiens
atcttggacctttcatattatatttattaaagtgttttttgacagacaaacgtctctgtgggggggccaggcatggtggtacatgcctgtaatcccagcactttgagaggctgaagcaggcagattgcttgagctccagagttcaagaccagcctgggmaacatggtgaatctccgtctctacaaaaaaatattaaaaaattagccaggcctggtggtgcatacctgtagtcccagctactcaggaggctgaggtggtaggatcacttgggcccaggaggcagaggttgcagtgagcagagatcatgccactgtactccagcctgggtgacagagtgagaccctgtctcaaaaaagaaatgtctcagggataactcagcttgggtcatgtgctgaccaaaagatattcattgtggccagagaggaaggaagctctatttgatgtgactggggtcacccatctttgaatcaaagagatgatgtggcccacctcaccctccatataaattttgcaggacctatctgttgagtagaggagggctgcctccaaagaagggataatgaggagacaaagtaaatatgtgtacagtgctcctatatgatgctta

SEQ ID NO: 783418 - DNA, 607 bp, Homo sapiens
atcttggacctttcatattatatttattaaagtgttttttgacagacaaacgtctctgtgggggggccaggcatggtggtacatgcctgtaatcccagcactttgagaggctgaagcaggcagattgcttgagctccagagttcaagaccagcctgggcaacatggtgaatctccgtctctacaaaaaaatattaaaaaattagccaggcctggtggtgcatacctgtagtccyagctactcaggaggctgaggtggtaggatcacttgggcccaggaggcagaggttgcagtgagcagagatcatgccactgtactccagcctgggtgacagagtgagaccctgtctcaaaaaagaaatgtctcagggataactcagcttgggtcatgtgctgaccaaaagatattcattgtggccagagaggaaggaagctctatttgatgtgactggggtcacccatctttgaatcaaagagatgatgtggcccacctcaccctccatataaattttgcaggacctatctgttgagtagaggagggctgcctccaaagaagggataatgaggagacaaagtaaatatgtgtacagtgctcctatatgatgctta

SEQ ID NO: 783419 - DNA, 624 bp, Homo sapiens
ctgggtgttggaccctggtctagcctactctggatctactatgaagcccagccttcaaaaagaggttaaaatcgcagtgtgggaatggggccaacctctggtacagaggttgatctattgggaagacaaataattaatgcagatartttatgcctcagagccaataaacattgcatcaattctaagtgttatggaagttcaaagaaggactgttaaggccagattgtcggcagaaattagggctctctagaggaaggaggattggagagggggctcaatgacctaccacctgtaccggctagcagacactgtgagtttaggccttgggcttagagtattatgtgcattctttgtttcatcctctcaatgagatggggatgattgtgatcccattatcagatgaggatatcaaggcttacaaaggttaagttacttgctcaagattacacaaccaattttttacagaccaactggtggttggaacccaggactgtggtgtgggattgcccctggagagtgctgcatccagaagatgagtgatatttagggaaatgagaacagcactgggcagaggaatgagcagtgtgtgtgtacctgaatgtgtgtactgattgtgtatagatc

SEQ ID NO: 783420 - DNA, 559 bp, Homo sapiens
gtagttaattatttgattatttattataaattaaaagggaagagaagggaaaatgctgttatcttttggaaagtctattttcttttctttctttctttcttttttttttcctgagatagagtctcactctgttgcccaggctggagtgcagtggcacgatctcagctcactgcaagctctgcctcccgggttcaagtgwttcttgtgcctcagcctcctgagtagctgggattataggtgcgtgacaccacacctggctaatttttgtatttttggtagagatacggtttcaccatgttggccgggctggtcttgaactcctgacatcgggtgatccacccgccttggcctcccaaaatgctggaaagtctactttcaaattgaaaatgtcacggagaaaaatctcctccccctcttttgtcttgaccacaccttcctccagtggataactaatggaatttgaggtgacctctacttaccatcaccatgactgcatgagagcctcacagtctgggggctgggtaaaaatagaaattagatagttttagtgcctttttaa

SEQ ID NO: 783421 - DNA, 847 bp, Homo sapiens
tttccttcctcttacgctttgaaaacttaatccatctttttattcttctcatggttgtcataaaatataaacatattttaacccattttctctaattataaaatgtcaactatcaaacaatatttattatatcaatcctgagtaagatactaaattttagcacactgttacttcctctgtacttgactacttttcaattttaattgatagaggtggggtttttatgctttgctttcagccaccctccyccacagtctacattttatgactcagcttaaaaggaatggttctcaccacatagaaatggggtgattttggccccaggggacacttggcaatgttgggagacagtcatgattgtcactggtgggaaggtgggtgtttgctactggcatctagtgggaaaagaccaggaatgctgttcaacattctacaatgcacaggacagagtccacaacaaagaattgtccagcccaaaatgccaatagtgttgaggcaggaaaattccattttagaggttttgtggctcttatgataattgtaagttaatattactcattgtatttaaattatttttaccaccagtactttcatatcctcactcttaaatttttaaattcctgtttatccctcgacgggctagaaaatatttttaagtaatttttttttcaagtagactctatagaaaggaggaattatacttccctaagctgccagtatttgagcaaatctttctaacactctcagacacactcactggaagcagatgaagctattagtcagtcattccccagcctctgagaaggaatatttttcttgtagatgttttccctcatatatttgcaca

SEQ ID NO: 783422 - DNA, 635 bp, Homo sapiens
cttatagattataattccctatagcatgcagagttatttcacaggctttatcttcttaatttgacaaattttttagagaccctacttgccaagcactgagaatatgaagttgaataaggaatagtctctaatctcaatcaattttcagactaatggaaaagtctatcatagaaacagttgttatgagctctaaaatcatagatgaagaataattaattctcattgctgaccagaggtaaatagaaagaagagtcaaatttgagctgagagccctagagggatgaaagagagtttgtcaaagcccattctgaagtgaataacacggtcataagaatgagccatggggaatatgacaaacagcctggtgtggccaaagggtgrtggtggcagtggcagaagagaagcagcctgagagatggctagggccagaacaagagccataggatctctcctagtacaggtgggcttcaactatccgcgtttttacatgttgctttggcaaacttgagagaattgatgaatgccttctatcccttcaccaagattgtattgaatcctcttccatatacctaccagcagtgttctaggctctggggatacaacatactccctgatttcatagagtttacattctc

SEQ ID NO: 783423 - DNA, 635 bp, Homo sapiens
cttatagattataattccctatagcatgcagagttatttcacaggctttatcttcttaatttgacaaattttttagagaccctacttgccaagcactgagaatatgaagttgaataaggaatagtctctaatctcaatcaattttcagactaatggaaaagtctatcatagaaacagttgttatgagctctaaaatcatagatgaagaataattaattctcattgctgaccagaggtaaatagaaagaagagtcaaatttgagctgagagccctagagggatgaaagagagtttgtcaaagcccattctgaagtgaataacacggtcataagaatgagccatggggaatatgacaaacagcctggtgtggccaaagggtggtggtggcagtggcagaagagaagcagcctgagagatggytagggccagaacaagagccataggatctctcctagtacaggtgggcttcaactatccgcgtttttacatgttgctttggcaaacttgagagaattgatgaatgccttctatcccttcaccaagattgtattgaatcctcttccatatacctaccagcagtgttctaggctctggggatacaacatactccctgatttcatagagtttacattctc

SEQ ID NO: 783424 - DNA, 587 bp, Homo sapiens
aaaaccaaaatgagataccgtctcacaccagtgagaacggtgatcattaaacagccaggaaacaacagatgctggagaggatgtggagaaataggaatgcttttacactgttggtggttagtgtaaattagttcaaccattgtggaagatggtgtggcaattcctcaaggatctagaaccagaaataccatttgacccagcaatcccattactgggtatatacccaaaggattataaatcattctactctaaagatacatgcacacatatgtttatttytatttgcttatttaatgtctttctggactaattctataaagtctgtaatttctataatgtgccattgaatctgcttggttaacttaatagttagccaatgacagggcagaggttttcttaaagaccttgaatcaataaggctttttgtttttaccctttgctaaggggctctgttgtgtatatcgggacatatcctcaattctcaagcaggcagttttaaactctgctatggccttcacctcctgtttttaaagagacatcaagtcaactaaaggtgagcacttagggccttcttagatatttcctgg

SEQ ID NO: 783425 - DNA, 596 bp, Homo sapiens
aaagaagagtagagaatgcaaaattaactctcagctcctacaccttctgcctagtttatagggttgatatcttcctatcattagttgaggcattaatgttgaacaacataataaatgcagaatttccatagagagttcaaagagcactgaaactttagcatactgggtaagcctgttgttacaggtaccagtgcagacagaaagctcccaataataaaatgaccaggagtaaattagaaatatgaaagacaaaagagatatgttatagggatgawaagaatacctaaattacaaaaaaaaaacctttagaacagatttaaaaataagctacactgaatgtcctaaacatcctgaataacatttttccaagcatacaaaaagaaaaaacaagacatttacatggataaacatttatataagtaaatgactgatctcagatttctttacaatactgggctgaaaacgctaatgattaaatatctgcaggatttaaagcactctgttcatttatggaagaagcagaaaagtatttacaaatgtaaaaggactcagaaaggatgtacagaaacactaccaccaccatttacctcctccct

SEQ ID NO: 783426 - DNA, 557 bp, Homo sapiens
aggtgttggttcaaaaaaaaaaaaaagcattctggagtaattgacagcactaaacattttgcttttcagtgaaatttaagagttggtggttggaagctattcatatacacagcatcagcaggaaatccccaactctggatttttaagcatgaggctatttttattttttcattcctatttaagactatttcagaatacgaattatagactcctggttctcactttggagtaatttataatcttagaagattataaatatatagattttctaaaaggtctatccaacattgtattatttaaagtattgattatttaatatgaggtttattagtctttggttttttccctgctaaaattatttcatttatttattcgctytctcccttaagcaacttgtgtttattaactgctgaatctactagaatgtcttcctataagtattaagagtcctagtaaaaataacaacaaaattcataaacatgcacaaaatgctcaaatcataaggtaaagcacaaacaaaataagttaagccacagaaaggcagaagatatttgcaa

SEQ ID NO: 783427 - DNA, 615 bp, Homo sapiens
caaaagtgtggaaagatttaagtacgaggatatttattgcaacattaattataacagaaagagtgaaaactctcctgtcttcattaatgggataaattatgatctatccatgtaataaaatactatgtagctatttaaaaagtggaggcagactgatgcacgtggatatgaaacagtctcctagatacattgcctaattaaaaacaaaaagtaaggtggaaaataaaaggaggtggtagaaacgagaagtcagggagaaacctaatttttgaactcttagaaatgtttgactgtgggtatatactacctttcaaaarcattattattattattatttaaaataacaagccaggcatggtggtgtgcacctgtagtcccagctacttgggaggctgaggtggaaagatacagcgagcccagtttgggtccagcctgggcaacgtagcaagactctgtctctaaaaacaaataaacaagcaaaattatgatatattttgccaaatttccctctagatacatacgtatcctcaaaccaccatttttattctgtggcactcctcattccaaaggccctgtggcttctcactcccaacaaggtcctaagttcaaactctt

SEQ ID NO: 783428 - DNA, 614 bp, Homo sapiens
gaaatcagaaaggaacatagaatagtacatcatccatgggatattatatcatattatgagactttagaaaacatttagttctgcttcaggtgacatatctcattagagacagaattattttaagaatttagatttagattctcacctaactctttcttctgtaagtcacatttcatcattttagtctttcttcaactctttgaatgaatgaagttttcctgcagtcacttctgtttcctaccagtttgttattaagtttcttgctttctgattgattgcttctgttccttatatttctaaacccagactgtcagataaggtctgcaatgcccaaacaccaagccacaaaatcttagtttgtttgaattcctctaagatcaatctrtcttcaaggagattggcattcaaatgttcagaatggacttgtggggaaagagtgaagagcacatctcatctaaacaaatttgaaaaaaagagatggactttcttgagcctggtgcttatgaatgtgtgtcctcttctcccctatgaaaatttcgtttgaatatcattttaaaataagcgtagaaactattttccaaggccctttccacatacaggtgggtcagtattaa

SEQ ID NO: 783429 - DNA, 614 bp, Homo sapiens
gaaatcagaaaggaacatagaatagtacatcatccatgggatattatatcatattatgagactttagaaaacatttagttctgcttcaggtgacatatctcattagagacagaattattttaagaatttagatttagattctcacctaactctttcttctgtaagtcacatttcatcattttagtctttcttcaactctttgaatgaatgaagttttcctgcagtcacttctgtttcctaccagtttgttattaagtttcttgctttctgattgattgcttctgttccttatatttctaaacccagactgtcagataaggtctgcaatgcccaaacaccaagccacaaaatcttagtttgtttgaattcctctaagatcaatctatcttcaaggagattggcattcaaatgttcagaatggacwtgtggggaaagagtgaagagcacatctcatctaaacaaatttgaaaaaaagagatggactttcttgagcctggtgcttatgaatgtgtgtcctcttctcccctatgaaaatttcgtttgaatatcattttaaaataagcgtagaaactattttccaaggccctttccacatacaggtgggtcagtattaa

SEQ ID NO: 783430 - DNA, 644 bp, Homo sapiens
acacatgcacaggctctcccactacaaaaattccacatccaagtggtacatttgttatactagatgaacctatactgatatatcattatcacccaaagtccattgtttacattagggttcactcttagtgttttatattttatgagttttgaccaatgtataatggcttacgttccccattatagtattatacagagtagtttcactgagctaaagatcttctctgctctatgaaatgatccctgcctcctccacccagctcctggctgattctttcactgtctccatagttttgacttttgcaggatttcatgcagttggaattatacaatatatagcctttttaggctggcttctttcacttagtaatatgcatttatgtttcctccatgtctttttatggcttcgtagttcacttctagttagtgytgaatcatattctattgtctgaatgtaccaaggtttgtttatccattcatttgcagaaggacatgttggttgcttccaatttttggcaattatatgaataaataaaactgctataaatattcatgtgcaagtatttgggcagatatagtttttaactcatttggatgaataccaaggagtgcaattgctggatcatatgataagggtatgtttag

SEQ ID NO: 783431 - DNA, 615 bp, Homo sapiens
aaaacatttttaagccacatattgaacaaaggactagtatctagaatatataaagaattcaaaatctcaatataaaagcaaaaattcctactaaaacataggcaaaatatataaggggacatttcaccaaagaagataaacttttcatatgcaaataaataaaaagatgttcataatcatgaaccatcagagaaatgcaaactaaaaccacaattagttgtcactaaacaccaattaaattagctaaaattttaaatagcaataatataaaatgcaggatgactcaacattgctgattggaatgtggaataggacagccactctggaaaatagtttggcagtttcttatagtaccaaacatgtaactatcatataacacatmaattgtatccctaggcatttataccagagagataaaaatgcataaacaaaaacctgtactcaaatatttatagaagtttttttcatagtaacccaaatgggaagcaatccagatgtgtgaatggttaaactgtaatacatccttatcatgaaatatccctcagcaatcaaaaacatacatattatccatatatgcaactgcctggatgaatctacagaaaattatgcagactt

SEQ ID NO: 783432 - DNA, 591 bp, Homo sapiens
tggaaagaaaaacacttgtgatattgcataatcttaaaattttaagtttatagccctaatcttggtagcaagtctttaatttttttccacagaaaaaaatgagtaggaattctaagtatactgataaatacaatcaaatagtaatttatctctagtactaagaaaccttgagtgctttaaaactggaatttcaggctttttgcctttctcttgtcaactgatttgtgaatctttcacttacttctgtctaaactacatgttgtatatttgaactgccatactgcactttcagctaactgtgtcttttaaatagaatcatacactgattctaggaacatgtgctgaatgaagtcggtcccactattctagctgttgacaaataggcaagatataggtagtgagtgtttctagtatgtctatgacaccttatatgtttcaaatatatattgstgatacatttattttcagtagattgaaacatttgtcaccttaaccatttaaaaaatatttggaagggtttttgaaacagtattttctttgacattgctttagtgataccacagctttttacaaaactgattgctaagagtt

SEQ ID NO: 783433 - DNA, 653 bp, Homo sapiens
gtcacaggggatccagtggcagtgaaatgcagaggttaagccattgggttccagctgcatggctggcagagggtaaggtgaacccagaagtgccgtgaccacgccgtgcccttcctgagcaggccaggatgggttgcaatgcacttcctacaagcacagtgctgcagaaacatcttgggaaggaggcatcccaccccgctggggcatgggcttccgtggcctcccatgcaggttgtgtgttcttaagcatgtctggacccgtgtctgcgttgtktgcacctgcactcccaggatctctccatcacccgctgtgccccactcctctctttctctttctctttctttcccctggaccagaaagaacaaccaatcttctcctctaaccacagtgacctcttggctccatcctttctcccttagtgcgataatgacattttctcattgtaatttaattttggggttgggtgggggaatgatctttctttttccccgtcttctctcccctctccccgactgaggcacagaaatagtcccagctgtgagatgaaggttgcagagtttaaaattgcaacttggtactatttatactccagcctgaaagatgtttttttgtgcagtcgtttattttgttgtggtggagatggctcatgctg

SEQ ID NO: 783434 - DNA, 611 bp, Homo sapiens
catccatacccacaccataggggaatgttagagccagggctaaaacccacttcttctgattcctgtgctaacaagttttctctaatgcaagaatcatttcctaagaggtaaccccaggatcctagtataggtgctaagtggtggaggaatctttctgcacaaaccttgtcattgcaaactccaaactctacgggtcagaagagtcctgctcacttcacgttgtaccccttagatgccatctggcccagccacctcataggagaccagagaggtgaaagggcttgcccaatctccaatccaagttgacagcagagctggacaaaaatctacatctactgacagctcagaccttgtccaccctgccaggatctcttccaattaaaaggaactactgttaacttaaaaccacagagatrtaccatttttctcccacggaactagcaacaatgaaaaattctgacaatatcaagtgttggagaagaggtggagaaaactgtattctcctctactgctggtgggaatggaaatcacaagggcaaacttgcagagcattcagcaatacctagtaaaatgggaagtgcatatatacaatgtaacaattccactccagc

SEQ ID NO: 783435 - DNA, 630 bp, Homo sapiens
agcattggccagatcatgtggacagaaaatcaacaaagaaacatctaatttaaactgtaacacaggccaggcatggtggctcatgcctgtaatcccagcactttgggaggctgaggcaggcggatcacttgaggtcaggagtttgagaccagccgggccaacatggtaaaaccctatctctactaaaaatacaaaaatcagccaggtgtggtggcatacacctgtagtcccwgctacttgggaggctgaggtgggagaatcgcttgaaactgggaggcggaggttgcagtgaactgaggttgtgccactgcactccagcctaggtgacagagcgagactctgcctcaaaaataaaaataaacaaaaaataaataaactgcatcatagaccaaatggacttaacagacattttacccaacatatgcagaatacacattctgtttatcagcacatgaaacattctccatgactgaccatacattaggacataaaacaagtctcaaaaaaaactttttagctgaaattctactaagcattttatctgaccacaatgaaataaaactggatatcaataacgagaggaacatttaaaaccatacaaatgaatggaagtcaaacaacatgctcccg

SEQ ID NO: 783436 - DNA, 605 bp, Homo sapiens
tctgtagtcacagttggctaccttctatgacaaacagtccaaattcccaatggtttaacacaataaagtcctatttcttattcacttcatagtccaatgggactggttcttgttggcagtcttcttccacatgctccatcagggacccaggcttttgttccactctcctctgtccgcagagaactatctattcaactggcatgtgaggagaaagagaaagctaagatcagtcaggggaattttctggaccattccmagaagtcaagtaaatgcactacattcatatttcactggcctcactcagtcacatgaccatatcccagccctttgggagactgagacaggaagattgcttgatcccaggaagtcaaggctgcagtgagctatgatcacactactgcacacctgcctgggtgacagagcaagagcctgtctcaaaacaaaacaaaacaaaaaaaggtaccaaacaggaatggaaaaggaaagaaataccctggcctatgtctcctcctgctctcacatcatctaccagtgcctagatacaagggagactgggaaacataatccactatatgcccaggataaacagggaaaggatttggtca

SEQ ID NO: 783437 - DNA, 605 bp, Homo sapiens
tctgtagtcacagttggctaccttctatgacaaacagtccaaattcccaatggtttaacacaataaagtcctatttcttattcacttcatagtccaatgggactggttcttgttggcagtcttcttccacatgctccatcagggacccaggcttttgttccactctcctctgtccgcagagaactatctattcaactggcatgtgaggagaaagagaaagctaagatcagtcaggggaattttctggaccattccaagaagtcaagtaaatgcactacattmatatttcactggcctcactcagtcacatgaccatatcccagccctttgggagactgagacaggaagattgcttgatcccaggaagtcaaggctgcagtgagctatgatcacactactgcacacctgcctgggtgacagagcaagagcctgtctcaaaacaaaacaaaacaaaaaaaggtaccaaacaggaatggaaaaggaaagaaataccctggcctatgtctcctcctgctctcacatcatctaccagtgcctagatacaagggagactgggaaacataatccactatatgcccaggataaacagggaaaggatttggtca

SEQ ID NO: 783438 - DNA, 625 bp, Homo sapiens
attaatacatttgccctttgctgctaattgaaaatgagggtcttttgtagaacatacctactgtgtacccacaaaaataaaaataaaataaaaaataaaactgtgataatatttagtacttgaaggaaagtcacaaggctcatctgtagttgcaccattttttcttgtggaaaatgacagcagacagaatgaatttgggaaattattttgtggagggaaatgaggccatgggaccctgtgggtggaatgaacagtactgctaaacagcttttgttgaatcagaaactgagcgaagaatttaccaagctgccctgaaacttggtatcattatgagtgagtctaccgacgcagctcttttttttccccttaaaaaatcaggtgtaatttacattcagtgaaaggcayagatctaaattttatagccctatgacacatatataaatatgtataacccacaccccaaccaagatagaacatttctatcactctaaaatgatccttatgtctctttccagtcatttgctaccacccccaatgtaaccactgatctgacttttgtcatctttagttagtatagcctcttctagaaagtacatactgctgtgcttattagtatatgcctctg

SEQ ID NO: 783439 - DNA, 604 bp, Homo sapiens
gatacaagcatacaatgtgtaatatcaaatcagggtaactgggatatccgtcacatcaagcatttattatttctttacattaggaacattccaatttcactcttctagtaatttgaaatatacaataaattattgttaaatgtagtcaccctattgtgctactgagcattagatcttattccttctaactatctaatttgtttatccattcatctgttgatgtgcatttgagttgattctaacttttgyctattagaaatgatgctactatggacatttatgtatgaactttcatatatatccctctacttcccttgggtgtacatctaggagtgtaatgggtgggtcatatggtaggtacatgtttaactctataggagactatcaacctgttttctgtctgagagttccaattgttccaacactttatagtaagtctttttaaaatttttgctaatctgataggagtggtgatatctcattgtggttttatttcacatttccccaatgactaatgatgttgaacatcatttttatatgttacttgccatttgtacatcttctctggtgatattgtctcttcaaattttgtgttgattttaaa

SEQ ID NO: 783440 - DNA, 456 bp, Homo sapiens
acggaaacctcaaagcaggtaagtgactggtcacaaaaatcacaggtaataaagccaggaatcaaacattatcgcagcatgctagaaagcctatctgcttttgatttctcagtcacattattttttagtaattcttaaaaaaaaaaaaaaaaagccttggccaggtgcggtggctcacgccagcactttgggaggccgaggyaggtggatcacctcaggtcaggagtttgagaccaggctggccaacatggcaaagcccggtctctactaaaaatacaaaaattatctgggcgtggtggcacatgcctgtagtcctagctatttgggaggctgaggcaggagaatcgcttgaacccaagagatggaggttgcagtgagccaagatcgcgccactgcactccaacctgggtgacagagagaaactctgtctcagaaaaaaaaaaaaaagcttgtgtg

SEQ ID NO: 783441 - DNA, 456 bp, Homo sapiens
acggaaacctcaaagcaggtaagtgactggtcacaaaaatcacaggtaataaagccaggaatcaaacattatcgcagcatgctagaaagcctatctgcttttgatttctcagtcacattattttttagtaattcttaaaaaaaaaaaaaaaaagccttggccaggtgcggtggctcacgccagcactttgggaggccgaggcaggtggatcacctcaggtcaggagtttgagaccaggctggccaacatggcaaarcccggtctctactaaaaatacaaaaattatctgggcgtggtggcacatgcctgtagtcctagctatttgggaggctgaggcaggagaatcgcttgaacccaagagatggaggttgcagtgagccaagatcgcgccactgcactccaacctgggtgacagagagaaactctgtctcagaaaaaaaaaaaaaagcttgtgtg

SEQ ID NO: 783442 - DNA, 456 bp, Homo sapiens
acggaaacctcaaagcaggtaagtgactggtcacaaaaatcacaggtaataaagccaggaatcaaacattatcgcagcatgctagaaagcctatctgcttttgatttctcagtcacattattttttagtaattcttaaaaaaaaaaaaaaaaagccttggccaggtgcggtggctcacgccagcactttgggaggccgaggcaggtggatcacctcaggtcaggagtttgagaccaggctggccaacatggcaaagcccggtctctactaaaaatacaaaaattatctgggcgtggtggcacrtgcctgtagtcctagctatttgggaggctgaggcaggagaatcgcttgaacccaagagatggaggttgcagtgagccaagatcgcgccactgcactccaacctgggtgacagagagaaactctgtctcagaaaaaaaaaaaaaagcttgtgtg

SEQ ID NO: 783443 - DNA, 569 bp, Homo sapiens
ctcccaaagtgctgggattatagctgtgagccactgcacccagccatcagcttttatttcatatgcatgcatagcatcctacaacaataactttaaaaaaaataagtcatcaccattttctatgattgcaacctatatagagaaatagcctggtgttatcctacaagacaatttccttaaaatgtgtgagtaatggctattaaatcattttatggagccatttctaaaayaatactctttgtcactgttaccataattacttttagttgtggccatattttaaagaacagaatgctttatcgtgactgttataaatacaaattatttttccccttgtgggaatcatcaggctaatttgtttaccattttccttctaaaacagatcattattaaaaggaaatcagtacaatgattgtgattaagatcaacagctctcttaattctttgttctgttgaatatcaagttttttctgccttcctacctctgtctttccgtaagacaaatccttttgctggcaaggggtatatgtgtgcatgcaactcctgacttatatctccactcttacacg

SEQ ID NO: 783444 - DNA, 512 bp, Homo sapiens
ctttagcaaggatgggcccttcattcatctttctgacctccatagcaggttacctgaatgagtgagcacaggatataagacctttaccttaaacagtaacatcttttgattgaatttttagttgaatgtcaagaacttcccccctttaatcactggatgttgtcagaacttattyttcagaaagttaggtttatctttgtgggttctatttgattgatttgtgcattggctggccaaaatacatatccctcaacttggaagttacgaaagctgtattcatttgccaagcattcatttccatacttgggaaagttgtcctctaagacagagtacctgaaactacaaatcttacccagccctcaaggccaaaattgttcacaagaattcccaacatcgtctgtttcatcctgcaagtggaagtgtgtgagtggtcttcgtgtaatattgatgttgaaaaggaaaagttgtttggtaatactaaaagtttatttattccaaagggcctacttttt

SEQ ID NO: 783445 - DNA, 560 bp, Homo sapiens
cagatgaaacccattaattccatccactctaaaatgacagcttaatcacagaaacctgggaagggctccaggagacacttttcctgggaattatccagaatttgtcccgcaagtgattgaccatagtccgtaccaaaygatttgacttaattaatctcaaagatatatttccacaaaattaacattaagagttgttggtctactttcctttaaaaagagaaatccatgatttctacctagcagccaagagttcattccttctgaattctttgtaaactgtatcaaaacacttctaataaattcaagttggtaggaacttttttatatacatatattaaagtttgtatatgtaacacatataaaagggtcagcagagctatgttcttttaccctttgatagcctgctgagtaacctgctgttattatgcattaaatacaaacttgttacagacagcagaaagcagcatcttcactcttttcattcattgatttattcattcattcaaatttgttttattttagcataacatttaggtagttctttactttcaggactttgc

SEQ ID NO: 783446 - DNA, 560 bp, Homo sapiens
cagatgaaacccattaattccatccactctaaaatgacagcttaatcacagaaacctgggaagggctccaggagacacttttcctgggaattatccagaatttgtcccgcaagtgattgaccatagtccgtaccaaacgatttgacttaattaatctcaaagatatatttccacaaaattaacattaagagttgttggtctactttcctttaaaaagagaaatccatgatttctacctagcagccaagagttcattccttctgaattctttgtaaactgtatcaaaacacttctaataaattcaagttggtaggaacttttttatatacatatattaaagtttrtatatgtaacacatataaaagggtcagcagagctatgttcttttaccctttgatagcctgctgagtaacctgctgttattatgcattaaatacaaacttgttacagacagcagaaagcagcatcttcactcttttcattcattgatttattcattcattcaaatttgttttattttagcataacatttaggtagttctttactttcaggactttgc

SEQ ID NO: 783447 - DNA, 619 bp, Homo sapiens
aatgataaacttatcttgatggtttaaagtgaatacttgttcatttattcctcctacaatactgtgtcttattaattgactacttctaacctcaccattttcaatatccttctaccaacctgtgtttgtccattttcacactgctataaagaactacctgaaactgagcaatttataaagaaaagaggtttaattgactcacagttctgcatggctgaggaggcctcatgaaacttacaattatggtggaaagtgaaggggaagcaaagcacacctcacatgaagggagaagagagagagtgaggggggaactgccacacacttattaaaccatcagatcttgtgagaactcactatcatgagaacagcatgagagaaaccactcccataatccaatcaccctccccaaatatgtgaggattacaattcaacatgagatttgggtgaggacatagaaccaaaccatatcayaacccattaagtgaaagggaaatcatatttctactcttgcttctattccattttgcttataattcaacatttgctgaagagcatttgtggctctttaaagtattctcttatgtctttgttatttgcatatcaaaattccttatggatt

SEQ ID NO: 783448 - DNA, 533 bp, Homo sapiens
tgacagcaatgccaattatcttccttttttttaaacattctcttaggcgaatgcctaagacaatggaaaattattttgcagtgagacccaagccaatccagacacaagctgctctcattacaaccatctcttctcatctcttgaggatgagctcactaataagagtacattatctcttattgggacaggcttaaatamatgcaagaacttcattaagtcattctctatcagaataggagctattgagaatttctgcagaactaggattgtgtcttctctacctatgaaatgagtggtgtcatgacaaagcactctagggagccctgccaacctatttgataatgttgatggacaagattgtatggggagtggggagaaaaaacaccttttatattcttccctgatgtatgtataagtagttctttaggaagagatgaaatgcgtggctttgtcctgaatagattcccttaggggacacccagggaattcctaggcccagtggaattaatgttctagaaagagaatcatgcttc

SEQ ID NO: 783449 - DNA, 533 bp, Homo sapiens
tgacagcaatgccaattatcttccttttttttaaacattctcttaggcgaatgcctaagacaatggaaaattattttgcagtgagacccaagccaatccagacacaagctgctctcattacaaccatctcttctcatctcttgaggatgagctcactaataagagtacattatctcttattgggacaggcttaaatacatgcaagaacttcattaagtcattctctatcagaataggagctattgagaatttctgcagaactaggattgtgtcttctctacmtatgaaatgagtggtgtcatgacaaagcactctagggagccctgccaacctatttgataatgttgatggacaagattgtatggggagtggggagaaaaaacaccttttatattcttccctgatgtatgtataagtagttctttaggaagagatgaaatgcgtggctttgtcctgaatagattcccttaggggacacccagggaattcctaggcccagtggaattaatgttctagaaagagaatcatgcttc

SEQ ID NO: 783450 - DNA, 533 bp, Homo sapiens
tgacagcaatgccaattatcttccttttttttaaacattctcttaggcgaatgcctaagacaatggaaaattattttgcagtgagacccaagccaatccagacacaagctgctctcattacaaccatctcttctcatctcttgaggatgagctcactaataagagtacattatctcttattgggacaggcttaaatacatgcaagaacttcattaagtcattctctatcagaataggagctattgagaatttctgcagaactaggattgtgtcttctctacctatgaawtgagtggtgtcatgacaaagcactctagggagccctgccaacctatttgataatgttgatggacaagattgtatggggagtggggagaaaaaacaccttttatattcttccctgatgtatgtataagtagttctttaggaagagatgaaatgcgtggctttgtcctgaatagattcccttaggggacacccagggaattcctaggcccagtggaattaatgttctagaaagagaatcatgcttc

SEQ ID NO: 783451 - DNA, 533 bp, Homo sapiens
tgacagcaatgccaattatcttccttttttttaaacattctcttaggcgaatgcctaagacaatggaaaattattttgcagtgagacccaagccaatccagacacaagctgctctcattacaaccatctcttctcatctcttgaggatgagctcactaataagagtacattatctcttattgggacaggcttaaatacatgcaagaacttcattaagtcattctctatcagaataggagctattgagaatttctgcagaactaggattgtgtcttctctacctatgaaatgagtggtgtcatgacraagcactctagggagccctgccaacctatttgataatgttgatggacaagattgtatggggagtggggagaaaaaacaccttttatattcttccctgatgtatgtataagtagttctttaggaagagatgaaatgcgtggctttgtcctgaatagattcccttaggggacacccagggaattcctaggcccagtggaattaatgttctagaaagagaatcatgcttc

SEQ ID NO: 783452 - DNA, 530 bp, Homo sapiens
aggggttgtcagcctttaggcagagcagcattcatttgccttttctgacagtttcagtttcctgggggtgatgaactctcctccactctgtgcagtcttggtgggatggcacacccaattgcttgcacaggcatgctaatagttaatggcaagtttgaagacttcttttgctagacccttccttttgctatcctggtgcatccacgtgcatagctcatgttctgatgttggtgcagaggttgcttcattctcagactttgaaacttgagttgagagatgcaaggaggaaagaaactgctgcagctgaattccttgagtgttgtakccctgggaggctgtggagatgctcctggagaaggcactctgattccctgggtctcacctctttcaaacccagttcttcaactttcttcatcctgggagctggaccacaccctgacaatacattttcctttaaaaagctagccagagttgccacctgttatttgccaccagacaattaaaaagatctggttgaatcctccaaaata

SEQ ID NO: 783453 - DNA, 284 bp, Homo sapiens
gaaactgctgcagctgaattccttgagtgttgtagccctgggaggctgtggagatgctcctggagaaggcactctgattccctgggtctcacctctttcaaacccagttcttcaactttcttcatcctgggagctgraccacaccctgacaatacattttcctttaaaaagctagccagagttgccacctgttatttgccaccagacaattaaaaagatctggttgaatcctccaaaataatgagaagacccttaagtggctcccaactcaaagaaaaggatcc

SEQ ID NO: 783454 - DNA, 591 bp, Homo sapiens
acctcaactcttgcctcttcagaagaaagaattcgactggtggacagaaggcagaaaaagagaccaaggcaagttttagggtaggaatgaaaatttattaaaaagctttacagcaggaatgaaaagaaagtaaagcacaattagatgagggccacatgggcaccttggagggcaagcgcggggtttgaccttttgacttggggttttatatgttggcacacttccagggtcttgtgtcccttctcccctgattcttcccttggggtgggttgtctgcatgtgcagtgcttgctagcacttgggaggggagcawgcacagtgtgtttcccggagttgtatgaatgcttaccaaagatgttcttcccttaccagctgtatttccttaggaggtcatataccagttacactctgccattttgcctcttaatgtgcatgtgtgagcccactcacccaactcctgagttcttatcaggaagctgctgatcaccagattcaggggtttttttatctacagggagactgcctttccctggcactggctgcaaccagttattactttagagacagtaaacaactgcctgaccatcacct

SEQ ID NO: 783455 - DNA, 562 bp, Homo sapiens
tttttaattttaattttttttttgagatggagtcttgctctgtcactcaggttgaagtgcagtggctcaatctactgaaacctctaccttctgggttcaagcaattctcgtgcttcagcctcccaagtagcaagacaataggtacacaccaccasatgcagctaatttttgtatttgtgctaaagatggagttttactgcattggccaggctggtcttgaactcttcacctcaggtgattcacctgcctcggcctcctgaagtgctgggattacaggcatgagccaccacacccagctcagactgctttttaaagtgggttcccaattctgttcctcctcactgggtgggacctcccaactagggtccctagccacccctgccagtgctctcagccaactgagatttgaaatctccctggacagagctcccagaggggtgggggatgggccattatctttgctgtttcagtgacttagctattccagccttcagactttggagagtccaaggcaatcataggctaaagtggacccccgagcacagctcctttgtgaaaatgt

SEQ ID NO: 783456 - DNA, 630 bp, Homo sapiens
cctccgtgctgagcaccataacttttttgctcatacatttgacagatacttggggagcatcttccctgcctgtctgttgccatgccttgctctgggtgctgagatacaacagtgaagagtcccctgtggttgggttgccgctagggcttgggtrttgtgagaggtcagacaggtttgtctcctgtcacgtccaggccttggaggttcttttagcctggtggtgacaccaatgtgcactgcatgttcctgttggtgtcctaatttcgggcacagctttccaacagggacaggcctcctcctcccagcttcctactatgatgctatcagctcacatttcctcagcatgcttgcttgtcacatccaggaaagtgttggtttccatagtaacagtgatcatatatgcagaagatttggctttctgacttattagtgactctttttccttcatgtgatctattcctacagtcccagggaaatttagctgcaatacctaagaaaatttactaacatgttaacaaaaattatctgggttagtagtgattcctttttgcatttatctgtatttttttcaaattttatgcactgatgatttatctcttctgtcattagaaaaaaattaaacttgtcagg

SEQ ID NO: 783457 - DNA, 630 bp, Homo sapiens
cctccgtgctgagcaccataacttttttgctcatacatttgacagatacttggggagcatcttccctgcctgtctgttgccatgccttgctctgggtgctgagatacaacagtgaagagtcccctgtggttgggttgccgctagggcttgggtattgtgagaggtcagacaggtttgtctsctgtcacgtccaggccttggaggttcttttagcctggtggtgacaccaatgtgcactgcatgttcctgttggtgtcctaatttcgggcacagctttccaacagggacaggcctcctcctcccagcttcctactatgatgctatcagctcacatttcctcagcatgcttgcttgtcacatccaggaaagtgttggtttccatagtaacagtgatcatatatgcagaagatttggctttctgacttattagtgactctttttccttcatgtgatctattcctacagtcccagggaaatttagctgcaatacctaagaaaatttactaacatgttaacaaaaattatctgggttagtagtgattcctttttgcatttatctgtatttttttcaaattttatgcactgatgatttatctcttctgtcattagaaaaaaattaaacttgtcagg

SEQ ID NO: 783458 - DNA, 598 bp, Homo sapiens
ccaagctggcttgagaatcagcctcacaaactctccagccacggctggtcatctgccatcagcatttggtgagggacctctgtgtgccagacactgctgagagccaggtggatttgacagtcggtccatgatgggcaaaagatgcccgtagagaagtgaacatggtgccttaagcatgagggggctcaatgaccagaccatgaaggatatgaggaaggcttctcagaaggaacgtcttgtgagccaggcctgggaggcttattttcagacagaagatacagaaaaggggcatgtcagacttaccccygcctccccctccacctttttttttttttttagtacagaagaaaaatatgctcctgggagctgttgtcacctttccttggttatcagaatcatacctggttttgaagaggtatacttcataaacgatcatctccaaagtgagctgacacatttatctttgcaactgaatatgtaaatgagttaccccctttttgatgttgttaccttcatgaatgccagaaagcaaatgtcttctgtttcttcggtaacttgaattcattttcagctttgatttgttgctatgatagtgtgt

SEQ ID NO: 783459 - DNA, 651 bp, Homo sapiens
attatgctctgttaattccttatccttatgaaataaacttctttatccctggaaatacttattactctaaaatgtattttgtctgatattaacatagctattctagctttcttttaactgttagcatggtatgtattttccwaacgtctactttctaaccaattgtgtctctaaagtgagtttcttgtagttagcaaataatttggttttactttctcatataagcttgataatctccaccttttcgttgaggtgcttataccactgggtctcaatggggagaagggaagatcttgccctctaagggcacctggcaatgtctgggtgatctttttggtggtagtaactgggtatgtaggcatgctgctggcatctagggtgtaacagccagggatgccaagatcctacatgcatgcgacagcccccataacaaagaattctctgatacaaaggtaaatagtgctcaggttgtgaaatcttgtgtttttatttttacatttactgtgattattgatatggttaggcttgagcctaaatcaaatagatttctatttgtcatatctgttcttcccccttttctcctttattctgctttattatccttaccctattttggattgattttttttttttaggattctattttatcac

SEQ ID NO: 783460 - DNA, 584 bp, Homo sapiens
  misc_feature 236, 261, 267, 271: n = A,T,C or G
gctctccatcccattcagcgctgacactgtccctgcaggtccgtccaccccacctcccgactcccctgggcctgttggtcactggggcctccagcccacctcctccgcttctgagccccaggaccccctgcctgccccccgacccccaacacagggccactccrgggctcctcctgcccccaccctgcctgggaccagcctggtttggggctgactctgcactgcggggccatatncatctggactccttccgggctgcancccccngggnacaggcaggggtggcccagaccgctcctgctcatgaccctgcttctcctccattctctggacaaactccccagaggcctccacctgccccgtcctggttccatgaatgaggcccacaagatgggaccttcaggagcccaggaggtgaggggatggggtgacgggggacaccagggatgagggtgtggcagggacacgggagacaccagggctgacggtgaagaagagactcaggggacaccagggctgggagaacccagggacacacggggacaccggggctgtggtgtgcagagggctctgggacccccgag

SEQ ID NO: 783461 - DNA, 590 bp, Homo sapiens
cgcctctggaaactgccggctactacgcagatagctgtgaattagccaaatagccgcccggaccctgtacccgcaccagggcacagcccatcactaatcaatggtatttccataaaccaaagagaattcttgacarctttacatcagcccccaccctgtccccaccttctgggtcatttatttatttattttgagacagggtctccttctgtcgcccaggctggagtgcggtggtgcggtcacagctcagtgcagccttgacctcctggactcaagccatcctcccgcctcagcctctggagtaacagggaccacaggcctgcaccaccacacccggctaatttttgctgtggagctcacagtgtgttgcccaggctgttctcaaacttctgacctcaagtgatccttccacgttagcctctagagtaaactctttatattttgtgcctcatcctcttccttttaaaaggtcgatatttttattattgagacggagtctcactctgtcgcccaggttggagtgcagtggcccaatctcggctcactgcctcccgggttcatgcctcagcctcccgagtagccgggactac

SEQ ID NO: 783462 - DNA, 627 bp, Homo sapiens
gccggggtctctcccagtgccatgtcaggctgagcagatcccttcgtggccgagggctcgggatcagaaagctcctactgctggctccccctccagtgaatcccccacccacaagggacagggccaccgggacaaytccccgtgagtgcgtaattttatgattcagaggatactgcttccaaataacggctcttgcagaattatgttccaagagtcaggtacagcaataatggtctctttgtgtcctttgctgctctgaagtctaactccggaggtggagcactgggggccgcagagccggggacctggcagcctgtggagcccctcgctgggctctgggcatgggagtggccttggaggaaccctgaggctcctctgaagctaagaagctacaaagacagggaggctgaggcaggaggatcgcttgagcacgggtcgaggctgcagtgagctgtgatcacagcaccacttcgatccagctcgggcaacagagcaagaccccatctcgaaaacaaaaaatcaaacaggcatttgggaaccacacgtgctggggacccagggcctgtgttggagatggaccggagcccgacagccgccctctccctgtcccaccatcggtggctcctc

SEQ ID NO: 783463 - DNA, 627 bp, Homo sapiens
gccggggtctctcccagtgccatgtcaggctgagcagatcccttcgtggccgagggctcgggatcagaaagctcctactgctggctccccctccagtgaatcccccacccacaagggacagggccaccgggacaattccccgtgagtgcgtaattttatgattcagaggatactgcttccaaataacggctcttgcagaattatgttccaagagtcaggtacagcaataatggtctmtttgtgtcctttgctgctctgaagtctaactccggaggtggagcactgggggccgcagagccggggacctggcagcctgtggagcccctcgctgggctctgggcatgggagtggccttggaggaaccctgaggctcctctgaagctaagaagctacaaagacagggaggctgaggcaggaggatcgcttgagcacgggtcgaggctgcagtgagctgtgatcacagcaccacttcgatccagctcgggcaacagagcaagaccccatctcgaaaacaaaaaatcaaacaggcatttgggaaccacacgtgctggggacccagggcctgtgttggagatggaccggagcccgacagccgccctctccctgtcccaccatcggtggctcctc

SEQ ID NO: 783464 - DNA, 627 bp, Homo sapiens
gccggggtctctcccagtgccatgtcaggctgagcagatcccttcgtggccgagggctcgggatcagaaagctcctactgctggctccccctccagtgaatcccccacccacaagggacagggccaccgggacaattccccgtgagtgcgtaattttatgattcagaggatactgcttccaaataacggctcttgcagaattatgttccaagagtcaggtacagcaataatggtctctttgtgtcctttgctgctctgaagtctaactccggaggtggagcactgggggccgcagagccggggacctggcagcctgtggagcccctcgctgggctctgggcatgggagtggccttggaggaaccctgaggctcctctgaagctaagaagctacaaagacagggaggctgaggcaggaggatcrcttgagcacgggtcgaggctgcagtgagctgtgatcacagcaccacttcgatccagctcgggcaacagagcaagaccccatctcgaaaacaaaaaatcaaacaggcatttgggaaccacacgtgctggggacccagggcctgtgttggagatggaccggagcccgacagccgccctctccctgtcccaccatcggtggctcctc

SEQ ID NO: 783465 - DNA, 627 bp, Homo sapiens
gccggggtctctcccagtgccatgtcaggctgagcagatcccttcgtggccgagggctcgggatcagaaagctcctactgctggctccccctccagtgaatcccccacccacaagggacagggccaccgggacaattccccgtgagtgcgtaattttatgattcagaggatactgcttccaaataacggctcttgcagaattatgttccaagagtcaggtacagcaataatggtctctttgtgtcctttgctgctctgaagtctaactccggaggtggagcactgggggccgcagagccggggacctggcagcctgtggagcccctcgctgggctctgggcatgggagtggccttggaggaaccctgaggctcctctgaagctaagaagctacaaagacagggaggctgaggcaggaggatcgcttgagcacrggtcgaggctgcagtgagctgtgatcacagcaccacttcgatccagctcgggcaacagagcaagaccccatctcgaaaacaaaaaatcaaacaggcatttgggaaccacacgtgctggggacccagggcctgtgttggagatggaccggagcccgacagccgccctctccctgtcccaccatcggtggctcctc

SEQ ID NO: 783466 - DNA, 448 bp, Homo sapiens
caggggctggcctggggttcagctgtcacccagctgacacgggatcaccaatggctgccatggctcaggcatccctctcctgccacgctggggacactgtgacacaggctctcaggtcagtgaggacagtgtgggtgtcggagcctggagggaggggagtggcatcggggaggcccccgccgagcctggacggtggggcaggtggaagggtgtgtgcccggccgtgcactttgggtctggtgagcgtggcygaggggcacagctgctcttggtcggggctgcagtgagtgctcagcccacttggccacaggctggccaccagggacttggcgtctgctacccacaggactgaggactccaacagcagtcccagcccaggccccgaaaagttgagcagagaagggcaggaggcccccgtatccctgggacccatccttggcaggctggg

SEQ ID NO: 783467 - DNA, 596 bp, Homo sapiens
ccgtctaaaaaatatctcacaacaagagagagagagggagggaggagcctgcaccggctgaactatttcagcgtcctggggctgctgtagtgcaggcttacaacatcagaaatttattctctcccagttctggacgccamgagtccaaaatcacggtgtgggcagcacgcagcacactccttccggaggccctggggaggatccctccctcttccagctctgggggctccacgcccctgctgcggccgacgctccagtccctgcctctgtcctcacagggcctgctctgtgcatctgtctctattctgctctgctcttcatggaggaacaccagtgactgacttgggactcagcctcaatccagggtgacctcgtccccagatccttaattacatctgcaaagccctactaccagggaaggttgcattctgaggttctgggcggacatgaattttgggggcaggacactgtccagctcagtgccgggcgccgctgtgggccaggccctttgactcttgcaagcccacgatggctacagagctccaaggaggaggcttcctggaggaggcggcccagctcatcagagaaccagcatg

SEQ ID NO: 783468 - DNA, 534 bp, Homo sapiens
cattttcttttccacaaaatgaagaaaatgtcttgcaatatgtctatgggtaagatacgtgttccacacacacacgcacagcacagtcagtggctcctgccacccaccccaaaggctcattttctttgctccctgttttatgagcttgaattccccagggcagctcacctgaaccctgcaccccaaccctagcaagagaaaccccagaatgtgcaaaccaagggcttgtctttcatgagccttcccaggacccccccgcacgcccgccccacgtccctctggttctcacccaacargccgaccatgccccagcctgtgttccagcagttgtcactgtcagtgaactccagggactatgacggcagggcgactgccgcgagagtgtttgttgttctcacactggtggccagcttcagcagggcgatgtctgcccccaggaagaagacagagtagttgggtggacgacgatctggctgacattcagcagcccccggcccccgtacagatacacatccctggtgtgaatccggtagg

SEQ ID NO: 783469 - DNA, 540 bp, Homo sapiens
tgggcggggcagggtgggcttctgcagggggtccacaaatctctgcctcttgagtcaccaaagaggggtgcatccagggtgcactgggggaaaccgaggcccgttcacaccgcagcacccccctcgacctgcctccccagggatttgggtgccatgttcaccctctcagaaggctttggggaccgagcagatggctcggaaatccctgccaagatcaatttctccaattgatttgacaccgggcgctctccctgcagggccggcagccacgaggggcagacagaggcgccagtgccctcactctsgggtgaagacgcccttgacccccagcccattcgacccggccacaagcctcgggccaccctgctccccaccttgtccagcctgaagcccccaggaccccggtccctgtccgtcccaggccccagcctcatggccctgccgagctccccagtctggtcccggccacccacagcccacatctgtgcctttggtcatagcctcgtccccatcaggtgcacaccctccccacaaaccaga

SEQ ID NO: 783470 - DNA, 593 bp, Homo sapiens
ctgaaaagcaaagcgcagacggatccaaatgattgcaagtgacttaactgcctgtgagaacacatctcaaaacgatgtcaaggaatagaacacaacccagcacgcaacaaaacactccagagagtactcacgagatccgggggctagtsaagaacgagcgggtggccgggcacggtggctcacgcctgtcatcccagcactttgggaggccgaggtggcagatcgtgaggtcaggagaacgagaccagcctggcccacatggtgaaaccccgtctctactaaaaatataaaaattagccgggcgtggtggcacgtgcctgtaatcccagctactcgggaggctgaggcaggagaatcgcttgaaccagggagtcagaggatgcagtgagccgagatcgtgccactgcactccagtctggtgacagagcaataccgtgtcttaaaaaaaaaaaaaaaagcaggcatgaaaaaggatgacctcccaataaaaaaaatcaatcatgttcgggcgtggtggttcacgcctgtaatcctagcactttgggaggccgaggcggctggatcacctgaggtcaggagttcaagaccagcct

SEQ ID NO: 783471 - DNA, 593 bp, Homo sapiens
ctgaaaagcaaagcgcagacggatccaaatgattgcaagtgacttaactgcctgtgagaacacatctcaaaacgatgtcaaggaatagaacacaacccagcacgcaacaaaacactccagagagtactcacgagatccgggggctagtcaagaacgagcgggtggccgggcacggtggctcacgcctgtcatcccagcactttgggaggccgaggtggcagatcgtgaggtcaggagaacgagaccagcctggcccacatggtgaaaccccgtctctactaaaaatataaaaattagccgggcrtggtggcacgtgcctgtaatcccagctactcgggaggctgaggcaggagaatcgcttgaaccagggagtcagaggatgcagtgagccgagatcgtgccactgcactccagtctggtgacagagcaataccgtgtcttaaaaaaaaaaaaaaaagcaggcatgaaaaaggatgacctcccaataaaaaaaatcaatcatgttcgggcgtggtggttcacgcctgtaatcctagcactttgggaggccgaggcggctggatcacctgaggtcaggagttcaagaccagcct

SEQ ID NO: 783472 - DNA, 593 bp, Homo sapiens
ctgaaaagcaaagcgcagacggatccaaatgattgcaagtgacttaactgcctgtgagaacacatctcaaaacgatgtcaaggaatagaacacaacccagcacgcaacaaaacactccagagagtactcacgagatccgggggctagtcaagaacgagcgggtggccgggcacggtggctcacgcctgtcatcccagcactttgggaggccgaggtggcagatcgtgaggtcaggagaacgagaccagcctggcccacatggtgaaaccccgtctctactaaaaatataaaaattagccgggcgtggtggcacgtgcctgtaatcccagctactcgggaggctgaggcaggagaatcgcttgaaccagggagtcagaggatgcagtgagccgagatcgtgccactgcactccagtctggygacagagcaataccgtgtcttaaaaaaaaaaaaaaaagcaggcatgaaaaaggatgacctcccaataaaaaaaatcaatcatgttcgggcgtggtggttcacgcctgtaatcctagcactttgggaggccgaggcggctggatcacctgaggtcaggagttcaagaccagcct

SEQ ID NO: 783473 - DNA, 614 bp, Homo sapiens
caccagcatctacaggacgtggacattgagccctacgtcagcaagatgctaggtgaggggccacgccaggtggggtggtggggggctcaaggccagccaccctgaccgctctcccccacaggcactggcaagctgggtttctccttcgtacgcatcacggccctgcttgtcgcgggcagccggctctgggtgggcaccggcaacggagtggtcatctccatccccctgacagagagtgagtggcctgcacccctgcaggggcagtggtgctgccagaggtgtacgtgggttcacggggtggctctgcagggccaccttggagggtgccttgctgcccctacgctgaccgctctcctcttctcccatgctcctcccatgtccccagctgtggtcctgcaccgaggccagctcctggggctccgaggtaagcccagccacctcgtgtcccctcacrggagcctctcccatcctccacctgtatgcgggctcagcgcctctgggttctctccctgcagccaataagacatcccccacctctggggagggcgcccgtcccgggggcatcatccacgtgtatggcgatgacagcagtgacagggcggccagcagcttca

SEQ ID NO: 783474 - DNA, 453 bp, Homo sapiens
gtgtccagccatgacccccagcgaccccagggggctctgctggtcttctgtggctgactgagaggtttgaagactgtgggcatctggggcaggctcaggtctcctgctgctcactgggacaggtcagcccggtgcccgcagagacagggacacagagaaagcgagcatgtcggcccatggctgagcatgrccagcacggagctgcccgcaccctccttctcctcctcgaggccggtgcagcgttctgcaggttgccctgcagttcccacagaggaagtggcaggaagtccagagtgaatcattctaggaataatgatcctgggcccttatctttcttaagaaatacaatttccagaaggaggctgacagactgtgggggcaggtattcctgtgctggaaagtgccctgagcgagtcaggccgggctctctgagcgctattaatagcatggcgt

SEQ ID NO: 783475 - DNA, 561 bp, Homo sapiens
ctttacagaaatagaaaaagaaatcttaacatttatatgaaaccaccacagaagaccccaaatagccaaagcaattctgaacaaaaagaataaagctggaggcatcacactacttgacttcaaaatgtactataaagctatagtaaccaaatcagggtggtactggcataaaaacagamaggccagtggaacagaatagagaacccagacataaatctacacatttacagccaactccatttcagcaaaagtgtcaagaacacactatgaggaaaagacagtctcttcaataaatgtttctgggaaaactagataactgtatgcagaaaaatgaaactagaccccctatctctcaccttaaacaaatatcaaataaaaatatattagacttaaatccacgacctgaaattataaaactactagaagaaaacattgggaaaacattccaggacattggtctgggcaaagactttttgtggaagacctcaaaagctcaagcaaccaaagcaaaaattgacaaatgggattacatcaagctaaaatgcttctgcacagcaaagg

SEQ ID NO: 783476 - DNA, 587 bp, Homo sapiens
tgtaaccattgtttggctcccacttacaagtgagaacacagcatttaatattatcggagggagaaaagatcccatactacacatttgtctcaaataataaatacatctgtggtttttcaaagaataagccctaatttccaaggcagacttcctagtccatagctataccatgagatggaaatttaaatgctacagtgatttggggtgattcacacaggcattctgtataaattaagcaaaaatgaatgtatttatcaataattacagataaactcaccaaaagtacagccaaagccctttggagtatgacataatttagcaataaaatcaggtggtgtacctaagggacagactataacatacataytctttaaatcccagtgacctcttcccaggggttaaatcagaggagtcatatcaaatccaagaaatatcatctttgaatatatttcaaaagcctcaaatgattaaacccaatgaccttttaataaatgtaaaataaatacacaaggatatcagctctaggtctgccttactccttcccttccttccacagccatttgtcaataatcaactaagttactgat

SEQ ID NO: 783477 - DNA, 599 bp, Homo sapiens
ggctttggagtccagtggatccaaattaaaatcccagctcttctactgaatagttctgcaactttttgcaaattactgaacctctctgagcttcagtttcttaatttataacatggaaatacagctcccttacagaattgcagtaagagttaaatgagacatcccttcatttatttgttttcaaatatgcatagtgagaaaaagaaagcagcccctgacatctgggagctgccctgataccactgctaggccctagtgttgctactagctggcccagcactcayagagaggttttggtgttctgttaaacagaaacaacttcacacaacagaggaaactctgtgaccataatggagcaagacaaaaacaagaacactcctctgatcttacataaacagacaaaaatgtgaacattattcaaatctcagaaatgcctaaacattcccctagtctgataatatgagtgactgctacttctttggcaatcatagctttagcctaattctagtcttcactccttatagtcttcactcctcatactcaattattcctactttctgatagcatccaatccagagcagagcctgcttctttaaacc

SEQ ID NO: 783478 - DNA, 482 bp, Homo sapiens
atattctagggtttggttagtgggatcctttccagaccttttcaactctaacagacatttttttacttcttgaggggggctatgactcaggtaaattcttttaaaaaagtcacttgggctcctgttttaaaaggtgaacttatttttagagatgataagaagctgtggaatgggcagctactcacagggagaggagccatgactttaggggtctattgtcccacctgctgttaatttgcagtttgagcttgaacaaagtcactcttacttctcaatatttatacccattgatttaataagcatctcatttgccagctttctggtcccactttgtagtttaattaactgtctcytttagctcttaaaaacttgggtgaacaaaaagattatcataagaaatgcaaactgccacacgagtccctgctgtgacttgggtgccatcagtgtagagctatgtgtgtccacaccagtcgtgaaaggcc

SEQ ID NO: 783479 - DNA, 506 bp, Homo sapiens
gtgtggtagctcatgcctgtaatcccagcactttgagagactgaggcaggaggatcctttgaaggcaggggttcaagaccagcctgggcaacatagcaagaccccatatccacacacacacaaaaaatttttttaagtctcctgttaaaaaaaaaggggtggggccaggagtggtgactcacgtctgtaatcccagcacttccgaggcaggcggatcatgaggtcaggagatcgagaccattctggctaacacagtgaaactccgtctctactaaaaaatacaaaaaattagcctgtcgtagtggcgggcacctgtagtcccagctactcggaaggctgaggcaggagaatggcrtgaacccgggaggcggagcttgcagtgagccgaaattgtgccattgcactccagcctgggtgacagagcgaagactccatctcaaaaaaaaaaaaaagaaaaaaaaggggggtggggaatcatatgctctgtgagaactaaatgagatgat

SEQ ID NO: 783480 - DNA, 668 bp, Homo sapiens
ctcatacctgtattcccagcactttgggaggccgaggcaggcagatcacccgaggtcaggattttgagaccagcctggccaacatggtgaaaccccatctctactaaaaatacaaaacttagctaggcgtgatggcaggcacctctaatcccagttacttgggaggctgaggcaggagaatcacttgaaccyggaaggcagacgttgcagtgagccaagatcgtgccactgcactccagcctgggcaactagagcaagactccatctaaaaaaaaaaaaaccaaaaacaaaacaaacaaaaaacccattagggttcgagtcattatcattctatctcagcttgattaagtaaaattcctgagaagtcattatgtcagtctcagaatacctaatttttccaccccccgcaaactacctcatacttgtattactatctctcactcacacttcaaaggagaaataaggggaaattagaaacatttggcttccttatactttggaggggttgttagtgcaaagtgccagtaaggtgtttccagttagaatacactgctttgtaatctctcagctgacgcgatgtatctgtatacacccagctgtctctcactttccctctcctcctcccttcccaccctcaaatggatcctgtctacctggtcccagaattt

SEQ ID NO: 783481 - DNA, 514 bp, Homo sapiens
ctaaatctaaatcttatgtaaagttgaaatactcattgaaaaccaaatattaaaattttacatacccagattatgatttctgcctcttcaagtggctttgttaattaatgatatatagcttaaggcaaatgatcctatcagaacaaagctgtctctagagctcagggtggttaatgtaaattcaagtttagaagactggagagggaaaaggttagatttgtttcctggaatataacttgaaattgcgtgccagygattgggtgttctgctgtctttggccctctgggagttaccagtgcaaacagagctcatccttgtccagagtcataactaacaactttaagaagtgggcagtagaaagaggggcatgatgggagaaagcgtctggtctagtgtgaaatatgactcatgagaactccagtcagcaaggtgggatttgtgcagcccttggagaatgtcatggttggagaatttgggtgtggcctcaaaatgcagatgctcttcgatttaggat

SEQ ID NO: 783482 - DNA, 618 bp, Homo sapiens
cgtggggtttccgtgggaaccagatccctgcaggtacaaatggggcccagcccttcctgtttcctgcctcaaaagacaccccaacttacccaaacagaggctgccatcacccacctccatctgccccagtgactccttccaagcccatcaggcccctttgggttctttcacttcttggacctcaatttcctcatgtataaaatgaggctaataaagagacctataccacgtgggctggctgtgtggctttgataatacatgtaacaggcttattggcacagggttagaggccactaccagaagctacagagatgtgtgaatgcaggcagtacygaagcagtggttaacagcccaggttcatccggctctaccactcacatgccgtggcaccgcctgcagcctcagttttcacacctgtacaacgggttactaccactatgcaggacctctatgaggatcaaatgacttaccccgtaaaacatgtgagttgttggctactgcggttattatcaagtatctactttgtgccaagccttttgctaagttctaggccacctggcatttctgctgggacatggagaatcttgccgtgggttggatctctgtgccccagaagcc

SEQ ID NO: 783483 - DNA, 618 bp, Homo sapiens
cgtggggtttccgtgggaaccagatccctgcaggtacaaatggggcccagcccttcctgtttcctgcctcaaaagacaccccaacttacccaaacagaggctgccatcacccacctccatctgccccagtgactccttccaagcccatcaggcccctttgggttctttcacttcttggacctcaatttcctcatgtataaaatgaggctaataaagagacctataccacgtgggctggctgtgtggctttgataatacatgtaacaggcttattggcacagggttagaggccactaccagaagctacagagatgtgtgaatgcaggcagtactgaagcagtggytaacagcccaggttcatccggctctaccactcacatgccgtggcaccgcctgcagcctcagttttcacacctgtacaacgggttactaccactatgcaggacctctatgaggatcaaatgacttaccccgtaaaacatgtgagttgttggctactgcggttattatcaagtatctactttgtgccaagccttttgctaagttctaggccacctggcatttctgctgggacatggagaatcttgccgtgggttggatctctgtgccccagaagcc

SEQ ID NO: 783484 - DNA, 640 bp, Homo sapiens
aaaaaaaatcagaaggtcaggtataggtattatgaccacattttaatcactcataaaatggacattctggaatgctgtatcagctcagggcagagtactggggacactatattgagtaaggtgtggttctcctggctctatgaagaaagcagaggagaaaggctgtggctttcttgcttctgaaaggggcacattaaggatggggcggggcgggcagggagtgaggggcagcatgcccaaacccactccaaagccactcacccggcttgacagcagaatcaggactagaaccaaggcctcccaaggtgatggctgagtcttttccattctaccaggctgctccagaaaacgcagcccctggtcttatgctgctcaaacggaagcaagcaagtgaggtttgctgccgactctgacccttacctccaactcctccaggatcttcagagatcacctcatccaaacagctttctgggaacggccagccataacaaatgytaagcatttattatgtgccagacatggtggcaggtgctttgcagcattatctgagtgattctcacaattctatgtggtaggtgctaggattcccacatcacctccatattgcaggtgagaaaatcaatgttcagagagggaaagt

SEQ ID NO: 783485 - DNA, 516 bp, Homo sapiens
agtctgggaggcttctcagaggaggtgttgattcatcagaaacaagagtaagagtttgcttggtaaagaaagaagcaacagaaggacattccagactggacagaattaagtgagctcaaaggcaagaaatgagactgctcagggagttacaattaggtaggtgtgctaggaatgtgaaatttcagaggggttagtggctaaagatgaagatggcaaaggcaggcatgggtcttgtctaccatgcactcaagctgggatcctaagccttggacaatggggagccactgaagggttttgagcaggtcagattcacttttttttttttttttagacggagtctcactgttgcccaggctggagtgcagtggtgccatctcarctcactgcaacctctgcctcccgggttcaagtgattctcctgcctcagcctcccaagtagctgggactacaggcgggagccaccacgcctggcttatttttgtatttttagtagacacggggttttgccatattggc

SEQ ID NO: 783486 - DNA, 571 bp, Homo sapiens
tctaatacctcctgaaacttgtgcacactgcctcctggatcccggcacctcctcgacaggcagtcctaatggcccggccccaccgcttcccagacagtctcagctccggtacttttcctcagccacctaagggcccagggacacccctacacctctccaaacaccccgataccacacctgtacacaaagacagcctcagctagycacaaccctgcacccattctgtgctccgcctgcaccccacggcaccctgtcacataccccgcctaatccttctgcagccctcactcccaccgttggcacattccagcacaccctctcccccaccttgttcccctagacagcctcagcctgtcacacacattgctcactcttgtgtgctctcgctctctctctctctgctgcccaggcctcccgctcttcccagagcctcctctgcctggggaggcatctccaccccttcaccgccccaggcctttcattcctggacagtgaggctggacatctggttcaaagctgccccacccaagaccctgtgctctgggcaccctggcctgggcttaaaggtttg

SEQ ID NO: 783487 - DNA, 487 bp, Homo sapiens
caccctgagttgctcaggcacagaggatccaggttaaacacatggatgttggctccaaggatatctctcccctgcctcagctctgtaccagatgctgccttggccccaggatgagggaagccatgggagaagctggtggagtgtctccgatgcttcctctgaggcaggttggggcaggccgggctgtgacaacaactgtgtccgcaactggtgggtttttggtctcactgacttcaagaatgaagccgcggaccsttgcggtgaatgttacagctcttaaggtggcgcgtctggagtttgttccttctgatgttcagatgtgttcggagtttcttccttctggtgggttcgtggcctcgctggttcaggagtgaagctgcagaccttcacggtgagtgttacagctcttaaggcagcacgtctggagttgttcgttcctcccggtgggctcgtggtctcgctggctcaggagtgaacctgcagacct

SEQ ID NO: 783488 - DNA, 631 bp, Homo sapiens
aagttttttttttttttttttttttttaaagtggcagttgagctggatcaaaagttcttaccttgtggcccaggatggcttctgaatatatctggacactcctgatgttgtgtaaggcatttagtgtctctgggccgggcgcagtggctcaagcctgtaatcccaacactttggcaggtggaggcgggcacatcacttggggtcaggagttcgaggccagcctggccaacatggcgaaaccccgtctgtactaaaagtacaaaaaaattagctaggcgcggtggcttatgccagtaatcccagagctttgggaggctgaagcaggaactctggaggccaaatgttcaagaccagcctgggtaacacagcgagaccctgtctctatgaaaaargagcagatgatcagtaaggtccccctgaccactgaggggtcagcaacactgggaatcagtagaaccccacggagggaatggcaggtgagggctttgctctggctgaagtgtcggaagccatctcaggtcagcagtgaaccctgggatctgggacagctgtccaggtcaggcctcacaccagaaggcagatgagagcggagaggagctgtcagcaggaagtccttgtctttaggcatctt

SEQ ID NO: 783489 - DNA, 578 bp, Homo sapiens
tggataaatctctgcttccctatggatgctcagttggagcccaaggaacacaaccagatagcaagggtcactaagtctctttgggtcactgtgaagccgaagacagcctggccttttccccatttctttgctgtccctcctcgttttcacaggccctagacgtgggcaggggccgaaggtatccagtgacacagccccttccccatcctgatccatgtgctgcggagcacattcsaggcaggagacgggcaggaaagcctcaaggatagggtcaagggtcacgccagggccactctccatctgtcacccaggaggctctcaagaaacggcagcttcccaatcgtcacctaaggatatctgaataagtaacctctggaaggttctaaaacggcctgctgttatcctaaaaggaaactttatggagtgtttaaacggaggccaaactcacatgctcgctcatctaatccttgccaagaactttatgaggcaaggattactactacccccattttacagatgaggacactgtggtctggaggccttcacaaatttgttccagggagtgacgtttgtgagat

SEQ ID NO: 783490 - DNA, 649 bp, Homo sapiens
ctcatgctaagtgctttcaccaatgagggtctcctagctacaaaagaatagctccaaaggggaaacactgggcggctctgtggcaagatggcatttgagctgggccctgggagatgagtttgctgaaggcccacatgggaggggcagtggaattatttccatatgcacgggacagcctcgaagcagcaagccacctgaccccaacggcaaatcagcagaatctgcgtggctcacggccgagggccagatgggacggtggaggtcttagcagatgtctgggtgcacagatggcatcaagcggcagatgcccccatcccaccccacctgggtctccacccctgggcactttattcccctccccacccccacctgaactggctggtggcggctcacttccaccattctggctaaatggggacctgaagctgaaatcaaagctgcatgtgccagaggagaacctttaacatgtggaccaaaaaagtcactaatyttgcagatggaaattcacacccgttccctaggaatgaagagccacagcataggagactctgaacagtccttgggtagaatactggagaactaaggacataggcaaacctcaggaacctggccaaggcttggccaatcttgccttatactcccgagaagg

SEQ ID NO: 783491 - DNA, 616 bp, Homo sapiens
aactaattgcatctgcaagagccctatttccaaatgaggtcacattctgaggtactggaggttagaactttagaatatgaatttggagagcacacaattcaacccataatactcagtggggattgcattgccaccctttctctgaacccctggtaaaaagaaaagaaagaaattgtgcttgggatgaaatgaagggtcagaatgattggaaatctcaagctctttcaggcactcctgggtggtagttgattgggagtcagtgaaaaagaagagctcagcygggcgcggtggctcacacctgtaatcccagcactttgggaggccgaggtgggtagatcacctggggtcaggagttcaagaccagcctgggcagtgtggtgaaaccctgtctctactaaaaatacaaaaattagctgggcgtggtagcgcgtgcctgtaatcccagctactcgggaggctgaggtaggagaattgcttgagcccaggagacagaggttgcagtgagctgagtttgcaccactgcactccagcctgggtgacagagcgagactccatctcaaaaaaaaaaaaagaagagctcaaatatgttattaaatacaaattagccagtagagtt

SEQ ID NO: 783492 - DNA, 559 bp, Homo sapiens
taccaatagagttgacctgttattggatttcctggaagatgtggtagctacttttttcctattttgaagccattttcgtagagaaatatccttcactataatcaaataagttttgtcccatcaattccaaagatgtttccagtggtgctcttgaagaggaatgagtaccagttttaaattgcccattggcatttgaaggtagttgagtatgtgttctttattcctagaagccactgtgcttggtagagtgcatcactcaccacagctgcctcctgagctgcctgagcctggtgcaaaaggattggcccccattatggtgcttctgaataaatcttgccaagatagacaaacaatgatgaaactcagatggagcttcctactcaygttgatttatgtctcacaatcctgggtattgttaattcaacatagggtgaaactatttctgataaagaacttttgaaaaactttttatactctaaagtgatactcagaacaaaagaaagtcataaaactcctgaatttaatttccccacctaagtcgaaacagtattatcaaaac

SEQ ID NO: 783493 - DNA, 632 bp, Homo sapiens
cggtgggggctcctttaggctctttaggctctgccctctcctccagctttggtcagacatgaaagagtcatggagcccaaggagtccatcagagccataagatgtggatctgtgtgcaggtggtggtgggagggggccatgcttggcccaaatgtagcatcttagaaggcagattctacctgggattgtcactaaagggatgcttggccctttctgcaaacccattcccctcattcccctctcgataacagtagttggggtcatgccccctcattccttcagtaaattttaacggagcaccttttatgttccaggcactgcattcagttctggccattcaaattgcctaagacatggtctctaaccccgrggactgaacttcccagagagcatttaaattttgtttcctgctgctctctaccccatctggttttcgggtcaggaatggtctggtctctctctctctctctttctttctctctctctctctctcaaattaaataccaactatgtactggacactaaagattacaaaatgaataaaactccgtccatgctcttgaagagcttggattatcattgtgtgaacatctgtgtaaacaaataaccaaggcaaaaagtgacaagtgttt

SEQ ID NO: 783494 - DNA, 492 bp, Homo sapiens
acatttaggtctatgaaccattttagataatttttgtgtatggtatgaaccgagggtcaattttttttccatgtggatatccagttgttctaccaccatttgttgaaaagactaccatttcctgctgaatttttcttgtacctttattgaaaaccaattgaccatatatgtttaagtctatagtaccctaagtactgtatgataattacaccccttttattgtttgatatctggcagggttatttcactctctttactcttctttgcaagaattttcctractattcttgtgtttgttttagcattatttttgtattgagatataattcatataacataaaatgtgtcattttaaagtgcatacttcaatggtttttagtatattcactctgttgcacaccatcaccactgtccaattctagaacatgttcatcatctcaaaggaaccctcatagctattgacagtcccaattccccactctccccatcccc

SEQ ID NO: 783495 - DNA, 596 bp, Homo sapiens
gatgagcatggtctatacctctggagtctatggcctactgtggaacagggacaattaagcaagtatgtaaagtatgataggtcagtcagtatggtagcagaataatggccctcaaagatgtcctcatcctagtccctggaacctgtgaatatgttagattaaatggcaatgaggaattaaggttacagatggaattaargctgccagtcagctgactggattattcagtggctcccatattatcacaagagcccttaaagtggaagaggatggcagaagagtgagagtcagagtgatgggaggcaagaaagactctacccaccattgctgtctttgaagatggaggaaggagccacaaaccagcaaaaatgcaggcagcctctagaagctgaaaaaggcaagaaaatggtttcttccctagacccttcagaagaaatgcagccctgccaaaaacttgattttagtccatcttgagcttttgacctccagaactctaagataataagttcatatagtgcaagccactaagttggtggacatttgtcacagcagccataggaaactaatacagtcagtcggtcaagtatttgcaagca

SEQ ID NO: 783496 - DNA, 528 bp, Homo sapiens
cgtgacagaggtgaatttcaaaaacataatgctgagcagaagacagacacagaagagtatgtgctatgacgctcaagaataggcacaactaattcagggtgatagatgttagaataatagctacccctgagctgggatattgactgggaaggtgcatgagggacccttctgaggtgatggaaatgttttacatcttggtccaggtgctggtgtatacaaatgcaagwactcattaagcaggacatttaagatcagtgcccttgtgcactctatgctatttgtattataactcaaaaatagtaatcataatgaataaacaataaaaaaggaaaagaaaaaaaacctggaaatgttttgaatttccaaaagaaatctaatggtagaaaaatttaagacaatatttttagggtctaaagaaaattgagttcctgactcagaaagctaaagtcttatgctaggaaaatgttgtctggaatgttctataatccaggggtcagggaaagggttccagttctattccagacttct

SEQ ID NO: 783497 - DNA, 612 bp, Homo sapiens
ctcctcccggagtggatttgggtggagggccccgaaacaggccctgcaggaaggagcccaggaaacggcccccggcaatgctaatctgagcgtttttccccaagcatatgcaacaaacctcaaaaggccacctcggcatgctttcacacccctagttgagattgtatgacagtcagcagtgtgtgttagttacagcaggacmagttgttatctattagcctctaagctccttaaggaaagaaggaaataaaccttttctcagcatctattatgccttaggctcataaacaatgtgccagcatttattcctcacccaacctcactgccaggaggaattatgacctccttcttggtagatgaggagtaagaggttgaaagagtaccttgttcagtaccagacagtcatcaagtgaaggtggcaagatttgaatccaggatctgatgccaagtctggctccctcctatgacaccgtgattaatctgtactgtagttgagtgtgaaaaggtggaaactatgtgttcagccattgtaccttcccttgagcactaacacgatttcatgccagcagggcctcaaaaggattaaagagaatggcatttttcaccatttta

SEQ ID NO: 783498 - DNA, 481 bp, Homo sapiens
caccctgagttgctcaggcacagaggatccaggttaaacacatggatgttggctccaaggatatctctcccctgcctcagctctgtaccagatgctgccttggccccaggatgagggaagccatgggagaagctggtggagtgtctccgatgcttcctctgaggcaggttggggcaggccgggctgtgacaacaactgtgtccgcaactggtgggtttttggtctcactgacttcaagaatgaagccgcggaccsttgcggtgaatgttacagctcttaaggtggcgcgtctggagtttgttccttctgatgttcagatgtgttcggagtttcttccttctggtgggttcgtggcctcgctggttcaggagtgaagctgcagaccttcacggtgagtgttacagctcttaaggcagcacgtctggagttgttcgttcctcccggtgggctcgtggtctcgctggctcaggagtgaacctgc

SEQ ID NO: 783499 - DNA, 644 bp, Homo sapiens
agtaacatgacttaagctgtctgtcttcatgatggctaattatgggcatatgttaattaagggtataaagcgaatactatatagctaagaatgaatcagtgtaagtctgtataatagtgaaagcctccattgtagctagccttgttcagctgagcgatgaactaagtcatcagcacactcatctgattttcactgattgctgtataatctttttgagaatcacttaggcattcttaagcttctatttrtaattaaataactttaaataattattttattgattaaccttttaaaatagcaatgcaaacaaatggcattactgtttttaataaaatgaactcactggaactcttttctgagctccaaaacattgatatcccttaatataatggagccctgatattaaattagaatatgtgccccacagccataatatggaatattatttgttagaaagaaaatccatcaagaattgaattctgttttaatgtaatagtatttgtttcctaagaatttgatattgatttaaaaacgcattaacttagtcaatgaaagtgaaagttttgaaagtggaactttctaatctgctgagtctgcacatcatcgttggcttttacccccactacctgcaagcttaactgcat

SEQ ID NO: 783500 - DNA, 537 bp, Homo sapiens
aatatcatactttactatctgttcaggtggtttttgtattgctccatcactaagtttgctagttagtttaacaggtcaagttagcagcttatttttgaatccttgtagaaaagaaaacatttcctttaaaatacgagaacaacagaataaacgattcatgagaataaggtcaaatgtttyctagctgaactaatatagttttacaatgtctcctatagttgatctaccagtggaaaggtaattagagagtcacttatttatttcttagggcactaagttcccaaagccatcagttcccataaagaatcctggggtctgtaatattttgtgtcatagccaaggaataattttccactcttctttctgggtttatacaatatcacagcaatcggtgacattaagactattatttagaaatgaattgagtgactcataacttattattgatttcaaaagctttagctgacttctgtcttgagaatctgcatttatccaatctctgtttccaaacagtggatgctaacatcatgaaaaaca

SEQ ID NO: 783501 - DNA, 586 bp, Homo sapiens
actttctcctcaactgatgacatgaaccaataaataactattggtgacaatacaaatccccaaaaggccttattgctgtacatgttgtcatcaaagtcctcaatcggagtggtggggggtcgggggatggggcataaatctaacaaggaaacttgcccctcaagattgagaagaatcattcctctgttctctgtttaggtttgtgtaagctgcaaggaggaccttcagaattggtgtgtagaaaatcttaaccctttaagggttctcaagtggtggaggaggggggtgcagagtagggagacgtgtcaggatcacccggtgattttttttttaaaaagattgagaaccagtgctctargctgacttttcctaattctactttaacttcatcatgtttcatttgtgtgacccaaatatccattcttggggtatttgaatcaatcaacttcatatggtgagttcagtcagtagttgtttattgaacacctatatcatgcctggcactgtagtctattctggaggtataaaagtgaacaagaaaccactgttccaaggagcttaaaatctatttgaaaggaagcttagt

SEQ ID NO: 783502 - DNA, 624 bp, Homo sapiens
agaaattcaacaacatgtagttcaaacatatagcttctatggatccactttggccacaagatatactaatttcttcttttgtttggatatgatactattacacaattattatttttaagtcatagagctgctactattcaaaaatttggctcactcatgcttaaaacccctgtgttgcctgaaaatatttaattattttccctattgttaaccattgttcctaagctcgtacatccaattagatagagagccttaccttgtcttttaggcactttggaataaaaagatcaacccatgtttagcagagagcaactgtaaaaagcatcaattgagaacccactataatctgttaaattcttttgattaatatcacttacttttacaaaataacccaatgagacagaaattatccccattttcagaagaataaatatagatttgggaaagctggttgactgctagcattatagagttagscattggcaaagccaagacttagacctagctcttttgactttagttaccatttattttctcatttccataatgcttcaagaggagtaataaagaacttaatacatttggcaacttcctatcagaagcatatctatgctgtctatagag

SEQ ID NO: 783503 - DNA, 622 bp, Homo sapiens
aacggtgttagtgaaggatggacagatggaccagtggagcagaatatagactctgaaatggatgcatatatatgtgggggcttcatatatgaaaagtagtgtaggcaaaggtagaattattcaaaaaccggagctagaaatgttggatgtataaagaaaaaaagcctttggatccctttctcatagtccatatagaaatgaacaccagaaaaattgaaaatttaaatgtcaaaygcaagactttaaaatttttagtagaaaatagaggtaaatctctttctgactttggagaaaagaagaatttattaaggcataaaaagcattaaccataaaataaaatagtgataaactatcttaaaactatatatttttgttcatcaaatacatcataaatgtagtgaaagacatactataaactgagaaaatattgcaacacctatgacaaataattagtaagatgaacatataaagattcgttacataccaataagaaaaagaaaaattgcctaatagaaaaattggaaaattatgcaaacatgttttatagaagaagaaatctttatatggattgcatattatgtgtgataaaatgcaaaataacttgtcagatgaattaagatat

SEQ ID NO: 783504 - DNA, 622 bp, Homo sapiens
aacggtgttagtgaaggatggacagatggaccagtggagcagaatatagactctgaaatggatgcatatatatgtgggggcttcatatatgaaaagtagtgtaggcaaaggtagaattattcaaaaaccggagctagaaatgttggatgtataaagaaaaaaagcctttggatccctttctcatagtccatatagaaatgaacaccagaaaaattgaaaatttaaatgtcaaacgcaagactttaaaatttttagtagaaaatagaggtaaatctctttctgactttggagaaaagaagaatttattaaggcataaaaagcattaaccataaaataaaatagtgataaactatcttaaaactatatatttttgttcatcaaatacatcataaatgtagtgaaagacatactataaactgagaaaatattgcaacacctatgacaaataattagtaagatgaayatataaagattcgttacataccaataagaaaaagaaaaattgcctaatagaaaaattggaaaattatgcaaacatgttttatagaagaagaaatctttatatggattgcatattatgtgtgataaaatgcaaaataacttgtcagatgaattaagatat

SEQ ID NO: 783505 - DNA, 660 bp, Homo sapiens
caacacaatccaacagaggaatttgcttaggtcccctcacttctggtgtctctgtaagttgctagagactggagtcccacttttggaaatgtctgttgttttggagtttgcatgtgtgcttgtgtgtgtgaatatgaggtgctcacagactctttggcccctgtagattgttaatttaccagtgccacctaaagtwtctacctactagcactcattgagtactgtattagtccgttctcatgctgctaataaagacatacccgagaatgggtaatttataaaggaacgaggtttaattgactcacagttaagcacggctgggtaggcctcaggaaatttacaatcatggcagaaggggaagcaaacatgtccttcttcacatggctgcagcaaggagaagtgcctaacaaaagggggaaaagccctttataaaatcctcagatctcgtgagaactcactcattatcacaagaacagcatgagagtaaactcttccatgattaaattacctcccactgggtcttccctctgacatgtggagattatgggaactacaattcaagatgagatttgggtggggacacagccaaaccatatcaagtacctactctgaataagatgccgtactaagtattcttggggccaaaacagaatacttgat

SEQ ID NO: 783506 - DNA, 660 bp, Homo sapiens
caacacaatccaacagaggaatttgcttaggtcccctcacttctggtgtctctgtaagttgctagagactggagtcccacttttggaaatgtctgttgttttggagtttgcatgtgtgcttgtgtgtgtgaatatgaggtgctcacagactctttggcccctgtagattgttaatttaccagtgccacctaaagtttctacctactagcactcaytgagtactgtattagtccgttctcatgctgctaataaagacatacccgagaatgggtaatttataaaggaacgaggtttaattgactcacagttaagcacggctgggtaggcctcaggaaatttacaatcatggcagaaggggaagcaaacatgtccttcttcacatggctgcagcaaggagaagtgcctaacaaaagggggaaaagccctttataaaatcctcagatctcgtgagaactcactcattatcacaagaacagcatgagagtaaactcttccatgattaaattacctcccactgggtcttccctctgacatgtggagattatgggaactacaattcaagatgagatttgggtggggacacagccaaaccatatcaagtacctactctgaataagatgccgtactaagtattcttggggccaaaacagaatacttgat

SEQ ID NO: 783507 - DNA, 601 bp, Homo sapiens
cattcattttgaaaaattaattttgtggagtttttataatattaatcatgatcacctgtgtgattccaagaataaaaagcattataggtagagatgaaagattaagtgcttggaagtttttttccttcgaatcaatgaagtgtttttccatctatcttgtcaaatgctaagaagcaatgtcaacagggatggaaacgttgcatgaaaatgagaagatcccagtacactctgctggcacattattttgatgccctgaaacaacatcaaatgctcctgtctacaaatgtccttttaaaaacatttttacttgcattaattcgctaaaacttcatagccaaaggcaggcgggatgaggtaggaagaagggcgggaatggttgcaaagtttatagaccacmgagccatggtaaaaactcagccagagttctttcttttgtgtgtttcaaatgttctttactgagttttctaatttttataattagaaaagatgtaaaaaaaacacacccacaaacacttattgagtgtccattctatgtaaaacagatccctggctgcatcgaacagtggagacaatcgataaaccttttctaattgatttgtga

SEQ ID NO: 783508 - DNA, 588 bp, Homo sapiens
tagggccacacccactctgactgcacctccaggtacggggactcagctgaacacaggtttgccatgtgtcaggaaggccgggtttgttagggacccagtttcatgtgaaccgagggattctgtgtctctaagaccttggagagtcaagaggtttcaagccatggaagagaaagatacgctagcygggcgcggtggctcacgcctctaatcctagcactttgggagtctgaagcgggtggatcacctgagttcaggagttcgagaccaaactgaccaatatggtgaaacccctctattaaacatacaaaaattagctgggcatggtggcattcatctgtagtcccagatacttgggaggctgagacaggagaattgcttgaacccaggaggcagaggttgtagtgagctatgatcgtgccactgcattctatccttgtccacagagcgagactctgtctcaaaaaaaaaaaaaaaaagacactctaaaggaaaactcaaatggaggtgagaatgcatgtgtgtgtatgtgtgtgcatctgtggatcagtgtgagctcctcgaggtcacagacagtcttgtctcccacag

SEQ ID NO: 783509 - DNA, 550 bp, Homo sapiens
tcccgtaactggctggggtcaggcggtgtgcaccagaactctctgtggaatcaggcagaagctagacttcatcttttttttttttttttttgagatggagtctcgctctgtcacccaggctagagtgcagtggtgggatctcagctcactgcaagctccgccttccrggttcacgccattctcctgcctcagcctcccgagtagccggggctgcaggcacccaccaccatgcctggctaatatttttgtagttttagtagagacagggtttcaccgtgttagccagcatggtcttgatctcctgacctagtgatctggccgccttggcctcccaaagtgctgggattacaggcgtgagccaccgcactcagcctagacttcatctttaaccatgttcctatgtggctcttttttcccctacagaacaaagctatacagaagctagcttaaaggcgtgcacactggccagatctgaagcaatttgaacctcaacataaactatgttaaaggagattataatccttgaataaaagagaagtccatgagtccg

SEQ ID NO: 783510 - DNA, 550 bp, Homo sapiens
tcccgtaactggctggggtcaggcggtgtgcaccagaactctctgtggaatcaggcagaagctagacttcatcttttttttttttttttttgagatggagtctcgctctgtcacccaggctagagtgcagtggtgggatctcagctcactgcaagctccgccttccgggttcacgccattctcctgcctcagcctcccgagtagccgggrctgcaggcacccaccaccatgcctggctaatatttttgtagttttagtagagacagggtttcaccgtgttagccagcatggtcttgatctcctgacctagtgatctggccgccttggcctcccaaagtgctgggattacaggcgtgagccaccgcactcagcctagacttcatctttaaccatgttcctatgtggctcttttttcccctacagaacaaagctatacagaagctagcttaaaggcgtgcacactggccagatctgaagcaatttgaacctcaacataaactatgttaaaggagattataatccttgaataaaagagaagtccatgagtccg

SEQ ID NO: 783511 - DNA, 550 bp, Homo sapiens
tcccgtaactggctggggtcaggcggtgtgcaccagaactctctgtggaatcaggcagaagctagacttcatcttttttttttttttttttgagatggagtctcgctctgtcacccaggctagagtgcagtggtgggatctcagctcactgcaagctccgccttccgggttcacgccattctcctgcctcagcctcccgagtagccggggctgcaggcacccaccaccatgcctggctaatatttttgtagttttagtagagacagggtttcacygtgttagccagcatggtcttgatctcctgacctagtgatctggccgccttggcctcccaaagtgctgggattacaggcgtgagccaccgcactcagcctagacttcatctttaaccatgttcctatgtggctcttttttcccctacagaacaaagctatacagaagctagcttaaaggcgtgcacactggccagatctgaagcaatttgaacctcaacataaactatgttaaaggagattataatccttgaataaaagagaagtccatgagtccg

SEQ ID NO: 783512 - DNA, 509 bp, Homo sapiens
atccatgtttcttggaattgaaatgggagagttccccgacacacctcgcaggatgtgtggcaggggtgtgtcttgtctgttcaagcacatgcgcaaaccccttatgggagggggagcacgtagacaggcaggtgcaggaaccagggcgagtgtttttggkctccggccccagggtagcatctaggggtggatgcctgttaatttcaaagccccagtgggtagtctacagtggtctgttagctctgccatccaaagatggcttaagtgttaaccagctcagtgccctcttgctacccgggttcttgtccagcatccaggaagaatcaggtcatgtgtggacttgaaggatggtgaatgtggggattttattgggtgatggaggtggctctcagcaggatggatggggacctggaaaggggaaggagtgggaagatattcccctggagtttggccattctatggtcgatttcctctctgactgtccccagtcaaacttctctcaatgttca

SEQ ID NO: 783513 - DNA, 577 bp, Homo sapiens
gtagccacggggacttcctcaaggagacaaatgcaggcgagcccatccacccgtgggtttctaggtggtgtaggtggagtgtgggcatccacgtggtaggccgctatgtgcatccccggatgcaatggagaatgtccttccacatgtcagcaccccagagggggtaacccactactgtccacatcctgggcttcccactgtagtagccacatggtgagtcccttaaagatggcccaactgcaggccgggcacagtggctratgcctgtaatcccagcactttgggaggccgaggcaggtggatcatgaggtcgggagatcgagaccatcctggctaacatggtgaaaccccgtctctactaaaaatacaaaaaaattagccgggcgaggtggcaggcacctgtagtcccagctaaccgggaggctgaggcagaagaatggcatgaacccgggaggcggagcttgcgctgagctgagatcatgccactgcactccagcctgggcaacagagcgagactctgtctcaaaacaaaaaacaacaaacaaacaaacaaaaaagacagcccaactgggctgag

SEQ ID NO: 783514 - DNA, 590 bp, Homo sapiens
tttttttttaaacaaacctctgtcatgtctggcataatagaagaagttggattttcattcacgctttgcattcagtctgttgcaaaatgttgttttggttgaaacgtataaggaaaatctggcttcacataaatatgtagttgcaaaaggagaagtatttaaatagtcttttggataattataaatattctttgagtcttcataaatttaaataaatgataatttttaaaagttaattgcaacatagattctgaarcaatataaaaaaacttttggtactctgttactttaaaattcattgatgtattttatattttgaatgtaccttttatctgtaaatgatttttatttacttattttaaattgtggtaaaatagacataacaaaatttaccactttgcagggcacagtggatcacacctgtaatcactttgggaggccgaggtaggtggatcacttgagctcaggagttcgagactagcctggccaacatggtgaaaccccatctctactaaaaaatacaataattaggcgggcctggtggtgcatgcctgtagtcctagctacttgggaggctgaggcaagagaat

SEQ ID NO: 783515 - DNA, 618 bp, Homo sapiens
ttattttctcatggtctagatgtcacagtaccccagggttcagtccttggacaacatcccttctctaaattccactcacaaccttgatgatctcatccagacacatgatttcaaatagtatatatatcctaatgactcccaaatgtgcatcttcagcccagagctcacctttgaatttagacttgtatatctaactgtctatttaacatcttcacatccataataataggcatcttaaatttaatatactcaaaatttatctttctctgttctagtccacaaacctaccccacttaggggcatcctcatytcagaaaatggcaaatccatttttccagtcgcttggtacaacaaaaaatttttaccttacatccagtagttaacaaaacctgttgcctctaccatgaactctatccttaatctggccacttttcacccacaactatttcttctatgccggtcatcttcctcacaatcactcacttggatgatagtaaaagctccttcttccagctgtgcccacctagagcccacagtccatatagcaggcagaaaagcctgtttaaaatgtcagtcagaccatatgtataactaaaaagtttcacaaaaatacttttt

SEQ ID NO: 783516 - DNA, 618 bp, Homo sapiens
ttattttctcatggtctagatgtcacagtaccccagggttcagtccttggacaacatcccttctctaaattccactcacaaccttgatgatctcatccagacacatgatttcaaatagtatatatatcctaatgactcccaaatgtgcatcttcagcccagagctcacctttgaatttagacttgtatatctaactgtctatttaacatcttcacatccataataataggcatcttaaatttaatatactcaaaatttatctttctctgttctagtccacaaacctaccccacttaggggcatcctcatctcagaaaatggcaaatccatttttccagtcgcttggtacaacaaaaaatttttaccttacatccagtagttaacaaaacctgttgcctctaccatgaactctatccwtaatctggccacttttcacccacaactatttcttctatgccggtcatcttcctcacaatcactcacttggatgatagtaaaagctccttcttccagctgtgcccacctagagcccacagtccatatagcaggcagaaaagcctgtttaaaatgtcagtcagaccatatgtataactaaaaagtttcacaaaaatacttttt

SEQ ID NO: 783517 - DNA, 619 bp, Homo sapiens
aaaacaaaacaaaaaaagttctgagttctaattctgggcatgctacttactgactctacaatctaaacaacaggcacactgtcctttaattttctctcatataaatgaatgagcagaaagttcaatcaattgaccctacactgatacccacccattccttctccaaaggcttagctggctggggtcataaggtcatctctctgcaagctcaaaatcaagataaagtcaagatgaagtaaaactttatcttttccagcgggggcatggcattttaggtagtgggatctgaaaggaatcttgctgtttaggtctggattgcactagtcagtgttagtcctgagaacacatgtgcacgtgagagtgttgatttattttcttcaatatacccttttctcccratttgtatatttgagattcgccagtggtttatagtctggtactctgtatttcctatctgaaaatggattacttccaggacaaaaagtccatatgtctgggttctgaccactgtctatttctcacaggactctcttccaaggcattaaaatcgattcccattcttataccaccagcccagattagaggccttgttgtgggtagattaacatctttgaattaa

SEQ ID NO: 783518 - DNA, 579 bp, Homo sapiens
tagaacgaacacttctccaaggacaggtattaaaagaaaacctaaaggtgatggtggaaaaaccattgagaacaactctctagcaaacgaacctccattctaaaacagaaaatactcaaattttgtggtccaatattatagtcacaaaccacatgtggctattcagtacttgaaatgtgagtagagctgcatgtcataatgacagtattttggatatgttgcatttttattttacttttgaaaacaacactactaaaaacttaaaatcatgtatctaccatgtattatatttctattacagaggactgctttggaagaattagaagcctatattctgtccaactccaaacaggaatgacataactcatattaataaaggcctgcctaaaaacaaggcaaacccatttccaagcaaaaatgctacttctctgcatttyttaccaaaaatggcatatctttcaacaaaaagtataaggcacacaaggaagcaagaaaaaataacaaccagacacagacatgacccagatgttgtcactatccaacaggaagattaatttaatgatgatacatatgtaaagg

SEQ ID NO: 783519 - DNA, 619 bp, Homo sapiens
gcctttaatcccagcactttgggaggctgaggtgtgcagatcacctgaggtcaggagttcgagaccagcctggccaacatgatgaaaccccgtctctactaaaaactacaaaaaaaaaaaaattagccgggcatgggggtgggcacctgtgatcccagctgcttgggaggctgaggcaggaaaatcacttgaacccaggaggcagaggttgcagtgagccaagatcataccattgcacattccagcctgggtgacagggtgagactccrtctcaaagaaaaataaataaataaatggatagatgatactattctcagaaaaatggccaaaacaaaattaaatactgattaaaatatccaactaatccaattctaaacaatcaatcaaatatctaaactctccaacagaaggcaggaaagtaggggagagcactggaaaggtaagacaaacagcaagcgcaagataagctgatgacactaattccacatatatcagtgattatatgtaaattcacaggttaaaaaaaaacagactttctattaaattaaaaagaaaaacatcgatatcttttttgtaacacgtttttctaaaatatgaatgtactgaataattaaaagta

SEQ ID NO: 783520 - DNA, 619 bp, Homo sapiens
gcctttaatcccagcactttgggaggctgaggtgtgcagatcacctgaggtcaggagttcgagaccagcctggccaacatgatgaaaccccgtctctactaaaaactacaaaaaaaaaaaaattagccgggcatgggggtgggcacctgtgatcccagctgcttgggaggctgaggcaggaaaatcacttgaacccaggaggcagaggttgcagtgagccaagatcataccattgcacattccagcctgggtgacagggtgagactccatctcaaagaaaaataaataaataaatggatagatgatactattctcagaaaaatggccaaaacaaaattaaatactgattaaaatatccaactaatccaattctaaacaatcaatcaaatatctaaactctccaacagaargcaggaaagtaggggagagcactggaaaggtaagacaaacagcaagcgcaagataagctgatgacactaattccacatatatcagtgattatatgtaaattcacaggttaaaaaaaaacagactttctattaaattaaaaagaaaaacatcgatatcttttttgtaacacgtttttctaaaatatgaatgtactgaataattaaaagta

SEQ ID NO: 783521 - DNA, 644 bp, Homo sapiens
gcaactatgctttaaagatacattgcttgaaataatgaattttaggggtttctctaaaatacctataattcactaatgtctgcaactttgtttttctaataatggcattaaaaggtttcctcaggactatggtttctaytggtatattttaattataataacacatttttaaatatattcattattcaaaattatttttttcaaaatgggcatgtctttgatattttttctaataatttttgttatgaaaaacttaaataacttaagagattgaaagcctctccaaactccacctcgcgagagaaatactgctaacatgtcaatgttcacttgctcaagtgattctgtgcatataaaaaccagtctatatgttttttaaacaactgtttcaatgtataacctgcttaattattgacagtaggtattttggtatcactccaggtcaacagacaacttaatatttttaagtattttaatatcagatttttgtgattttaaatattaacccacttcagaatgaagaacaacccaacaattaacgtcaggtagcaatgtaaaaatacaaatagtatcttcattaaaggaaaaaagtcatccctaatgaaatttccttgctagagaactaccttatttttaaaactgag

SEQ ID NO: 783522 - DNA, 644 bp, Homo sapiens
gcaactatgctttaaagatacattgcttgaaataatgaattttaggggtttctctaaaatacctataattcactaatgtctgcaactttgtttttctaataatggcattaaaaggtttcctcaggactatggtttctactggtatattttaattataataacacatttttaaatatattcattattcaaaattatttttttcaaaatgggcatgtctttgatattttttctaataatttttgttatgaaaaacttaaataacttaagagattgaaagcctctccaaactccacctcgcgagagaaatactgctaacatgtcaatgttcacttgctcaagtgattctgtgcatataaaaaccagtctatatgttttttaaacaactgtttcaatgtataacctgcttaattattgacagtagrtattttggtatcactccaggtcaacagacaacttaatatttttaagtattttaatatcagatttttgtgattttaaatattaacccacttcagaatgaagaacaacccaacaattaacgtcaggtagcaatgtaaaaatacaaatagtatcttcattaaaggaaaaaagtcatccctaatgaaatttccttgctagagaactaccttatttttaaaactgag

SEQ ID NO: 783523 - DNA, 538 bp, Homo sapiens
tgtatgacaagaaatgctgaaagaagttcttcaatctgaaggggaagtgataccacaaagcaatttggtaggagagtttataatgatgaaaggacaaattcatcagaaagacataacaatcaaaactgtatacacctaatacaagagcttcaaaacccattaaacaaaaactgattgatagggagagataaatacacaatcatagtttgaggttttaatattccctttcaatattaataactagatattaaaaaacaaacaaaaaacatagaagatatgaacagcactgttggtcatcctgacctgacatttataaaactccttttcaggtgctcatggaatgttcaccaagatagacsatatgctgggccataaagtaagtcacaggcaattccaaagaccgaaattccgaagattacaaaggaatcttcgttagcaatagaaacacaatatccagaaaagtatccaggtatttggaaattaatacacttctaaataacccaacattcaaagtagaaattaagagggaaacaaaata

SEQ ID NO: 783524 - DNA, 609 bp, Homo sapiens
ttttttttttttttttttgagacaaggtatcactctgtcaaccaggctggagagcagtagcgtgaccacggctcactgcagcctcgaactcctgggctcaagcaatccttccacctcagccttacaagtagctgggaccacaggcatgcaccaccatgcctgcctaatttttgktatattttttttttaatagagacagggtcttgctcttgaactcctaggctcaagcaatctgcccgcttccgcctcccaacgtgctgggattacaggcatgagccactgcactgggccctaactcttttctttgtaagagacggagcctcgttgtgtttcccatgctggagggccgtggaaattcacaggtgcgatcagggtgcattactgcctccaatttctggcttccagtgatcctccttcctcagcctccagagtagctggaactacaggcccgcaccactgtgcccggccacaaactaattttatctttggaaagcatagggataaagaggtataacagctattattactcatgtaaggaaagttaatacagatgagaatcaggaacttttattaggtcagattctggtacaagaaaactaataatataca

SEQ ID NO: 783525 - DNA, 596 bp, Homo sapiens
atgtaactttttaaaatgctgactcttaatattcatcaattatttggctgttttaaagatttttatctaaaaatacactatatttaagatatatctaaaggtgagatcttaacctactattaaccatttcgttaactagaaaccttaactctttcctgcacacgcagaccaaaactgctttgtggtgagagcaacggctgatttcactgttttgattcacatttgttatttcacatggccttcactggcttgaagaactgactattttttaaactgttggaaacttcatctaaatttttaacggatgggctcttaatacaacaagatagttttataacaagaaaaataagaaaattcaaataaattgtgtttaaaaactatcatgctttcttgtgtgagattaaatagctatcaaaagccccagaactcttcccagaattcaatccagcttctgsgtttcacttgcagaccggcaagggaagcaagtgtccccagctcctctgctccttcctacagccctgcgctttcctctagctcttcagaagagggcacacagtttcaaagcatgcccaaatctgcagagcaaattacacgta

SEQ ID NO: 783526 - DNA, 622 bp, Homo sapiens
acacggagccaggtgagtaaggttactgtattttctcatccttcatgcctactacagcaagttttctcacagtctacaatagtgtagggaacactgatctgcagcctcagactctcagaagggtggccgacttcctcatggcccttaaacacctttgaacacattttcctgcgcacagcgggccgttgtcctgcacagcagcccgaccacccactgttgcttgctgaccaaacacgggccgggagcctccgcagacgcaggcaggatgggattcctttcaagcgcaccacacacaagaatttcaatgccaaagctgggggtgggggtgggggtgyggtgggcgtatcaaggcagagttacaaattcctcaggaattagacctgtgtcaacagataaaaatgctttttgatcttctgattatacatgtatacatatacatatatatgtatatatatataacatttttaaagtcctgacaggggcatttccttaatttaaagagaatcacttaatccaaattaaacaaagggaggcacagttaagaagcccctgttaactcactcactcaggactgtccttcacaagctccaggcagcatttcggacgtgcatttcagtatcat

SEQ ID NO: 783527 - DNA, 558 bp, Homo sapiens
gccatggcttacgcctgtaatcccagcattttgggaggccgaggtgggcagatcacgaggtcaagagatcaagaccttcctggccaacttggtgaaaccccgtcactactaaaaacacaaaaattagctgggcgtggtggcatgcctgtaatcccagctactcgggaggttgagacaggagaatcacttgaacccaggaagcagaggttgcagtgagcccagaatgtgccactgcactccagcctgggcaacagagtaagactctgtctcaaaaaaaaaaaaaaaaaaaaragagagagtatttgcctttggatgatccttgagggttttgtttgtttgtttggccttacgttaggaataggtatgcttttcctgagcatttggtctgtttttatctggtggaactgaaaccaccccagttgtcccatggaacagatgtttatggtttctttgaataaacataaaaattaatctcccttaaaacttgagaaagttaacatttgtcttatctgagttcctttctcgggaaaccaaccatgaggactgccagatagtatc

SEQ ID NO: 783528 - DNA, 742 bp, Homo sapiens
aagcttagatccaaattcttggtggatccttagcaaatacatgcaggtcttcattgcgtttattttgtgtattaccctgcctctagtctatgatcccatcattgctttccctttgcctttctcacttgtttctaatggacttgtttctattctaatattgtacctctttttgttmccctctgtaaatccttttgaagaaaggcatgagaataaagatgtatctgtatctttctctcaccaggctatgagctccttgagaatgtcctggggttgtttctctatcattttgcacttggatgtggcacagacttcaccgtatgttcagtaaatatttttgaaagtaaactaaatgaagttgccattgaaaaataaaaagaaatcatctggtaatttgagcaatgccagttttctatttcatggtaagacaaaaggaaaagactgagaatccaattgtcacctacaaacaagaaggcagaagatattccttatctaagtcaaggataaatagatgaccttaaaaaagttccttgtttttttaacctgttgatggtgtgaccatgacaatgttgtggcttataaaccaagaaaaatgaaagatgcttgtaatccatctatcacagagctttgcacatagttgatactggataaatacatgttgaacccagtttctctgaatactagtttgagaaatagagtcatttagaacgcttggcaggaaatatctggtacttatttttcctca

SEQ ID NO: 783529 - DNA, 590 bp, Homo sapiens
gacctgtatgattgcagccacttacacaatgcctggacttgacctccaaagtctagaagctctccttgttgtaatagaaatgaacacctctggggtcagctgatgaatacaagtggcacatcttttgaagtgtcctcgagagagctttaggtccacagaagaacacgccaatactgctgctgcagtaggggtaagaaaaggaaataaaatgtcaccaggaggcaaggccagccagaagccaagacaatgataagattaatgaagtggttgtggctttacttatttatttttctccctccatgtcgttttttcttarattctttttttctacctactttcagcaccatgctctctcctaggttcccagcatcctcccctaaattaatcagggaggtggagccaagaagactgaggctggaaaggggccatgaaactgttgaggggttttgatacaacaccctgcaatgttggcactttacaatggcagagttcagtagttgagagtgggaccatacagtccatagagcctaaaatgattactatttggccccttatgggaagagtttcccaatccctgacctatatgattg

SEQ ID NO: 783530 - DNA, 653 bp, Homo sapiens
tgcttgctttgttaaatatattatggcgtagaggaaagaagatgagctttggtgccagaaggatctagattcaaactctagttctagtattatttagctctctgtgtgtcagggtcctcatcagtattgagaatattacctatctgaatgagctattatgagcatttagtaaaatgactgtcatttctattagctttgtgatcaggccttagttttctcatctgtaaaatgggaataaaaatgataagtatgacgaaaagatggcatgagatagtgcatgtaaaatgcccagtttccttcctgttaggtagtcagtgcttgataaatctaggccattagtaatagcagtactggtaacctatttatacctttggtagatacaatcagcatttagataatcatctatatttctgtatacacatttctatggtaatatttccatattatttgtcttatttagcattaaaactccctgttggatatggattcttatttctccrttatgtggatcaggaaactcagctcagagaggtgaactgcaggcagtatttcagtcagggtggaatcaggcatgttctttgatgacagcaaaattcaggtgccgattctatgagcaggaatcccaccgtcttcctaaaatattgctccagggt

SEQ ID NO: 783531 - DNA, 431 bp, Homo sapiens
taaatgatgaaaacacttcaagtcaccccaagtccagaaaatcagtcacagttttgtaatcgatgtgtccaatctaatatagcactccaactcttccaacttgatgtgaagttaaacctctcctcctccttcagctgtggcctgctgaatgaacgaacgccagccacttgtactggggaaggtagacatgggaagatkgtattctccttagctagattgctaatttaggcaaccccagtttctgatactaatccctcattctggggaagcggtagggagaggaagaggcagaaggaaagttcttccttgattaagacaattgcaatgacctaaggctggtgatctacaggcttggtgggcatttaaagcttacttcgggctgggcgcggtggctcacgcctgtaatcccagcactttgggaggccgaggcg

SEQ ID NO: 783532 - DNA, 431 bp, Homo sapiens
taaatgatgaaaacacttcaagtcaccccaagtccagaaaatcagtcacagttttgtaatcgatgtgtccaatctaatatagcactccaactcttccaacttgatgtgaagttaaacctctcctcctccttcagctgtggcctgctgaatgaacgaacgccagccacttgtactggggaaggtagacatgggaagattgtattctccttagctagattgctaatttaggcaaccccagtttctgatactaatccctcattctggggaagcggtrgggagaggaagaggcagaaggaaagttcttccttgattaagacaattgcaatgacctaaggctggtgatctacaggcttggtgggcatttaaagcttacttcgggctgggcgcggtggctcacgcctgtaatcccagcactttgggaggccgaggcg

SEQ ID NO: 783533 - DNA, 440 bp, Homo sapiens
tccaggttactgagatggaactgaagcacctgtccctccagctcactgaattggataccagattccttaataaatgccttgtagatttcttctatcttttctgtaatgggaatggatcaaagcagaaaaaaatagctttaacaagattctccaattctttctcctttgctttcaacctctgtcacccagcaacacccaaaacttccaaagtcttttcccaagtaaagtcagaggggaaaagawctcttgataaggtccatttctctcaggaagagaaagtttatctttttttttaattttattattattatactttaagttttagggtacatgtgcacaaccggaaacaaagctatgtaagttctatatcttcagaaacgtctcaatttcgcttcgttgagaagtggtttcctcttttgctcaagatacagaaaaactgt

SEQ ID NO: 783534 - DNA, 644 bp, Homo sapiens
aatgcaaatctggcaaatcaaggccaggggaacagcccattagtcatacaaaacaaaacaggcacaaagaagtttaaatcatctctgttcactttgtatgctacaaagtcctggaactcctaggatggccaagtaaaaactacagttttttcttagtgctgtttttaattcagcagtagctcagaggatctacatagaaagaactaaatcttgactatgttccatggcagagaaaatgtattcatcatttctcttgaaattggtcatccattcactactgctaaaattaattaattttataaaatacttatatttgctgtgagtttatgccacattcctttcctctaaaatatgaataactcttgagttcattacttcactaattgtatgctgattccttcaatcctatctctgmgccatctaacttactgtttttattagatttttaattataaaaataaaaacattcattttacatatataaagcagcatagaagtacaatttcctacctactactctttcggtgctgaatatcattctataccattccctaggcttactcatatatacacagggtatacaaaattttcttaaagggtgtttttcttgccttttattcaattacaaaaatgggatcatatta

SEQ ID NO: 783535 - DNA, 610 bp, Homo sapiens
ctgtctcaaatttttggggttcacatttggtaaccataaagggatctgagtggaggtgcccctgacctttgacaaatctcctatcagtgcttggtaccagcatgagctaactttatggctcaaactgacagacaggactagctggatttcctaggccaactaagaatccctargcctagctgggaaggtgaccgcatccacctttaaacacggggcttgcaacttagctcacacccaaccaatcagagagctcactaaaatgctaattaggcaaaaacaggaggcaaagaaatagccaatcatctattgcctgagagcacagtgggagggacaaggatcgggatacaaacccaggcgttcaagctggcaacagcaaccctctttgggtcccctctctttgtgtgggagctctgttttcactctatttcactctattaaatcttgtaactgcactcttctggtccatgtttgttatggctcgagctgagctttcgctcgccatccaccactgctgtttgccgccatcgcagacccgccaccgcagacctgccactgcagacccaccactgactcccatccctccggatccagcagggtgtccgctgtgctc

SEQ ID NO: 783536 - DNA, 634 bp, Homo sapiens
agcaatggggatgcaagtcatcagtatatagggctatgggatgactttccgtasaaagaagtgggccaaagtgcagcgtgattaatgctcaattatatttctgtctagaacctggcatgcaattcttgttaaccctgtaaggacagtgtcacttttagggctcttttaaaatttgtctgtaaaatgagggctacaaatacaaaataattcttaatcaatttatagattatttgcaaagccatgttttattctgatcttgccagtgttgacctaaccaatgaagaaacaactgattccaccacttctaaaatcagcccatctgaagatactcagcaagaaaatggcagcatgttctctctcattacctggaatattgatggattagatctaaacaatctgtcagagagggctcgaggggtgtgttcctacttagctttgtaagtattatcacttctatttaatagtaatgtgtcttatgtatatacaaagtaacagttcaaggttgtgggctttagaattaaacctaagttcaatgtccagctctgagaagaaacatctgaagaattaagatgattgcctctgagagcaggattgcaggctgcagcaaagagggaacactaattttcgttagaag

SEQ ID NO: 783537 - DNA, 606 bp, Homo sapiens
ctgcattctcatgctgattcggttcctgtcggggtgtcttcaaactggttggtgtcagctttctgctggaattcagcgtctgaaaaacatcttaagcaatgcttaaacaaaagccttatgattctgatgtcagagatcctacccataggagcaatggggatgcaagtcatcagtatatagggctatgggatgactttccgtacaaagaagtgggccaaagtgcagcgtgattaatgctcaattatatttctgtctagaacctggcatgcaattcttgttaaccctgtaaggacagtgtcacttytagggctcttttaaaatttgtctgtaaaatgagggctacaaatacaaaataattcttaatcaatttatagattatttgcaaagccatgttttattctgatcttgccagtgttgacctaaccaatgaagaaacaactgattccaccacttctaaaatcagcccatctgaagatactcagcaagaaaatggcagcatgttctctctcattacctggaatattgatggattagatctaaacaatctgtcagagagggctcgaggggtgtgttcctacttagctttgtaagtattatcacttctat

SEQ ID NO: 783538 - DNA, 576 bp, Homo sapiens
cccatgttctgtaattattaggacatgctttccagcactacgtgtgcttgaaataatataaaacctggaagcaatgatgaataatgtctaacttttcattagcacaattactcagttcattttgccctagaataagcagtatttggaaggaggctcctacattcaggacatgtcttcagcattcttctggtgaacatttatgctgttatwtgagtagtttaataatttttgaatagtgactataaatgatgcacacaaatattcctcttctagattgtcttctgtggattaattaacagttcattagataattatctgtacttttaagaccataatgttagtccctgaactgaaaccagtaagaagattgctggaagtcctggcctcttttcccatttacggagtaggaaaggttactttggtgcttgaggtaaattccagttttcaggctacacatcgtgttcatttctttattctgctagggccacagctcatgacctaggtaggcccttgctgtgaattcctcactgtatcatttgttccctaattctgacctctgtttatcagaccataatc

SEQ ID NO: 783539 - DNA, 576 bp, Homo sapiens
cccatgttctgtaattattaggacatgctttccagcactacgtgtgcttgaaataatataaaacctggaagcaatgatgaataatgtctaacttttcattagcacaattactcagttcattttgccctagaataagcagtatttggaaggaggctcctacattcaggacatgtcttcagcattcttctggtgaacatttatgctgttatttgagtartttaataatttttgaatagtgactataaatgatgcacacaaatattcctcttctagattgtcttctgtggattaattaacagttcattagataattatctgtacttttaagaccataatgttagtccctgaactgaaaccagtaagaagattgctggaagtcctggcctcttttcccatttacggagtaggaaaggttactttggtgcttgaggtaaattccagttttcaggctacacatcgtgttcatttctttattctgctagggccacagctcatgacctaggtaggcccttgctgtgaattcctcactgtatcatttgttccctaattctgacctctgtttatcagaccataatc

SEQ ID NO: 783540 - DNA, 535 bp, Homo sapiens
tggacatttgaggttccattttattattattagtatttttttagttattatgactacatttattaaatgtaaatggttgttccttattatgagattatatccttcctacttttatgatattaaatatcaacttttaaatgaaatattggtagtaaggtttttaaatttgcttaaatatctttacttgaccatccctttaacatcccccaatttttaaagtcctttttgaattcagcattttattattaatttaattcaacatcattatttctttataatatgagcgatgagtttgacttactgaaaaacattttatagttttattgttatatttggaaaagaatagtgatagatatatagaaaactaagaaagcaaccmaatgagaaatttattaactagaggtaagacaaaagtttttaagagaaagatagatatgtggttcattagtgagaatattcacatagttataataaagtaaaccctgtagaaaataaaagttgttttaaaagtctatactgcattcatatgggtttt

SEQ ID NO: 783541 - DNA, 583 bp, Homo sapiens
acctgaatttcccaacacatatttactgctatctggtttatttcttgtttaacatctaaactctgctaatgcttttcagaaaataggcaaagattcagacatggaattttttttttcaaaactaaatatgacatatttastaaattaaggatgctcttttaaattagacaagtatgagaatgggggcaattaggagttcaagaagaagaagagaaagttggggaagagcaggcattgttagtactagtcaaagggctcattttggaaccctgcttcattggtaatgaaagagtaggataacttgcccaatagagtactggcgcaacagaggtggaaggaatgttagagttggaaggaatcttagagaacatctagtctcaagtattcattttacagatagggaaagagtgtagcagggaaagatcacaggctttggatttacccatgtccacatttaaatccctgtattgctacttgctattctacctttggccaattattaacttctgtgaggctcttcaaagaataatagtgctacctatcttgctcaaatatatgtaaagcagctaggataattctgggt

SEQ ID NO: 783542 - DNA, 503 bp, Homo sapiens
tatatatccatttcacagttacatagttgcctgcaagtacttataattaaaataaaacaagtatgtaatctctgaataaccaatagcttcttcatattataaagataatagctaaaactcaagacaattcagaaatcccattttattatttctccatactcacccgactcgacctgccaacagtaaatattgatatgtaacattttggartttgcaaggcaacggtgaaattttttttctttgtttttattttgtagttgcccccactaaaaattgtatatatataaaatggtatacttccgaagataaggtagtctgtaaatcaggccatggaaacaagggtcatgaaaggggcagagaaatttgttactcttcttttcccacacaggaaaacagaaaatgaaaccactgaatttgatgagtatctgacaataatgtaacccaactgatggaattttttaattcagacacacacacacacacacacacacgcccctagagta

SEQ ID NO: 783543 - DNA, 503 bp, Homo sapiens
tatatatccatttcacagttacatagttgcctgcaagtacttataattaaaataaaacaagtatgtaatctctgaataaccaatagcttcttcatattataaagataatagctaaaactcaagacaattcagaaatcccattttattatttctccatactcacccgactcgacctgccaacagtaaatattgatatgtaacattttggagtttgcaaggcaamggtgaaattttttttctttgtttttattttgtagttgcccccactaaaaattgtatatatataaaatggtatacttccgaagataaggtagtctgtaaatcaggccatggaaacaagggtcatgaaaggggcagagaaatttgttactcttcttttcccacacaggaaaacagaaaatgaaaccactgaatttgatgagtatctgacaataatgtaacccaactgatggaattttttaattcagacacacacacacacacacacacacgcccctagagta

SEQ ID NO: 783544 - DNA, 646 bp, Homo sapiens
tattgataattaattagggttagctcagtagagttgaaagtggcttgcaaaaacaaacccaaaaaatacttacaaattacaggttatttcgtatcattaagatgcatacaaaagacaataaaacatttgttctggttctgttgctttaagtcactaactatatttttatgtaaatgtaaacactgacaaacattaacttctctsctgtatgtctcaggccttttaacagctttgcaatcctaacgagccgctgcattgatcgatttaaattacatgtgacataaagtctctttgcattttaattagtttgcttttttgggtttttgtttgttttgagacagtctcgctctgtcgccgaaactggagtgcagtggcgcgatctcgactcactgcaacctccgcctccggggttcaacattttctcctgcctcaacctcttaaatagctgaaattacaggcgcgcgccaccacgcccgacaaatttttttatttttagtaaagacggggcttcacaccatgttggtcaggctgtcctggaactcctgaccctgtgatccgcccaccttggccttccaaagtcctgggattacaggcgtaaggaaccgcgccccgccaatttgcttatgtatttttatggcatctttaa

SEQ ID NO: 783545 - DNA, 646 bp, Homo sapiens
tattgataattaattagggttagctcagtagagttgaaagtggcttgcaaaaacaaacccaaaaaatacttacaaattacaggttatttcgtatcattaagatgcatacaaaagacaataaaacatttgttctggttctgttgctttaagtcactaactatatttttatgtaaatgtaaacactgacaaacattaacttctctcctgtatgtctcaggccttttaacagctttgcaatcctaacgagcygctgcattgatcgatttaaattacatgtgacataaagtctctttgcattttaattagtttgcttttttgggtttttgtttgttttgagacagtctcgctctgtcgccgaaactggagtgcagtggcgcgatctcgactcactgcaacctccgcctccggggttcaacattttctcctgcctcaacctcttaaatagctgaaattacaggcgcgcgccaccacgcccgacaaatttttttatttttagtaaagacggggcttcacaccatgttggtcaggctgtcctggaactcctgaccctgtgatccgcccaccttggccttccaaagtcctgggattacaggcgtaaggaaccgcgccccgccaatttgcttatgtatttttatggcatctttaa

SEQ ID NO: 783546 - DNA, 626 bp, Homo sapiens
tcatgattgatgaaatcattggccattggtgattgaattcagtctctagtccctctgtcttccctggagtgagacattgctccccacaaaagggcattagctgcgggggtctgccttcagaccctgacccaacgacagatgaataaaacgtacactgacacacagatattctgttttgccagtcctgctgagtgtccgaccgcctgcacaccaagagaggtttgtcactgcggccggccctgagcagcttgcactccaggcatttatttagtatagaattaacaacagaagctctgagtcaacactcttgtgrataattaacatggttaagagagtagttttatgaatgattaaagttcaggtaccgcagtctaaagtaaataccattagggggcaatatccctggtcgacctcccccaccccccaccccgagagggctatctggctcaaaggttagttaatggaggtagagtaaacaaaattaactggggaagactctgttatctctagtatttaccctatgacataatgctctaaggtaagaaccagctgccttcagcctgttcagttattacaagctatgtaacctttcggccttccaaaaaggtttgtgactattccctata

SEQ ID NO: 783547 - DNA, 392 bp, Homo sapiens
ttgactttctgagttatttcgcttaagatcatggcctccaattccatccatgttgctgcaaaaaaacacatgatttcattctttttcatgactaagtagtattccatggtgtatgtatgtgtgtgtgtgtatatatatatgtgtgtgtgtgtgtgtgtgtrtatatgtatgcatatatatatgtacatatatatcacatttgctttaattattcatttatggacacaggttaatttcatgattttgctattgtaaatagcgttgtgctaaacatgtgagtgcaggttatctttttgatacaataatttttttcctttgggtagatactcagtattgggatttctggattacagggtggttctatttgtagtgctttgagaaagctccacact

SEQ ID NO: 783548 - DNA, 576 bp, Homo sapiens
aattctgtctcagcctcccaagtagctgggactacaggtgcacgccaccacacccagctaatttttgtatatttagtagagatggggtttcgccatattggtcaggctggtctcaaactcctgacctcagatgatccactgcctcagcctcccaaagtgctgggattataggcatgagccaccacgcccagcctcctttgcatatttttatgtagtctgtcttcaggctcattagttattttttctgcttgatcaattctgctcttgggagactctgacacrtttttcagtttgtcaattgaattttgcagctccaggatttcttgttgtttgtatttctcttggtacattttttctgatagaattctgaattccttctctgtgttatcttgaaattcgctgagcttcctcaagacaactgttttgaattctgtctgaaaggtcacatagtctattactctgagattggtcactagtgccttatttagtttgttttctgatgtcaaattttcctgaatgttcttcatgcttgtggacatttgtcaatatctgggcactgaagagttatttatttct

SEQ ID NO: 783549 - DNA, 601 bp, Homo sapiens
ttgtggacatttgtcaatatctgggcactgaagagttatttatttctatctttgcagtctgggcttgtttgtactcatcctttttgagaaggacatattcaaagaagattgagtgttgtgatttaagcctgtagtcactgcagctgcagctgtatcagcactggggrcagaagaggacagggagttccccaaatccagaagcactgtcactcttgccaactcctagaggcacaacattggacagcattggttgacttgggtaaaataagggagaattcctaggttatcctgaaaagtctcttgcttttttctctctcattcctccaatcagcaggagtctctgaccatgctgggctgcctggaattggcagaggggatgtaagcactcctatgtccaccacagctggcactgtgctgggttacacctgaagccaatgcagtactgggtctcacccaaggcccgtagcaactactgcctgactactactgatgtttattcaagactcaagggctctttagtcagcaggtggtaaatcctgctaggactagatccttcccttcagggcagtgtatttccttctggcccaaggtgggtttagaa

SEQ ID NO: 783550 - DNA, 575 bp, Homo sapiens
attaaatggagccagaaatgtgtgctcattttgctggtctgaatagagcaaaggcatcatcattaaatagttactttagggcaccaagatttctgtatcaggtattatgtaaactttatttgtacgtgcacccagtcctcccaaccaggaacagcaacatgacaatatctactaggccattctgcaggatagtcatgtatttacagtgagagaggaacaaaggcctattctagaagtcaggacacctttgtttgtgtgacctactgtgggcaaaacacataacagttcattcatctgtaaacatggcggttaaacaagatgatcgctaaaatccccttcarttctaaaataaaattattgattcattttcctctcaatgtgttaatttatgtcttccaaattgtattaaaaacacttttatttcagtaatgcctcttccctattcagcctaaatatatgcataattaccttgaactgaaacaagatttttagtgcaatattctctttcctgtctctccaaagcatatggagaaaccaaagcaatgcaaaagttgttctatggctgtggcaaaaat

SEQ ID NO: 783551 - DNA, 467 bp, Homo sapiens
cttttataatttccttcaagaacttttcctttgcattcacaacttgattaactgctatatgaggcctagctttcgccctttctcaacttccaacacaccttcctcactaagcttaatcatttgcagcttttgatgtaaggtgagagatgtgagactcttccttcctttcatttgaacacttagaggccattgtagggttattaattgtcctaatttcaatatcattgtgtctcagggartaagaagtcacaagaagagggagagagatgggggaatactcagtcagtgaaacagtcagaacacacatagcattgattaagttcaccatcttatatgggcacagttcatggcactccaaaacaattataataacaacatcaaaatcagtgattacagatcaccatcacagatataataataataataattttgaaatattactataattaccaaaatataatagagac

SEQ ID NO: 783552 - DNA, 500 bp, Homo sapiens
aaaaaaggctgcttcttaccctcaggtaacttagagcctaaagtgtgaaatttttaatgacttatttcaggttcaactgtaaagctacattttaaatgtaacataaacttatcaatcctatattactttccatctttgttacttttaataaattacagataattactaaaatcttsatatatttttccttcatctcaaatttggataaaaccttttctctataccatttggctataaagaattttaaaagtaaagtgcttattagcttgttataacaatagctgactaaatgccaacaaaaaagtcactcttaacatttactttcatttttggactcagttaaaatacttccaaaacatgcctgctttgactttgagaagatgtaattgtgatattaaattttattgaaatttctcaggtcctgatttgtgtacaggctggtgctctgagttcccacgaagcagtaaaacgtttaaaatactgtctgtgcaaatgcaaaa

SEQ ID NO: 783553 - DNA, 500 bp, Homo sapiens
aaaaaaggctgcttcttaccctcaggtaacttagagcctaaagtgtgaaatttttaatgacttatttcaggttcaactgtaaagctacattttaaatgtaacataaacttatcaatcctatattactttccatctttgttacttttaataaattacagataattactaaaatcttcatatatttttccttcatctcaaatttggataaaaccttttctctataccatttggctataaagaattttaaaagtaaagtgcttattagcttgttataacaatagctgactaaatgccaacaaaaaagycactcttaacatttactttcatttttggactcagttaaaatacttccaaaacatgcctgctttgactttgagaagatgtaattgtgatattaaattttattgaaatttctcaggtcctgatttgtgtacaggctggtgctctgagttcccacgaagcagtaaaacgtttaaaatactgtctgtgcaaatgcaaaa

SEQ ID NO: 783554 - DNA, 500 bp, Homo sapiens
aaaaaaggctgcttcttaccctcaggtaacttagagcctaaagtgtgaaatttttaatgacttatttcaggttcaactgtaaagctacattttaaatgtaacataaacttatcaatcctatattactttccatctttgttacttttaataaattacagataattactaaaatcttcatatatttttccttcatctcaaatttggataaaaccttttctctataccatttggctataaagaattttaaaagtaaagtgcttattagcttgttataacaatagctgactaaatgccaacaaaaaagtcactcttmacatttactttcatttttggactcagttaaaatacttccaaaacatgcctgctttgactttgagaagatgtaattgtgatattaaattttattgaaatttctcaggtcctgatttgtgtacaggctggtgctctgagttcccacgaagcagtaaaacgtttaaaatactgtctgtgcaaatgcaaaa

SEQ ID NO: 783555 - DNA, 626 bp, Homo sapiens
gattttccatttacttattctataattattgagacgaaatgttgaaatctctgatgctaattgaggattttttctatttcttcttgaagttctatcagcttttttttccattttgaaatgtttgtctctgttattaacttgttattaacctttgttattcaatgcataaacgatttggcttattatatgttcagaaatctacttcaatggatattaacgtaactactcyagctttcttctgattagcggtagtacatctttttccattattttatttctatttatttctttatatttaaagtggatttcttgcagacaatatatggtttagccttgtttttttaatccaaattgccaatcttacctcttaatatgaaaattagagcattcacattcatcgtgataatttatattcttgggtttaaatttaccatcttgctatttgtttcctatttggttcgtctgatttttgctctcttttttctaccttttttggattaatttttttcatgattgcactttatcctctttgttagtttattgactaacaaagacttacatatttgtttttatccttttagtggtggtatttttagttttatagcatagatctttaacttactaca

SEQ ID NO: 783556 - DNA, 568 bp, Homo sapiens
aacgatttggcttattatatgttcagaaatctacttcaatggatattaacgtaactactccagctttcttctgattagcggtagtacatctttttccattattttatttctwtttatttctttatatttaaagtggatttcttgcagacaatatatggtttagccttgtttttttaatccaaattgccaatcttacctcttaatatgaaaattagagcattcacattcatcgtgataatttatattcttgggtttaaatttaccatcttgctatttgtttcctatttggttcgtctgatttttgctctcttttttctaccttttttggattaatttttttcatgattgcactttatcctctttgttagtttattgactaacaaagacttacatatttgtttttatccttttagtggtggtatttttagttttatagcatagatctttaacttactacagtctactttcaagtaatataataacactttaagtacaatgtaagaagctcacagtttacttctgtttctgtctcccagactttgtgctacttctatcagatgttttcttt

SEQ ID NO: 783557 - DNA, 568 bp, Homo sapiens
aacgatttggcttattatatgttcagaaatctacttcaatggatattaacgtaactactccagctttcttctgattagcggtagtacatctttttccattattttatttctatttatttctttatatttaaagtggatttcttgcagacaatatatggtttagccttgtttttttaatccaaattgccaatcttacctcttaatatgaaaattagagcattcacattcatcgtgataatttatattcttgggtttaaatttaccatcttgctatttgtttcctatttggttcrtctgatttttgctctcttttttctaccttttttggattaatttttttcatgattgcactttatcctctttgttagtttattgactaacaaagacttacatatttgtttttatccttttagtggtggtatttttagttttatagcatagatctttaacttactacagtctactttcaagtaatataataacactttaagtacaatgtaagaagctcacagtttacttctgtttctgtctcccagactttgtgctacttctatcagatgttttcttt

SEQ ID NO: 783558 - DNA, 558 bp, Homo sapiens
ttccagataagagaagtagtgcttagtaccagggtaatgaaatttttgtggttatcatctccacatacacctttttaccacagaatgtgtgggttttaaacaagcgtatcaacctccattccttgagaaaccatggtgaaattcttgaattatttctggtaggcrctttatctgtgaaatcccttctagtctcttcgccatttttatagatgtaatcaattattttagtcaaacaaaatacactgccaactttccagaattcctagaacgattttaactactagcttggggttttattcggcataagcataaaagttattatattctaattgcttgtgattgttacgacattgagatttattttggttggttatttcaagggactcttaaaatcagtttagtgacttcattctggttttcctgattgattctattattaggactgtggaagcctggggccttttggcctgactgaacatcttgaacaattctttaaacagtttgggtttggcaaaacctattttgccaagaacattaccccttaatttttaaaaacca

SEQ ID NO: 783559 - DNA, 609 bp, Homo sapiens
tagccaaaacaatcctaagcaaaaagaacaaagctggaggcatcatgctacctaacttcaaactatactataaggccacagtaaccaaaacagcatggtactggtgccaaaacagacatatagatcaattgaacagaagagaaacttcggaaataacaccacacatctacagccatctgatctttgacaaacctgacaaaaacaaggaatgggaaaaagatttcctacttaataayggtgctgggaaaactggttactcatatgcagagaactgaaactggaccccttccttacaccttatacaataattaactcaagatggattaaagatttaaatgtaaaactcaaaaccataaaaaccctaggagaaaacctaggcaataccattcaggaaataggcatgggcaagaatttcatgacaaaaacaccgacagcagttgcaacaaaagccaaaattgacaaatgggatctaattaaactaaagagcttctgcacagcaaaagaaattatcatcacaatgaacaggcaacctacagaatgggagaaaaattttgcaatttacccatctgacaaaggtctaatatccaaaatctacaaggaacttaaaca

SEQ ID NO: 783560 - DNA, 558 bp, Homo sapiens
cctataatctggtcccaaaatatcctctcaagttaagcccattaacctactactttacacacgtatgtaagtaacatcttaagtcaaaccagattgctctccaccattcatctctgtgcatattcccacttcctccatcctaagtgctcccctgcgcactctctgcccctctctctttccaaatcctacctatccccatccccacaaacttcaacctaaatgctaccttccttctccaggggccatccctagattacagtagatcctcacttaatgtggtcaatacattctttaaaactaactttaagtgaaacgacagacagcaggtcctcaaataaygccactgctttcaacatggtttcattataacattgatgaaaaaagaggctgcaatatactcattttgtttaaagttgtatctccaagaacctatcgacaaagttaattgcttctacttcaaattacagtctgttgagtatcaccactcccaaagtaagctccatgagaatagggcttatttctttgttaccactgcctaaccccatgttcccacggcca

SEQ ID NO: 783561 - DNA, 571 bp, Homo sapiens
atatatgtttatacttcttaatattacaataataaaatctcttaatgaggaaggggaagaggacagggctgaatcctggaggcaccccaacatttagagaatgtgtggaggaggaagagaaagagccaacgagaaaacatgaaaaggtaactagtggcagcaaggagaaatctaggagcatgtggtatcccagaagccaagagaagaaattgtcccaagaaggagggaatagtcaacagtgtcaaacactgtagagacatacagcaagacaagaagaaataattgaaaaatastgactactggatttcaaagatggaagactggtgatctaaatatgcagcagaaggttgggatggaagtcctactagagtgggtcagagagagaaatggcagtgaaaatgtgcaggaaataaaggcaaaccttttggagcacttgtactacaatgagaaacagggaaatggcctggtagctaaaggaagatatgtggtagaggaagtggggaggtttgggtggtttcaaatggatcatcctttaggctattgggaaaatttaactagaaaagaaaatgac

SEQ ID NO: 783562 - DNA, 492 bp, Homo sapiens
aaagaatggaccaggtaggataagcagggcagaaagggttagggttggctggttggaatgatttcagcaggctcctctgtgtgggggttgactcttaacagtgtagtacctggccctgggggtattagaggaggggaataatggcatggagtgtaagagccattaaatgaggcagtcatcaggtgtgggtgctggattggtwagttggcatatgaaaagcacgcttccaggagacctcttaccagctatctctggtaatgggctaaccttgggaggggcagtccctctagggtcagcaaaggcccagatatcaaagcatcagaaatacaaataataaaaaggcatggttaatacacccttgtatttgcttttcttccttttttgctttacttttttcaggtttcactccttttccctgaaattgctttatgaataaattacctttacactgactctagtctcatgccttgctttcatgggctttcatagggg

SEQ ID NO: 783563 - DNA, 631 bp, Homo sapiens
aaacagaaaaaaaaaagatctacactagatgaactaccttgtatttcagaatgggaaattcgttggcacgagtcatcaattttgctctatctgagatttccctgtgtactttcctaagggtctgaatttggaaatccaaatacatctggggactaaattatttagaaattaccctgaataccagattagtgagattatctaaaaataacaggtaatgtaatgcagaaggtaactaatgacctgtaaatgcaggttcctctacaactctccctttagggagtagttaacgtttctcaaatggcttctatgggaactggatggttcagaggaattggtaataggagatgatrcagtgattttgccattatgtccttgcttgaacaacacataaacaaaccatctttctgaacaaatctattcataaatgcttaagaaatgcatcaaatgctgataacaacctgaaaactgcactgctaatcagacttctcaagcttacatgtcagaatccatcttgcagagcacacacattattttgtccctttgtcttttctgcagcaataggctatgctatcactccagtgtaaaacttctgttgcaagcaaaagttaatcacaagttctttcttcatttg

SEQ ID NO: 783564 - DNA, 573 bp, Homo sapiens
ctaagaactaatggtgcaaaaatattgcaaaattctttttaaaagaaaacagacaataagcaactatagaccaataacccaaacaaaaaataaataagaagctgaaattattgcagtatsattgacattttgagactggctctctctggcttttaattttagaagtagagctagtgtaggtatgtatgaaggtgtgtgtgtgcgtgtgtgtgtgtgtgtgaaaataattaccagtgacctacagtaacagtccttcccgcctagatgtttcagctgcatttgacgtcgttattgcctgagacaacagtctggctgcgatgttaacaaactgggccaagcctctttgatgcaccacaggtattagaaagttgagcactcacgtaagccctcgagcaggtgggctgtgttgaagcgccacctactgaaacatcgtgtttcccaatcctgcattcccaaagttgtcatttactacagcattggcaaaactggttcaggggaaaaaattccagtacaaatgaaatcctatttttggcaagcaggactctataagtgtgtcagcttccaactttactg

SEQ ID NO: 783565 - DNA, 639 bp, Homo sapiens
aacatttaagtctttaatccatcttgaattaatttttggataaggtgtaaggaagagatccagtttcagctttctacatatggctagccagttttcccagcaccatttattaaatagggaatcctttccccatttcttgtttttgtcaggtttgtcaaagatcagacagttgtagatatgcggygttatttctgaggcctctgttctgttccatttgtctatatctctgttttggtaccagtaccatgctgttttggttactgtagccttgtagtatagtttgaagttgggtagcgtgatgcatccagctttgttcttttggcttaggtttgtcttggcaatgcaggctcttttttggttccatattaactttaaagtagttttttccaattctgtgaagaatttttcccaattccaaaagcattggaagtcattggtagcttgatggggatggcattgaatctataaattaccttgggcagtatggccattttcatgatactgattcttcctatccatgagcatggaatgttcttcgatttgtttgtgtcctcttttattttattgagcagtgtttgtagttctccttgaagaggtccttcacatcccttgtaaattggattgctaggtattttattc

SEQ ID NO: 783566 - DNA, 597 bp, Homo sapiens
taaaatttctttgaagttaatatgaccatataataacttttggtgttagaaatatatattttatttttacttgaactccgataacttcagcaaaatgctgttaaaagtattctgtgcctccctccattattgtattagatgttttaagaacataacaatgtggtgattattaagagtgaataattatatttaatgaactrtgaccatgatttgaattttatatggatggtggtttactttctgttactgaatgttgcacccagtgttgtgggattttgttttgttttgtttttgagatggagtctcactctgtcgcccaagctggagtacagtggcacgatctcggctcactgcaacctccacctcccaggttcaagcaattctcctgcctcagcctcccgagtagctgggattacagatgcccaccaccatgcccggctaatttttgtatctttagtagagacagggtttcaccatattggtcaggctggccttgaactcctgacctcaggtgattcagcctcccaaagtgctgggattacaggcgtgagccactgtgcccggtcataccaattgtttttaagtcatagggtaaaa

SEQ ID NO: 783567 - DNA, 547 bp, Homo sapiens
ttgtttttaagtcatagggtaaaattgaaagggcacagacaccagaattaaaatgcaggtctgtgtgaatgacctgaactactctggtcctcaatttttttcacccataaaatcggtgttagatttcctactttcccaggaagtggtgaggatggtgttgtcattattgaataaattcaaacatgagtcatgtaccacagcatctaactaatataaaaygcttagttgatattaattctattgtctctatgtgagtatgattaaatgtaaaaaagtaacactttataaggcaaaagatatttctcaaaacaggctgaagataaagattatagctatagaattatcaagaattatgaaatatataaatagaagtaaagttagttaacatttgggagatacagtgttcaatcagtaatttattaggcatgcaaaattaaggctgtagacatagaaaaataattatctgagagcaaaactaaatatcatgtctatgtttctaaatgtcagtacaaatagcaaatggagggaaagaaaaaaaaaagggaca

SEQ ID NO: 783568 - DNA, 547 bp, Homo sapiens
ttgtttttaagtcatagggtaaaattgaaagggcacagacaccagaattaaaatgcaggtctgtgtgaatgacctgaactactctggtcctcaatttttttcacccataaaatcggtgttagatttcctactttcccaggaagtggtgaggatggtgttgtcattattgaataaattcaaacatgagtcatgtaccacagcatctaactaatataaaacgcttagttgatattaattctattgtctctatgtgagtatgattaaatgtaaaaaagtaacaytttataaggcaaaagatatttctcaaaacaggctgaagataaagattatagctatagaattatcaagaattatgaaatatataaatagaagtaaagttagttaacatttgggagatacagtgttcaatcagtaatttattaggcatgcaaaattaaggctgtagacatagaaaaataattatctgagagcaaaactaaatatcatgtctatgtttctaaatgtcagtacaaatagcaaatggagggaaagaaaaaaaaaagggaca

SEQ ID NO: 783569 - DNA, 547 bp, Homo sapiens
aacccttggtgcctgcctgggttttggcttagctggatctgagtggcccagtttccctaggacactcccattctttcccgtccccggacctctgaagaggccaacccttctgtagaatgctccttctgcccctctcatttactcattctcccgatctcagctcagtcactayttcgggaaagccgaggtgccgtgccacggtccgagtgcaactccatcacacccctgtcctctccgctctattgccagcccctacctgccctgcctccccgcctccccgccccccgccccggctctcacctgctctttaggatcatcccgggttggacacagcctcctaggcgggtgtccaaaggcagggtccacagagcttcgggactggggcgtggaggtgttgtctcctcctctggacacagggatctttgtccaatttacagaaagatgtggaagtcctgggacagatgaattaacacacgggtgcgtgagtgcagggctgtataaaccagggaaggcaggaagcgggtgcttgccctgcactaggccaggc

SEQ ID NO: 783570 - DNA, 553 bp, Homo sapiens
acagctggcacctgtacctgataatgtcacattccctgtcccgggccccgagcccctccctgtgccatttgctgtgctttccagaagaagcaagagagcccctctgccacacttgtttgctggggagataaaacaggcaaggcatgtagtggtttagcctaggcctggcacaaagtgtccactttttttttttttttttttttttttttttttgtgggggacggcstctcactgtgttgcccaggctggagtgcagtggcacgattctcctgtctcagcctcccaagtagctgggattacaggcgcacatcaccatgcctggctaattttttatgcttttggtagagacggggtttttgccatgttggccaggctggtctggaactcctgacctcaagtgatccgcccacctcagtctcccaaaatgctgggattacgggcatgaaccaccatgcccatcctagagtgtccatttaaatcatggttcctgttactgttactgagaagaatgtaagtctccccacctacagggcagatgctgagcaggagaatc

SEQ ID NO: 783571 - DNA, 591 bp, Homo sapiens
acaaaacaaaaacacaaacaactggaatgtgtgagctactgaggacccgagctactgagcaaccaaaaagcatgggggtatttgagggttcgagcaaaacttgatccagccatgaaactgagtgacaggacccatttctctgcctccctctcttagctcctctcttgggctggctctcccatgggggtctcaggcggctcccaatcggtctagatctttttttggcgggggratggggatggagtctcgctctgttgccaggctggagtgcagtggcgagatctcggctcactgcaacctccacctcctaggttcaagcgattctcctgcctcagcctcccaagtagttgggactatgggcgcgtgccaccatgcccagctaatttttgtagttttagtagagacggggtttcaccatgttggccaggatggtctcgatctcttggccttgtgatccgcccacctcggcctcccaaagtgctgggattacaggcgtgagccaccgcacccagactcttttttgttattattattattatttttttagagacagggtctctctgtcacccgggctggagtacagtggcatga

SEQ ID NO: 783572 - DNA, 618 bp, Homo sapiens
aaccaagagaaaaggtggcggacgaggggcgtggcaaagtgattagtgcggcctggaccctgcgtgccttgcgcgctgcgggctctttgcgtctgcgtagttcgctcacctccctttctaactccgctgccgccatggctcctgtggttagtatggctccgcgtgaggcctcggctccaggggaggcacgtgggcctcgcsgagcccggcatctacccaggctcgctggggacggcgccctgcagcgtcctgctggggtgggctggcaggtcggccggagcgggccagagcccctgccgatcccagcacgttgtaggcggaggaggccgcggcccgaggctcgtgagggagatccgggaggtctcggaggcccggggccccagctaggggctagcggggagctggagcctggagactgcggtctgggccggccactggtcctcggaccccggccgggggcctgattacctgggtggagggcggggaagaagaacgggacctgctaccctggggagccgcgcattcggaagtccacggccaagactcggggacgaatccgcggaagggcggcttggtcggcgtgctttcggagaggaggcctgggtttgaggagctttt

SEQ ID NO: 783573 - DNA, 623 bp, Homo sapiens
gaagccttatttttaagccagttgacagatcaatacttaaaaacaaaaaaacacaaaacaaaaacctataagcagttaaatgttacaattaaaaatacctttggtacctaacgtgtatacattagtggccaagaaagtcttttttttttccccgtaattcttgaaataaatgcagctccaaggacggcgggtcctacaattttgttgtcatcttttaaattacagatcttgggagatgaggactgcctgcggtggactgtaatgtgccaaagttattttccaacgttggcagcacccgttgtgcctgcggtgggggaaattgatgaggcttttcagtaggaacctggaaagaagcatcttggaaaaaacttaggcactcgatattttaaatacagcggaagaaagtgaaagggagacagtgrcttccagcgtcagaagcggggtggctccctctggcaaggcaggggcccaggtggacagtggtggcaagaaaggcagttgtgaggaaggcactatgtttttctgggttgttttcttaaaatttagttttctcagttaacacattgattgtagtgtcttgtgtgtgctgtcatagacacaggcattgtgtggtagcagtcttt

SEQ ID NO: 783574 - DNA, 596 bp, Homo sapiens
ttgaaaaattgtaagtcagagactgtctgtatttcagttaggttgtcatccttagaaagtagtgtcagtctgttaaggagaggagggagtgcagagaagtgtttttagatcttacccattagaaatacttggttctctttctttaggaggggatcttcccctggaaccccgtaacgggaagattatccctcatgtcaggtctgtgtaccccagaggaccttacttggcaagtcctttcttttttcttccttgtttttgagacaaggtctctgtcacccrggctggagtgcattggcaccatcacggctcaccgcagccttgaccttttgggctcagatgatcctcccaactctcagccttccaggtagctgggactacagcatgtaccaccatacctggctcattttttgtagagacatccacctgccttggcctcccaaagtgttgagattacaggcatgagccactgtgcctggccactctattttttttttttctcttgagcttgtgcagtgtcaggatgggttatggaggcccagggtctgagtcagaggagctcatctgcctgtccttggtcagatcaccctcatgctgtg

SEQ ID NO: 783575 - DNA, 427 bp, Homo sapiens
ctttttttttttccttgtagaatagccagataaatacaaggtattttgttttattttgtatattccctaaatctggcaacactacctcctgagcacttagctaaactatacttcccagtggatgtggccatgtgactgagttctaccagtgaaatttttgtagatgtgatgggccacttctaagactggcccacaaaaacctcccatgtgtgctcctgcatgttctttccaattgtgtttggttaggatggaraaaacttctagggtgactttggaagctacatgttgaagaaaacagaggttctattagacttgactgcatggaggtagacctcctcaccctgtccacgttgcctgtactgttacgcgagcaaaagataatttttttattgttgttgggctcttgtacattttgggatctattaca

SEQ ID NO: 783576 - DNA, 593 bp, Homo sapiens
ttgggaatatttcaaatcttctcttctagctactttgaaatatacaataaattgttaactatagtcagcctactgttctatgaaaacagtatggaggtttctcaaaaaaacgaaacatagaactaccatatgatccagcaatcacactactgggcatttatccaaaggaaaggaaattgttatatcaaagggaaacctgcacccctatgtttattgcagctctattcacaatagccaagctagggaatcaacccaagtgcccatcaatggatgaatggacaaagaaaatgtggtatatatacacaatggaataccatttagtcatacaaaataatgaaatcctstcattttcagcaacatggatggaactggaagtcattatattaaatcaagtaagccaggcacagaaagatgaatacaacatgttctcatgttctcacttatgtgtaggagttataaaatttgatctcatggaggtagacagtagaatggtagttagctgaggctggggagggttgggggaatgaagagagatggttaatgggtacaaacatacagttagatagaagaaataagttctagtgtcttcaagt

SEQ ID NO: 783577 - DNA, 594 bp, Homo sapiens
ttgatatgaacaataactatctacgagtcttgacttcatgaatcaagatgaaaaggaagaaattcctgaaatccagctttctttcctgccttcagaacattggctcagcttctattttccataaaccaacaaccttaaagctggttatttaaataattttaaaattaactactagtattgttatatttatatctcacagaccagtattatctaagacaaatagaattaaggtttaaatttaaatcactctgtgctactaactgttatttctacaagmcaatttctgccttctcttgccatgttctggagccagtcttgaccaactctgactttattgaaggaggtcccttcacaccagtgagtgaggtatgcaattcatgtggctacctcaaaatatgtcagatatacttgctgtagcaaggcctaggccaaactgcaatatgtcaacaaaactataacatattcccctaaacctcaataaatttggcacaacctatccagtataggacttccagattgattgcctggttggtgctccatattcacattcttctctaacactgattcgctttctgacttattgactaaaggttc

SEQ ID NO: 783578 - DNA, 640 bp, Homo sapiens
gaataaaatacagaataacaacaataatagtgatatttgacacatattaagcacttgtgctaattgtattacatgtactagcttattacgagatggccattgaaacagctattatctatatttaaatatgaggaagtagaaacagaacaatttagcaactcactaaagtcacagaactaataagtgaacaagccagaattataatggagacctatttgactcaaccacttctactctacacactgcaagttctggaccagttaccagggattttaaaatacaaaaatcaaactgggaataactccaacatgttaaactggttttttactgctgraattattggggcctttgacatgctaaaatgtgttgtaaattttcattagggagagaatgtgttgcatttattaaattggtatatttgaccatgaaaacttttatttcacccaatggtattccatggaatatactttgtgaaaggttgctttaaagatttaaatatgtctactcttttttgctgttgttgttgttatttatttatttccttatttattttttactttaagttctgggatacaagtgaagaacatgtaggtttgttacatatgtatatgtgtgccatggtagtttgctgcacttatca

SEQ ID NO: 783579 - DNA, 647 bp, Homo sapiens
aagagcgaaactccatctcaaacaaaacaaaaaaaatactaagggaaactattttaacattttttatggtattcaaagcaatcttcctttcaacaaactaaatgtgtaacaacaagggaatataaataaatgatactagacctgaaatagtcaaaactgatttatcccaaggtactcataaatctacaaattctgaaaaaaaacactgacatctcatttcctaacaaataagtaataaaaaaaatcaatctttctaagmttttaattattctgtaagtggaagactacaacaatttataatactaataatgccaattttgccactaaaatgaacactattctgcatcattactatgatgactgatatccaggaacttatctaactctctgaagagatttttctttaatgactttataagagttattgtgcatattaaggaccagtagaaaacaacagagtggcactgaaacgcttatactgggcaggaaactatactcacaagctgagaaatgtattcagcacacatggggtaatagcagcagtgactcagacttgtgcatcaataaaatccctgggtcatggacctttgagaatgtttctcacttgttaaatccatatccaacagtaggatttctcaaaataatgg

SEQ ID NO: 783580 - DNA, 604 bp, Homo sapiens
aaaggtgcaataaagattgcaaagtattacgaatcatgcacaattaaatccactgaacttgtaaatattttttcaagtactgatagtaacattatgctaaaaataaaataaacgcacttctggaagtaccgagcagtggggcaacaggtgttattgacccgtctgactcttttattgcgtgtgttttccacaccattgccttatatgatggtaatggtggaagaacagctgggcattggtaggagcctgtgcccaactgaaattccagcakgtattaaactggctttactttatctgtcccctgctctatgaaacctatgaagtgcactttcaaattgatgtgaccagtttgttccttctctagcacttatcacaatattatattttattctttagcctttccaaatttgtttccagtgttcaattgtgtctcttagagggtaggaaccataaaacaataccagtcccagaacaaattgagaattagacaaattttcttccaggtatctgtctggctattcaacactcttcctactttccttttgctctttcttaatctctgagaggttctgccaggcttattcatgggctttcgagctacaaa

SEQ ID NO: 783581 - DNA, 403 bp, Homo sapiens
tctttcagaatctatgttcgtcaccattatggtttactgccttgtaaccagtgtagccagtggttctcaaagagtggtccccagaccagcagccctcacatcccctggtgctatggtttgaataacagtgtcccctgcagaatgcatgttgaaacttaatccctaatgcaacagtattaagatgtatggcctttgggagtgattaagtcatgagggctccactttcatgaatgggattagcaccctcataagagggctctwggttaaagagaactcttgcttgctcttctgccttctgccatgtgagaacacggtgtaccttcctttcagaggctgcagcaagaaaacaccatcttggaaggaaagagctgccctcaccagacactagtcctgctggtgcctt

SEQ ID NO: 783582 - DNA, 531 bp, Homo sapiens
ttgcatcctattcagttcttcatttgcagggattaatagccagatatggaactatatacaagaacataaaaaataaaatactggaagaagaaggaggagaaggaggaggaagaggaggagaggaggaggaagaagaggagaggaggagaaagagaagaaggacaagagaagaggaaagcctttagtatgttytaagtcaattgggagaaaccacattaactaaccgccgggcgcggtggctcaagcctgtaatcccagcactttgggaggccaaggtgggcggatcgcgaggtcaggagatcaagactatcctggctaacacggtgaatccccgtttctactgaaaatacaaaaaaattagccgggcgcggtggcgggcgcctgtagtcccagctactcaggaggctgaggcaggagaatggcgtgaacccgggaggcggagctcgcagtgggccgagatcatgccactgcactccagcctgggccacagagcgagactccgactcaaaaaaaaaaaattaaatattgtta

SEQ ID NO: 783583 - DNA, 633 bp, Homo sapiens
tcttaaaggaggcaaggccgaggtctgcgatctgcgaaagacattgagccactgggattgtttggtgaaggccgtaagcaaatcagatctgactttcaattttgggcttatccattatacataaggtacggtaaattttccagaaatggttgcactgggcaggttcaaaacagcgacttctcaacagactcatagaaactgtgtgtctcctcagccatttgtaaaatgtcgcccaggaaacgttcacatgaaattctggtatcgtattccttatgcagtaagggggaggggaaaagcggaagatgtttctgacaagaacagtaacaaccaaacatatttattctcattccccattgactctgcgtatgtttttcaactatttctagggcttggggggaaaatggttattttcttctctgcacatttatgcagcagacagtggctaaatactacaccttctatttccccaaatggcgtccagaggcccatggatgcragtgtccaaggatcccaaagacacactgaggataaggactgcagtgttgcttgttttgagctgtagcctgaacctaagaggagatagggtggaaaggaggagaaaaacagacaaaaaagcagagagaaaaatagcaa

SEQ ID NO: 783584 - DNA, 592 bp, Homo sapiens
ctctacgcccacatttcttcccactttggatcctgtgcctggtctaatgcccaggccccctcccgagcctctggtctccctagagccactccccactgtcgggacacctcatctgtgctccccaaaacgccacgcaaagcactggagagccttggacaatgaacacaacccgcacccccagccacccccgccacagccgcacggcacctcagaaagccgtgtctttttttttttttttttttttttttttgagacggagtctggctctgtcgcccaggctggagtgctggagtgcagtggcgcgatctcagctcactgcaagctccgcctcccgggttcacgccattctcctgcctcarcctcccgagtagctgggactacaggcgcccgccaccacgcccggctatttttttgtattcttttttttcttttttttagtagagacggggtttcacagtgttagccaggatggtctccatctcctgacctcgtgatccgcccgcctcggcctcccagagtgctgggattacaggcgtgagccaccgcacccgaccagaaagcggtgtcttaatcctcttgtccttcctcctaa

SEQ ID NO: 783585 - DNA, 644 bp, Homo sapiens
gcttttgacatgtcttcctaactttaatcgtctttcacttttgatttaaagtgacaggcatgcaactcttccttttatttgaagatttaaaggtcattatagggttggttcttcactaccctaatttaaatattgttgtgttgtctcaaagaatttgggagagggagagagatgggaaatgactgctcactggagcagtcagaacacacacaacatttatccattaagtttgtcaacgtatatgggtttagtttgtggcaccccaaaacaattatagtagtaacatcccggatcactgtaacagatgtaataataatgacaatgtctgaaatattgtgagaattaccaaaacgtaacacagagacaagaaatgagcacatgctgttggaaaaatggtcccaaaatcctgcttgacacagttgccacagaccttcaatatgtraaaaacacaatatctttgaattgcgctaaagcaaaatgcaatgaaatgagggatgtctgtataagacaaagagaaaatcataaaagcagcaagacatgtacaagggatcctcaataaactcatatgtctatggccaagggtgccaagcagtattcaattcagggaagaatagtcttcaacagatgatatggaaggactgtat

SEQ ID NO: 783586 - DNA, 508 bp, Homo sapiens
accgaaccggccctacctaatcctgttactctgtcaggaaattacaaaggcctaaatccttggcttgggagttaattgggcagagtcattgtgtaaccatggggttgggggcagcatttgtagcctaaaattttgtcctgctgtatccaaaggagagtcatggagttcttttagtggctgataccytcactgcagtgacattttagtttgaaatggttgtgttcacaaaatttgaaattgttgtgttagaagacacaaaacaagatattgcattaataatacgtaatgcgaataagctaatataagcattattataggtgacagaagtggggcctgagagataagatttctaaatgttaattcaataagagaaaatcaaggaaaagtttgtagatgtactagtgaggagttagtttacttttgacctttatttctacatattccattccagttgctgaactatttataggcatgaaagaattactacacattttgctggcattaactt

SEQ ID NO: 783587 - DNA, 508 bp, Homo sapiens
accgaaccggccctacctaatcctgttactctgtcaggaaattacaaaggcctaaatccttggcttgggagttaattgggcagagtcattgtgtaaccatggggttgggggcagcatttgtagcctaaaattttgtcctgctgtatccaaaggagagtcatggagttcttttagtggctgataccttcactgcagtgacattttagtttgaaatkgttgtgttcacaaaatttgaaattgttgtgttagaagacacaaaacaagatattgcattaataatacgtaatgcgaataagctaatataagcattattataggtgacagaagtggggcctgagagataagatttctaaatgttaattcaataagagaaaatcaaggaaaagtttgtagatgtactagtgaggagttagtttacttttgacctttatttctacatattccattccagttgctgaactatttataggcatgaaagaattactacacattttgctggcattaactt

SEQ ID NO: 783588 - DNA, 498 bp, Homo sapiens
atcaaatgggacagatttacagtttcctgaacaaatgcagccttctctttgttctacatttgacttattagctacaaaagtatagaaacagtaaaagtggtaaagcttctaggatgaaagcctaagttcaagccactttgtctacaatgataattaracattaaaaggacaatattagggcagaatgcgttatcatgttccctaattttttgagtttcaatactggggggctgacagctcagaacctcagtaggtgcgagggaggaactgtggggcagggagctgtgcttggaagatgctgggcctcttccaactcagccaccacattgggggtgggaatggggtaccaagagaatcaacttgaaaggaagacatattgttgggacctttccgagggccttggaacattagtaatgctattactaacaatcacgacattctaaattcaactttaacactattcagaaaagaaggatgagttgcacccaccccagagat

SEQ ID NO: 783589 - DNA, 498 bp, Homo sapiens
atcaaatgggacagatttacagtttcctgaacaaatgcagccttctctttgttctacatttgacttattagctacaaaagtatagaaacagtaaaagtggtaaagcttctaggatgaaagcctaagttcaagccactttgtctacaatgataattagacattaaaaggacaatattagggcagaatgcgttatcatgttccctaattttttkagtttcaatactggggggctgacagctcagaacctcagtaggtgcgagggaggaactgtggggcagggagctgtgcttggaagatgctgggcctcttccaactcagccaccacattgggggtgggaatggggtaccaagagaatcaacttgaaaggaagacatattgttgggacctttccgagggccttggaacattagtaatgctattactaacaatcacgacattctaaattcaactttaacactattcagaaaagaaggatgagttgcacccaccccagagat

SEQ ID NO: 783590 - DNA, 498 bp, Homo sapiens
atcaaatgggacagatttacagtttcctgaacaaatgcagccttctctttgttctacatttgacttattagctacaaaagtatagaaacagtaaaagtggtaaagcttctaggatgaaagcctaagttcaagccactttgtctacaatgataattagacattaaaaggacaatattagggcagaatgcgttatcatgttccctaattttttgastttcaatactggggggctgacagctcagaacctcagtaggtgcgagggaggaactgtggggcagggagctgtgcttggaagatgctgggcctcttccaactcagccaccacattgggggtgggaatggggtaccaagagaatcaacttgaaaggaagacatattgttgggacctttccgagggccttggaacattagtaatgctattactaacaatcacgacattctaaattcaactttaacactattcagaaaagaaggatgagttgcacccaccccagagat

SEQ ID NO: 783591 - DNA, 498 bp, Homo sapiens
atcaaatgggacagatttacagtttcctgaacaaatgcagccttctctttgttctacatttgacttattagctacaaaagtatagaaacagtaaaagtggtaaagcttctaggatgaaagcctaagttcaagccactttgtctacaatgataattagacattaaaaggacaatattagggcagaatgcgttatcatgttccctaattttttgagtttcaatactggggggctgacagctcagaacctcagtaggtgygagggaggaactgtggggcagggagctgtgcttggaagatgctgggcctcttccaactcagccaccacattgggggtgggaatggggtaccaagagaatcaacttgaaaggaagacatattgttgggacctttccgagggccttggaacattagtaatgctattactaacaatcacgacattctaaattcaactttaacactattcagaaaagaaggatgagttgcacccaccccagagat

SEQ ID NO: 783592 - DNA, 576 bp, Homo sapiens
agaccaaggtggccaggtggcagtcttaacttccagttcagtggaattattgtcgtgtcccctgatggaagaattcttccctccagaactgagatctctaagccagcagagcataatgccacaagaacaggaagctagtgggacactaaggataatagtgagtggtgcaactctattttcacccctkgatccctagacccaggaatcctggttataggagaaatagcactataaattgaacatattcagagcatattcagttttccggagaaccttgccccagcccttccaggtattgacatctagctgatgacgtaactgagtcttcaaaaggtcattccaccgttccatcaaacaagtggctttaggatggtggggaacatggtaagactagtgaattccatgagcataagccaattgccccacttctttggctgtgaagtgagttccttgatcagaagcaatgctgtgtggaataacatgatggtggataaggcattctataagtccacaaatggcagttttggcagaagcattgcatacctggacggcaaatccatatccagggtaagtgtc

SEQ ID NO: 783593 - DNA, 600 bp, Homo sapiens
cactcatgtctgattttgtaacattatacgttggtaatttggaacatactggtttaccaagttatgcagatcttccaaatgctgacgcaaaatcacagttattaatatcactgccaatttcatcagaaaagtttttcagtattgggaagctgtcaaactcatggtggtggataacattttccaagattctaattttctcttgaaaacttcagttttatcattggcaacagatacttattttccctgaagtgacagactcatatcattcatttttgagaaaatgtctgccaaatacccaagtctgaataactgtagtctgtcattgcttcattcaaataataaaaaagagtttatagagtggtctgttcagctcacaattcaaatactcacacaagtgcttttccttgaaaatatgaaactagcatatttctccatgtagcagaagtrctttatatgtatttctcagttcattatatagaatatttaaaaattcatttgctgactttgcttgttttgtttggttaggttttggggaggttttggtgggttttgtttttgtttttgttttgtttttactgtatgtatgcggcagtggataat

SEQ ID NO: 783594 - DNA, 654 bp, Homo sapiens
ctgaacaatggcgagaaatgggatccaccagagaataaaggaagggttttgcatgttccagtgaggtgttgggcttcatgtcgttcattttgttttattctattgaattttattgctattattccacataaaattcaccattttaagttacacaatttaattttaaatatattcacaagatttggaactatcattgctatctaattccagatcacttatatcacccttaagagaaagcttatactcattagccgtcagttcctattctcccctcctgcagcccctggcaaccattaatctgtgtttagtctgtatggattcacctattctggacactttacatacatggaattatataatatgtggtcttctgtgcctggcttctttcactgaacatgctgttttcacatttcatccacatgatagccaatgtcagtgtttcattcctttttatggctgaaggacattgcattgtgtagatgtatcagtttcctagggctgctgyaacaatgtaccacaaactgggcggcttcaaacaacaggaacttattgtctcataactctggaggttagcagtctaaagtgtcagctggctaccctccctctgaaacctgtaagggaatcctaccttgcctcttcctaacttctggtggt

SEQ ID NO: 783595 - DNA, 622 bp, Homo sapiens
gtgatttatgttagtgttttagagttgcttaatattcactcatgattgatatgcaattagcttggatcctgttgctttttttaatgattctttttttagaattttatgtggagaaggggcttttgaaatcatttagccccagacagctggttaatgacagacttggagcgaggaggcgcattctctgatttgagagggctggggcagccctgcagctgaggggcagaagtgagtgtgggtgtgggcacaggggaagaggcttctttgttgctcagcactacattgtaaagagtacaggaattttgggtaagctcgatacggccacctatgtgtctgcttattacaccaagtgtgtacctgctttggagagcatgttaggggtgagttaatggttgtaaagccccaaaatagcttgatttaaaaagttttactaacagtggcatttgtgtggtacttagattcatgatwtcagggattctaacagcaaaactctgatgtggacttatctacattttgtagaccaggaaaatgagactcagagtggtttaatgacttgtctcaggtcatgcagctactcagcagtccagctggaattgaatcctagttaaatctggctccaaac

SEQ ID NO: 783596 - DNA, 573 bp, Homo sapiens
agtgtatgcaaagctgctggtaattgctaatggctcaattaatggcggctgttaccattgtcaaacttacagaggaagagacaggcggcctagaagaaccatagactttgtctaggataggtgagatcaggggctgagtagtcagtgtcatcctggcccacccaatggctggaggaggggatgaggacaggaagaggaaggggaaggggaggcactgggagatgacagagataaatatatgtcatgatcttgccccatctgggtcactggctgcaccccaggggtgatgactcacctgctgagaagttccccacccagagactggtcccacaggctgtggctcggccccacgggcacagcaggcatgcatcggggaggcccatggarcaatgcccagggttacccatctgcttgagggctcaggtacccccctttgacctcttcacacccccgtccaagctgcaacctagaaccagccagctggctctcctgaggcagggcaggcccagagagatcaaagaatttgctggggccagacagcaaggcccgtgaggtttcatcccattcaaaccc

SEQ ID NO: 783597 - DNA, 567 bp, Homo sapiens
ccaattgcaggcagcatagcttgcagttccaggagaaagtcatttcttccacaagagaggagagagaaaagagggctttgccttgcaacttggataccagttcagccacagtaggatagggcaccaggcagagtcctgaggcccctattccaggtcctaggttttggatgacatttctagacacaccctgggtcagaagggaacccactgccttgaagggaagaacccagtcctggcaggattcttcacttgttcactcaagagcacttgggccccgaatratcagcagcagtacccaggcaggactcaccatgggccttgggtgagactcagagatgtgctggcttaatgtgtgacccagcacattcccagctgtggtggctgcaggaatggactccttctgcttgaaaaaggagaaggaagagtaaagggaactttgtcctgcagcttaggtaccagattgaccaagtgggcccttgaggtccccaattccagaccttagctcttagatggcatttctggaccttccctgggccagaggggagcccactgccctgaagggagagt

SEQ ID NO: 783598 - DNA, 678 bp, Homo sapiens
tgatattttaggaccagaactcatattcctttttaaaaaagaagcactctggctgagcgcggtggctcacgcctgtaatcccaggcctttgagaggccaaggcgggtacatcaccagaggtctggagtttgagaccagcctggccaacaaggcgaaaccccgtctctactaaaatacaaaaattagtggggtgtggtagcacgcgcctatagtcccagctactcgggaagctgaggcasgagagttgcttgcacctaggagacggaggttgcagtgagccaaaatcacgccgctgcactccagcctggacgacagagcgagactctgtctcaaaaaaataaaataaaaagaagcactccgtggtgttgcatagagtgttggtatatattacatatatgaatgagttaactggcccttatcaggaagatggatgggaagtgggttctggaaaccttattctataccacatccttatatatagtcctcagttattgtccctctgtgttctagggcactgtgaggtgaatgctattgtacacgttttatagatgaggaaactaaggctcaggaaatgtaagtatctctcagaaggtcacacaggtaatcactgaaggagctgtgctcaaacctaagtcctacaactggcagagtgtggttgctcccacctgtaatcccagt

SEQ ID NO: 783599 - DNA, 622 bp, Homo sapiens
ctctgtagaaaatcagtgtcttttcacctctttattgcatcctctaatttttatatcacacttattttatgtggtaaatttctgccaagtgggataatggagaaggaagtatttctgattttttagtaagtttttggcaggtttcatataagtcatttttctttcctgggtaaaaattatgaagaggagtatgataatttttcagagtgattattaggatgagtaacrctggcaggggatgggagattctgtaacagttttgaattaaaattcatatttgagatttcttttttgttgctataagcatctttattatttggcaatcttgaaacaagatacttcagtagttgagtaaagtaggaacatcagcctaaggggaaaagatcctattaagttaatgcgaatgcatattttataggcctggggttggggggaagataaacacagtttcaattacaggttgagccatggacaagcatgccatatctatcttttttcctggtaggaaaaccgaatacaggccaccactaaaaagtggtgaatacaggcccatcaccactaaaacgtctcttgggagaggactgtttatgtaaggtgctcggccaaatagaatatgacatgg

SEQ ID NO: 783600 - DNA, 621 bp, Homo sapiens
tggatcgcttgggtactccggaggctgaggcacgaggatcagctgagtccaggaggcagaggttgcagtgagccaagatcgagccacggcactccagcctgggagacagagccagaccctggctcaaaagaaaaacaaaaaaaagatggaccctggagaggcccggggtcccgcggggcgccttttctatttctttaccgcaatctgtttaaagagaaaagcaagcgcctgcccctcagctacacccccggggcctcaaggccacgcccacatgggagctgcccccccccccaacgaccaggacggttcccacgggggcggggcttcacacgtgacccgggacagccaatcgcgggcgcgcagcggaggggcgtgtcgcgcggaacaaaaggcctttcccsagcggggcggggcggggccgagatcacgctgatgcccacaggaccggcacggcgtggggtgcaacaaggggcagccacccacctaggaaagggtgcacagtgggggcacccacgggggcaggcaccggagggggtgcccacagaggatagaggacgccgagaagtgacctggggagccataggatgaggaagagagaagagatgacagcaggggctgtag

SEQ ID NO: 783601 - DNA, 474 bp, Homo sapiens
ctgcaaaaagagacatgagtgtatccattattaaaaggaaaacctgtgtgaaagaaaaaattgtatgatagatcaattaagataaaccaaggataatctggaaaaaaaccaacagcaagaatactctgcttctaagataaaaagcaaatcttatttaaaagaattttcatagttacattyactccatggttttctagaaataatttttctgcatatatatatgatattaagaagcatggctcatttgcattaaatacttataaaaatatataattaagaaattcttaaaatgagatgaagatggaaagagaacaaaggcaacttttaaaaaacagagatagttccttattcccatgagaactattgaactgacccagcacagccatagtacttagtgttcttcatcatcatgcctattaaacaaaagaatgatgaccaggtgacagatgctggtcactctaggctctctcatgg

SEQ ID NO: 783602 - DNA, 575 bp, Homo sapiens
ccagagctatgcttcctgtacagcctatagaactgtgagctaattaagccttttttctttataaattacccaatctcaggaatttatttatagcaatgcaagaatagcctaacacatctccacattgtccataatggctatactaattcacattccaacagtgtacaagggttctcttttctccgtatccttgtcaacacttaccatttttctttttgataataggcatwcttacagatgtgaggggataccttgttgtggttttgacttgcatttctctgattattttgagtatttttccctatgctagttggacaattgtatatcctcttttgagaaatgtctattcagatttttttgtccatttttaattgagttcttttattactgttgttttagttatgtattttggataatctttatcagatgtatggtttacaagtcatttcttccattccataggatgtttcttcactctgtgtattgtttccttggctgtgcagagctttttattatgtaatttcacttactaatttttgttttttgttgcctttacttttgcatttatattcaaa

SEQ ID NO: 783603 - DNA, 612 bp, Homo sapiens
atactcctgcctcagcctcctgagtaactgggattacaggcacgtgctaccatgcctggctaatttttttttttttttttttaagtagggatggggtttcaccatcttggccaggctggtcttgaactcctgacctcaagtgatccaccygcttcggcctcccaaagtgctgggattacaggcgtgagctgctgtgcccagctggagataaggttcttattttgaggggtgggatatatcaggttttgtctttcccatgtggctgctgcttttccacacagctctgcacactgtgacaagatggcttctgtgtctcaattatggcttttgtcattttgttcacctagaaacactggcatgcattttcatgtggatgtttctccttctcatctagtaattaaaaataagaaagatattgctagaaatggcctggtaacactccctccccactaccatgtttttgatggattcttgtcccatgatctcaggacaggtaatagcattcttcactgagattttactaggctgtattacaatgtttgcataataactacctgtttggatctaagaattccttttgagatgttttcttgaaacaaactcaacagaaaa

SEQ ID NO: 783604 - DNA, 690 bp, Homo sapiens
gactttgcatagaaacttgcaaaaaattatttatgcttctgaatgtggtttttaattactgattttaaagtctgcctatagcttgagctactagatgaatattcagtgacagtaaccatttcaaaactcactgctacatttcaactgaaaataatcctcccaccttcccacaggaacttcctatatcatcaccgtctgtcaagttttttctttccatatttctgacattctgatgcttcccagtcaaaactgtccaataaagcttaatgactgccttctggcatttcacaggaagtatttggttaattttaagatggtgatttgtacctaactgtaatttaccagccaactggcaccacaggctgagcagagccctgccaaataaacccaccatgcaaactaggctggtggcaaytctggctcccctgagaaactctttcacattcagagggaggggttggatacaggaattaccaacatgggagagacacagcttaatcatcccaacggtatttttactcagctttgagatggatctgctggccagaatcagggcttgatggctcttgctttcactctgggagtaacctattcctggcagatcacctgtcttagtccaataccagttctgagattttagagcactgtatagattcccgttgatataagctggaaatgtccatagctgtc

SEQ ID NO: 783605 - DNA, 656 bp, Homo sapiens
gaaccaaaactgcgttttatgggtaattcatattaacttcacttttgaaacttattcttgatgtttgtattattttatttgtatgaattcccacccaaactcttaaaatttattatacaaaaagccctgaactttttgcacaaactttaaggggcagtggcactgcttttcttttcatgtgtgatgactcacaagttgagttaaagattttgaggacaatatcaatactttggttttacatttgagaaaattaaggcacagtggccttaagagactttcttgatatcaaagaattactggtggactcttctagggctgcttctattacatcaaccgtatgatttttctggataatatcactaaatcataaatcaaacttacatattctttttgtgttgatcaaggttcctacctgatcccgctcccagcagcagaactggccagctgtgcagayctggggaccctctgtcaaggtagggagcccacaccgtgctctggaatctctttgctttctacttgcaattttgggtaatgtggttgtcattgttttgatttgtatctgaattttcacttggaaagccagaaaacagcaaaacagaagaatttctgcatgtgttttagttgtgtgggtgcacagtacgtacggcatggagaaa

SEQ ID NO: 783606 - DNA, 566 bp, Homo sapiens
agagctaggatgttaatggtttaaataataaaacctgttcttcattttctgcgaccaacaatacttgcaacattttgttttacagggtaaagaaggagactttgtgtacaaagaagtcatcaaatcacctactgcctctcgcatctctcttgggaaaaaggtgaaatcagtgaaagagacgatgagaaagagaatgtctaaaaaatacagcagctctgtctctgagcaggtatgcagctacctggtagaatgttcccttggttcttcctgacaagaaaagctgagaatggcccttctgagattttaaatggtgctaaatacacatactccttggcattaacctgctccaagtccgtgctttatttacgtagagaaacactgaattcaacacacgtttattaagcactttgggctgytcagcaccgtgcttggtgctgggaatacaaaatacagaacttgccttctgtgtacagacaagagagacagacatgtaaagaaatggttattcttcagtgcactaagcgttgtaaatttgaatacaaaggaaggattttattttctaaact

SEQ ID NO: 783607 - DNA, 596 bp, Homo sapiens
cagttgggcaattacccaacattgcctttaatgaaatcaggggatgcactgaagcagggacaggaggagggcaggctgggtggtggccttgccccagacacgtccaagagctgtgacccacctggtgtgactggtttgaataaaaaccgaagaagcctcccagtttccatctgccggagctgtgagaccctggagggcccccagactgtggacacttggccccgatcccattccctggatgaccttcaagtggagcctggtgctgagcaagacgtgcctaccgaggtgacagaaccgccccctcagattgtacctgaagtgccacagaagacgaccgcctcttccacgaaggcccagcccctggagcragactctgctgtcgacaatgcattgctactgacccaaagcaagagattttctgaacctcagaaattgacaactaagaaactggagggctcaatcgcagcctctggtcgcggcctgtcaccccctcagtgtttgcccagaaactatgatgctcagcctcctggagctaaacacggtttagcaaggacgcctctggagggccacagaaaaggacacgagtttgaaggaac

SEQ ID NO: 783608 - DNA, 562 bp, Homo sapiens
ctccatgccttgagttccagggtgaggacagaggccaggacatcagttgtttatatcccttactatccttgtactaatgttcgtgccatagtgcaaagaggactcacaacgtgcaccatttttatgcctaaataatgcatagaaactctacttcttcttctcttgaggtattctctgcaactcttgcttatctgttttattgtctgtaacactgggattagtgagagcttttctttgggagaaaagtctctacattagatttgtattcagagatgaggcttgtttttgttttgtgtgttcatttgaggmatttatcttcctactgttccatgaactgggttggaggaaatggagagaaggttgttgtcagggcgtgcgacgtgagctggaattgctcacccactgcacagggtgtgccgaggcggctgctcccaggcatgcccacgcacccgtgttgcacactcgtttagtcagagatctcttatgctgtttcacattttgaacagatacaacagaggaagctgcatattggatgttggagctgacttagaaatgaaaccct

SEQ ID NO: 783609 - DNA, 561 bp, Homo sapiens
tttcttccaaatattctcagcaacctcttcatagatgaatttactaaaaacatactttctttttaaatgtaagcccaagatagatagatgatccaagacccagatgattctatgactttctcttcccatttcatatatcttgaagaaatattttaaaagtacaacaaagatatttgactaactaaaaaatttatacacaagaatacatattcctaaygtttattcggaactcccagatgtcaaaaaattgtatactctaaatgaaaggttgccaattgctttccttcttgaatattaggtatattattaaaggaagttaaataaaataattcatgtttcgtaaaggagtttgtcatatctctgcaccatataaagagaaaagtaaatccagggatcaaacactcataaataagaaaagaaaggaagctattttactggtgtcatccttaatagtaaagagacagtgctaataggttctaagtggctgcttatctaagcttcttaatttgtaaacatgtaatggttttgataatctacttcaaccaaattcagctctatgtc

SEQ ID NO: 783610 - DNA, 561 bp, Homo sapiens
tttcttccaaatattctcagcaacctcttcatagatgaatttactaaaaacatactttctttttaaatgtaagcccaagatagatagatgatccaagacccagatgattctatgactttctcttcccatttcatatatcttgaagaaatattttaaaagtacaacaaagatatttgactaactaaaaaatttatacacaagaatacatattcctaacgtttattcggaactcccagatgtcaaaaaattgtatactctaaatgaaargttgccaattgctttccttcttgaatattaggtatattattaaaggaagttaaataaaataattcatgtttcgtaaaggagtttgtcatatctctgcaccatataaagagaaaagtaaatccagggatcaaacactcataaataagaaaagaaaggaagctattttactggtgtcatccttaatagtaaagagacagtgctaataggttctaagtggctgcttatctaagcttcttaatttgtaaacatgtaatggttttgataatctacttcaaccaaattcagctctatgtc

SEQ ID NO: 783611 - DNA, 561 bp, Homo sapiens
tttcttccaaatattctcagcaacctcttcatagatgaatttactaaaaacatactttctttttaaatgtaagcccaagatagatagatgatccaagacccagatgattctatgactttctcttcccatttcatatatcttgaagaaatattttaaaagtacaacaaagatatttgactaactaaaaaatttatacacaagaatacatattcctaacgtttattcggaactcccagatgtcaaaaaattgtatactctaaatgaaaggttgccaattgctttccttcttgaatattaggtatattattaaaggaagttaaataaaataattcatgtttcrtaaaggagtttgtcatatctctgcaccatataaagagaaaagtaaatccagggatcaaacactcataaataagaaaagaaaggaagctattttactggtgtcatccttaatagtaaagagacagtgctaataggttctaagtggctgcttatctaagcttcttaatttgtaaacatgtaatggttttgataatctacttcaaccaaattcagctctatgtc

SEQ ID NO: 783612 - DNA, 487 bp, Homo sapiens
gcctagcaggctgcactcggctcatgctaccagcctggatcccatgcctccaaggaagtctttgagtcaggcatggagcggcaaggggtggatgagggagtgtgaggtctggccgctgcgccgtcagatatgccggctgctgccgcagggcagtcagctccaggtcccggcatgggtgccggctctctgaaaggctgtggctggaccagrtgcaccacaagcagcttccccagctggcactggggaatgcggtggcacctgaaagcttggagatgccaggaactgcagggccccaaagagggagtcacagccctggctccaggagctcccaggtctgggctccccaaagggctgcagctcttctctccttcttttcgcccacaacgtggtgagcaaggggcatgttgcagcactgtttgtgtgatagctcttttagcctcaccatttggcagttcccaagttcttgtcctgcacgcaggaagaatga

SEQ ID NO: 783613 - DNA, 615 bp, Homo sapiens
accacagtgctgtatgaactctgtgcctcttggcattgagacgtgaagccagctggacttcctgggtccagtggggacttggagaacttttctgtcttacaaagggattgtaaaatgcaccaatcagcactctgtaaaaacgcaccaatcagtgctctgtagctagcaagaggtttgtaaaatgcaccaatcagtgctctgtaaaatggaccaatcagcaggagtctaaaagtagccaatcacagggaagattgaaaaaagggcactctgataggacaaaaacagaagatgggcagagacaaataagggaataaaagctggccaccccagccgcagtggcaacactcaggtkcctttccacctgtggaagctttgttttttcactcttcacaataaatcttgctactgctctctctttgggtccatgccttctttaagagctgtaacactcaccgtgaaggtctgctgcttcattcttgaagtcagcaagatgagaccacgaacccacgaaccaacactaggcacagcatgagcagtcctggactgcttggcctaactgtagaatactgtaatgatcaatgacttcatgcagactgaacgaaagaaacaagaggg

SEQ ID NO: 783614 - DNA, 568 bp, Homo sapiens
tcaagggatcccaaataaatatatttatttctaaattcattctaaatgtttgcaatgttaagtatgtgtggcaaaagaacagatacctttcattttttcaatcacctttcaaatattgttacaaaagcacatattactgtgaaatagtcgtaatttcagaaagaaattattcttcattcaacttctcttaagatttttaattaaactttttattttgaaaacattcagaacctacagcaaagttgcaagaatattacaagttaatgattatatgctcttcccctctattctcccaccattgakacttagccatgccaactctctccatctctatattctacacatttacagtgcaattatcaaatttagaaaacttaacattgacacaatgctattatctaatatgtggtgaatattcaaattttgttgatggttacaaaattgccttaaaagcaactttttcccctcaacacaaaatccaatctagggtgatgcgtcgcatttaggtgtcatgtccccttagacttccttaatcaggagcagtccttagcctttctttgttccatga

SEQ ID NO: 783615 - DNA, 617 bp, Homo sapiens
acgccctgtataattttatatggttcctacagccctgacatgccctgagcaacaatcgacattgattcactgacttataaaagtgtattatctgttctctgtgtctacgtagagttctctgagagttgcccaggcagtgactcaggactccagagagaggtgcacagagcggtcacacaccagggagggagcgatttgcaactcagaatacttcttagcagaaagcacatttgggcttgatctgctccttgatttctgtgggagtgacttcgtgacagtttcaagctgaatcctacatttgcttcttaagtcaactgaaattccattcgagttagatccattctgtgtccactttaaaagccaagctgtttartgggggattgttatgacacagcaagcttgacaaaaaatacacctggtcttagaagcaatctttgcatagctctgaatgcacagaagaaaatcgtgcttgggtaaaggcaaggatttcactaggcataactcaccatgaggcatagatccttgagcaaaagtccagcagtatgtatgtatgcatgctgagcatgatgctaccagcttagcagcaaatgttggtgaaggaaaataaaacaatgcat

SEQ ID NO: 783616 - DNA, 620 bp, Homo sapiens
tttttttttttttgagatggagttttgctctgttgcccaggctatgggcaatgtcggctcactgcaacctccacctcccgggttcaagcagttctctgtctcagcctccagagtagctgggattacaggcacccaccaccacgcccagctaatttttgtatttttagtagagacagggtttcactatcttggtcaggctggtcttgaactcctgacctcgtgatccacccacctcagcttcccaaagtgctgggattacaggtgtgagccaccacgcrcagccaccttacttttcatttggtacctttggataatggttgaagttttaattgtgtatttttttaatttttagaaaaattaatttgaattcaccaaccatccacttaaaacccaaacacagtatattccaaaatatctgaacctctaatttatgtatgttacatcaatcctttcctttacatctttcaaagtgtgatccaagaaccacctgcattaaaatcacctggaatatttgtttataatgtgtgtccatgggtcccaattccaaagattgtgtttcagagggcctgcaatagaagctaggactctatttgtttccttgattcttaggggcagtaaag

SEQ ID NO: 783617 - DNA, 638 bp, Homo sapiens
ataacatgaaagctgtatacctattgtggaatttgattagaatccggaacagtcagagttggaacaatgttcacaacaaaatgcaagttaataatgaaggaaaaataaaatcagtcaaatcagcctaatgctttgggaaaaatctaaattcagttaattctaccacaaacaacatgtaacctgcttatgactggcaacgctgaaggaggattcaaaggctctcatctcgcgctgcttgcctgacctcttgctttctaggagctgacttaccctgtcagatgcatacacggcatcgaatagcccaaggagggtgacggagatgcccacagctggaccattgaccactgcaatcagaggcttaggaaaatctataaaacagcccacaaattccctacagaaatggaaacacaaaatcattaaatgtgccaaagcagcatgactraagcatgggcaagacagtctgactctgagataaagccttctgtcaggctgggtgtttccacagccaccaccagcagtgcctccttgtcctgccacttccctggtcttccgcaccagattcatccagggcatccgtctgaatggcagtggatggaagaccaaccagtgagacctatgggtcaaccctggtttgaatc

SEQ ID NO: 783618 - DNA, 604 bp, Homo sapiens
ctgccataaaaatcatctgtgcttcatgtattcatcccttcctcccccaacccctggcagccactgctctttttactgtctccaaagttttgtctttttcagaatgtcatatagttggaatcatacattgtgtatcttcctcagagcgtcttcttttgcttagctatatacatttaagttccctccgtgtattttcatggcctgataactaatttttctttttttttttcttttttgagacagagtctcgctctgttgcccaggctggagkgcagtggcgcgatctcagctcactgcgagccccgtctcccgggttcaagcaattctctgcctcagcctcccgagtagctgggattacaggtgcccaccacaatgcccggctaatttttgtttgtttgtttgttttagtagagacggggtttcaccatcttggccaggctggtcttgaactcatgatctcatgatccacccacctcggcctcccaaagtgctgggttacagtcatgagccaccgcgcccagcggtggtttttttttttttttttagtgctgaatagtattatgttgtctggatataccatactttatccactcacttattgaag

SEQ ID NO: 783619 - DNA, 655 bp, Homo sapiens
cagtgtcatgcaaaatggcttcactgccataaaaatcatctgtgcttcatgtattcatcccttcctcccccaacccctggcagccactgctctttttactgtctccaaagttttgtctttttcagaatgtcatatagttggaatcatacattgtgtatcttcctcagagcgtcttcttttgcttagctatatacatttaagttccctccgtgtattttcatggcctgataactaatttttctttttttttttcttttttgagacagagtctcgctctgttgcccaggctggagtgcrgtggcgcgatctcagctcactgcgagccccgtctcccgggttcaagcaattctctgcctcagcctcccgagtagctgggattacaggtgcccaccacaatgcccggctaatttttgtttgtttgtttgttttagtagagacggggtttcaccatcttggccaggctggtcttgaactcatgatctcatgatccacccacctcggcctcccaaagtgctgggttacagtcatgagccaccgcgcccagcggtggtttttttttttttttttagtgctgaatagtattatgttgtctggatataccatactttatccactcacttattgaaggacatctgattgcttccaagttttggca

SEQ ID NO: 783620 - DNA, 655 bp, Homo sapiens
cagtgtcatgcaaaatggcttcactgccataaaaatcatctgtgcttcatgtattcatcccttcctcccccaacccctggcagccactgctctttttactgtctccaaagttttgtctttttcagaatgtcatatagttggaatcatacattgtgtatcttcctcagagcgtcttcttttgcttagctatatacatttaagttccctccgtgtattttcatggcctgataactaatttttctttttttttttcttttttgagacagagtctcgctctgttgcccaggctggagtgcagtggcgcgatctcagctcactgcragccccgtctcccgggttcaagcaattctctgcctcagcctcccgagtagctgggattacaggtgcccaccacaatgcccggctaatttttgtttgtttgtttgttttagtagagacggggtttcaccatcttggccaggctggtcttgaactcatgatctcatgatccacccacctcggcctcccaaagtgctgggttacagtcatgagccaccgcgcccagcggtggtttttttttttttttttagtgctgaatagtattatgttgtctggatataccatactttatccactcacttattgaaggacatctgattgcttccaagttttggca

SEQ ID NO: 783621 - DNA, 645 bp, Homo sapiens
ctgcaacttcactgaatttgtttaccaattctaatatactttttatggaatctttagtttttttgaaatataagatcatatcgtctgcaaacaaggataatttgacttcttcctttccaatttggatgaccttttatttcattcttttgtttgattgytttagctaggacttccagtactatgttgaataacagtggtgaaagtaagcatccttatcttgttccagatctcagaggaaaggcattcagtttttttgtgtttagtatgataataattgtgggtctgtcatatatagcttttactgtgttgtggtatgttccatgaacacccagttttttagtgattttttttttaatcatgaagggatgttgaattttatcaaatgcttttttagtatcagttgaaatgatcatgtggtttttgtccttcattctattggtatgatgtatcacattgattgatttgtgcatgttgagccatccttgcatctctgggataaatcccacttggccatgataaatgatgtttttaatctgttgttgaatttggtttgctagtatttggttgaggatttttgcattaatgttcatcagggaaattggactttagtttgattttttgtgtgtctttggttttagtatcagg

SEQ ID NO: 783622 - DNA, 594 bp, Homo sapiens
caacttcactgaatttgtttaccaattctaatatactttttatggaatctttagtttttttgaaatataagatcatatcgtctgcaaacaaggataatttgacttcttcctttccaatttggatgaccttttatttcattcttttgtttgattgctttagctaggacttccagtactatgttgaataacagtggtgaaagtaagcatccttatcttgttccagatctcagaggaaaggcattcagtttttttgtgtttagtatgataataattgtgggtctgtcatatatagcttttactgtgttgtggtatgttccrtgaacacccagttttttagtgattttttttttaatcatgaagggatgttgaattttatcaaatgcttttttagtatcagttgaaatgatcatgtggtttttgtccttcattctattggtatgatgtatcacattgattgatttgtgcatgttgagccatccttgcatctctgggataaatcccacttggccatgataaatgatgtttttaatctgttgttgaatttggtttgctagtatttggttgaggatttttgcattaatgttcatcagggaa

SEQ ID NO: 783623 - DNA, 684 bp, Homo sapiens
atgataaatgatgtttttaatctgttgttgaatttggtttgctagtatttggttgaggatttttgcattaatgttcatcagggaaattggactttagtttgattttttgtgtgtctttggttttagtatcagggtaatactggcctcatagaatgagttaggaagttttcccttctctcctattttttggagtagtttcagtaggattgayattagttgttctttaaatatttggtacaactcagcagtgaagccatcaggtcctgggcttttctttactggagatttttcttgtttcagttttgatctcattactttttattggtctgtgcaggttttggatttcttcattgttcaatcttggtaggttttttatgtctaggaatttatccatttcttctagattttccaatgtactggcttatagttgttcctaatagcctctgataatcttttgaagttctacagtatcagttataatgtatcctttttcatcttcagtattatttatttgggtattctctctttctttcttagtatggctaaagctttgtctattttgtttatcttttcaaaaacccaacttttcatttcattgatttttgtattgttttctttgtttaaatttcatttatttctgctctgatctttattatttcttttcttctactgattttgggtttg

SEQ ID NO: 783624 - DNA, 568 bp, Homo sapiens
ttatttatttatttatttatgacagagtctcactctgtcacccaggctggagtgcaatggcatggtctcagctcactgcaacctctgcctcctgggttcaagtgattcccctgcctcagcctcctgagtagctggtactacaggcgcatgccacgacacccggctaatttttgtatttttagtagagacggagtttcactgtgttggccaggctggtcttgaactcctgacmtcgtgatctgcccacctctcctcccaaaatgctgggattacaggtgtgagccaccatggctggcctcttgtggcactttaaagtttcattttctgactgcttttcaccattgttttcactgagaagtcagtctgagtatgtattatagttcccctgaatgtaatgcatcttttcctttggcttctcttaagatttttctcttcaactgtgtaaggtctttcttgtattgctataaagaaatacctgagactgggtaatttataaagaaaagaggtttaattggctcaaagttctgcaggctttaaaggaagcatggtgttggtatctgcttggctt

SEQ ID NO: 783625 - DNA, 426 bp, Homo sapiens
tgtggcctatcataaggtctattcttgagaatgatccatgggctgaagagaagaatgcatattctgcagctattgcataaaatgttctgtaaatatctattaggttcatttggtctgtagcgcaggttaagtccaatgtttctttgtcaattttctgtctggatgaygtgtccaatgctgaaagtagggtgttgaagtgtcctggtatcattgtattggggtctatgtctctctttagctttaatatttgctttgtatatctgggtgctccagtgtgggtgcacacatatttacaacatatatttgcagctcattatataacgttaaaaggttcaagtcagcaagaggatataaacatagaccccaatacaatgataaggggacatttcatatttataagtgtatatcatatcttcatatttataa

SEQ ID NO: 783626 - DNA, 648 bp, Homo sapiens
aaagcaaatatagttcaagaccagtgaactttcccattttggtttgggaatattatatttctaaattcttgggtatgctgctttaagaacctctaatctgtatggttatataaacatgaaaaagcacaatttctttttccccaaaataaaarctgagattttgaaagtataattcatttttgagaacttgtcaaaaaagcaaagggatttgggcaaaggttagtcttgttttatttcaatgtgtttttgcttttttaaaaaaatagtttgcacgagagaggaaacagcattggttttaggttctcgcagacatttttctggagttccagcatgtgactgcttaaagacatctcagtaaaagcgaaccagctgcctatcacataggactcggagccatgtgtccaatcactgtacgtggtcccaccccagccctcagcagcagctcttacaggctcttcaaggtaacgagcacaaaataagctccctctcatctttccctcccagagaacagatttactcccttttactcacacgtacttccagattgcctagttctatgatcttacagcagtaacaacaacaataacaacaagagcaggcgtaaaccaaatacatcatttcactaccgaagtctagaaattaaccttg

SEQ ID NO: 783627 - DNA, 648 bp, Homo sapiens
aaagcaaatatagttcaagaccagtgaactttcccattttggtttgggaatattatatttctaaattcttgggtatgctgctttaagaacctctaatctgtatggttatataaacatgaaaaagcacaatttctttttccccaaaataaaaactgagattttgaaagtataattcatttttgagaacttgtcaaaaaagcaaagggatttgggcaaaggttagtcttgttttatttcaatgtgtttttgcttttttaaaaaaatagtttgcacgagagaggaaacagcattggttttaggttctcgcagacatttttctggagttccagcatgtgactgcttaaagacatctcagtaaaagcgaaccagctgcctatcacataggactcggagccatgtgtccaatcactgtacgtggtcccaccccagccctcagcagcagctcttacagkctcttcaaggtaacgagcacaaaataagctccctctcatctttccctcccagagaacagatttactcccttttactcacacgtacttccagattgcctagttctatgatcttacagcagtaacaacaacaataacaacaagagcaggcgtaaaccaaatacatcatttcactaccgaagtctagaaattaaccttg

SEQ ID NO: 783628 - DNA, 596 bp, Homo sapiens
gacaatcgtcagcaaaaagaacaaagctggaggcatcacactacctgacttcgaactatactgcaagaccactgtacccaaaacagcaatggggaaaggattccctatttaataaatagtgctgggaaaactggctagccatatgcagaaaactgaaaatggaccccttccttatgccttatacaaaaattaactaaagatggattaaagacttaagtaagtcctaaaacaataaaaaccctagaagamaacctaggcaataccattcaggacataggcatgcgcaaagacttcatgactaaaacaccaaaagcaatggaaacaaaagccataattgacaaatgggatctcattaaactaaagagctgttgcacagcaaaagaaactatcatcagagtaaacaggcaacctacagaatggttgaaaaattttgcaatctatccatctgacaaagggctaatatgcagaatctataaggaacttaaacaaatgtaaaagaaaacaacaaccccctccaaaagtgggcaaaggatatgaacagaattaccataaacaatatattccccaattatgtgaccatgtaaataatgtatgaa

SEQ ID NO: 783629 - DNA, 623 bp, Homo sapiens
tctcaaaatttatagctttatttctatggaaaaattgtttccaagcatcaaacaaccaactacaaggcaagttttggaacatcacctgtttataagttgggaccactgtactgtttgcattgttgtctaatgagtttgtggaaggagagctcatctccctggtgagattacacacttcttaaggaaggggcactacatcttgcacatgtcctccataacacccagccggtgccatgcacaagaatgtattcaaaacatacttatttaattcttccaaagcccagctgcttgtctgcctccaagacatgggtgctgatgggagtcaccttgggtgtcycaagaacctctgtggtaatcattgaatcatatactgtcaaacttgacagctcacagatgaggcccaggaacactgtatctcactggctgaatgtaattatagtggtaataacactatcaactaatttttgtagtatttaatatatgccaatacttttctagatgttttatatttgttaatgtatttaatctttaccaaaataatttaggtagttattcctattattcccattttacagatgaagagactgcagcctagagaggctaagcaacttgcttaaggtcct

SEQ ID NO: 783630 - DNA, 590 bp, Homo sapiens
cccccctcagaaagagatgctataatctttccagacagcaggtttccttgtatgtcactcagctttgtggcctcacctttaatactcccctgtcttttttggaggtaatatcctctccctgctcagcaacagtggctgtggggctttcttcattgttcttggcaccttcatcagtagtcattgtcttttaagtagagaacctggtaagaagaaaaatattttagctgggaaaaatatcacttctttatgaatcttgaatgyccctgggaactgagctctacctaacctaagatttacttagggccaataagcttagatactgaaaatgaaaacaaaggcatttgctatgagcatgtattgatgtcatcaggcatgtaaataaaacatcatccaattctttaatttcccatctagctctggtctcaaaacagagaacagtacaagtcaagttgggtagtgattacattccttaacataacatggtgagaagcagtcccttcacaactttgaaaacatcctttttctacagccatattcttgacagaggattaagaccttatcagttcttaataaaagaagtgacaatatat

SEQ ID NO: 783631 - DNA, 546 bp, Homo sapiens
tggatacaaagcaaacggggcagggtaaagagtgtgagtcatcttcattgataggtaaggtcacgtgggtcacgtgtccactggacagggggcccttccctgcctggcagctgaggcagagagaggagacaaagagaaagacagcttacgccattatttctgcatatcagagacttttagtactttcgctaatttactactgctatctagaaggcagagccaggtgtacaggatggaacatraaggcggactaggagcgtgaccactgaagcacagcatcacagggagatggttaggcctccggataactgcgggcaagcctgactgatgtcaggccctccacaagaggtggaggagcagagtcttctctaaactcccccggggaaagggagactccctttcccggtctgctaagtagcaggtgttttcccctgacacttacgctaccgctagacttcggtctgcctggcaacgggtatcttcccagaagctggcgttaccgctagaccaaggagcccttctgctggctctgtctgggcataacag

SEQ ID NO: 783632 - DNA, 468 bp, Homo sapiens
atgacccaagcttgccagggtaactcatcctcctggccacaatgaccagttcaaggtcagtcatgagaagcctagccaataagaatcactgtgaggattctacgctagtgttaacagaagatagcttctcttgtcactgaagtggytaagttgggaggatgtcaacttggggataccagagccctcttgtctgctacagggaggaagcctacttaaggaatgaagcctaataagatctagaaagataaagaaccatactgacattatttgagcatctgaatccaacaaatgcctgaagccaaatgcagccctgctctgcccagtcatgcgagcctgtggcttaaatcagtttgaggtgggtattctgttcttgcaaaaaagagccctggccaactcagccatccaggtagggtgaaatgaaccaggttagtctttcccaaattgcttctaattatttactacctatct

SEQ ID NO: 783633 - DNA, 631 bp, Homo sapiens
tgtctcaaaacaaaaacaaaaacaaaagaaaaaaaagaaaattcccaactaagccccaagatagctgaatgaatctctgagaatggagcctgggcatcaatatcttttaaaaactttccagtcattctcatgtgtgtacagccacagttgcaaagcaatgtccagtggttttcaaagtgtagtttccacatcagctggagtagcatcatggggaacttgttagaaatgaacattttttctttttcagtttttttgtaaaaacaaggtctcgctttgttgtccaggctggtctcaaactcctcycatcttggcccctaaagtatgggattacaggcatgagccaccatgcccagccagaaatgaaaattcttgaactccactccagacatactaaatcagatattttgagtaaaacctagcaatatttaacaggccctctaggtgattttgatctgaattaaagtttgataatcactgtcccagaattattctttcataaaaaccacctagaatgtatgtcaaatatacataacctagacaattcaagggggaaagcgtagtttttttttcaacaaatgacactgggataactggatagcaacatgtaaaaaataaagttggagccctattt

SEQ ID NO: 783634 - DNA, 606 bp, Homo sapiens
cattggatccaaaataaattggcccttatgaccctgaatgacacgttgttttttttcttcagtgaactattgttgggggtgactccgagatagaatggtataaaaataattcactgatgtttttctcctgaatggagattttatttctacattgatgaagattgcaaacaacatgtctgccttttttggtcctgaatttaaagggaaacacaagaggtgtttagttatttacaaacaagtatatattcttgttgatccttttttcaatactatcttgagatactgtttgtaagtatcctcctataagtatttccaaaagtctgccaaccaagcagcttagaagaatctattccaagtttctatagaaaaactctgagatgaatttattattttttggtaccatttatgagaaaaatctcagctttgaaggtagaatagcatacagaatcctgttaaatagtayatttgtatatatgtctatgtatgatatatatcagatatatacatatgtatcagtaatccctctgaaaatgttgttttaattgtgtggaacaaaaagcaaagtaaatcagcgagtaacttattttctaatctcatctgccaatg

SEQ ID NO: 783635 - DNA, 537 bp, Homo sapiens
tcttcagtcctgacttacccttgacttcccggctacactctgtgggtttcaggagtgacttctctaacaccttctggaccaggaggagaagcattgttagggcctgtccccggggtcctgggctccaaggccgggctgtgttgatcttgaattgatgatggctctgctgaggttgcttttgtgtttgcttcttgatcgcttgttgtgaaatgtgttcagtagtagtcatgaagcagatctttggcataaattttcatcccagcaagcagtgcatgaaattgaaaatcagcagagccaaggagagggagcccaggctcccgacaaatgtggactccttggagatgtcccacctggatggcgggarcagcctctctggggcctctgagtgctctgctgccccacatcacctcctcaccctggcagagcccggctctctccagggactccactttcctttcactgcttccaggggaggctgctaattttccgtgtcctccaagatttgcacattaccacttgcagatcaaaagctctctc

SEQ ID NO: 783636 - DNA, 647 bp, Homo sapiens
aaacagaaagtgactatttcagttaccaaagaaagcaaatccatacacgggaatgaaccaggctaaattgtggtaaggtgtaagaaaaaataaaggaaaacagtcccccaagcaactaaggcatccgatggggcagtgagcgatgttcctgttgggtgtggtgtgccaggggagagggagggctgttaggagctgtgtcctgaatgggaagaagataatcccttggatttgagaaggcaccaggaatttggagtatattttaggcatgacttttatgatggggtgcatagaggttctgagtcgaaagaacagatgaaggtggtcctggtcttagagctgtggttaggagatgagcaggctcacgggcagctggaggactttagctccaagaactggccatggctaccagatctcatctgcygagcgaggggacggaaacgcggtccctcagaaaatacaaacgaacgctgcagctttttatacctagatggaccagatggcatgatgcgatccaggagttcatgggatttcagagtgagaaggatcctcagagattaatacaactttgaaatttttcattggaggaaactgagtcccaaggccatggagctcgttgtcctggctcctcatcctccattccagcccct

SEQ ID NO: 783637 - DNA, 505 bp, Homo sapiens
taaaaagtcaggaaaaaacagatgctggagaggatgtggagaaataggaccgattttacactgttggtgtgagtgtaaattagttcaaccattgaggaagacagtgtggcgattcctcaaggatctagaactagaattaccatttgacccagtgatcccattactgggtgtacacccaaaggattataaatcatgctactataaagacacgtgcaccygtatgtttattgtggcactattcacaatagcaaagacttggaaccaacccaaatgtccatcaatgatagactggataaagaaaatgtgggacatatataccatggaatactatgcagccataaaaaaggatgagttcatgtccttagcagggacatggatgaagctggaaaccatcattgtcagcaaactatcacaaggacagaaaaccaaacaccacatgttctcactcataggtgggaatttaacaacgagatcacttggacacagggtggggaacatcacatac

SEQ ID NO: 783638 - DNA, 505 bp, Homo sapiens
taaaaagtcaggaaaaaacagatgctggagaggatgtggagaaataggaccgattttacactgttggtgtgagtgtaaattagttcaaccattgaggaagacagtgtggcgattcctcaaggatctagaactagaattaccatttgacccagtgatcccattactgggtgtacacccaaaggattataaatcatgctactataaagacacgtgcacccgtatgtttattgtggcactattcacaatagcaaagacttggaaccaacccaaatgtccatcaawgatagactggataaagaaaatgtgggacatatataccatggaatactatgcagccataaaaaaggatgagttcatgtccttagcagggacatggatgaagctggaaaccatcattgtcagcaaactatcacaaggacagaaaaccaaacaccacatgttctcactcataggtgggaatttaacaacgagatcacttggacacagggtggggaacatcacatac

SEQ ID NO: 783639 - DNA, 635 bp, Homo sapiens
tgcccactggggagggtataactcagaaagggccatgatctggagaagaggacacttgctgggaaggtgtcccagacggtcaaagttggacccttttcctccatagaatgtgcaggacagagcagaaatccactggggaagagacgagggagcagagyagcttccctgcttccttccacccagagcatgtgctgtgagagcagtgggtgcccaggccagcaaaggagaggctttgggagggtctggggagagtggacagctccttcaaagaccagagagagggtctcaggctagcattttgggaaggaaaattggggcagagaatggaggtccccggctctcaggccaacaagattccaaattccatcagaaggatgagcagtgctcacaggggagctgaaggctgaggactctggggctgaggaggctccaggcccacagttacagcaggaaggcttggaagtcaggtgcacaaagtttgacatataggagaataagctctcctgatctggttttgtattctgtttccctgctgatgaactgtgtgatcttaagcaacttacttaaactctctgagcttcagcattgtcatttgtgggatggacattttctgtctgctttgtggatggggtgat

SEQ ID NO: 783640 - DNA, 536 bp, Homo sapiens
ctggaggaccacaatgacgttttggatcccttggaatcaacgtcagctcagagccagtgttcagtagttcctgaaatgtctgatcatttctctttacccagtgcacagttactctggtaaaaggctggaggtctccttggggaaagatgggagaaagattcactgcataaattgtcagtaatgtagtggggtccttcctcaaggggacctggcctccccttcattcaggggagttctgggtctctaaactggctcaagtctggaaattgattgaggggctgtgaytctctgtttctataattcaaattagtcttttgtccatttgacctaggagttttctacttgtataaattaagtaggaaagcaggaggcttcctatcaatttcacttctacgaacaccatgattaattagccagtgccagagtgctacgtgaatcagactattctgattgcagctttgcctctgctgtccattatggtagctatgcccaccttgcctttgatggttgagtgctgccacttggtccctgtcacc

SEQ ID NO: 783641 - DNA, 614 bp, Homo sapiens
actttagtgtggttttaggtctagaagcaaacaggggtgttgggggtggctcctgaagagaatcgacattattttgcctggcaactgcctcaggagaggccatcactgttgccttaggcagcacagagtttatctcctcaggcaacggtggaaaggctgatggcagcatgggtctgggaggggatgttgccactacttgggatgagaaagctgttccttttggcaaaaaaggttcatcagagttcacaaactcagtgtccccagcttcatcagggtcctcccacgtgtccccattccaagtttcagagtcccattcttttctaatcaatgccctcactttaacagtaaacacctggtgaggctatgcatrcacctttcgttgcaggtcagccacttacataagagcttgtgtctgtttttccacaatttcagctctttctctacaggagataagactcttactgagggcagcctcagcagatttgaggcttagtatctgcttttgaagctaggagacagaatccctgatttcatcattttctttcatcactttgtcaactgaacttaggagcagccaactagcttcattatattccttggttctccacatatgg

SEQ ID NO: 783642 - DNA, 595 bp, Homo sapiens
gtattttaattacaattatccctctagtagctttttaattacacatttttcacccttctattagtggttaccatagagataatgacacacatccttgacttattacagtctaatataaattactacttttactgctttgcggccattcaaggcatttaaaacactacctccatttactttcatctgcctttgtgctactgcagttacgtattttaattctacatacatttgaaacaactttattcaggtatatcttacatatcataatactcatctcaagtgtacaagtcaatgatgtttactacattttaccaggtggtgcaactatcaccataaatttattttatagcaatttaccccccgataaaatccttcatgtccatttacagttaatmtccattcccatttctagacctaggcaaccactaatctgctttctgtttctataaatttgccttttctggatatatcatagaaatggaatcgcagtgtgtggttggtctcttgtgtctggcttctttcacgtcgcgtgctattttcaacgttcatctatgatgtaacgcgtatccgtagtttattcccttttgttgctgaa

SEQ ID NO: 783643 - DNA, 557 bp, Homo sapiens
cttatcccaaaattcttaagaaatgtaagagactcaggataaccaaaacaatcttgaaaggaaaaacaaagttggaggactcgcatttccagaattaaaaatttactacaaagctatggaatttaagacacagtagtaatggcctaataacagacatacagatcaacaaaatataatttagaatccagaagaaacccttacatttatggtcaactatattcaccaaggataccaagacaattaaacaggaaaaaaactagccttttcaacaaatggtgytaggacgactgaaaatccacatgtaaaagagtaacgctggaccactttcctcacactatacacaaaaattaacttcaaatggagtaaagacttcagtgtaagagagaaaaccataaaatacttaatagaaagtgtaggagtaaatcttcataatcactacaccaaaagtacaagtgacaaaaaaagataaattagactttatcaaaattaaaatattttgtgcttcaaacgacgccatcaaaaaagtgaaaagacaacctatagaatgaaagaaaagg

SEQ ID NO: 783644 - DNA, 560 bp, Homo sapiens
gagaaaacaaattctctatttccccctttaaattaagtatagggagcatacaatttccacagtaagataaaatgtcaattatacacaagttaaatatcccttatccaaaatacttgggaccaaggaaatgtttcagattttgaattatttgcattatacttactggttgagcatcccaaacctgaaaatctgaaaactgaaatgctccaatgagcatttcctttgagcatmatctcagcactccaaaagtttcagattttggagtattttggattttagattttcagatgttcaacctgtagtatgattaacaaagggaaagtgagcaaagaaatgaaaaggggaagggaaaaatgttaagattccagaagaggagagagtggaaagaggaaagaagatgggataggacatacttcacgggaaaaggtttaacttatttgtgcaagccatgaaatgactgtgatattgagcaaacacccttctactctttgggcctcagtatctagtaccttcacctgtcgaatcaagaaggctgattggggccaggcgtggtggctcac

SEQ ID NO: 783645 - DNA, 507 bp, Homo sapiens
gtgataaatttgttaactagactccgaccatagaaagagagagatacaggaagtcaatgtaaattgcagacatgccagctctgttggttcacattacagctacctaatgttgggcttaatttctttttcttcttcttcttcactatcatcaacctgttggatgaccagatcascagacccatcttctacaatctccacataggatctattctcatcttcactcaagtgccatctggaatccttatctccatctgatggggacataagatgttgttcagcttccaagtcaatggggaggctgtctatgccaaattctgcaagacactcattacacagtctgtagcgcctggttccctcctgtaccacttgccctgttagatctgtcacatgacgtttacattttctgcagatgagtttacatgcctggtgaatctgtgtagagatttaaatagtgataaaagtgatttttcaaaagcaggacagtttgatattttaggtaccagttca

SEQ ID NO: 783646 - DNA, 575 bp, Homo sapiens
tttgtcagccaaagcctatttctttctaacaatgctagactggtcattcttcattcaaactatattcttcaagcttctattatgtggcaggcatgcaatacagtgcctcggatagtgcagtgaatgaggtggaagtggtcgcttccttacagatcttccggtcctaattcaaggaactgaaatatggttcagttctgataactgagcactctgataatgtaaacacatggttttaaaagaactcacagaagaggctaacccagaagtgagggtcagaaaaaaccatgaaagaagacagtaaaatctggaatcagaaaaataagtaaacattagcataatataatagagaagaaaatagggagaggcactatttccaggagagaaaactgcacagacttgttaactgtgagtgctkagacaagttatattacctctggcatggaataatcactatagaatgctcataaaaagaattagcactttgtatggttttctgggtcaaaaccaacaggctaatccccttcttacttattaagttctaatcattgtattaattccaaaaatctaatatttga

SEQ ID NO: 783647 - DNA, 615 bp, Homo sapiens
actatcccatcattcactaagctcttgccaaatagacttactttcatttcttttacatcccttgtacaggctgtacatctcttgtacatgctgttccctctaccaaaactacttttttgttgagcaatttctactcattttttaaactcactgagatgttactctcaaaaataatataacttcacaatctctagtaagtctcctctttttcttcctttgtgacttgttatttttcctcattgcatttrtcacatttgtaatcatacatttatttaggggattgtttaatatctacctttttgcatattctctaaatattttcatttaataatttcctctatgcctaaaatcatacatcatgtggtaaataatattcgttaaacgagtgagtaaatgaattctttaagcaattatttaagagctgtagggattacttcagcttgggagaaatgtgatcagatttacatattggaaagatcattttggcaacattataaatgattggaaggagtaagattgaaaacaccaagaacacgtaagaggccattgctatagtccacctaagagattatgagggatccaacctaaggcaatagtggtgagaagtgggaatgg

SEQ ID NO: 783648 - DNA, 619 bp, Homo sapiens
gagagaagtccaggcaggctcagttgggttttctgctcatgtgaatgccaaaatgaaggtgctggctaatctgagctcttatatggaggcttttgcggggactctgcttccaagcttgttcaggctgccagcagaatttagtttcttgccactgtgggatggaarcccccatttctttgctggctggcagtggggccaccctctgctcccagaggctgcctgcaattcttcctcatgtggtccccttatcttcaaagtcagcaaaggcatgtcaaatccttctcataccctgacctttctggcttcctcttaattcccctttcagccagagagagctctttgtttttaaggattcatgtgatacatcaggtctacattccctgtcgtaaggtcaactgtatcaaacaacaaaatcctaggaatgatatctcattatattcaaaggtcctggggattaggaaagggcatctttgtcaagctatcttccaattctgccacaacaatataaagaatttcagggccaggcacaatggatcgtgcctataatcccagcactttgggaggctgaggtgggaggataatttgagcccaggagttcaagaccagcttagccaaaata

SEQ ID NO: 783649 - DNA, 619 bp, Homo sapiens
gagagaagtccaggcaggctcagttgggttttctgctcatgtgaatgccaaaatgaaggtgctggctaatctgagctcttatatggaggcttttgcggggactctgcttccaagcttgttcaggctgccagcagaatttagtttcttgccactgtgggatggaaacccccatttctttgctggctggcagtggggccaccctctgctcccagaggctgcctgcaattcttcctcatgtggtccccttatcttcaaagtcagcaaaggcatgtcaaatccttctcataccctgacctttctggcttcctcttaattcccctttcagccagagagagctctttgtttttaaggattcatgtgatacatcaggtctacattccctgtcgtaaggtcaactgtatcaaacaacawaatcctaggaatgatatctcattatattcaaaggtcctggggattaggaaagggcatctttgtcaagctatcttccaattctgccacaacaatataaagaatttcagggccaggcacaatggatcgtgcctataatcccagcactttgggaggctgaggtgggaggataatttgagcccaggagttcaagaccagcttagccaaaata

SEQ ID NO: 783650 - DNA, 633 bp, Homo sapiens
acccaactccagccctctctttagcttctacattggagaagggaaatacccaattctagcccccccccagtgatcttgtcccacttaaggacaggaaaagagtggaatgaaaagcacttgttgaaagtcaccgttcataggcacaggctcactaaaaggccgagacctgctataggactatagaatgcttcacttcccctgamctcttatcgtcacattacaatgtattgagtttctttcactcagtacatcatgcctggctttcaacaaaaaattagaagtcacactaaaagacaaaaacatagcttgataagacagagcaagcatcagaatcaatgtcaaatatggtagagatgttgaaattacaatacctatgaaattaaaacaactgcaattactatgataagacaacacacaagaataggttggtaatgtaagtagacagatggcaattccaagaaataatcagagaaatgctagagatcaaaaacactggaacagaagtcaacaatgtctgtaagggcttattagtagactggacatggcagaggaaagaatccctgcgattgcagatatataaatagagacttctaaaactgagaatcaaagaaaaaaacacagaagaaaaccaaa

SEQ ID NO: 783651 - DNA, 633 bp, Homo sapiens
acccaactccagccctctctttagcttctacattggagaagggaaatacccaattctagcccccccccagtgatcttgtcccacttaaggacaggaaaagagtggaatgaaaagcacttgttgaaagtcaccgttcataggcacaggctcactaaaaggccgagacctgctataggactatagaatgcttcacttcccctgaactcttatcgtcacattacaatktattgagtttctttcactcagtacatcatgcctggctttcaacaaaaaattagaagtcacactaaaagacaaaaacatagcttgataagacagagcaagcatcagaatcaatgtcaaatatggtagagatgttgaaattacaatacctatgaaattaaaacaactgcaattactatgataagacaacacacaagaataggttggtaatgtaagtagacagatggcaattccaagaaataatcagagaaatgctagagatcaaaaacactggaacagaagtcaacaatgtctgtaagggcttattagtagactggacatggcagaggaaagaatccctgcgattgcagatatataaatagagacttctaaaactgagaatcaaagaaaaaaacacagaagaaaaccaaa

SEQ ID NO: 783652 - DNA, 504 bp, Homo sapiens
taaaatttaaagtatttctgtgtttttaaaatgctcataataaaaaaattaaaagacaaatgatgctagggaaattcacttggcaaataataatatttgctaaataaagaacacatccaaatgaataaaaaaggtaaacaaatacagctaacctaggaggtgaaacttctctacaatgagaattacaaaacactattcaaagaaatcagagaagacacaarcaaatagaaaaacatcccatgctcatggctaggaagaatcaatataattaaaatggctatactgcccaaggcaatttacagattcaatgctattcctatcaaactaccaatgccattctttaaagaactagagaaaactatttaaaaattcatatggtaccaaaaaagagcctgaataacctagacaattctaagcaaaaaagaacaaagctgggggcatcacattatctgacttcaaattatattacaagactacagtaaccaagcagcatggtactggtac

SEQ ID NO: 783653 - DNA, 504 bp, Homo sapiens
taaaatttaaagtatttctgtgtttttaaaatgctcataataaaaaaattaaaagacaaatgatgctagggaaattcacttggcaaataataatatttgctaaataaagaacacatccaaatgaataaaaaaggtaaacaaatacagctaacctaggaggtgaaacttctctacaatgagaattacaaaacactattcaaagaaatcagagaagacacaaacaaatagraaaacatcccatgctcatggctaggaagaatcaatataattaaaatggctatactgcccaaggcaatttacagattcaatgctattcctatcaaactaccaatgccattctttaaagaactagagaaaactatttaaaaattcatatggtaccaaaaaagagcctgaataacctagacaattctaagcaaaaaagaacaaagctgggggcatcacattatctgacttcaaattatattacaagactacagtaaccaagcagcatggtactggtac

SEQ ID NO: 783654 - DNA, 592 bp, Homo sapiens
tatctctggctgacccctgaaccactggacagaagagcgcggaaaactcaaatggggataataatacctgcttttgtttattttctatataataaaggtaaagtgagataatggaataaaaatattttactccataaaatatcatatataataatattttattgttagatagacccaattatacccctcccccaaataacatcatactttcagcatcagctctacattcagaactaagaaggcaaagcagttttaccgtatttattgccaaacactattgctgccctcaagaagcaaggagacagacatatyaaatgagtgagactatcttggaaaaggtatccagtaaactataacgctggcaactccagggaggaaaattaggtggtgagaaaaagagatgggagggagactgttcagcatttttttcttttgaagctttgaatttcgtaccatgtgcaagtatcacttattcaaaaactaaaaaatgcaaatagttaatgagtatatgcacattagagagctatcagtgtactgatgcatcattttgatacattatacataggaatgcatggctttccctatagcatcc

SEQ ID NO: 783655 - DNA, 335 bp, Homo sapiens
tgctttaatagacactgaaaatcacaaaggaggaaggccaagtgccttagcaatctcaataaaaatatgaagttctttttacatggtaaatttcataatataaaaagtttaatgtctggaaatggtgtaatttacaaaaaaagtccacgtaggccaaagatggctaacactgcatataaggaacgtgaatgccagygggaaggtgtctgaggaggggcagggccacaggtgtcctgacagggaacatctttgaaggatctggcacaaacaagggcccagttcacaaaccacaggtacactcattttagatagaacagcagaataggtgatgaaaa

SEQ ID NO: 783656 - DNA, 635 bp, Homo sapiens
tgtcggcccccagggagagcatggcaggccctggtggagaactggtctgagggcaggctcttaccaaacagagacagcagggactggagcgcgaagtgcacagtccgtcgattagcttgcttcccggttttcaggattacttcctcctgaccaacttcacagagatcaaaacctagaggaacaaagaatataagcatctgcttccttcgggaagattccagatcttgaacatgagcgctatagggctccttgtgcaacttcatggaatgcctgcaaggcccttcagcaagcatttgggcctggggcttccccatgtctgcacagaggttggtcatgtggcagaggggtcgggctgccccacccagaacatccactctacgcagcccccatttggcgtgtgtgtggctctcactgcctggctctcctctgtcccttcacggaaagcactatggaccagaactcrgtaaggctcactcacatgttttcttttccatttttttttcacagaagtacagtctatataaagactgtccaggacaaaaactggccactccattcagcattgacagcagtatttaaagctggtgcatggtgaggtgaagtttctcaagggcaaagacaatgccttcatgcat

SEQ ID NO: 783657 - DNA, 629 bp, Homo sapiens
atacacacttagtaagctacaagtaaagcagaaagcaatgtatgaggataaagggaaaaacaacagattgatccagctcaacgataggaattgcaaaaatcattctgaatggtgcagggtgcaagtgaaatattccaaataaacttctgttaacaattgccaccaatgacccattcacctttggattctttttacttgagccttttttatctcctccctctgtcctataccctacctaccttattttcatctttttatgtgtaactatccaatctctctgacgaattgaaattgtgarcttcaggcaaggaatatgtcctgtatgttattttgattcaattaaattagaaacagtcacaaaaacaaaaccgccatttctgctccaccactcttcacctgtggaattgcttatgcatttcattattggcacattcaccattcaattctttccatcttctttgtttcagcacttcttctttattcaactcttcatttcatgcaacagctgttattggacgtgttcacacacagactaggaaattgtttgccacagagacagttgcaggagtagcctcaataaaataaatggaaatagcatttctggataaaagaactcttctattagatat

SEQ ID NO: 783658 - DNA, 574 bp, Homo sapiens
ccactctcatcactttggtcatacagacccttttgaacaaaatggagcatactcatatttataacccatcacaccaacttcttggaaatccaagtataatttgatgtacctatgtgtttcccagaattgcttagtgaggcagtttctggctatgaccaaaattgaaaacatataagtattcaaacaggaccaaatgctatttccacccaacttagagcagcaaatgttggaaagaatagaagactccttttggatgttttcccactggcttccaaagacagtggataagcaatgtatgaatacccaaacatttgggtttttatcttcattaaatccttatacaaacttttaaatcctgtccaccactcatttatctacacaatgtatttggaaacaataaaggaaaatcaakgaggcatttagttggcaggagcatagaacctgaattcaatggttggctttgaaaagcatgactatagctgtgttgctgagacattccactgggaaaggaaacctgatgatattccaggagagtgtgttgcatttggtgtcagtggaaatggaaggactaaag

SEQ ID NO: 783659 - DNA, 592 bp, Homo sapiens
aagtatggtgagagagacagagagaaagagagagctcttggtgttggatgctaacataagagaacccagaaatagacccacaagaaatacacctgatatttttcacacaggttcataagaaattcaatggaggaaagactactttttcaaccaatagtgctaaagcaggtggagttcagaagaaagaaaaaaaaatacctcaaattaaactcataccttataaaaaattaattcaaaatggatcataggcttaaattaaaaacgtaaaactgtaatttktttttaagacagggtctggctctgtcccccaggttgcagtgcagtggcgcgatctcggcttactgtgacctccacctcccgggctcaagcagtcctcttggctcggcctcctgagtagctgggactacaggtgcctgccaccatgcccaactattttttttttttttgtgtttttttgtagaggtggaattttgctatgttgcccaggctggtctggaaattctgagctcaagcgatcttcccaccttggcttctcaaagtgtgtaaaacttttagagaaaaacagaagaaaatctttgagacctagagctaa

SEQ ID NO: 783660 - DNA, 592 bp, Homo sapiens
aagtatggtgagagagacagagagaaagagagagctcttggtgttggatgctaacataagagaacccagaaatagacccacaagaaatacacctgatatttttcacacaggttcataagaaattcaatggaggaaagactactttttcaaccaatagtgctaaagcaggtggagttcagaagaaagaaaaaaaaatacctcaaattaaactcataccttataaaaaattaattcaaaatggatcataggcttaaattaaaaacgtaaaactgtaatttgtttttaagacagggtctggctctgtcccycaggttgcagtgcagtggcgcgatctcggcttactgtgacctccacctcccgggctcaagcagtcctcttggctcggcctcctgagtagctgggactacaggtgcctgccaccatgcccaactattttttttttttttgtgtttttttgtagaggtggaattttgctatgttgcccaggctggtctggaaattctgagctcaagcgatcttcccaccttggcttctcaaagtgtgtaaaacttttagagaaaaacagaagaaaatctttgagacctagagctaa

SEQ ID NO: 783661 - DNA, 592 bp, Homo sapiens
aagtatggtgagagagacagagagaaagagagagctcttggtgttggatgctaacataagagaacccagaaatagacccacaagaaatacacctgatatttttcacacaggttcataagaaattcaatggaggaaagactactttttcaaccaatagtgctaaagcaggtggagttcagaagaaagaaaaaaaaatacctcaaattaaactcataccttataaaaaattaattcaaaatggatcataggcttaaattaaaaacgtaaaactgtaatttgtttttaagacagggtctggctctgtcccccaggttgcagtgcagtggcgcgatctcggcttactgtgacctccacctcccgggctcaagcagtcctcttggctcggcctcctgagtagctgggactacaggtgcctgccaccatgcccaactattttttttttttttgtrtttttttgtagaggtggaattttgctatgttgcccaggctggtctggaaattctgagctcaagcgatcttcccaccttggcttctcaaagtgtgtaaaacttttagagaaaaacagaagaaaatctttgagacctagagctaa

SEQ ID NO: 783662 - DNA, 634 bp, Homo sapiens
aaagaaattgaattacatctttgcctccccccaccttcaatttaggagcattttcaaaattaggcatcaaaatgcaaaaacatcataaaataaatttgaaatgcagaaattactacttgcacagtgtctgtacaattttaattctaaacatttctaaaaactcagttctaagatagcattttcctgtgcgtgaagggaggtggaatggataatttgaattacaaaaaagacttgataaccccccacacatcaatttacctgtgaacaaaaagactcacactgagaaaatgggacttgggactatttgataaattactacagactacttgaatattccattagcaaaataatagctcgttatggaatctcagaagaatgtagtataattacaatagtactatcctcccttggagattgggaggaatgcaaatgttcaaaatgatagctatttaaccaatgttagagaaaaatgcytgaaaacaaactcggagggtatatgatttatggaacttagggaaattattatagtttccaccagctttaattagttgaatgtgtttctaccaaatgaaggttattcacattattgggccatatagatgtatatatgcacaccccacatgtgagtaatggt

SEQ ID NO: 783663 - DNA, 411 bp, Homo sapiens
gtgtgcaagtggcttttggttatgtggatgaattttgtactgtagaagtctgggttttcagtgcacccatcacctaaatactgtacattatatccaataggtaattttcatccctcacactcctcacaccctctcccttctgagtcttccattgtgttcatttagaatcartgcctcctcccaccccatggataccagtgatttgttttctctccctatgtttttgccttttccagtatgctatataaatagaatcatacattaccaatgtattgggtctagcttctttcacttagcatactctacttcagattcattcacattattttgtgtatcaatagttcattcatttttattgctgactagtatccattgtgagactgtatcacaggttatctattgatgtaatga

SEQ ID NO: 783664 - DNA, 497 bp, Homo sapiens
atgcataacttccctttgctgtcctgggttagggtgggttgagacttagggtgaccagggaggaatggatatcttgtgggtcaccttgactgtcttggggtgatgagagggcagtattaccaatgcttaatcatttgcccccataccaaggtgaacacgagatgctctggtcctagtggctgcagagttgtgcagcctctgtccctgtgctagctctggacctggtggtggccgcagagctgtgtagcctctgtctctgtgcttgctctggtcctggtggccacagagctgtacagcctctgtccctccrcttgctctggttctggcggctgcagtgctgtgcagcccctgtctctgtgcttgccctgtccttgtggtggctgcagagctgtgcagcctggccccagagctgtgcagcctctgtccctgtacttgctgtggtcccggtggtggctgcagagctgtgcagtctctgtttctgcactttccctggtcac

SEQ ID NO: 783665 - DNA, 599 bp, Homo sapiens
tgtgtggtttgtagaaatgaaaatctatttttaaatttaatgttgtgcatgctcccctctgcttctctatcttcctctgcacagcagtggaggcctctatcccctgccttgtctgggggactcacacctaagtgtggttttttgtttgtttgtttgtttgtttgtttgtttgtttttagacagagtctcactctgtcacccaggctggtgtgcagtggcatgatctcggctcactgtaacctctgccttctgggttcaaggtwttctcctgcctcagcctcccaagtagctgaggttacaggcaccaaccaccatgcccagctaatttttgtatttgtttttagtacagacagggtttcaccatgttggccaggctgttcttgaactcctggcctcaagcaatccacccaccttgacctcccaaagtgctgggattagaggcgtgagacaccgcgcccggccctgagcctggattctcttttccacctcctcagaaagccctccctggccccccaagccacgtgagacctctttgcttctcccagagcacccagtgctgttccttcccatcacttatgcaattaatgattaaatatgta

SEQ ID NO: 783666 - DNA, 577 bp, Homo sapiens
gcagtggctcacacctgtaatcccagcactttgtggggccgaggggggcggatcacttgaggtcaggagttcgagactagcctggccaacatggcaaaaccccatctctactaaaaatagaaaaattagcctagtatggtggtgcatgcctgtaatcccagctactcaggaggctgaagcagaagaatatcttgaacttttgaagccaagaggtagaggttgcattgagcgccactgcactttagcctggtgacagaccaagactctgtctcaaaaaaaaaaaaaaaaaagaaagraaaataagtgttagcggttcttgcggaactgtctctgcagggttcttttgctaaaactctattttacggggaagtgcacagatggggctaggagaatgtttgactaaagtttggccaagcaaagaatctttgccacaacagagaaacaagaaactaccatcaaattaagagaaagtaggaaaggaggtaagagaagcgaataaatatggtggcaaaagccaaaaccaaaaccaaaaccaaaaccaaaacaggatagcagaaataattcaaagtcttccagc

SEQ ID NO: 783667 - DNA, 630 bp, Homo sapiens
ttataggcatgagccatcacacccagccagcatatttttaaatataaccaaactgctgtgaggaattgaagttgacttcctagagctgataaaaagccccttggaaagaccagccttgtctatgtggtttccttacatgatttctgacctgtggtaagtaaagaatgtcactttctgacagacccaggaacctcaagaaatrtcgggaacctcaagaagagaggaattcactgactcattcaggtattacacagcccgatgaagaaattttgacttggctttctagcctcaagaggcttttgaaagtctaactggagattccttatgaaaatatttcagcaaagccaatttaaaaggagcctatgtggccaattactatttgtgctgcactttatgcaaataaacaggccaagtacaataatactaaaacttattttgcaaataaattggtcataatattcttggtataaaggtgggactggagagagacaaattatgattcagaagtgttaaagcaaactaaatatggcctgagaaggactctgtacttctatatttgagtccttgtggatgaactgcaacttaacttcataggtagacaagactgaaaacctgtcctaggagtctgtg

SEQ ID NO: 783668 - DNA, 573 bp, Homo sapiens
tttagtggctgcataaaactccatagagtagacctatccccatttattcaaccatcctcagccaatggacatttactttgcttacatcttttccacagagaccaatagaacaatgctactaaatattctttaggaagttaattcttggaaattttataacatatgcaaatacacattcattggaacaaataaagtggagatttcaccacgctaggtggacatttttcttatttcagagctgtggcatatccccccaaggattccctcaggtactgtaagagctgggccccagcatgacactccacccaaccgtccgtgtcacaccccgaagcctcacgtccttcctgtctctctcttttaaacatctcctggtttgcycagctctaagcttcctcctttactcctctgatcccaaggatttgctttatgaattctaaaaaaagtatttatttccaaaaagcatctggagcagttattttggaaagcaattgtggaactctgggaaagtgtgtgttttttacaaaccagacccttgaggaaggggtaggggctttgtcagaatccttgagggat

SEQ ID NO: 783669 - DNA, 573 bp, Homo sapiens
tttagtggctgcataaaactccatagagtagacctatccccatttattcaaccatcctcagccaatggacatttactttgcttacatcttttccacagagaccaatagaacaatgctactaaatattctttaggaagttaattcttggaaattttataacatatgcaaatacacattcattggaacaaataaagtggagatttcaccacgctaggtggacatttttcttatttcagagctgtggcatatccccccaaggattccctcaggtactgtaagagctgggccccagcatgacactccacccaaccgtccgtgtcacaccccgaagcctcacgtccttcctgtctctctcttttaaacatctcctggtttgctsagctctaagcttcctcctttactcctctgatcccaaggatttgctttatgaattctaaaaaaagtatttatttccaaaaagcatctggagcagttattttggaaagcaattgtggaactctgggaaagtgtgtgttttttacaaaccagacccttgaggaaggggtaggggctttgtcagaatccttgagggat

SEQ ID NO: 783670 - DNA, 569 bp, Homo sapiens
caacttcacacagatatgtatttggaaaggtggtggagtggggtgtttctattgccttttcagatacttgtggatattctttgatactacatcaaaacttgacaagtggaaatttcttaaagattagttaccatgtggaatctgaaaccatatcatgaagtttttaactctgttacataaaaatttacttgtcaatcttgcatgattttgtaacatgcatgtcttggaaaaattggttcactgaagcayacagattttctaaatttaacacattttatttaacacaaaatttttttcagtaatatttgttaatatcagcactgattttggctgaaaattctttaagattttaggaatctgtcaagctcacagtgggagatacaagttctctttttctttttttcttttagaggccgtctccttctgttgcccaggaaccatcatagctcactgcaaccttgaattccagggctcaaggcatcctcccgcctcagcctccggagtagctaagcctaaaggtaagaacggccactcctgactcatttctttcttcttttttgtagaaatga

SEQ ID NO: 783671 - DNA, 633 bp, Homo sapiens
cctcctccagggcttccttacaggccacaagtgcattccgagaaggtcatggtggatgcacaaggttcctggaggcccagactctgaccttgcacattgctgggtgctgcaatgcatcagtcaaagcaagttataggccagccaggatttgggaggcaggagaagagcagctgcagaacactgcaggccctgtccacctgcagcgggaggtggggtggtactggctgcaagytgaggagcgacctttctagaggtcttcaagaacaggccacaccctcccgagggtgatgtaactgaggccgtgggacctgaagtctagccatgtctctgtctagaggtcgatgattaccacgtgcctttttattgcaaattttgcccaggactcttttcttcagcttttagcagttccaagatgcaccccctggctggggctccttgaagaaccactgtttttctaaactcactcttttcttttgaggttttgacatctagtatttgactattttcccctgagcacagtgtcctgagttgagcctcggaagtgactctgaacgtttaggttggaagtctggaggaatcctcgctgctaaggctgacatcagggcggtgtgatttctgcaacgcccggagacg

SEQ ID NO: 783672 - DNA, 595 bp, Homo sapiens
cttgactttatgaaatcaaaaactttcacttatgacccaggatacactcttcctctgtctaactaattcaagcactatcttcattcattttgacttgcagattatccaaacagactccccataatgaaaagcaatcacactgcagaagttcttttttttttttccttttggtaaccagcctaacagattttatgttttattgaaataattcctatgtcattgttagtaaactttttatttgcctagaaaattgagattaaaaaataagtttattacatccatataactttctgtattgcttttaaagtcctcatgctgttaagttatagggctttgactcctagatctaaaaaggacaccaagtcctgctaaatcttaaacagtgacagcagttaaattatcatcttcrgatttgggagaagatgacaatcaaataaagtacattcgtgagacatagtgccataaatgaaaactattcaactcccctaggcccagggactatcacagaagtggtgggtgtgtgagattgtaagggccaattttgagagagaacattagttcagagtttctctatgaattaaacattaatatcaaa

SEQ ID NO: 783673 - DNA, 599 bp, Homo sapiens
gccttggccttcgcgaattctgagattacaggagtgagccaccatgcccagcctatttctttctcagctaattctcctggctgttatttgggttgatagctgcattttcgttttgcagacatccaaggcagactgatggctactttgccatcttcaatatgtggattccaaggtcaccaggggcataaccatcagccagaaatggagaatggacagcatagaggttgctcatgggaggtttatttgagccacttttggaagttgtacacatsacttctctttacagtaccttcattaaaacaaccgtgtgtctacactcaattgcaagggaggctaactctagtctagctgtgttctcaagaagaggcaaccaatatctgtttatttgcttgtgtgttatctgtttggtggacagctggctgtctcaaccacagagatgattctactttaggtggtattttctatttaatcatggcatactgaagaaaatctctgggtggacttcttatgtccactttatattgcatagcttcttttcagcaaatacatattagtatatacatatacatattagtagcaaatatatattagtatgcatt

SEQ ID NO: 783674 - DNA, 599 bp, Homo sapiens
gccttggccttcgcgaattctgagattacaggagtgagccaccatgcccagcctatttctttctcagctaattctcctggctgttatttgggttgatagctgcattttcgttttgcagacatccaaggcagactgatggctactttgccatcttcaatatgtggattccaaggtcaccaggggcataaccatcagccagaaatggagaatggacagcatagaggttgctcatgggaggtttatttgagccacttttggaagttgtacacatgacttctctttacagtaccttcattaaaacaaccrtgtgtctacactcaattgcaagggaggctaactctagtctagctgtgttctcaagaagaggcaaccaatatctgtttatttgcttgtgtgttatctgtttggtggacagctggctgtctcaaccacagagatgattctactttaggtggtattttctatttaatcatggcatactgaagaaaatctctgggtggacttcttatgtccactttatattgcatagcttcttttcagcaaatacatattagtatatacatatacatattagtagcaaatatatattagtatgcatt

SEQ ID NO: 783675 - DNA, 618 bp, Homo sapiens
acctaaaaaaaattatgccagaacagaggtacgtgtaacattttttttttttattgacggagtctcactttgtttcccaggctggagtgcagtggcgcaatctcggctcactgcaacctctgcctcatggattcaagtgattctcctgtctcagcctcccaagcagccgggattactggcrtgcaccaccatgcctgggtaatttttgtatttttaatagagatgggtttcaccatgttggccaggctggactcaaactcctgacctaaggtgatccacccacctcggcctcccaaagtgctggggttacaggagtgagccaccacacccggccaacacaaaattattgatcttgactgagtctatgtaaagtgacttatgatactacctctgtctaatgcacacctcattaattagcaatatgctgttctgtgtcatgccttgctgctttagtcacatacatagattgtacatatgcaacatgaagaaaaagctgattgcccccgaaagaataccactgctacaagaacatagatcttgccaatttgctgagtttttaaagatcaataccatttctcagggactgtagtttgaacatgcacacatgcaaatattaaa

SEQ ID NO: 783676 - DNA, 618 bp, Homo sapiens
acctaaaaaaaattatgccagaacagaggtacgtgtaacattttttttttttattgacggagtctcactttgtttcccaggctggagtgcagtggcgcaatctcggctcactgcaacctctgcctcatggattcaagtgattctcctgtctcagcctcccaagcagccgggattactggcatgcaccaccatgcctgggtaatttttgtatttttaatagagatgggtttcaccatgttggccaggctggactcaaactcctgacctaaggtgatccacccacctcggcctcccaaagtgctggggttacaggagtgagccaccacacccggccaacacaaaattattgatcttgactgagtctatgtaaagtgacttatgatactacctctgtctaatgcayacctcattaattagcaatatgctgttctgtgtcatgccttgctgctttagtcacatacatagattgtacatatgcaacatgaagaaaaagctgattgcccccgaaagaataccactgctacaagaacatagatcttgccaatttgctgagtttttaaagatcaataccatttctcagggactgtagtttgaacatgcacacatgcaaatattaaa

SEQ ID NO: 783677 - DNA, 618 bp, Homo sapiens
acctaaaaaaaattatgccagaacagaggtacgtgtaacattttttttttttattgacggagtctcactttgtttcccaggctggagtgcagtggcgcaatctcggctcactgcaacctctgcctcatggattcaagtgattctcctgtctcagcctcccaagcagccgggattactggcatgcaccaccatgcctgggtaatttttgtatttttaatagagatgggtttcaccatgttggccaggctggactcaaactcctgacctaaggtgatccacccacctcggcctcccaaagtgctggggttacaggagtgagccaccacacccggccaacacaaaattattgatcttgactgagtctatgtaaagtgacttatgatactacctctgtctaatgcacacctcattaattagcaatatgctgttctgtgtcatgccttgctgctttagtcacatacatagattgtacatatgcaacrtgaagaaaaagctgattgcccccgaaagaataccactgctacaagaacatagatcttgccaatttgctgagtttttaaagatcaataccatttctcagggactgtagtttgaacatgcacacatgcaaatattaaa

SEQ ID NO: 783678 - DNA, 470 bp, Homo sapiens
aaagctctaggtgacacctggtcacttacatgctactgttttattgtttaccagtttgtaagagccagcagctctcagagcagtatcggacactaactgatctgtttttctgtggccctcttttatttcttacctttagagactgaggtctaagctgtactttgaaagagaatccggtggacagggatgatgagaaggttggttccaagagwcagcataaacatacgtaaatgtgtaaagggaaaggtaagcagattggcctgactcaaaaaaacagctcctgccagttgggcagtgtttgggaaccgggctaggaaggagaaggtcgatgaaggtgggaaacatcaatggtcctgccctgggcatatgacccctgatgttttccaagctgcgcaactctcaggctggctgttctcagagtcaactggccccaaaagtgaagggctctgaagctgagtgcccagaaccag

SEQ ID NO: 783679 - DNA, 470 bp, Homo sapiens
aaagctctaggtgacacctggtcacttacatgctactgttttattgtttaccagtttgtaagagccagcagctctcagagcagtatcggacactaactgatctgtttttctgtggccctcttttatttcttacctttagagactgaggtctaagctgtactttgaaagagaatccggtggacagggatgatgagaaggttggttccaagagacagcataaacataygtaaatgtgtaaagggaaaggtaagcagattggcctgactcaaaaaaacagctcctgccagttgggcagtgtttgggaaccgggctaggaaggagaaggtcgatgaaggtgggaaacatcaatggtcctgccctgggcatatgacccctgatgttttccaagctgcgcaactctcaggctggctgttctcagagtcaactggccccaaaagtgaagggctctgaagctgagtgcccagaaccag

SEQ ID NO: 783680 - DNA, 639 bp, Homo sapiens
ggtcacccagaggatgagagaggcacatacagagggagatgactcagtgctcactctgcctcattccaagaaaaatgcaaaggaatacctcctactgatattggataagatgtgctctgcagagaagaagcctagtccacctgtccacccctgcctggtaacaagatgcagaaagstgaaataagtaaactccatttccttcaagccacagctcaaaagccaccttctcggaggcctgctctgagaccagaacggcaggtgagacctacaccttctcccatagtaacgtgcccagccaacaacatcaggtacagaagagtgagcagtatttgctttcctaacttcccactcaactgtgactccccaagggaaggggctgtgtttctcaatcctttcccccaggacccaagacaagcttgaaaagaccatcagtatgggaacattggtatggatgctagacatggcctatgcccttgaggattttggaatctcaagaccgtcacctccattcttgaacaccataaactgctcccaggagcaaatgccagcagatgacagcagcagacaccatctattgggctgtcctcatgtgcaagcataactctgaaaaacatttgattatcagaccctctccacaac

SEQ ID NO: 783681 - DNA, 629 bp, Homo sapiens
caagttcttaaaatcctatatgttttaagatatattagaggcagattctatactgaagaaatagtgcaaattttgcgcagttaacataaaatttagcatttttcatcctcccattatcttcagccccatgattttgtgtctttggggatgaatacttagactttcacttgatgcattcaggctctgggttagaaaaagatgcttaaagactgagtcatgaatattggaaaagaatatagtgggaggaatcactctacatgatattatgacctactatatagctgtagttaattaaaacagttgcagtartagagaaggaatagacacatagatcaatatgatagaagggagaattaagaaatagacctttacaatatgcccagctattttttgacaaaggagcaaaagcaatttaatagaggaagaataactttttttttcaacaaatgattctggaacaattgagcatccatagacaaaaatatgaaccttgacctaagcctcacaccttacaaaaaagttaactcagaatggatcatgggtttaaatataaaaagaaaacaataaaacgtttagaaaaaaataaaatcatcacctagagctagatgaagaattcttagacgtaatac

SEQ ID NO: 783682 - DNA, 582 bp, Homo sapiens
tattgcccccaaagaccttccagtgggacaagatgtggaggtagaagacagtgatattgatgattctgaccctgtgtacgcctagactaatacgtgtgcttgtgtcttagtttttaacaaaaagttttaaaagttaaacaataaatacagtattttaacaatagaaaaaaggttatagaataaggatataaagttttatatatatatatatatgtatatatatatatatatatatttttttttttttgagatgaagtcttgctctccagtagcccaggctggagtgcagtggygcaatctcggttcactgcaacctctgcctcccaagttcaagcgattctcctgcctcagcctcccaagtagctgggatcacaggcacctgccatcacgcctgggtaatttttgtatttttagtagagatgggattttaccatgttggccaggctggtctcaaactcctgacctcaagtgatctgcctgcctctgcctcccaaagtgctgggattacaggtgtgagccactgtgcgctgccaataaaatatttttgtacagctgtacaatatatctgtgttttcagctaag

SEQ ID NO: 783683 - DNA, 669 bp, Homo sapiens
aggtctgcggcttcactcctgaactcagcaagaccacaaacccaccagaaggaagaaactctggacacatctgaacatctgaaggaacaaactctggacacaccatctttaagaattgtaacactcaccgcgagggtctgcggcttcattcttgaagtcagcaagaccaagaacccactggaagggaccaactctagacacattttggtgacccagatgggactattgcctatcgccaagcagtgagtaccatcagacccctttcacttgctattttgttctatttttccttagaatttgggggctaaataccaggcacctgttaaaagctggccagttaaaarcgactagcacggccaccagacttaagacatggttgtcaggctttctgggaaagggctctctaacaacccccgactctttggaattgggagtgttggtttgcctggaaccagcttccgcttttcctgtacttctgggctgagccaagggttggcagagacaaaagccattcagctctggggtcccgacaacaagttggttgaccctgcagccatgagcagaactctcaaagtcatgtcgcccaagcgagactcacccatctatcctatctatcctgatgcttgcctcctgggtcctaatgcctgtcagacaaacttcctcccgcct

SEQ ID NO: 783684 - DNA, 684 bp, Homo sapiens
gggggactatctggaattttaggatccctcctcagaaaagcaggcctaacaaaagctattcctgaagctaggatttggggagcctcagaaattgtatccttcctattcgtataagtgaggacaaaaggcatcactcttctaactctggagatcccttccctccctcagggtatggcccttcacttcatttttggggcataacatctttataggacatgggtaaggtstcaatactaacaggagaatgcttaggactctgctgcatcagtaagcacaactattctgatcagcagggtccagggactgttgtgggttcttgggcaagaggtgtttctgctgctacgtcagtgagggcgattattcccatcagcagggcccagggaccgttgcgggttcttgggcagggggagaaacaaacaaaccaaaaccactggcggttttgtctttcagatgggaaacactcaagcatcaacaggctcattcttgaaatgcatcctaagccattgggaccaatttgacccacaaaccctgaaaaagacctggctcatttttttctgcactacagcttggccccaatattatctctctgatggggaaaaatggccacctgagggaaatataaattacaatactatcctgcagcttgaccttttctgtaagagggaaggccaatggagtgaaata

SEQ ID NO: 783685 - DNA, 684 bp, Homo sapiens
gggggactatctggaattttaggatccctcctcagaaaagcaggcctaacaaaagctattcctgaagctaggatttggggagcctcagaaattgtatccttcctattcgtataagtgaggacaaaaggcatcactcttctaactctggagatcccttccctccctcagggtatggcccttcacttcatttttggggcataacatctttataggacatgggtaaggtgtcaatactaacaggagaatgcttaggactctgctgcatcagtragcacaactattctgatcagcagggtccagggactgttgtgggttcttgggcaagaggtgtttctgctgctacgtcagtgagggcgattattcccatcagcagggcccagggaccgttgcgggttcttgggcagggggagaaacaaacaaaccaaaaccactggcggttttgtctttcagatgggaaacactcaagcatcaacaggctcattcttgaaatgcatcctaagccattgggaccaatttgacccacaaaccctgaaaaagacctggctcatttttttctgcactacagcttggccccaatattatctctctgatggggaaaaatggccacctgagggaaatataaattacaatactatcctgcagcttgaccttttctgtaagagggaaggccaatggagtgaaata

SEQ ID NO: 783686 - DNA, 684 bp, Homo sapiens
gggggactatctggaattttaggatccctcctcagaaaagcaggcctaacaaaagctattcctgaagctaggatttggggagcctcagaaattgtatccttcctattcgtataagtgaggacaaaaggcatcactcttctaactctggagatcccttccctccctcagggtatggcccttcacttcatttttggggcataacatctttataggacatgggtaaggtgtcaatactaacaggagaatgcttaggactctgctgcatcagtaagcacaactattctgatcagcagggtccagggactgttgtgggttcttgggcaagaggtktttctgctgctacgtcagtgagggcgattattcccatcagcagggcccagggaccgttgcgggttcttgggcagggggagaaacaaacaaaccaaaaccactggcggttttgtctttcagatgggaaacactcaagcatcaacaggctcattcttgaaatgcatcctaagccattgggaccaatttgacccacaaaccctgaaaaagacctggctcatttttttctgcactacagcttggccccaatattatctctctgatggggaaaaatggccacctgagggaaatataaattacaatactatcctgcagcttgaccttttctgtaagagggaaggccaatggagtgaaata

SEQ ID NO: 783687 - DNA, 684 bp, Homo sapiens
gggggactatctggaattttaggatccctcctcagaaaagcaggcctaacaaaagctattcctgaagctaggatttggggagcctcagaaattgtatccttcctattcgtataagtgaggacaaaaggcatcactcttctaactctggagatcccttccctccctcagggtatggcccttcacttcatttttggggcataacatctttataggacatgggtaaggtgtcaatactaacaggagaatgcttaggactctgctgcatcagtaagcacaactattctgatcagcagggtccagggactgttgtgggttcttgggcaagaggtgtttctgctgctacgtcagtgagggcgattattcccatcagcagggcccagggaccgttgcgggttcttgggcagggggagaaacaaacaaaccaaaaccactggcggttttgtctttcagatgggaaacactcaagcatcaacaggctcattcttgaaatgcaycctaagccattgggaccaatttgacccacaaaccctgaaaaagacctggctcatttttttctgcactacagcttggccccaatattatctctctgatggggaaaaatggccacctgagggaaatataaattacaatactatcctgcagcttgaccttttctgtaagagggaaggccaatggagtgaaata

SEQ ID NO: 783688 - DNA, 539 bp, Homo sapiens
ggaggacttcacagcttatccccatatcctagcctccctatagctccccttcctattaatgataagcctcctctaatctcctccacccggaaggaaataagcaaagaaatctccaaaggaccacaatcccccctgggctattggttatgtccccttcaagctgtggggggaggggagtttggcccarcctgggtacatgtccccttctccctctctgatttagagcagatcaaggcagatttggggaagttttcagatgatcctgataggtacatagatgtcatacagggtctagggcaaacctttgatctcacttggagagatgtcttgctattgttagatcaaacactggcctttaatgaaaagaatgagactttagctgtagcctgagactttggagatacctggtatctcagtcaagtaaatgatagaatgacagctgaagaaagggacaaattccctaccagtcagcaagctgtccccagtatggatccccactgggacctcgactcagatcgtggggactggagtcgtaaaca

SEQ ID NO: 783689 - DNA, 641 bp, Homo sapiens
tgagtaatcctgggacagcctgtaaccaggtatttctcccaccttctcagttgtaactgggagactttgctcttttcacatgcctttcttgttatgcctgaaagtcccacccttattaaggagggatatattagccaaggctggagctattatctacatgaatatggggaacaagttacccatttattgtctcctacttgggagggaatcaaccctgaagcctgggcattggaaggacaatttggaggggcaaaaaatgcccacacagtccaaatcaggctaaaagatcccaccacatttccttatcaaaggcaatatcccttaaggcctgaagctcataaaggattacaggatattgttaaacatttaaaagctcaaggcttagtaaggaaatgcagcagtccctgcaacaccccaattccaggagtayaaaaacagaatggtcagtggaaactagtgcaagatcttggactcatcaatgaggcagtaattcctctatatccagttgtacccaacccctataccctgctttctcaaataccagaggaagcagaatggttcagtgttctggacctcaaggatgccttcttctgtattcccctgcactctgactcccagtttctctttgcctttgaggatcc

SEQ ID NO: 783690 - DNA, 608 bp, Homo sapiens
cactgggggctagcccttttggggagacatcatatagcagacagatgctatgacagggctagttaagggaagagttcaggcttcaagttgaggctcgttactttcccctccagactagctagttatttcttagtggatttccctgcctcctatctctttccagtcctatataccaccaccaaactaaccattgctatcatgattatgctcaaaaatggtcaatagtccccmagtgcctactacttaggcttcaaacattttaggctgagattgaaggcctctaccagccagggcctaaccttccttccatacctggcttccacagccctccaatccagctaaactcacagactgtccttcatacatgccatcctttattacctctccacttttgtccctgcccatcatcttgagggtttttcctccacaatccactcttaatgtctcatttccgcatgaagactcaactttcatgtccatcagaaagtgttctctaatccccagtctagaagcaaccttcctttcttctgaacatccatggaaatttgttcatacttcttttagaatgttttttacgacattcctagaactgtggttatttttatact

SEQ ID NO: 783691 - DNA, 619 bp, Homo sapiens
attcctagaactgtggttatttttatactcttcacatcttcctactatattatcaacctaaagacaggatttgtggctcatccactcttagactccataatactttatactccaataaaaaacagatgtagctaaggaaatactgtgctaatgtttgttgaagttagtgctaaaaaaaagtcatatgaatggatgcttggaacttccctgtgatcctgcacacattgattcttatggatatatattttttytgcatttctggaacacaaatgttctaaatgcatacatacttcatccatccatccattcattcattatttaatacaaacatattgaatgcccgccatatgcaaggtatccacaggatagggagggtgctggctctggctttatgcaatgtacgcactcattgatcaatgtttatgtcattttgtttcccttctttccagacaaagggaagcaaagactcactgcacctcattactgtcagcagagagcaatgtgtaattggaatgacctttgtataagtgctgacctatggggtcagaataagccttataatgtacagaaccaacttatgtgcaattttaacatcgacagagaatattggcctttaaga

SEQ ID NO: 783692 - DNA, 619 bp, Homo sapiens
attcctagaactgtggttatttttatactcttcacatcttcctactatattatcaacctaaagacaggatttgtggctcatccactcttagactccataatactttatactccaataaaaaacagatgtagctaaggaaatactgtgctaatgtttgttgaagttagtgctaaaaaaaagtcatatgaatggatgcttggaacttccctgtgatcctgcacacattgattcttatggatatatattttttctgcatttctggaacacaaatgttctaaatgcatacatacttcatccatccatccattcattcattatttaatacaaacatattgaatgcccgccatatgcaaggtatccacagratagggagggtgctggctctggctttatgcaatgtacgcactcattgatcaatgtttatgtcattttgtttcccttctttccagacaaagggaagcaaagactcactgcacctcattactgtcagcagagagcaatgtgtaattggaatgacctttgtataagtgctgacctatggggtcagaataagccttataatgtacagaaccaacttatgtgcaattttaacatcgacagagaatattggcctttaaga

SEQ ID NO: 783693 - DNA, 611 bp, Homo sapiens
agatccctgttatcatgttgaggaaattcccttctatttctagtttgttgagattttttaattcatatataggtattggatatttttcacatgtttttcttcatcagttgagatagtcatgtgatttttgctacttactattctattaayatggtatattacattaattgatttttttaggtgttgaaccaaccttgcattcctgaaatacatcacacttgttcatgatgtataacctttttaatacacttgaattctgttcttgaattcatttttctaatattttgtgaattttttttgtgtgtatgtacatgatactggctatcatcttttcttgtgattgcgctatctggctttgctctcagggtaatattggtctcctggcatgagtttaaaggtgttccctcccctctattttctaatagtttggtgaaaattggtattactttaagtatttaataaaattcaccaataaagccacttggacctgagcattttttttgtggtaatacagtatttctaattgctaattagatttctactagaaattactggcacaatttctctttttgttttaggtatattcagattttctatttcttcctcaatta

SEQ ID NO: 783694 - DNA, 523 bp, Homo sapiens
tatcacggtattgcactccagcctgggtgacagaggaggctctgtcctaaaaaaagaagaaaaaaatatgcttttagaggattgtttccaatgtcctgaattaatcatgttactgaatactgcagaatatatgttctttgtcttgcctcttgccttgacgcctcttttccctacttgccgtctttctaaaastgtgcccataattggaaatttgttgttgttttctatctagacttcgagataactctgttgtttgcctggaggctgcttcagcaatacttttgtacaaaaggaatgacctctttacatactgatttcgtttagcttatcttgttatttctattcatgcacccattcccacaaaacacacagacacacacacacacacacacgtgcgcacgtgcactccctccactcatctatgaattcctcatgatattgtattggctacatgtaagaaaaaacagtctcagtcaaatgtatgggcacactggctgaagcatcactctgattctagggaatg

SEQ ID NO: 783695 - DNA, 577 bp, Homo sapiens
ggatgtttacagtgtgcctttcatggaatagttcttcatctttgtgaacggcctaatgctaaagtgactgacctgtgaccaaatgcccctctcaaaggaaacttgttcataatggcagatacccctgtggctcttaactgacctgtgtccagtttattcctaccaagatgtcaggagagttgtccaggagagccctggctaggaggagagttaggttcaggtgtgtcagtcaagtgagacacagaggaggcaacacaataaaacacatgaaataacagaagcagtgtgtcactgatagatcctagcgagaaggggccggcatacctccaagggccartaggaagctgggagctgtcttagaaatacacgtgcaactagctagtggagagcaagagagagagagtgagggactcataggccagagcctttactggtgtccaggctcttacccacgcaggttttcctcatggagttctaattggtcagtgtagatagagcaagggggcactagctcagtggagtcatgctgtactgagaggtggtccctgtggcatatctggggaggtgttgggggtca

SEQ ID NO: 783696 - DNA, 649 bp, Homo sapiens
gttaaaaaaaaaagttgtttggaagaagatgtttggtaacagagttctttaagatctctgtaattaagacctagatgggaagtaaaggggcagcaatcctccctgacctcattttcatactcttcatcatcacttctactgtatctcaatcagtgataaaattacaggcttattttttaagtgctgtgattatcagttatactgtaattatctgtttatctgtccacatcctattaggctctaagctcttcaacggcagaacctctggtgttcccattttatcgctagagtgtctggatctgtgcctgaccaattattgattgctcattgaaactaagagtgaatgaatgaataatgagtggatcaatgaatgaatgactttctagagtttcatatcaatgggctctcaaawctggttgcatcttaaaatcacctaacagctttaaaatcaggtttttgggatccaatcctagaaattctaattcaatagatgctaggaaatatctttttgaaaagatcgttaggtaattctgggaaacagcctgctttgggaaccactgctatatatatcaattaagttttggactcttactaaaatcccctgccaccctttaatttttatcacccagacggtatccatacactgtat

SEQ ID NO: 783697 - DNA, 318 bp, Homo sapiens
catatcaatgggctctcaaatctggttgcatcttaaaatcacctaacagctttaaaatcaggtttttgggatccaatcctagaaattctaattcaatagatgctaggaaatatctttttgaaaagatcgttaggtaattctgggaaacagcctgctttgggaaccactgctatatatatmaattaagttttggactcttactaaaatcccctgccaccctttaatttttatcacccagacggtatccatacactgtattacagagacagagcctagactaggatgatggtctcaaggacaagttattttttattccaa

SEQ ID NO: 783698 - DNA, 543 bp, Homo sapiens
gaacaggacaaaaaggaaaggccggagagtccccccagcggcgcccggtgcccgcagaccctcgcacaggctcttcgaactcacccgggtttcgccgactccaaagaaagcgcgctccctccgagagcgctcccccggctctcccgccgcgcgctccggcccscagggcgggaggacccaggcggacagatccatccctccgcgtctggtgtgggcacggtgtcgtgccccgcggcgcctgtcagcgcgcacaggtgggaccgcagcacagagaacgctcccgagcgccctgcctcagcctcggcgtggggcgagccgcccgcgcccgcacccgcacccctttccccgcgcccgaggagccgggctgtaccccggagccggcggagctggaggccgcgggcggagcgcgggttgccccggcagctctttctcggcaccaggtccgagacctaacggcagttctctctgaccgcttcccggccgcgcgctcgcgcgggtgtcatggccgagcggcggcccccgacgaagtttcccggagctgac

SEQ ID NO: 783699 - DNA, 497 bp, Homo sapiens; identical to SEQ ID NO: 776386

SEQ ID NO: 783700 - DNA, 624 bp, Homo sapiens
tccacggcaacagcgtcagtttctcagaaatttcattgccaggctcccccacttcaatggacaatagaagaaaatgtgcctcaatgtcgcaaacttcagtgccgctcaaggagctaattaaatctcctaggatgccctcacccacaccctaagaaatttgaasggtacgcaaaatccaaactcaattcaacaccattaaaataaaaggcctttacatataaagcttaatcttgactttctttgtccttttctccccacaaagtagtagatttccaaattccccaaaggtcatgagtttggcaatggaacaatggcatccccagagtgactgccttggggagagagtttgctcctctcttggccatgccgtgggggctgttgtctctcttgggagctgcaagcatcatcaaagtggatgagggctggccacagcaagaagtatggtctctgtcctatagttttctagtgttagggtgatgaggtctctatctattcacaagaagaaaaagagtcatcctaaaccattcccaaactatgttagaaatgaagaaaggggaagggaaatagcacttgctgagcacttcgtttaaatgtgccagtcattatgctgcatattttatattt

SEQ ID NO: 783701 - DNA, 604 bp, Homo sapiens
aaatttcttgtttattttttctccattttttaatccaaaatattacaacacataataggacacagatactgaaataatacatttagtgccagctttgagtcaggtttcattgctgtcaagagaaaggtaaaggtgatgttcaatccatctcccttgtagacagtaaattttaattagttttaattagaaatgagaagtcctacacctcatctctacaagtctcctgaaacataccaagatattgtctttctgtagactcagagcacgtataatcagataactggtccacttactgtttatattgtatattttatccaagaatgatttatacctataaatccagccaggaggatctcagaataatatttatgagatagactgaaatttaatagcaacacttcttaagtagatggactatcaagaaactcttaaaataacagaatgaaaaataagrtagtggctctgtatataagccccgtcagccagtacacgggaggtactcgatcaatgccaaatgaaggagtgacttcgtaagagggactaagaagcaattcaagttgctattctggaatctcttgtgtaagatgggaatcaagtctaacag

SEQ ID NO: 783702 - DNA, 604 bp, Homo sapiens
aaatttcttgtttattttttctccattttttaatccaaaatattacaacacataataggacacagatactgaaataatacatttagtgccagctttgagtcaggtttcattgctgtcaagagaaaggtaaaggtgatgttcaatccatctcccttgtagacagtaaattttaattagttttaattagaaatgagaagtcctacacctcatctctacaagtctcctgaaacataccaagatattgtctttctgtagactcagagcacgtataatcagataactggtccacttactgtttatattgtatattttatccaagaatgatttatacctataaatccagccaggaggatctcagaataatatttatgagatagactgaaatttaatagcaacacttcttaagtagatggactatcaagaaactcttaaaataacagaatgaaaaataaggyagtggctctgtatataagccccgtcagccagtacacgggaggtactcgatcaatgccaaatgaaggagtgacttcgtaagagggactaagaagcaattcaagttgctattctggaatctcttgtgtaagatgggaatcaagtctaacag

SEQ ID NO: 783703 - DNA, 554 bp, Homo sapiens
cacacccttattagggagggacatattagccaaagctggagccattaactatatgaatatggggaacaagttacccatttgttgtcccctacttgaggagggaatcaaccctgaagtctgggcattggaaggacaattcggaaaggcaaaaaatgcccacccagtccaaatcaggctataagaccccaccacttttccttatcaaaggcaatatctcttaaggcctgaagctcataaaggattacaggatattgttatacatttaaaagttygaggcttagtaagaaaatgcagtagcccctgcaacaccccaattctaggagtacaaaaactgaatcgtcagtggagactagtgcaagatcctagactcatcagtgaggaagtaattcctctatatccggttgtacccaacccctataccctgctctctcaaataccaaaggaagcagaatggtttcactgttctggacctcaaggatgctgccttctgcgttcctctgcacttggactcccagtttctctttgcctttgaggatcccacagaccacaaaacc

SEQ ID NO: 783704 - DNA, 599 bp, Homo sapiens
aaaaaaagggcactctgacagaacagaaatggaacatgggcagggacaaataagggaataaaagctggccaccacagccagcagcagcaacccacttgggtccccttccacgctgtggaagctttgtccttttgctcttcacaataaaccttgctactgctcactctttgggtccatgccatctttaagagctgtaacactcaccatgaaggtccgcagctccattcttgaagtcagcgagaccatraacccaccggtaggaaccaactccagacacaaaaagacatagaggaaacttacacgcatattgccacatgaaagaagccaatgtgaaaagggtacatactgtatgattccaactttatgacattttggaaaaggcaaagctacagggatagtaaaaaaaaaaaaaaaaatcaggggttttggggattgggaggaacaaataagcagagcacaaagagttgttaggacacatgtcatctatttgtcaaacacagaatgtacaacaggaagaatgaactctaacatgaactatagactttagttaataataatgtatccatattagttcaatttcaacaaatgtaagatgcaag

SEQ ID NO: 783705 - DNA, 612 bp, Homo sapiens
atgaatatttactgactgcccattatgggaacaagcagtattttaggtactattcattcaccagggaagaataagaatgagaataaggataagaataccatccctccttttgcagagcttgcagactagttgaggagactgatgattaacaaataaatatataatatgtaaggtgcttaaaagaaaaacacagaaggctagaggactgagagggatggggtggatgctattttatgtagatcagggaaggstgctttgataaggtaactcaagaattcctacttaaggaagcagagaagcttaggaatgaaatatggatcactttctccttgcttagactctaaccaatatttgagcacagaggtggttttagaaaactcaagttcaaaaatcgttcctgtttattttcaaaaggaccaatgagtgtggaccctaaatttaaacagctaaagctatagtctaaggacagtctcaaataaatacctttgaattgtcatatggtgcccaggagggtcttgtggaaagggtttcatggtagtgaaagatgtaataactctttttttcttttaaccctaagactgtgctcaatgttttaaaaacagttgtaaatga

SEQ ID NO: 783706 - DNA, 623 bp, Homo sapiens
tttcttttttttttttttcttttttgcagctattgttaaaggggttgagttcttgatttgattctcagcttggttgttattggtctatagaagagctactgatttgtgtacattaattttgtatccagaaactttgctgaattcttttatcagttctaggagctttctggagggatctttagggttttctaagtaaacaattatatcctcagcaaacagcaacagtttgacttcctctttaccagtttggatgccctttatttctttcttttgtctgattgctctggctaggacttctaggactatgttgaagaggagtggtgagggtgagcatccttgtattgttccagttgaaacggctttcaccttttcccattcagtattatattggctgtgggtttgtcatagayggcatttattacattgaggtatgacccttgtatgctgattttgctgagagttttaaacataaagtgatgctggattttgtcaaatgctttctctgcatctattgagataatcaggtgatttttgtttttaattctgtttatgtggtgtattatatttattgacttgcatatgttaaaggatcccttcattcctggtataaagcccacttgatc

SEQ ID NO: 783707 - DNA, 496 bp, Homo sapiens
actagacccctctctgccttctctggatagggaagtcttaaacactttcctaccagggaaaaacaatccactccagctgaacaaattagtcccccgagatgtgtccagagttggttcctgccggtagggttgtggtcttgctgacttcaagaatagagccgtggaccttggtggtgtgtgttacagctcttaaagatggcatggacccaaagagtgagcagcagcaacatttattgtgaagaggaaagaacaaagcttccacaccgtggaaaaggaccccagtgggttgccgctgctggstgggggcggtggccagcttttattcccttatttgtcccccaccatgttccgtttctgtcctatcagaatgcccttgtttcaatcttccctgcaattgtctacttttaggatcctgctgataggtgcgttttacagagtgctgattggtgcattttatagaatgccaattggtgtgttttacagagcgctgattggt

SEQ ID NO: 783708 - DNA, 612 bp, Homo sapiens
tgactgcttagtgggtcagttttctggaagaaagtcagtagtgggagcacccattctattttatggaatcaaggttgtccgactaaaaaaagaaggaaagttgatagccaatttgccatctctcttctattgctttctagatagacaaggccaaaagaaacttaaccagakgaataagtgtttggaaggtgaattcttttaaaattaatttgtagaaacaaaatgtggcatgttgttgtgccgaacccctattaacctcggtagggaaggcaccagggtcaagaggctgaagaagagaccccaagccagcaaacgagacctgtggcttttttagggccttacatacagtggcagcaggctggacaggagaacccccttacatacagaaacagtccagtggcagcaggctgggccccacatctgcaggaaaaccacttgcaaacagcatgcagtttacatagcattttcactgaatacccttcccttaatgactcctacttggcaaccttcagccaacccaaaacttaggacctcaatcctctatatggcccaagttccatgggatgggtagggggctcagatgtccctcatagacaaagaacaaatctccag

SEQ ID NO: 783709 - DNA, 655 bp, Homo sapiens
gtgatggaccagggagatatcttgtggaatgggaaatagtcagatccctgagaagtaaattgtggcatagcactgaggagttgccgtgtcctaacacagaataacaaagatgtacagcaggtccttgaataacatctctttattcaatgttgtttcattataaataaacctgatgagaaaaagaagaattgattcttcgctggggcctctgtctgtatgaagtctccatgttctccccattctgtgtggagtttctccaggtactctaatttcctcccatatcccaaagatgtatacattatgttaattggtatatcttctaaatggtctcagtctgagtaagtgtgggggtatgtgtgagtgcactctgcagtggaatagtgttggtgccaatctcgtgccctgacaggttccatccactggcaaccctgaactggagtaagtgggttgggaaatgaatgaataatgaattytgttattgtccaataaaaattcataaagtgtacagtaatcatccaaatgcatgacaataaatgatgccagatgaaagagctcagtgagcctgtcatagttgttattgtgtgattttgaactgtgtggtggtaggaggtgctcttttcaatttttgacttgcaaacacttattccttgattta

SEQ ID NO: 783710 - DNA, 618 bp, Homo sapiens
agttactagaaaagtgaccacagacctcagaagagcactcccagaggaaggtaaagaaaaaacacattccccaacaacaggccaaagaaagattcccccaccaccactacttacagctgctgaggtaaccgaggatttactgaagagccgctcagcttccttaaacttccggttccttcgatcatttttgctattggagtttctaaaacacagaagaaactcattatgagcaccaagctatgtctatggctcaagctggggatgccccaggactcatgttccatgcaggaagcttccatgtcactcagactggcccaaacgacctttatgctgaacayagaaagcaacgttttccaatatatggtacatgtcccactgtgagacatgagatttagttgcttcacatgttcattttttaaatttatttatttatttacttatttatttatttattgagacggagtcttgctctgtcgcctacgctggagtgcaatggcagaatctcagctcattgcaacctctgccccttgggttgaagcgattctcctgcctcagcctcccaagtagccaggattacaggtgcccaccaccatacctggcaaatttttgtatttttag

SEQ ID NO: 783711 - DNA, 525 bp, Homo sapiens
accaccctggtattctccagagcctcatgtcttgcaattctggaaatgctcaaaatcctgtttgttctacagaaagatcagtttcagtttgctgggacattctgctgaaaataaacatgtaaataacacatccccaaatacaggcattgatactatacacacggatattcctttgatcccatgtgcaaatgcaaacatattcattctgtctttctctcctcctcgctctcactctctctctttctctccatcccccatctctttgtctcttcaaacccattcctgatacattattttcttatctattctacagctacctccatcatgccccacgacatcttcattactttcttytgagatagtctactgggggccatccttgtcctcagagggcttgaagtctaatttagttggccaacatcaggtgcctcaaaattcatagggggaaaatgtaacaatattgaataaagttgttcatggagtatggatgtaagggaagagactaggagaactggctagcaaatt

SEQ ID NO: 783712 - DNA, 629 bp, Homo sapiens
atatcacaaagagctgaagcttttccttacaagatctccttaaaaatcatcctcttccggctgtgaccattttcagtttttcttcagtacaatgtgttggggtggggggtggggaagagtttggcgttggaagaagaaagcctttaggagatacaaggaaattccatgttaggaaatcattagcaaagggtgacttcgtctgttttcctgccactgacgctgacagtgacacagatgtgtgggttgaaataggaacgtcattgaatttttacactccaccaggaaataccctgtttctggggtgggggtggggkctacagattcactgcaacttaaggtaggagattcactactgtcaatcctttttactaaggaaagggatttttttagcttagccagcatgtttaatgtattttcttcccttttaaattgatcacctaaaggcataaaatgcacctgttaatggatggtccctaggaaactcaattactatttggggttatgaaagggaataaactggtcttagacaagtggctcttctgaaaatagctggactatgcctcttctttaaaggagcctcaatatacagtaaaacctttttttattattgcactttaagttctagggta

SEQ ID NO: 783713 - DNA, 421 bp, Homo sapiens
ctctggggctttaacatcacaaggaaataaagtccctcacagaattagaggatcagataagttgagacaaaaatagaattgcgcaaagtaaaaatatctatcggaaatttttccccttaactgttggaaacaagaaatagcgggttgtgctggcaactcttattctgatgaatagcgtctgcccgctcattcagattccacgaggctcttgatgagagagaggtgatttgggcgaatgaagaggaatgtcsaaaacacaattgctcctccccagcctccagaatagatgctcactgaataaccatagaaaaaccccagcttcatgcagaagagattctgaccatgcagggcttgtctgataaacactcaaaacaaaaggaatggctttgctccttggctgccaacttctttctagcatttt

SEQ ID NO: 783714 - DNA, 512 bp, Homo sapiens
aatttgcctcaacctgaaagcgatccgtcacttcctctcacattctacccaccggaagtagccacgtgaccctgcctagaagcaaggaggctgggaaatgcaattttcctttgtgcccaacaagtgcaatcggtttggagaaagcagctagcctatctgctccatgttgtttcaggactcacagctgcctgacgcaaagaaagaaaatccagtctgctctgacctcagatgataagatttaggaacatggataaaagcctaaagtttggagtcactacgacctgggcttgaatccakttcagctccttgccagctaaatgaaactagagaaatcattccaattagtttcagtgtctctaaagtggaaaataatcaaggctttgacagttgtctagcacagcgcctggcacagaatatgtactcaaagttttgttaagtgagtttacaaatgttcttataaggattgcagatggtggagcaggtgaagtgccttacactggaggacacatccc

SEQ ID NO: 783715 - DNA, 645 bp, Homo sapiens
tatactctttagagtgtgaatcaactcatctccatttgagcatgatttgttgagtcagcatatctttcgtttttataatattcaaatgcttatcactcctctctctctttctcaagaaaaattgtgcatttttctcagaaaaggtaaataattctccttcttaagaccatcaaaagaattcatttccatcttctgtctacttccaagatattagaaaggttaaggaaccgctccgaaacaatttcctggatgtttaaaatgtggataaaatgaatatgaaatggaatagtatatgtgaaaatacactttgaaagccatayagtagaagaggtaaacaaagcttatccccatttaagaagatgaaatttatgctcaaaagattgagacttactcaagttcacctagctgaggagggagctggatatcaaattcaggttttgaaacgtgagagttatgagaagatggcaatgcgctgtctacttttttgaagggacacaccagtaccactaatttcaatgtaccatggctatccctaaccctcacgccccaacactcaatgttctctttcagtatccactcaccagggctgcctatagatgttccctcggctgtctctctctctctctctctctctctctctctctc

SEQ ID NO: 783716 - DNA, 645 bp, Homo sapiens
tatactctttagagtgtgaatcaactcatctccatttgagcatgatttgttgagtcagcatatctttcgtttttataatattcaaatgcttatcactcctctctctctttctcaagaaaaattgtgcatttttctcagaaaaggtaaataattctccttcttaagaccatcaaaagaattcatttccatcttctgtctacttccaagatattagaaaggttaaggaaccgctccgaaacaatttcctggatgtttaaaatgtggataaaatgaatatgaaatggaatagtatatgtgaaaatacactttgaaagccatatagtagaagaggtaaacaaagcttatccccatttaagaagatgaaatttatgctcaaaagattgagacttactcaagttcacctagctgaggagggagctggatatcaaattcaggttttgaaacgtgagagttatgagaagayggcaatgcgctgtctacttttttgaagggacacaccagtaccactaatttcaatgtaccatggctatccctaaccctcacgccccaacactcaatgttctctttcagtatccactcaccagggctgcctatagatgttccctcggctgtctctctctctctctctctctctctctctctctc

SEQ ID NO: 783717 - DNA, 564 bp, Homo sapiens
agcagtgtcttaggcactcaaattcatcttaactaatgactccaccatcttcaaataatggctcctaagttcatcatgttagtccaccttaagtgaacagaaagaaaaaagcttgaagatcatgagtggatgactttacaaacaagcctggatgactttcatatcacttctaacaacattagattggctagaactcaagcatatagccacacctaactacaagggaattttggggaaatagtcaaccacgttgtattagttttctatagctgctctaacaaattaccacaaacttaatggcttaaaacaacacaaatttattatctatcagttccataggttataaatctgtcatatatgtctccctggacaacaatcaggttgtcagcaagactgcattctttctggaggttctaggaacaaatctgyttccttgctttttcagcttctagaggctggccacattccttggttcatggctcccttcttctatcttcaaagtgaacaaaaatgaatcaagtcctcacatcacaccattctgcccttcttccactgtagtacctc

SEQ ID NO: 783718 - DNA, 652 bp, Homo sapiens
ctattacatttgtggttgcatattagggtcacatttcctactagcaaagttgtttcttgttcaaagatggaattaaatatatcatatttcattattttttctaaaaggtatcaaaacttccagatgcttcacaatctgaacaagtttattactcacaggttttaattaaatgtgatccaaccaatacctatccttaaagtaacgaaaaggaagggattcacttgccctatcccaactcaggccrcaaccatatgatactgatttcaaagtgcactgttgttgaagtatagatggtgctcacttaaatctcttctcatctgaaaacagagctcccaaattagccaccactagcccggtgccacctatagatgtgttttgtttggtcaggatggtattattttaaattttgaatttgaatgcctctgggtagggcatggacttttcaccatctctatcccttataactagcagattcacaatcatgagacctgctgggccccttaatgcaactgagtttgtgatcgatccccacagagataatcaggaattctgtctggtatggaaaatgtggtactctctaaaagaactaactctgatgctcccattaggaagaatatccacagagacaatgtccttaatccaaaacacacaa

SEQ ID NO: 783719 - DNA, 652 bp, Homo sapiens
ctattacatttgtggttgcatattagggtcacatttcctactagcaaagttgtttcttgttcaaagatggaattaaatatatcatatttcattattttttctaaaaggtatcaaaacttccagatgcttcacaatctgaacaagtttattactcacaggttttaattaaatgtgatccaaccaatacctatccttaaagtaacgaaaaggaagggattcacttgccctatcccaactcaggccacaaccatatgatactgatttcaaagtgcactgttgttgaagtatagatggtgctcacttaaatctcttctcatctgaaaacrgagctcccaaattagccaccactagcccggtgccacctatagatgtgttttgtttggtcaggatggtattattttaaattttgaatttgaatgcctctgggtagggcatggacttttcaccatctctatcccttataactagcagattcacaatcatgagacctgctgggccccttaatgcaactgagtttgtgatcgatccccacagagataatcaggaattctgtctggtatggaaaatgtggtactctctaaaagaactaactctgatgctcccattaggaagaatatccacagagacaatgtccttaatccaaaacacacaa

SEQ ID NO: 783720 - DNA, 652 bp, Homo sapiens
ctattacatttgtggttgcatattagggtcacatttcctactagcaaagttgtttcttgttcaaagatggaattaaatatatcatatttcattattttttctaaaaggtatcaaaacttccagatgcttcacaatctgaacaagtttattactcacaggttttaattaaatgtgatccaaccaatacctatccttaaagtaacgaaaaggaagggattcacttgccctatcccaactcaggccacaaccatatgatactgatttcaaagtgcactgttgttgaagtatagatggtgctcacttaaatctcttctcatctgaaaacagagctcccaaattagccaccactagcccrgtgccacctatagatgtgttttgtttggtcaggatggtattattttaaattttgaatttgaatgcctctgggtagggcatggacttttcaccatctctatcccttataactagcagattcacaatcatgagacctgctgggccccttaatgcaactgagtttgtgatcgatccccacagagataatcaggaattctgtctggtatggaaaatgtggtactctctaaaagaactaactctgatgctcccattaggaagaatatccacagagacaatgtccttaatccaaaacacacaa

SEQ ID NO: 783721 - DNA, 652 bp, Homo sapiens
ctattacatttgtggttgcatattagggtcacatttcctactagcaaagttgtttcttgttcaaagatggaattaaatatatcatatttcattattttttctaaaaggtatcaaaacttccagatgcttcacaatctgaacaagtttattactcacaggttttaattaaatgtgatccaaccaatacctatccttaaagtaacgaaaaggaagggattcacttgccctatcccaactcaggccacaaccatatgatactgatttcaaagtgcactgttgttgaagtatagatggtgctcacttaaatctcttctcatctgaaaacagagctcccaaattagccaccactagcccggtgccacctatagatgtgttttgtttsgtcaggatggtattattttaaattttgaatttgaatgcctctgggtagggcatggacttttcaccatctctatcccttataactagcagattcacaatcatgagacctgctgggccccttaatgcaactgagtttgtgatcgatccccacagagataatcaggaattctgtctggtatggaaaatgtggtactctctaaaagaactaactctgatgctcccattaggaagaatatccacagagacaatgtccttaatccaaaacacacaa

SEQ ID NO: 783722 - DNA, 602 bp, Homo sapiens
tttaaattttgaatttgaatgcctctgggtagggcatggacttttcaccatctctatcccttataactagcagattcacaatcatgagacctgctgggccccttaatgcaactgagtttgtgatcgatccccacagagataatcaggaattctgtctggtatggaaaatgtggtactctctaaaagaactaactctgatgctcccattaggaagaatatccacagagacaatgtccttaatccaaaacacacaatattcagtattttggcaggatawgtacatcgtaagttttttttatcttcttctttactctgtaaggcaacaagtaaataccttccactgccctgcttatttgtcttcagctgggaaacgccacaaaatactcagttcaagaatttcctttcttggcccagtatggaggctcacacctgtaatcccagcactttgggaggccgaggtgaggggatcactcaaggccaggagtttgagaccagcctggccaacatggcgaaaccccatctctactaaaaatacaaaaattagctgggcgtggtggcacatgcctgtaatcccagctactcaggaggctgaggcacaagaa

SEQ ID NO: 783723 - DNA, 566 bp, Homo sapiens
aaccagctaacatcataatgacaggatcaaatacacacataatattaaccttaaatataaatgggctgaatgccccaattaaaagacacagactggcaaactggataaagagtcaagacccatccgtgtgctgtattcaggagacccatctcacgtgcagagacacacataggctcaaaataaagggatggaggaagatytaccaagaaaaccgaaagcaaaaaaaaaaaaaaaaaaaagcaggagttgcaatcctagtctctgataaaatagactttaaaccaacaaagatcaaaagagacaaagaaggtcattacataatggtaaagagatcaattcaacaagaacagctaactatcccaaatatatatgcaccaaaacaggagcacccagattcataaagcaagtccttagagatgtacaaagagacttagactcccacacaataatagtgggagacttcaacaccccactgtcaatattagacagatcagtgagacagatgtttaacaaagatatacatgacttgagcttagctctgcaccaagcagacctaatagacatct

SEQ ID NO: 783724 - DNA, 630 bp, Homo sapiens
ggctggtacatgataagtatggactaagaggtagtgatcaattcattataatcccagcacactgggaggccaaagagggtggatcacttgagcccaagagttcgaggccagccttggcaacatagtgagaccccatctctttaagaaaattagccaggcctggtggcacacacttgtggtcctagtgattcaggaagctgaggtgggaggattgcttgagcccaggaggtcaaggctgcagtgagccataaccatgctactgcactccagccagggagacacaatgagaccctgtctcaaaaacaaacaaaaaaaaaggtgacaggcaagatggcggaataggaacagcaccggtctgcagctcccagtgagatcaacacagaagtcrggtgatttctccatttccaactaaggtagctggctcatctcattgggactggttagacagcagttgcagcccacagagggtgagctgaagcagggtgggatgtcacctcacctgggaagtgcagggggtgggggaactccctcctctagccaggggaagccctgagggactgtgccatgaggaacagtgcactgaggcccagatactatgcttttcccatggtctttgcaagccacagacca

SEQ ID NO: 783725 - DNA, 630 bp, Homo sapiens
ggctggtacatgataagtatggactaagaggtagtgatcaattcattataatcccagcacactgggaggccaaagagggtggatcacttgagcccaagagttcgaggccagccttggcaacatagtgagaccccatctctttaagaaaattagccaggcctggtggcacacacttgtggtcctagtgattcaggaagctgaggtgggaggattgcttgagcccaggaggtcaaggctgcagtgagccataaccatgctactgcactccagccagggagacacaatgagaccctgtctcaaaaacaaacaaaaaaaaaggtgacaggcaagatggcggaataggaacagcaccggtctgcagctcccagtgagatcaacacagaagtcaggtgatttctccatttccaactaargtagctggctcatctcattgggactggttagacagcagttgcagcccacagagggtgagctgaagcagggtgggatgtcacctcacctgggaagtgcagggggtgggggaactccctcctctagccaggggaagccctgagggactgtgccatgaggaacagtgcactgaggcccagatactatgcttttcccatggtctttgcaagccacagacca

SEQ ID NO: 783726 - DNA, 574 bp, Homo sapiens
ttgttttggtattacagtgatgctggcttcacagaatgaattaagaggggttcattctttctctatcttgtggaatagtgtcaaaaggattgctaccaattcttctttgaatgcctggtagaattctgctgtgaatctgtctggtcmtggattttttttgttggtaatttttaaattaccatttcaatctcactgcttgctatttctgttcagagtatctaattcttcctgatttaagctagaagggttgtatttttccaggagtttatccatctcttctaggttttctagtttatgtgcgtaaaggtgtttacagtagccttggatgatcttttgtatttcagtgatgtcagttgtaatatctcctgcttcatttcttagtgaggttatttggattttctgtcttgttttcttggttaatcttgctaatggtctatcaatttaatttatcttttcaatgaacagctttttgtttcatttatcgtgtgtgtgtgtgtgtgtgtgtgtgtgtgtttgtttcaatgtcctgctggctgtggtggctcactcctgtaatcccaacactttgggaggc

SEQ ID NO: 783727 - DNA, 574 bp, Homo sapiens
ttgttttggtattacagtgatgctggcttcacagaatgaattaagaggggttcattctttctctatcttgtggaatagtgtcaaaaggattgctaccaattcttctttgaatgcctggtagaattctgctgtgaatctgtctggtcctggattttttttgttggtaatttttaaattaccatttcaatctcactgcttgctatttctgttcagagtatctaattcttcctgatttaagctagaagggttgtatttttccaggagttyatccatctcttctaggttttctagtttatgtgcgtaaaggtgtttacagtagccttggatgatcttttgtatttcagtgatgtcagttgtaatatctcctgcttcatttcttagtgaggttatttggattttctgtcttgttttcttggttaatcttgctaatggtctatcaatttaatttatcttttcaatgaacagctttttgtttcatttatcgtgtgtgtgtgtgtgtgtgtgtgtgtgtgtttgtttcaatgtcctgctggctgtggtggctcactcctgtaatcccaacactttgggaggc

SEQ ID NO: 783728 - DNA, 574 bp, Homo sapiens
ttgttttggtattacagtgatgctggcttcacagaatgaattaagaggggttcattctttctctatcttgtggaatagtgtcaaaaggattgctaccaattcttctttgaatgcctggtagaattctgctgtgaatctgtctggtcctggattttttttgttggtaatttttaaattaccatttcaatctcactgcttgctatttctgttcagagtatctaattcttcctgatttaagctagaagggttgtatttttccaggagtttatccatctcttctaggttttctagtttatgtgcgtaaaggtgtttacagtagccttgratgatcttttgtatttcagtgatgtcagttgtaatatctcctgcttcatttcttagtgaggttatttggattttctgtcttgttttcttggttaatcttgctaatggtctatcaatttaatttatcttttcaatgaacagctttttgtttcatttatcgtgtgtgtgtgtgtgtgtgtgtgtgtgtgtttgtttcaatgtcctgctggctgtggtggctcactcctgtaatcccaacactttgggaggc

SEQ ID NO: 783729 - DNA, 477 bp, Homo sapiens
ctagaaataaaaactagatctgagggatccaaaagcatgcaaaaatggaaagtaggggcacagtgtaggtgggccaattaagcccctatttcatggatagaggtcatgctagtatccatggcataaattaagcccagggaactcaaagattaccgacagtgggggtgatagactgtgtaggtaaatgtgaataactcttgccttttaggccccactgcttcatgggtgyaggttgcactggcacacatggatggtgtccgacctaggccactgggactcagggatgaaaagatggaagaaaaaagtagtcacccttttctccctcacacaccgagtttccactgaaagagagaaaagaattaagggacaccatttctctctctttttcaaatggctaaccaatcatcttcagtctacactcctctggagtgtatcctgaactactaggactgctttgaccctcagactctggagaaa

SEQ ID NO: 783730 - DNA, 588 bp, Homo sapiens
aaatataataaaaacatatatgacggacccacagttggtatcatactgaatgcagaaatactgaaacctttcctctaagatatgaaacataacaaggatgccactttcactgctgttattaaacataatactggaactcctagggagagcaatcagacaagagaaagaataaaggacattcaaattaaaatggaagaaggcaaattatccctgtttgcacatgaaatgatcttatattttgaaaaacctaaagactccactaaaataatattagaactgataaattatgtatagttgcagaatacaaaatcagtatacaaaaatcaggagctaacagtgaacaatctgaaaaaaaawtttttaaagtaatccaatttatattagcaacacatagaattaaatatctaggaattaatttaaccaaagaaaggaaagatctctataatgaaaactataaaacattgaagaaagaaattgaagaggacaccaataaatgaaaagggattccatgttcatggattggaagaaccaatattgttaaaatgtttgtactacccaaagcaacctacatgttcaatgaaatctcta

SEQ ID NO: 783731 - DNA, 642 bp, Homo sapiens
caataacattatgtgtagaattctgagtcttgggtttacaaactattcctttagcagcagacattatgctctgtttaatttgtgatggaaacaaattatatctgccaatgtaaagaaagggtaaatgtactttagtaggggttaggtagtgaggactaaatacatgatcaggaagcgaagaatagctgtgggtgttccatgtccagactgagccaaaaataatgtgtcagttggccaatsaatcttagaatactggaggattgatagaattccagaagctgtttaaatgatgggaaagaccatttggctgcctgaagaaaaagcattccaggcagaatatactgttttggaaaaatttcagaagtcgaagtgtgatgtgcctgcagggaatctaaagcaggtgtgtcttcacacatgaggtgtaaacataaagtgattaatatgacttgttttcatataaacatatcagaactttatttcccaataagtgttctcttagaagcagacttagattcctaatattctcctttgaaacatagctttgaacattctctctggcctggccttcagacacaaatgtgcaaactatgtgcattaatttaagacagaaagtggaaagaactagcggggatgtagcaaagg

SEQ ID NO: 783732 - DNA, 641 bp, Homo sapiens
cgccgccccgctccgctcgctcgctcgccgaggccctgcagcggcccggcccagcgcagcgcgcagcccgcagcccgtcctcggggagcctcggcgccccgtggccgcaggcacctcgcggacaggcgggctggcggcccgggagcgcgaacccgagccgggctgggtgtccctcgcccagcctggccctcggaagcctcgcggggcgcaggggcccgtcggaaatgtttgggggacgggccggccgcggttcctcccgcagcccaggccgggccggcgcgtcccggggagtcgcsgcgaccttatctccgaggatgacttgatccggagcctcctcccggctcccgccccaaacctgtgccaccaacgcgcgaagcgcagctgagactcgcggctggcgggaggagggcgggggactgtcctgaaaatgcccaagccgtgagggatcctaagccgaccgtcagacccggagaggcgaggtctagtgacacgtccctgccacccagggaaagagggcgagcccacgccaagcgccacggatccctgcctctccgcccagggttctccccactacgcattgcagagcccttggatagacctcgccggacccagagtgagggacgtggctcaagtcgacagaa

SEQ ID NO: 783733 - DNA, 599 bp, Homo sapiens
tagtttgtgtgcatagaggtggtcatagtagtctcaaataatcttttgaatttctgtggtgttggttgtaatagctccatttttatttctaattgagcttatttgaatcatctctcttcttttcttgattaatctacctaatgttctatagattttgtttatcttttcacagaaccaactttttctttaactgatctttttcatagattttgtttcaattttatttagttctgctctaatccttgttatttcttttcccctgctagctttgggcttggtttgggctagttgctctagttccttgaggtgtgatgttaggttgttaatttgtgacctttcagacttttcratgtaggcatctagcaccataaaccttcctcttgacactatttttctttctatatcccagctgttttaataacttgtgtcaccattatcattcattttgaatatttttaaaatttccatcttgattttattgtcaaaccaaaaatctttcaagagcagattgtttaatttccatgttcttctatagcgttgagggttcctttggcagttgatttctagttttattccactgtggcctgataagatatttc

SEQ ID NO: 783734 - DNA, 539 bp, Homo sapiens
ttgtaattacttttccaaatgttaatctattaatgtgttcctaaaggatttaatggcattttgctactgaggagtggcttttggaagtttatttgaatgttggatattttatgcatgtatttgtcttgatatttcatatttaattgatatgcttcttctgtgttgtcaccagagttctgcagaaacagaacagactgtaacttgaaagactttaataataaaaccagagacagtaaaataaaaaatttgctcattgtttttactaaygtagcttaccactaaatagggggagtactttatgctgaaagttggtatatctaaatactattggaagcatgacactttatggatctttatgaaccaattcaagcattggtctgtgttctacaatcaccaatttaccattgaatttaaattaacagtgatgaatatagcaaagttttcataaacttaaaaaatggaaaaagggctcttgaggttaaaaaggaaaaattatgcaatttagcaattgttaaactccctattccagggtagaattt

SEQ ID NO: 783735 - DNA, 539 bp, Homo sapiens
ttgtaattacttttccaaatgttaatctattaatgtgttcctaaaggatttaatggcattttgctactgaggagtggcttttggaagtttatttgaatgttggatattttatgcatgtatttgtcttgatatttcatatttaattgatatgcttcttctgtgttgtcaccagagttctgcagaaacagaacagactgtaacttgaaagactttaataataaaaccagagacagtaaaataaaaaatttgctcattgtttttactaacgtagcttaccactaaataggggkagtactttatgctgaaagttggtatatctaaatactattggaagcatgacactttatggatctttatgaaccaattcaagcattggtctgtgttctacaatcaccaatttaccattgaatttaaattaacagtgatgaatatagcaaagttttcataaacttaaaaaatggaaaaagggctcttgaggttaaaaaggaaaaattatgcaatttagcaattgttaaactccctattccagggtagaattt

SEQ ID NO: 783736 - DNA, 638 bp, Homo sapiens
gtgaatagtgccacgataaacatacgtttgcatgtgtctttatcatagaatgttttataatcctttgggtatatgcccactaatgggatttctgggtcaaatggtatttctggttctagatccttgaggaatcgccacactgtcttccacaatggtcaaactaatttacattcccaccaacagtataaaaacatttctatttttccagaacctctccagcatctgttgtttccttactttttaatgatcaccattctaactggtgtgagatggtatctcattgtggttttgatttgcatttctctartgaccagtggtgatgagcttttttttcatgtctgttggctggctgcgttatctttacaggcaaacccaccaaccaaacaaacaaatgaaaaaaatcaaacaaatgactctatacttgtatcatcaccatgatccaaaaagatcaggagtcaaattcaaatgtttcaaaattaatagtgaacaaatttatttctggatttaaaaggaactgatgcttcaaagtagacttaataattaaaaaatataagtactcaccacaggcttactcaaataaattgcacctaactcatacatatttctaaaaatagggctaatatgtttcacgaagtaaa

SEQ ID NO: 783737 - DNA, 638 bp, Homo sapiens
gtgaatagtgccacgataaacatacgtttgcatgtgtctttatcatagaatgttttataatcctttgggtatatgcccactaatgggatttctgggtcaaatggtatttctggttctagatccttgaggaatcgccacactgtcttccacaatggtcaaactaatttacattcccaccaacagtataaaaacatttctatttttccagaacctctccagcatctgttgtttccttactttttaatgatcaccattctaactggtgtgagatggtatctcattgtggttttgatttgcatttctctagtgaccagtggtgatgagcttttttttcatgtctgttggctggctgcrttatctttacaggcaaacccaccaaccaaacaaacaaatgaaaaaaatcaaacaaatgactctatacttgtatcatcaccatgatccaaaaagatcaggagtcaaattcaaatgtttcaaaattaatagtgaacaaatttatttctggatttaaaaggaactgatgcttcaaagtagacttaataattaaaaaatataagtactcaccacaggcttactcaaataaattgcacctaactcatacatatttctaaaaatagggctaatatgtttcacgaagtaaa

SEQ ID NO: 783738 - DNA, 618 bp, Homo sapiens
ccttagaggaaaggagaatccccatgagcgactctcttcccctctcatatattcgagcttcactcttttgatcaaccagattccatcatgggtgctgtttgctcacttacacttcccggggatctggggcatctagtgctaagaaaaaactgtatttaaaacctgataaaatatttgtacacacataaactctgtctgcatatgttgtacacagattttatatatgtacaaacaatgctatatagacaaatcttattgttatgggagatgaatactaatgtcagactcctagaagtaaatttatgcaagtgaagttcacttggttagaggttgtcaaatatttagcaccattttaactaaattttacataacacaggaggaacagggaaaagaaaaatcacattcttagtaaaacttcaagagtcaataaactttctctaaatacaatagattttcagtgacaaattttgtartgaggtgccttttcagtttaaagctaaagagaagagctattatgaaatatagtgcttatggcaagatccaagcctacatatatctgttataggttccccaggatgactgaacaaggacttatattttggaataagataagagaat

SEQ ID NO: 783739 - DNA, 647 bp, Homo sapiens
atggcttttatcaaaaaggcaataatggatactggtgaggatatggagaaaatgaaatcttcatacacaattggtaggaatgtaaattagtacagccactattggccaggggtggtggttcacacctataatcccagcactttgagaggccaaggagggaggatcgcttgagcccaggagttcaagaatcccatctctacaaaaaatgaaacaaattcgccaggcatgggkgtgggtgcttatggtcccagctacatgggaggctgagatgggaggaccacttgagcccaagagattgaggctacactgagctatggtcatgccactacactctaccttgggcaacagagtgaggccttgtctcaaaaagaaagaaaagaaaactgtggtacatatgcacaatagaatataactcagtcacaaaaaaatgtaatcctgtcatttgcaacaacatggatggaactgggggacattatattaagtgaaatgaacaaagcatagaaagacaaatattgcataatctcattcacatgttgtaggagcaaaaaaaaaaaaaaaatgaactcatggagacagagagtagaatgatggttaccaaaggttggtaagggtagtggagtgggggggataaaaagaggatcctcaac

SEQ ID NO: 783740 - DNA, 597 bp, Homo sapiens
cattttcatacatcctctgaaatataggcagaggcccccaagcttcctcttttgcaatctgtgcccctgcaagcttaacaccatgtggaagccaccaaggcttatggcttgaaccctttggagctagaatccaagctatatctgggcccctttgtgccaaggctggagccagagtagcccagatttgagaaccagtgtcttaaggatgcccagggctgcagggccttcggcctgacccacaaaactattcttcctcctaagtctctgggtctgtgatgggaggggctgccattaaggtctctgaaatgcctttgaggtctttttcccattgtcttggctatcactatttgcctcatttttagttatgcaaatttatccarcaagtggttgctcaggaacccatttgaattcttcttctgaaaatgtgcttttcttttctaccacatagccaggcttcaaattttccaaatttttataccctgaaatataagttccaaccttaggacatttcattgctcgtgcatctgagcataggcagttagaagcagccatgccattcttgaacactttgctgattagaatttttttcatgccaga

SEQ ID NO: 783741 - DNA, 637 bp, Homo sapiens
gcagtttttgttcacttctaaagtaaactctgacttcattagaatagtggactggcttatgctctgtcaaatccctaaacatgattgtgatagaatttgactctattcctatttagttacagaaaactactggtgcatgaacaaaaatatgtgaaatatcatggatggggtttrgggggacatgtggggccagactttgtgaggttatagaaaatcatggaactggaaagcatctggaagttcttttactcaaagaagcatagattctttcacatttgtgttaaaaacagtgaattagacaattttgacttggtaaagttagcattctggcaatgctgtgaaatcgttcatctctcttcatttacttccacatatagtccctagggtcaaaatttctttctaaaaatgataatttctaaagtcagagatgctttttgggggcaaaatagaattgtccaggtaatcagtttaaaagacagagtaattctactcttccttcagtagaatgacgcacgaagcagcatttctttcatttccagtagaactttgatgcgaatgtgacttttatctctctcagtgtagctttaaacatcaatgggtttctttacttcttggtttggtgtataggttgcccctg

SEQ ID NO: 783742 - DNA, 503 bp, Homo sapiens
aattttgccaaaaatgttaggatcttaattggaaacgtagttaatcaatttggagagaattgatatttatgctttatagagtgttctgatatgtgaatactgggatctctctactggtttaggtctttaatttctcaaatgttttaaagttttctgtgtggagcttttgcacatcatacattagattcattcctaagtatctgatcwtttgtgatgctaccatacatggtatctcaaaatttcgctttgtaatgaattgtcctggtatataaaaatgcagttcgtttttttgacttcgtatccagcaactttgctaaacttatttgttaattctaaggttaattgtagatttttgactatgtacacaaatatatctatgaataggttttctttcttcctttctaatctttatatttcttatttatctttgtttactaattgtactggctagggcatatagtgcagtgttggatagaggagtgcatagagagcatctttgtctt

SEQ ID NO: 783743 - DNA, 577 bp, Homo sapiens
tttatcactgttgatgttgactttgatctactatggtagtgtttgtcaggtttcaccattataaaattactttaccctcccttttcatactctggaaataagtaactaggcacggcccacgctcagaatgtgggggcttagattatacctccttgaggagggagtctctatcttacttggacttctgtataggagatatatttatataggagatctcctatataaatggagatttatatatatatatatctcctatttataaatggatttataaataaatacatataaatataaatacatataaatawgtaaatatataaatacatataaatatgtaaatatataaatacatataaatatatacatatatacatttatttattcagtcatttacttatatcagtatggtctcacagatatttgttttatactctgggttatattccaatactatgttatatattttgttgctcaaattgttccagccttagccactggggactctttcagttggctcttgtgtccctttgacatgccaccattgttttgctatttgagcactttcttactttctggc

SEQ ID NO: 783744 - DNA, 635 bp, Homo sapiens
aaagagatttaagccatattgaaaagtgaatttggtagaattcactgttgaattctaccaaagatttcaaaaactaacacctatcctacccaaactattctaaaaaatagagaataacagaataattccaaactcattttacaaggctggtattatcctgataccaaagccagacaaagatacatcaaaaaatgaaaactataggccactattgctgatgaatattgatgcaaaaatcctcaacaaaatattagcaaaccaaattcaacaatatattaaaaagatcattcatcatgaccaactgggatttatctcaggcatgcaaggatggttgaacatacaaaatcaattattgtgatacatcatatcaacagaatgaaagacaaaaatcatatgatcatttcaattgatgcagaaaaagsatttgataaaattcatcatctcttcatgacaaaaaccctcaaaaaactggacatagaaggaacatatctcaacataataaaaaccatatatgaccaacacatagctaatattgtaatgaatggggaaaaaactgatagcttttctttcacgatcaggtacatgataagggtgtccactttcaccagttattcaacatagtagtggaagtccta

SEQ ID NO: 783745 - DNA, 626 bp, Homo sapiens
ttcccgtaaggagagcaacagctgctatggaatagccaagccctgctccaccaggaaggggcctgagctttggcaaggatacacttagcctgaccaatccagagactcagcctccactaccagtgggatgacggatttcccagtcgtacttttctcacacccaagaacctaatggacataattttaagtttaaggcagcattatctatgggcacaaaaataattagaaaggataaataagatctagtacttgatagcacaacagggtgactacagtcaataataatttaattctacagtttaaaataactaaagaccccctcccatgccattaccttcagacttctcaacccctccctgcaaaaaagaaaaaataataactaaaagagtataattggattgtttgtaacacaaaggataaacrcttgaggtgatgaatacctcatttaccctgatgtgattattacacactgtaggcctgtaccaaaatttttcatgtaccccataaatatatatacctactatgtacccacaaaaattaaaaattaaaaaaatacagcagtatctaaatggaggtattatagttatcttttccactgtgaattcactggtctgaattttatccca

SEQ ID NO: 783746 - DNA, 503 bp, Homo sapiens
taagaacactatgatgtcatacagaaattttatggaaaaatattactttcctcatgacactgatctcaaaaggtttcctatctcaaacattgttagatttcaaaaataagatgttaattgcactcacttcaaattttaaaaaaccttattcagtctttttatagaggtcatcctgtaattatatggtcaatatgaattccagcagcatatctttttcatgtgtcaagaaagtttacattgaaaagattgcattcttaaaaagaccatacccagatccatctccacttcctgtttgtccactaaacatttgtgagatatttatggctatcttgcrcaatgcctccagaaatcaatgtttgctctcaagtttataactacagtttaaaaaaaattcaccaaaaaattcataatcctggtggatctgctgtttaggactagttagttaagtgcagtatatacaagtagaaaagctccaattattttacttgagatgatctgatggc

SEQ ID NO: 783747 - DNA, 618 bp, Homo sapiens
acctggctaattttttttgtatttttagtagagatggggttttgccatgttggccaggctggtcttgaactcctgacctcaggtgatccatctgccccagcctcccaaagtgctgggattacaggtgtgagccaccaggcccagccgaccatttgatatgtttataagtcattaaggttctaaccatttttcttcagtcttcttcctttctcttcttcaaattggataattcttttgatatcccttcaagttcagtgactttttctgccaactcaatttctaagcactattcaacaatgaaatacttttacctcttatttcattcctayagccctgtgttggggttgatagaggcttcagaaaaggtaacaggtttatcaaagttatatacctagtttgtggcagaactgaaattagaacctaacttgattgtttacaaactacagaccattttctttccataatgccatgatctttatcttctaataagttgctgtcagttaaaatgttcatactgtaactggtgtgagtggtggtcctggtagcggatgctacttaattaacaacattgtcaaattgcagaaaattgaagttcttctcatttaaaaaacggttttc

SEQ ID NO: 783748 - DNA, 594 bp, Homo sapiens
agagtactgggattccaggcatgagccactgcccctggcccacatggtcaccattgttctaacatctccttgctgcctgggacccaggcaagctcccctctctgcccagaccactcagccttccagtcacagctgcctcatgtatgtctcgagaatccggctctgacaactcaggaaattccattcactcctgcacctcagtttctgggcacaaagggactttgtccatctggtaattcacaaaggagggatgtggtgaagggcargagtccggggtcgggggcctttccaatgcttcaagcccatcctcagggaattcagtctctcttagtggaacttcctacctatccaggcatctcaggaggtaagccagagacactgagaaaaaggacagacatagcctctgtggatatgggcagttgtttggaggagtgttgaaggtggccactgggttcacggaacaccagattttcttcaaaattttttgagtttggcaaagatgcaaaagactgatagcacatagctccagcagcaagggtgtgaggaagactgcgctcatgtacactgttgtgggggttataaattgcaaccctt

SEQ ID NO: 783749 - DNA, 606 bp, Homo sapiens
cccagtagccatgtatggcaagtggctaccatactggacagcccaggtctagaatctttttcaatccatagctcattttacagggaagagctgtctcatctttctcccttctcttagaaaagatgtcctgatcgtagcctccgggctgacaaattccacatgagcccggagggaggagctggaagccacaatggagagaaagcccgggcctgcctgggtgtgaagaggctgtggctgctggggatgctttctgtctctccacagccaaattactcatgaagccccagggatggggagagtccctgcggaagatggccacaatcctgcttttcctcctgaccccaaaattcccttaattggaaattcagtctgagcttgaaacccatccaggcagccacctccacccatggcaacatctccatgggcacgcaggactcctgccccagacacacarggaatccaatcccacagcagcacctcatgcaagaggctggatcccagcttctcagtccccaggctcacttcccggctgtgggcctggcagccttctcggtgggagctcaaaacctccacatgcaggggcacaggcattggcaggaaggacca

SEQ ID NO: 783750 - DNA, 620 bp, Homo sapiens
ggctggctgactcagcttctgaccccaccaccctcgtccattcgtgatccttgaatccatgccttcccaccccaggaccctgcacggcatctcctctgtaactttctccccagtgttgctcatgtgttgactcttccaggcctacaagaggaagacagaagcagcaaagaaggaatatctgaaggccctggcagcctaccgggctagcctcgtctccaaggtaacacccggaatctccaggcacagccctgatcagagtggggccacttgaggaatggagcaagaactggggcccgtgggaagggccggcaccccaggtcttagaaagaatggctcagacctacatggtcatgtctgcagggcacctacagcrtgccaggctcattctgggcactttacatgcatttcattggcttcttccaacaagaacccagcacccagaggggttgagcaacttgcctgaaaagatccagtttgttaaagtggccgcactaggattcaaacccagttttgccagttttatgtggccttcacttctgaccgctgatggggcttgggacacgctaccccaaaatatggcacctcctcaccacaccgtcggcctcctctgtcaacaccag

SEQ ID NO: 783751 - DNA, 498 bp, Homo sapiens
acagcactccagcctgggtgacagagaaagactgtctcaaaaacaataaaggcccatcatttgggaattggttaaatagaataaaggacatttacagcgtaacactatacagtcatagaaaagagagatcaaagggctgggcgtggtggctcrtgcctgtaatcccagcactttgggacgctgaggtgggaggatcacctgaggtcaggagtttgagaccagcctggccaacatggtgaaaccctgtctctactaaaaacacaaaaattagccgggggtggtggcacacatctgtaatcccagctactcaggaggctgactcaggagaatcacttaaacctgggagatggaggttgcagtgagccgagatcgcgccactgcactccagcctgggtgacagagcgatactcttgtttcaaaaaaaaaaaaaaaaaaaaaacaagatcaagctctatatgtgttgagatggaacaatggccaagagcaatggttcatgca

SEQ ID NO: 783752 - DNA, 498 bp, Homo sapiens
acagcactccagcctgggtgacagagaaagactgtctcaaaaacaataaaggcccatcatttgggaattggttaaatagaataaaggacatttacagcgtaacactatacagtcatagaaaagagagatcaaagggctgggcgtggtggctcgtgcctgtaatcccagcactttgggacgctgaggtgggaggatcacctgaggtcaggagtttgagaccagcctggccaacatggtgaaacccygtctctactaaaaacacaaaaattagccgggggtggtggcacacatctgtaatcccagctactcaggaggctgactcaggagaatcacttaaacctgggagatggaggttgcagtgagccgagatcgcgccactgcactccagcctgggtgacagagcgatactcttgtttcaaaaaaaaaaaaaaaaaaaaaacaagatcaagctctatatgtgttgagatggaacaatggccaagagcaatggttcatgca

SEQ ID NO: 783753 - DNA, 498 bp, Homo sapiens
acagcactccagcctgggtgacagagaaagactgtctcaaaaacaataaaggcccatcatttgggaattggttaaatagaataaaggacatttacagcgtaacactatacagtcatagaaaagagagatcaaagggctgggcgtggtggctcgtgcctgtaatcccagcactttgggacgctgaggtgggaggatcacctgaggtcaggagtttgagaccagcctggccaacatggtgaaaccctgtctctactaaaaacacaaaaattagccgggggtggtggcacacatctgtaatcccagctactcaggaggctgackcaggagaatcacttaaacctgggagatggaggttgcagtgagccgagatcgcgccactgcactccagcctgggtgacagagcgatactcttgtttcaaaaaaaaaaaaaaaaaaaaaacaagatcaagctctatatgtgttgagatggaacaatggccaagagcaatggttcatgca

SEQ ID NO: 783754 - DNA, 608 bp, Homo sapiens
aaccttgcaagcatgcttctctaagattagcaatttatattaactttattctgctcatctacaatataccagttacacttttaaaataactatattttttactactaagactcagaatgaaatttaagacttctttgtgattcttttttggccttaaaatatgtctttgtggagatacaaggtcaaaatgttgtgtttagtaactatttttctctgtgtaggtctcccatcatgagatatagtttggttaatttgcttcaatctgtttttaatttttagagatttttaaaattttgatttratttgttgttttaattatataaaacatttatatacaatatttctcaaagtcaaaactatataacaaggtacatttacagaagtttcctttaatctcattctcctccaccctattcccttccttcccacatagttaacagttgttattagtttatctttcctttgtttctttttgaaaacagtaacaaatgcatatatatgtgtatggtgtgtacatatatatttatattccccccttcattaaataaaagatagcatactattaaacacagttttgcaactttcttttttcacttaacatacgcaat

SEQ ID NO: 783755 - DNA, 589 bp, Homo sapiens
aggctctagttcttcctctcttcatgcaatagcaacaacaatcactatcaccataataatactaataacagtcaatacctattgagaatttgctatgtggcagacactgcccaaacaactgtacctgtgtattatctcagtttaattgtgattgtcacaacagccctatgcaggaggttccatgattatctccatttagcagataatgcaactgaagcacagagtgaataagtagcctgaccagggtcacagagatgaaagtagtggacagcctgctgggtagacacaaggcaagctgctcatagcattatgctattacacaagggggagatggagagagctagacaagctattcccaaatatccaatcagtrttaggatggatagcagcaaaattgtttagcataagtatatcccatgcactatttgggatatacttatagtttaaaaatgactccttgttcatctgaaattcaaagtgaacttagcaccctgtgttttatccctcaaccctagctggaccaacattccaaagatgtgaggagggaaagcccaagtatttctaaagaccagatgtggttctgaagtga

SEQ ID NO: 783756 - DNA, 507 bp, Homo sapiens
acatcccaagcctgacgttttctctttcttgccctcaaatcctcaatgatacccatttcagaataaagttgccggggcaccaagacactccactatctttccctcatggccttctcagcttcctccctcttttcccctcctcttaccagctactccctgctgcgactctgctgaacttctcacccgcacccaacacctttactcccctgcctccctgcctttgcttggtccattcccaccaacagaatctaagtatcaggattttttctctttatattgaactctsaatccacctggaatttacttagatgcatagtacaaagtaagatgtaaattttttaatagaagaaaccaattatcccaactctcaccatttattggaaaatccttccttcggatttgggtttcctatagatttattctgtttcaaaaatctgtttccagacttgtgtcttactgttttaattattgtaattttagaatatgtttaagagcagccctactcat

SEQ ID NO: 783757 - DNA, 356 bp, Homo sapiens
tgggagaatgaaaacaatacccatttatgtggttattatgaggattgatgatgatgcttatgaaatatgcaatacctaaaattgggcaaggacctatcaaatgatagctctgtttgtctctaatttattaaataatggrgagggagaaatatggataggggagtttcccaagacatcaataccaggcccacagtcctggggccctatgtcttttgtactaagcaccttcatctctttccctgaaggctttctccagagctgagaaaggttcccctgcccaggcactgcaggctggatatgctggagaattaataccactctttctctcaagagaaactgtcaaccaaagtctgatg

SEQ ID NO: 783758 - DNA, 570 bp, Homo sapiens
gtgtctttggaaagttggcaaatttcctcctgaggccagaagtcaaggacctccagagcttggtcaggctcccaagagactctggtggttaacagtatgttccttgtctccaccaatacattctcctcatcaaagagccagatcagggtgttgttggggtcaagtgcagacatgccattatagagaatccycccaccaaagccataaatcacactttttttgaggggcagggtctgactctgccacccaggctggaggcagtggcatgatcatgatcatagtttactgtagcctcaaactcctgggctcaaacaatcctcctgcctcagtcacctgagtagctggagtacaggcctgtaccatcacaactggctaatttgttgttgttgttgttgttcgaggcagagtctcgctctgtcacccaggctggagtgcagtggtgcgatctcgggtcactgcaacctctgcctcctaggttcaaggaattctttgcctcagtctcctgagtagctgggattacaggcgcccgccaccacgcaggcaaatttttgtattgttagtagagatggg

SEQ ID NO: 783759 - DNA, 570 bp, Homo sapiens
gtgtctttggaaagttggcaaatttcctcctgaggccagaagtcaaggacctccagagcttggtcaggctcccaagagactctggtggttaacagtatgttccttgtctccaccaatacattctcctcatcaaagagccagatcagggtgttgttggggtcaagtgcagacatgccattatagagaatcctcccacyaaagccataaatcacactttttttgaggggcagggtctgactctgccacccaggctggaggcagtggcatgatcatgatcatagtttactgtagcctcaaactcctgggctcaaacaatcctcctgcctcagtcacctgagtagctggagtacaggcctgtaccatcacaactggctaatttgttgttgttgttgttgttcgaggcagagtctcgctctgtcacccaggctggagtgcagtggtgcgatctcgggtcactgcaacctctgcctcctaggttcaaggaattctttgcctcagtctcctgagtagctgggattacaggcgcccgccaccacgcaggcaaatttttgtattgttagtagagatggg

SEQ ID NO: 783760 - DNA, 570 bp, Homo sapiens
gtgtctttggaaagttggcaaatttcctcctgaggccagaagtcaaggacctccagagcttggtcaggctcccaagagactctggtggttaacagtatgttccttgtctccaccaatacattctcctcatcaaagagccagatcagggtgttgttggggtcaagtgcagacatgccattatagagaatcctcccaccaaagccataaatcacactttttttgaggggcagggtctgactctgccacccaggctggaggcagtggcatgatcatgatcatagtttactgtagcctcaaactcctgggckcaaacaatcctcctgcctcagtcacctgagtagctggagtacaggcctgtaccatcacaactggctaatttgttgttgttgttgttgttcgaggcagagtctcgctctgtcacccaggctggagtgcagtggtgcgatctcgggtcactgcaacctctgcctcctaggttcaaggaattctttgcctcagtctcctgagtagctgggattacaggcgcccgccaccacgcaggcaaatttttgtattgttagtagagatggg

SEQ ID NO: 783761 - DNA, 675 bp, Homo sapiens
tgagtttatttgttcattcattcaacaaacagtaagtgggcatcttctgcatacctggcactgtcctccgaagatcagtgaaggctgatgtctgtgtggttcataattggcagtaccttatcaagggcaggtgtcccagccatgttgctgaagaacacgcctcctcaaaacttagcagaggttaacacattcatgttgctcaccaatctgcaatgtgcacagggtgtgatgagtctgtttgcttccacatcatatcagccgggacagctcgaaggctggggatgaaatcacctgacagctggccccctcaccccatggctggccccctcacccgcctggtggttgaaaaaagctggatactggctgaggctgtcttgagcacctgcacgtgacctctccatgtggctgctcggcctcctcactgcacggtggyggctccatgattgagtatgcaagtgtccaggcagatgctataccacctcttaggattttgccttggaggttccacagcctcacttcctggtagttgtggtcccacccagattcaaagggaggagtgtgagcatcatgccatgcacagagcagggcgtgggataaaagctggtgcagccagcttaggagaatccaatctgccacagcagctcagaggctttcctgcaggccccatggtacaga

SEQ ID NO: 783762 - DNA, 675 bp, Homo sapiens
tgagtttatttgttcattcattcaacaaacagtaagtgggcatcttctgcatacctggcactgtcctccgaagatcagtgaaggctgatgtctgtgtggttcataattggcagtaccttatcaagggcaggtgtcccagccatgttgctgaagaacacgcctcctcaaaacttagcagaggttaacacattcatgttgctcaccaatctgcaatgtgcacagggtgtgatgagtctgtttgcttccacatcatatcagccgggacagctcgaaggctggggatgaaatcacctgacagctggccccctcaccccatggctggccccctcacccgcctggtggttgaaaaaagctggatactggctgaggctgtcttgagcacctgcacgtgacctctccatgtggctgctcggcctcctcactgcacggtggtggctccatgattgagtatgcaagtgtccaggcagatgctataccacctcttaggattttgccttggaggttccacagcctcacttcctggtagtygtggtcccacccagattcaaagggaggagtgtgagcatcatgccatgcacagagcagggcgtgggataaaagctggtgcagccagcttaggagaatccaatctgccacagcagctcagaggctttcctgcaggccccatggtacaga

SEQ ID NO: 783763 - DNA, 499 bp, Homo sapiens
tacattcacatatacacactcactccctcactcacacacactcctgcccctcccgaccggcaccaggcactgctctgcaggcactcccttggacccctcactcatgtgctcattcccaacttcctctgctacctccygtttatctgctgatccagatcctctccgccaagcctcactcccgatttatcttgaaaagagtccagtgcctaacccactttccaagggcagtcgaggtgggaatcattgcttttatatagggcatggctctggcaacactcgggagatgccctcgtttcatttcagagagaggctgttccctgctcactccctccacttgtcctccagccatacccctgtacagaactccctttagtccaggcccccaggcccccagtgacctcttccaagccctcagggcggctccgtcactagggagatatgaccttgaggtgtggggcagctggtggggctgggcgaggccggggctggctgtatccct

SEQ ID NO: 783764 - DNA, 673 bp, Homo sapiens
tgcatatgcctcatgacacaacaacttatattcaggtatttatggcgtgtacaagaatgttcacaggaggactgttagcaaggaaactgaataacctacatatacatcaatgccagaagaaatttaaaagtgtggcttacttatatagtgagatgcttatacagaaaatgaaaaaaatattctacttctatagaacaattagatcaatgtcacagatataatgaaaccagatttaaaagaacacatatcaaatgattccatttatatgaagtgtacaaacaccaatctatgggacaggaagtcagaatactgattagctttgttgagggagggagggtggatagtgagtggaatcagtttctttgtttgttttaatctagagacttagcaaaccaacaagggatttaaatcagggaggaaaagcaaagacaataagccaaaaagacaaacgtttatgtagcagctgccgtagrttgtgatgatgagatcatcagataagagcagctgaggaaattcagtgtcaacattcacagtaggcctgaagtcccagatggattcaaacagaaaagataacctggaaggttatagcaagacagaacctattgcatttatccacttggggtgaatcgctctccaccccgtttctctctgtgccactgtccttcttcatatt

SEQ ID NO: 783765 - DNA, 564 bp, Homo sapiens
aggtgcccttttatctcagtaacaactgtttttcctattttcatgttaaaatattattgttttatgaactgaaaatgcagatagctggtaggtcactttggttgagtctgatttagtttctaatgttattgcttagcaaaataacaagctgaaaactacagatagacccagatttatgggacttgaagtttctccaatatgggtatcctcttaagaaaaagactatctgtttagagtgagaagagaaatcacagctcatayattttaaaagccagcagatgctacaaacatcacaaattctgggaaaatgccacatttctatgaaccagctgcccgacagccattctaacgtacttccttaatgcctgcccgctggggccctctccaccgtcaatgacttcacagcatccttctccacagagaaaatggaaagatgagtttgctgttttcttgacacagttgatgaaaagtttttgtcttattaattggttttaagtgtttcttttagctttataactgataattggcaatgtcatatacattttaatcttgttgccaagtttt

SEQ ID NO: 783766 - DNA, 492 bp, Homo sapiens
aggtaacataaacttgtaacttcactctcttctctttgacctgtcacccttgagcatttgagactgaattgcaaaagtcttagagagaagaggtaggggaaagattgacctatttttcccaacccacccatctctttccccactggtagggtctaaatggggcatcaaytagtatgttagaattcatctctagcctgggacaggcatgccttctaagaatcctatcatgaaagatttgtaagcataagaatctttcatttatctattacgtaaatccagatttattaattgaatttgtttaaatcaaattatttgtgctatagatctcacattttcaacaaattcctacaactagtatgtctttgctcataagctgaaggaaaattaggggtgaattaaaactaaaaatggtttgaaattctcatagtcctctcagcaaagccctactgattgatacaatagaccactgctaaagcggctttaacaatagtg

SEQ ID NO: 783767 - DNA, 586 bp, Homo sapiens
cgccctttataagacttgatagattacttggcaataggtaagtaaacaggctattacagagcaatgcgtgttattacagtatactcagacatggtgctatgaaaggaggccttcagagggccatgggaggacctagacaaggcagttaacttggacctgtggaaaggggaaatcagagaaagcttcccagaagaaatgtacaaaatgtgactggaaagaagaacragaatcagttaagtaaaaggtaggatattccaggcagaggaaacagcatatgcaaggctccatgagaggcaaagaccaccacaatttcaggaacaaagtgcctctgaaggctgtcccatagtgcacagtgtatgtgtgcacactgaattcaagggccgatgctacatcctgggtgagtgaatgagatggctcaaaaagaacaaaagggctaaatgaaagcagcagattgggtaaaccctgtaggaactcctcaagttgaggaacaaacagagaagacaccgatgagtaaggtctaggactagctagagaagcaggagatataaaagaaaaggaaaaaatagagttattaaaacagggaagg

SEQ ID NO: 783768 - DNA, 590 bp, Homo sapiens
caaaagaaggcagaaaaagaagaaaaagaagcaaaaaacagttgggacagatagaaaacaaatagcaatatggtagagttaaacacacctatattaataatgtctttaaatgtccgtgctctgaacactccaattaaaaggcagagaggatgggtgtggtggcttatgccggtaataccagcactttgagaggtcaaggcaggaggatygcttgaggccagtggttcaagaccagcctgggcaaaatagtgagaccctgtctctaaaaaaaatagctggacatggtggcatgcacctggaattctggctaattgggagactgaggtgggaggattgcttgaggccaggaattcaaggctgcagcaagccatgatcatgtcactgcactccagcctggatgacaggggagaccctgtcacaaacagacaaacaaacaaacaaacaataaaaggcagagatgatcagactgactaaaaaagcaagatgaccccaggaatattctctctacaagaaacccattttaagtataaagaaacaaataaattaaaagtaaaaggatagaaggtatttcatacaaacagcaattagaa

SEQ ID NO: 783769 - DNA, 594 bp, Homo sapiens
tatccagaatccaatcacttttcaccaccttcatcaccagggctcatgccacccacgtctctcccctgtattatcacatcactgtcctctctggcctcctagctttctcctttgtcctccatctactctacaatctattctcaactgagtcacaaagtactttgtaaaaatgtcaatcagataacagcattctactcaaaactgtaattcttccctgtcycgctcagagtaaaagctaaagtcttttcaatggctttataaggccccacatgatctcacagtatcctctctctggctgcattgcctatctctgcattgcctagctctttctaaccttctcatgctactctagccatgttagtctccttgctcttctttgaacacgccagacacactccggcctcagggcctttggacttgctgttcccttttcctggagctctcttccttcagataatctacatggtttgcttcctttcttcctatgggtcactgttgaaatgtcactttagcagacacctttcctggctaccttatccaaatggtaaaccctccccaccccagtactccctggctcccttactgtgatctgtt

SEQ ID NO: 783770 - DNA, 595 bp, Homo sapiens
aggaaatgccatttacccaaagtcaggtggccaatgtatgggagggtcaagcttcaaactcagttctgtctgattctcaaatccttgctctattcattgcacccaacttcctgcttcatcaggacagaaacaagccactcacacaaccgctggggacggacccaaagacatcatctgtgagggcctcactaacctgctgtgggaactgtctgtctgctgcccctactctgctgaattatctttaaatccaccccagggcttggtaggtcagttaaaaacagacagggccatgctggaatcttaaaaccatggctggaaaaragtcctttccttgagcttgggagtttctgcttaaatccttcctgggtgactcagccccttcttgagtagcctaggctggcttcacctcccataccccactctggggagcactgttgaggtcagatttggctaaaagggaacagggggctcttttcaggaagcggcaggaaagcatttgggtttggtctttcctactacctaaagatggtaatcccacctgtttcctgtaactagcaggccagcctcaagtcgggagctctgcttggagtttacc

SEQ ID NO: 783771 - DNA, 613 bp, Homo sapiens
catggcagaagatgctgaggtcacatgctctgagatgccaggcaggctccagggtgctggggagatattttcttaagtctgggtgggctggcacagaggtagaagggtggcgggtaggaggtatccctgagtaccctggtcagctcctcacatcagctgacttggttcatgagacaaagtacaaacccatttttatttccatgactccaattgcacctctgctggggttaggaaacccattccccggatggcactgagccagaaaattagcaatgatcaatgaaaggggaaggatgatgaaataaaagtggagtctcaattatgctctaaatgarcaaggcgatgttaagtcttcaacagaggaggggccggggactggaggaaggaaaaaatgattacgtggaagaattcagtgccccagtctggacttagccattgatttcctattccagttccatggatggaccataaaggccttgcagagtgcatggactcccctgccatatttctccacaatctgcctaaagtgagttcctccactctgcttatctgtccagcaacatcggatcctgggtggatctaagggaacaaatgtctgtgggtattatgttaa

SEQ ID NO: 783772 - DNA, 617 bp, Homo sapiens
acctgtgggggaggaatcattcccttattgtgctggtgtttttatctacatggcagaagatgctgaggtcacatgctctgagatgccaggcaggctccagggtgctggggagatattttcttaagtctgggtgggctggcacagaggtagaagggtggcgggtaggaggtatccctgagtaccctggtcagctcctcacatcagctgacttggttcatgagacaaagtacaaacccatttttatttccatgactccaattgcacctctgctggggttaggaaacccattccccggatggcactgagccagaaaattagcaatgatcaatgaaaggggaaggatgatgaaataaaagtggagtctcaattatgctctaaatgagcaaggygatgttaagtcttcaacagaggaggggccggggactggaggaaggaaaaaatgattacgtggaagaattcagtgccccagtctggacttagccattgatttcctattccagttccatggatggaccataaaggccttgcagagtgcatggactcccctgccatatttctccacaatctgcctaaagtgagttcctccactctgcttatctgtccagcaacatcggatc

SEQ ID NO: 783773 - DNA, 486 bp, Homo sapiens
agcatgatgattgggtgttgacacaaatatgtgaaatgtgccagcctcaaaccttcttatgacatcagatcagcacatgactctgctgggaagtcattaatccattatacattaagtatctggaacttttctggttaaaacaaatatatacctatatctctaagagatattattcttgatgtaggtcaattttataggtcctgaagagsaagtagtgtaccgatgttcaaaatgatgtctggtcagtgatggttgtccaaacacacacacacacacacacacacacacacacacacacacacacacacacacacacgggggaggggggagagagagagtcactgtgttacccaggctggaatggagtgtctattcacagatgtgatcacaagtccctgcagcctttgacccctagactcaagtgatccttttgccacagcctcctgagtagctgggactacaggcacacaccaccatccctggctc

SEQ ID NO: 783774 - DNA, 542 bp, Homo sapiens
tagacattgctgtgggaaaaggagttcaaaacttggaacagggctttcaattatcacctaaagtttgagttgaattaacacaggaaaagttaaacatactgtattttattcattctaacttcaaattatttcataacaaaatagtcaatgacctctgaaattggtattttaatcagccatcttaaatttactgtcattctggtgtcattcccaatacaactgttatgcctaagcatgtaccaacttcataatagctatttctttggtcgcaattttaatagttttgtgcatttggggcatgtatcttgagtgtaatcgccacaaaatgccctcaaaaagattgttgtatgattcaacaatgaataaagttaccatatacccagaaaaatgtggaaacagtytagtgtaatgtaaggtaaatgtctatgtctaataattacaaaataactttttcaataagtataaaataaaatttctaagtgataagaaagcattgtattactgtttaattggcaatgtattttccttcttagtcatacaaa

SEQ ID NO: 783775 - DNA, 612 bp, Homo sapiens
ccagaaggtgagagtgagtactcaggatcctttgcactccatctctgcagggcaaaggtttttccccctttctggagggaagggggaaacagctgtctcttcctcctgtatggaagaagagaattcatttttctcactgagaaactatttagctactcatatacaagatttttccacctggctttcatcatatcaccccagaggtaaggactaaagtaagggagaatcacatgcttatttattgtaaggtaataaataaataaataaataaataaataaataaataaatctctgatccagaraacttcaggtgcacattcagaataaaactaataaagatgaataaaacaatcccaacaatgtctgggaccagatgctagaaattctcacactgcttctccctaaaagcactatacgtcacctctctagtagccagatgcttatgtcagattactggggaaaccggctctgaggtagagatttctgtgcaaggagtttatcagaaaacactctcaggaacaacacctgtaagagagtgaaggcagtaacattgggtagagagagaaaactgtaccagaggccatagttaagcccttagggagctttgaacat

SEQ ID NO: 783776 - DNA, 613 bp, Homo sapiens
atcaaaatcacaaaagtgtggaggtcttttaatgacacggtccccttagagttcttatctctcagacttgtcaacactgagcctccagcaattcatcagttataatagtccaagtttctcctggcactgattcccacagaggtttctattagcaggttctcaagtaagttgtgattctctgtattcccctgtcagtttcttcagtctggggagcagtggtttgccctgttacctcctttctctgtggatctaaaaacagttgctgatttttcactttgcttggctttttacttattgttagaatagagtggtgacttgtaagcttcttataagccagactggaaatcaaaatccccaagagtattttttaagaggaaaargatggtaaatcatttgttatgagcggagcatactagaagcatttagatgcacaatggctactcaagatccttgtgtattgtggttttacattttgaattcaaatgtaaaatcagaattcatcatcagaggactgatgtcatcttcatcccttacttctgtaagccaaagtttcttcaatggagagcaactgtgcagtcgtagaaggcagctactgtgatgtcattaagatgtt

SEQ ID NO: 783777 - DNA, 622 bp, Homo sapiens
atttaatctttttaatactatgaagtaagtattattaatatcctcaacttatcatatgaaagaatttaagtacaaagatgtaaataaattttctgaagcctcgcagctagaaacaaaacgtaggaattttgatgcaggaaatctcaggacagaagccatgctctcagcaaccacacyaaaaggcctttcacgtaacatggtgctgagcacgtaacatagttatgttgcaaaaatgtacttgcagagcaagattattcacctattcattcttgaaaatcagcgtgttatgagttagtcttaaatttctccaaggcaaaactatgacacaatgtatgccatgctaaattatggaaatatttcatcctgagatgccaaattttaaagcagaaatactgaaagtaaatatagtttacattccatagattttgttgttcttggaattcttcatgctttttctaaccctccaccctttgctcattttcattatctttacatgacttagttatgccaatacctcctagcctactataatctgcactactctgcttggaatgccataacaaaatatcattgacttgctggcttaagcaacagaaatttttgttcatacagttctgaaggc

SEQ ID NO: 783778 - DNA, 614 bp, Homo sapiens
gtggtgggggtgggatccagtgccagacagctgtatgaacacgctctcctggctacctgggccccatctgtttgcttcgggctgacagtgagataagggacaatgacttttccctcctgagccacatgttagtgaagcgrtggagataattctgctctgagtcctgacgggaagttgctggggagcaactttacagtgctcctggcttggggcactacccactcggggctttgtggcaagctattccccctcacggccaaggaacctggcttcccataccacctcctttcctccacccaccgtctccctatctgaatcctattcacttttcaggtcttggctcaaatcctgactcccctgtgaagatgtcctgaccctcccagcctagagccactactccctccttgaatctcaggatctccaactgtgacatggccatactatttgccacatccccacagacggattgtgatgaggaaggaaagagagagtccatgtagcatgctagatgcggtgtctggtgcaggcctgtggtgagttccctgcctcttcctcttcctcccctctgacccccagcatgcaggcatggcggccttgatcacctgctgccttct

SEQ ID NO: 783779 - DNA, 606 bp, Homo sapiens
tggatttaaagatatgtccacaaattctctgaaactcattgtgaggcaggctgaatcctcctcctcttaaatggggctgaaatttgtaacttgcttctaacaaatggaagaaagcacagatgacagtgtttgactttgcagatcaggtcataaaaaggcactgttgcttccatcgtggtctctctcttgttcattctcttggattawttgcacctggaggggttagcaaccatgttgtgagaagaggcctatacagtgaggaactgggcatctgtccagtggccactgagtagccaaggtttcctgccaacaaccatgtgaatgagcttagaaattgttgccatggccccagtcaagtcttcagatgaccacagtctctgccagcctcaggtctgtggtttcatgagagactcatacagctaaatcgcttccaaacttttgaatgaaaaaaaaagtatgaagataaatacttattgctttaggctacaaattttttgatgatttgttatatggaaatatataattaataaagtactttaaaacatttctctcatactcatagtacacttacataacatttacaattaatcaataacatctctttat

SEQ ID NO: 783780 - DNA, 606 bp, Homo sapiens
tggatttaaagatatgtccacaaattctctgaaactcattgtgaggcaggctgaatcctcctcctcttaaatggggctgaaatttgtaacttgcttctaacaaatggaagaaagcacagatgacagtgtttgactttgcagatcaggtcataaaaaggcactgttgcttccatcgtggtctctctcttgttcattctcttggattaattgcacctggaggggttagcaaccatgttgtgagaagaggcctatacagtgaggaactsggcatctgtccagtggccactgagtagccaaggtttcctgccaacaaccatgtgaatgagcttagaaattgttgccatggccccagtcaagtcttcagatgaccacagtctctgccagcctcaggtctgtggtttcatgagagactcatacagctaaatcgcttccaaacttttgaatgaaaaaaaaagtatgaagataaatacttattgctttaggctacaaattttttgatgatttgttatatggaaatatataattaataaagtactttaaaacatttctctcatactcatagtacacttacataacatttacaattaatcaataacatctctttat

SEQ ID NO: 783781 - DNA, 598 bp, Homo sapiens
aaaacaacaatgacattcttcacaggaatagaaaatacaattctaaaattcatatggaacaacaaaagacccagaatagctaaataaatccttagaaaaaagaacaaagctaaagacatcacaatatctggttttaaattatactacaaagctatagtagccaaaacagaatggtactggtagaaaaaacaaatacatagaacagtggaayaaaacataacccagaaacaaatccaaaaatttactgccaactcatttagacaaaggtgccaagaatgtacattgggaaaaggaaagtcttttttttttttaattatactttaagttctaggatacatgtgcacaacgtgcaggtttgttacatacgtatacatgtgccatgttggtgcactgcacccattagctcgtcatttacattaggtatatcttctaatgctatccctcccccctccccccaccccacaacaggccccggtgagtgatgtcccccttcctgtgtccaagtgttctcactgttcaattcccatctctgagtgagaatatgcgatgtttggttttttgtccttgggatagttaaatggtgctaggaactggatat

SEQ ID NO: 783782 - DNA, 598 bp, Homo sapiens
aaaacaacaatgacattcttcacaggaatagaaaatacaattctaaaattcatatggaacaacaaaagacccagaatagctaaataaatccttagaaaaaagaacaaagctaaagacatcacaatatctggttttaaattatactacaaagctatagtagccaaaacagaatggtactggtagaaaaaacaaatacatagaacagtggaataaaacataacccagaaacaaatccaaaaatttactgccaactcatttagacaaargtgccaagaatgtacattgggaaaaggaaagtcttttttttttttaattatactttaagttctaggatacatgtgcacaacgtgcaggtttgttacatacgtatacatgtgccatgttggtgcactgcacccattagctcgtcatttacattaggtatatcttctaatgctatccctcccccctccccccaccccacaacaggccccggtgagtgatgtcccccttcctgtgtccaagtgttctcactgttcaattcccatctctgagtgagaatatgcgatgtttggttttttgtccttgggatagttaaatggtgctaggaactggatat

SEQ ID NO: 783783 - DNA, 614 bp, Homo sapiens
cctcattaatggagatgcgtcactaatttgagatgaaaattgaagtctggtaaatatccatcttgtagctacccagcctgcgtcacacatagaatctggtacgcgagtttctcttactccttgctcaatgttccctcctgggacccaataaaggatgtgggagcaggtaaaaagcagaacattattctgtagctttttcccagctgcactttggaaaacagatttgcaggctctgaaccaacaggcaataagtcactcagcccattttctcagaattaccgctgcactgttactgtttgcttcccaataactctataaccatggacagtaacaaatgtgcagagacgtattcttctctgcactcagaaagctgcgycttcatgaacgtctcttccttagctatttcctaatccaattttttcatgtcagagctaggaatttgtgtgacagggatttggtgcatttccataaggcaacgctcagccacaattacgttagttctaggcagcttgagttatagcttcacaggttaaatctgcgataattagctggatttttaggtctaggagtggtcacattaatgagagccctagattatacaaagaagcctgagg

SEQ ID NO: 783784 - DNA, 541 bp, Homo sapiens
acttttttttttgccctgcttacctgtttgtgttttttatataaactggttgccaatattttttaaatggggaccttttcattaaaatacaattcctggcttctcttggggaaaacaatgggaatgtggggccatcttgggaactgcgagggtgggtcacagcactggctctgagtatctgccagccagcgttcccatcccaggcccatgctctacagctgtaaaatggtgtcttccttgcaggctgtagcctagatagaatgaggtgagccaggtaatgagctgggtcaagggccaggaacacagcaggcacttggtaaaccctagaatgcgttgtgtaccctttttaggtagsgcttgtgctgagatgtcaggcacacttcctgtttctctcatcttattacctgcctggaccctaagtttgtagctggtttaagagaggcttaaccctctcagccccatcagccccctccccaagggactctgttgaaaaatgtattcctttcagaattttagtttaaatttaattgctctgtggcct

SEQ ID NO: 783785 - DNA, 605 bp, Homo sapiens
gagactaaatgaatcagtctaagtttagaaacagaaaccactcttgctgttgaagaaaatgctggtccctgggctgggtattaggaatgactcctagaacaccatagaactgccaggggagttactacctctcacagtcagaaagacagaagccaggaggccaccactggaaaggctgagcatgaggacacaatggtgaagctgccacccaaagacaggatcctgggatcagaaagtcactgccaatgccactggcaggacrgtgaaatgccaagtcctttccctgcctctacaaagccagggactgtgcactactgtctccgcaaccatttacaggtaaaaacagcccaaactgtctggcttacttatgcctcccttccatcttttatgcaaatacatctaagtgctagagccctagctgcaagggagttgggagatgttttagctttccagcatccgcaacataggaaggcacatagaatggggatgggtgctgtctgtcaaaagacaatatccagcacaaaaaatgtgactgcagtgcagagaagaggagctcgtgggagcatctggtaggccatgttaagaatgtgggtctaagaacgatg

SEQ ID NO: 783786 - DNA, 612 bp, Homo sapiens
ttctcataaggagtgtgcaacctggatcccttgcatgcgcagttcataatagggtttgtgcttccatgagaatctaatgcttctgcacatctgacaggagatggagctccggggtaatgctcacctgccactcacctcttgctgtgctcccagttcctaacaggccatggtccccataccaatctatagcccaggggttggggacccctggcctagaggacattatgttaagtgaaataagtcaggcacagaaacataaatgctgcacattctcacttatatgtgggaactaaaaaagttgagcttacaggcccrgctcggtggctcacacctgtaatcccaacattttgagaggccaaggcgggtggatcacctgaggccaggagtttgagaccagcctggccaacatggtgaaatcccatctctactaaaaatacaaaaattagccgggtgtggtggcgggtgcctgtaatcccagctgctcaggaggctgaggcaggagaatcgcttgaacctgggagacagagttgcagtgcaccaagattgcaccactgcactccagcctgggagacagggtgagactccatctcaaaaaaaaaaaaaaaagttgag

SEQ ID NO: 783787 - DNA, 638 bp, Homo sapiens
gctcagctgttgctctctttgatctgtttcaaaatggggcttccatgtcagatttcattggaaataaacctaaagactggcaaactcaatgacttccaaaggctccatccagttccgccctttgttcaagctattcagtaaatatttaccaagcacctgctaggtgccacatactgttcaagacactggagacccatcagtgaacaaacaggccaaaaaaactcttcccccaatgggaccacrttccttttaaagtaaagtgcacattcatcagaaggtgatgagtggtctggagaagactcaagcagacaaggcagctgcaatgtttaaaagggtgatcatggggccaggcgcggtggctcacacctgtaatcccagaactttgggaggccgaggtgggaggaatgcttgagctcaagagtttgagatcagcctgggcaacattgaaagacctcctgtctactaaaaatcaaaaatttagttaggcatggtgctgcgtgcctgtagtcccagctacttgagaggtttgagatgggaggatggtttgagatggagactgcacgtgagctgtaattacaccactgcactccagcctagatgatagagcaagaccccaactcaaaacaaaaaatttaatt

SEQ ID NO: 783788 - DNA, 638 bp, Homo sapiens
gctcagctgttgctctctttgatctgtttcaaaatggggcttccatgtcagatttcattggaaataaacctaaagactggcaaactcaatgacttccaaaggctccatccagttccgccctttgttcaagctattcagtaaatatttaccaagcacctgctaggtgccacatactgttcaagacactggagacccatcagtgaacaaacaggccaaaaaaactcttcccccaatgggaccacattccttttaaagtaaagtgcacattcatcagaaggtgatgagtggtctggagaagactcaagcagacaaggcagctgcaatgtttaaaagggtgatcatggggccaggcgcggtggctcacacctgtaatcccagaamtttgggaggccgaggtgggaggaatgcttgagctcaagagtttgagatcagcctgggcaacattgaaagacctcctgtctactaaaaatcaaaaatttagttaggcatggtgctgcgtgcctgtagtcccagctacttgagaggtttgagatgggaggatggtttgagatggagactgcacgtgagctgtaattacaccactgcactccagcctagatgatagagcaagaccccaactcaaaacaaaaaatttaatt

SEQ ID NO: 783789 - DNA, 638 bp, Homo sapiens
gctcagctgttgctctctttgatctgtttcaaaatggggcttccatgtcagatttcattggaaataaacctaaagactggcaaactcaatgacttccaaaggctccatccagttccgccctttgttcaagctattcagtaaatatttaccaagcacctgctaggtgccacatactgttcaagacactggagacccatcagtgaacaaacaggccaaaaaaactcttcccccaatgggaccacattccttttaaagtaaagtgcacattcatcagaaggtgatgagtggtctggagaagactcaagcagacaaggcagctgcaatgtttaaaagggtgatcatggggccaggcgcggtggctcacacctgtaatcccagaactttgggaggccgaggtgggaggaatgcttgagctcaagagtttgagatcagcctgggcaacattgmaagacctcctgtctactaaaaatcaaaaatttagttaggcatggtgctgcgtgcctgtagtcccagctacttgagaggtttgagatgggaggatggtttgagatggagactgcacgtgagctgtaattacaccactgcactccagcctagatgatagagcaagaccccaactcaaaacaaaaaatttaatt

SEQ ID NO: 783790 - DNA, 474 bp, Homo sapiens
tattttaagaccaaagaatctaagacgtttcatagagttatagaatcaggtgtctgtaagttattcttagcttcctgaaagactcctaacttctagatcaggggtgcccaatcttttggcttccctgggccacattggaagaagaatagtcttgggccacatgtaaaatacactaacggtagctgaagagcttatataatttatacatcacaaaaaaagtctcataacatcttaagaaagttgggccacattcaaagctgccctggggtgcttgcagcccacaggttggacaaaattsttctagatcttaacctctggtgttaatcatttgacgcctttcaattatgctgagaatgagaaaacatacttgaagtcataaccagaagcagctacggaagaagttggtatttaacactagtcattagtgcagactcccacaggtacggttcttttccctgtgggtctttacatctt

SEQ ID NO: 783791 - DNA, 619 bp, Homo sapiens
ccgcccaaggctgcctggcaaggagggaactgagcaagatctgagctctgtgtgcccccacacttccctgcagacctcttggaggccagggaggaggcacacaggggagggggccgggccaaggagaagaggccaacagcactgctgctgtaaataccgagccctgggcactcaggaaacacacctgctccccagagacccgccctgctgcccagtttgcatttctgggtggyggagggccccacccaagggcagcaggggccaggaggtaggaagccttggtcttctcactaagagctcctgggggcatgccaggatgaggggccacagcccccaggccatgtcacagagagaagctgtggcccagagttgggggatcggctagctcaagaccatacttcggggaagggccggccagatccatggcacagcacccaggacctgcctacaggatgccacatattgggcccgaccactccatcctcccagaacccttccatgccagaccctccccagatggcctggctgtggcctctctgcccttctctcctggttggagcttggggtcatagggagcttttggaaacaggtgacccaagaaaccctcaatcctggcatc

SEQ ID NO: 783792 - DNA, 613 bp, Homo sapiens
aattgataattggaacattgtgtattttataaataaattttcctataaataccttataaacaacttaaaatatcactgactatattttagaaagaacacaaaacatatccgaaagaaagagaatgaccaaatcccgcaagctgtgcatataatcaagtttatgctggcttcaaatccctcttgggactgtgtctccaaagcaatcagttaactgagatttataggaaacccttttcattctgtgagctggagatcgggctgcatcaggaagcttctttgaagagcctcaccttctaatgaacaagagctgttctcttcaattctaacacaatgtgaggtatattttttatgtcagttstgtcaaagcttgacatgcggtacagcctcaaacaattcaacacatgtcgtctggtcagtaacagctacttcctttcctctgacagatgaagtaagctgcccactctaccaagcaagggagagttctgagaaagttttccaaattgatgccttcttctgtcatgtttaattcaaaactttggaagtaaatttctgcattctttcactttctgagaaatgctttctgtagatttggataagtgtttttctacttgat

SEQ ID NO: 783793 - DNA, 644 bp, Homo sapiens
caaggtggtagctatgaaaacaaagtaaacattaatgtttgcataattatctacacaatttggtcaaagtctttagcaaataaaacaaattttggagctagaattccccagttaaaccaattcgctgggtaaattatcttttaaaatgtatattggtttttttttttttttggtcacagatgatcatgaaagaaattttaggaaatactgaaacatataaaaagaaaaacaaattcttcattatgccaaaacccaaatataggcatcgttaacatgctgtgtttcctccatgttgttttatttccaaagcacatatcaatatagctgcagctagtttttaaaaatcaaggccaaaycaaataactagatggacaactagatagacagatacagacaacagctatatctttataatcttataatcttgatgagttgcccttcatatgaatcttcaggataaccatgtaaagcaagcagtagtgctatctgctttatggatgaggaagcacaaggaggtcaaataatggacctgtgtcctctattagaccataaaatcctctaagacagggcctagctagttactcatctctgacttcctgcttctcttactgcataatttgatcacatcttagataatcaatgaa

SEQ ID NO: 783794 - DNA, 616 bp, Homo sapiens; identical to SEQ ID NO: 771555

SEQ ID NO: 783795 - DNA, 616 bp, Homo sapiens; identical to SEQ ID NO: 771557

SEQ ID NO: 783796 - DNA, 597 bp, Homo sapiens
taagtatgcaaggattttggtaatgaggttttttttttttttttgagatgaagtcttgcttttgtcccccaggctggagtgcgatggcacgatctcagctcactgcaacctccacctcccaggttcaagcgattctcctgccttccccgctcccacttccaacctccagtagctgggattacaggcatctgccaccacacctggcgaattttcgtatttttagtagagagggggtttcaccatgttggccaggctggtctcgaactcctgacctcaggcgatccacctgcctcggcctcccaaagtgctgggattataggcatsagcccagcgcccggccggtaatgagtttttaatcattatttgagtgtaccacttacttctatattttttaaaaaaaagttaactctaaaacagcctcagccagatccttcaggaggtatctagaagacgacactgccatcacaggaaatgatggctccatgcgtgttactgctcctgaaaaccttccagtgagacaagctgtgaaggtggcaatggtaataccattgatcttgaccctgtgtaggcctaggctaattatgtctgtgtcttagt

SEQ ID NO: 783797 - DNA, 624 bp, Homo sapiens
tgggattcacctatcaccagttgaggtcacagttagacacttaacagtgggtgaatgtgcagcctaactttagatggactgcaggccaaacaccagatttacaaagacagcggagttgggcagtccagtgggtagacccaagcactttcttcagtaactaaatagcagggagctccgtattttcagagtcacacttttttttttttttttttaaagatcagtgtctcagttcatagggaggcagcaatttctacctttttttgtggggagaggggagaaagcaagaagaggcagtttggtgtaactttgttctcttcaaagttaaggccatctggacctactgtgcctcagggtttcaccctgaatccacatttttttyccctcagacttctaaggcgaccttatcttttgactatgaagtgggtataggacagcacagcccttagaaaaacctgacagcttagtgtgtgcaatcctttatccacatagtttccttaaggattcaaaggaatcaatttggaataaatatggagagaggagaatctgatggtagcaatatttattcaataataaatatttattgaccaatgtactgggtttcaggttttttttttatgttttggg

SEQ ID NO: 783798 - DNA, 600 bp, Homo sapiens
ggccttttgaattagtatcaaaatgagattttttttttttttttgagatggaatctctctctgttgcccaggctggagtgtagtggtgcgatctcagctcactgcaacctccgcctcccaggttcaagcgattctcctgcctcagcctcctgagtagctgggattacaggcgcacgccaccacgcctggctaatttttgtatttttagtacagagggggtttcaccatgtttgtcaggctggtctcgaactcctgacctcgtgatccgcctgcctcgacttcccagagtgctgggattacaggcgtgagccaccacaccctcccgagatctttaaagtttaccaaaataaaggaaaccacctttgtagtctgtcagtgtctcttataaattgctactgtttycttaaagttaacttcagggtccaccttatgttgcacacatatcacatcgtttaaattgcatactatggtttgacttgctttggaattttcaagtcaaagtcccaaccctttgcctctccccctttaatttgccttttctcttttgatttaatgtttttttattccagcattttatactaatgtaaaatgtttttatgt

SEQ ID NO: 783799 - DNA, 545 bp, Homo sapiens
tattgtgaattacctgtttgtatctattgccatttttctatcaggtttttagaactctgctccataatttataatatttctctgatattggtgatattaactatgtctgtggtatgtatcatgaactcatgagtattttcctcyagcttttactcatcttctgacttgtttataatttttttttttttttgacatggagtttcgctctgtcacccaggctggagtacagtggggcgatcttggctcactgcagcctccgcctcccaggttcaaacaattctcctacctcagcctcccaagtagctgggattacaggcacccgccaccatgcccagctaatttttttgtatttttactagagaaggggtttcaccatgttggccaggctggttttgaactcccggcctcaagtgatccaccttcctcggcctcccacaaagtgctaggattacaggcgtgagccacagtgcccggctataatttttaatgcatgttttatgcactgaaatttatcaatcttctctttccttacctctagattttga

SEQ ID NO: 783800 - DNA, 623 bp, Homo sapiens
ggggctgatgtgactctcaagatttcttatctgtaaaatgagatcattagaatcgcttcatgggctaatttagaaccttgctcatcaaagtgcagtccttgggccagcagtgtcagcatcatctggagcttgctagaaaagcagaatttcaagcccgagacctccagaataacaatatctgagggtaaaatccagcaatctatgctttcacaacctctccaggtagctcttatgcatgctgaggttcgaacastgctggttagagaactaaatgaatcagatataattacaaacactgctttccatgagttcattatcattaggtaaatcagctacagtgaaagttaaccatgtgtattggaggcctgggaataatcaattttctcttaattttgggtatttgtttctactgttttttaatcttagcattattttgtcttagacaagaaatttaaatgtttaatagagaaatattcttccttataatttcataaatatttgttgacttctacctatgtcctgggccttgcattatatgctggggttcagtaataaagattgtaagagagaaaaagtgatatcttttatttacccattgcaaggttcatggctgacacttccat

SEQ ID NO: 783801 - DNA, 552 bp, Homo sapiens
ttgtattccaaaaagacaataaccattcccaactaatgttgtgctaaatgctccttttggaaagaggatgataattttgccctaggagtgcagccaatgaacccaatgcaatttcatttatgtttcactgtgtttaggattgttcttcctgcccccagtgttccagaggctctttgatatttacgagctttaaatctctttctctaagctgtttggcatttagggcctggcagtctcaggcttttttttttttttttttttttttttttttgkctgaaagctttaggaagttgctgtccctgcagttttctctgaatcagaaacttgtttccttcctggacacgaaatgtactgtagtggcaacaggttgatgagttgaaaaagattagagcaaaggttgaaatacaagaggtgggttaggtggaatattcgtgaattcctatgaatttaacgtgttaaattgtattttcccaaaagatatactctatcccttggtttctataaatgtgaccttattaagaaacaggatctttgcagatataaccaagttaa

SEQ ID NO: 783802 - DNA, 552 bp, Homo sapiens
ttgtattccaaaaagacaataaccattcccaactaatgttgtgctaaatgctccttttggaaagaggatgataattttgccctaggagtgcagccaatgaacccaatgcaatttcatttatgtttcactgtgtttaggattgttcttcctgcccccagtgttccagaggctctttgatatttacgagctttaaatctctttctctaagctgtttggcatttagggcctggcagtctcaggcttttttttttttttttttttttttttttttgtctgaaagctttaggaagttgctgtccctgcagttttctctgaatcaraaacttgtttccttcctggacacgaaatgtactgtagtggcaacaggttgatgagttgaaaaagattagagcaaaggttgaaatacaagaggtgggttaggtggaatattcgtgaattcctatgaatttaacgtgttaaattgtattttcccaaaagatatactctatcccttggtttctataaatgtgaccttattaagaaacaggatctttgcagatataaccaagttaa

SEQ ID NO: 783803 - DNA, 578 bp, Homo sapiens
gacagaggagctgtgtgctaagagcacagtcgtagagtccaacacactttggttctttgccagccggacaactttgtccactttattgaacctcccttggtctcagtgtcttcagccgtaaagtggaatagataatccttcccaagcagggttgtggtaagagtggatggggtgatctrtgtgattgtgtgctgcttgtaagccctgagaactgaaatcagccattaccgtgcaccaactaggaggtgtgccggttggtggtagctttattctgttctatcacgcaggggccagtcacagagggagcaaagtttatcattcatgatgggcgcttttgaggcggcagtggcaggttgataggattagcacatgggaggtatccaagtttgctaagtggttaatgattgcgaacatttattgaagacagatgctcaataggtaccaggctctgttctaaacgctttacctggataatctcattccatcctcacagcaaccctggcagtagacactattatcatcccctctttacagatggagaaactgaggcccagagaggttaagtgaattgctcaaaa

SEQ ID NO: 783804 - DNA, 580 bp, Homo sapiens
ttatttatttatttatttattttagggacagggtctcattatgttgcccaggctggtcccaaactcctggccccaagtgatcctcccatttcagcctcccaaagtgctaggactgcaagtgtgatcaccatgcccagcctataccagcattattcacaatcagcaaaagttaaaaacaacctgagtgttcatcaacaaaaaaatagataaacaacatgtggcagatgcacatgcaacaaataattatttagttatataaaggaatgaagtttggatcatgctacagaatgggcaaaccttgaaaacattacgctaagcgaaataaaccagacacaaaaggacaaatactgtacrattccacttctatgaggtacctagaacaggaaaattcatagagagaaaaagcagagtaaagtttaccaagagctaggcggagggggaagtggggagttattgcttaaattgcacggagtttctgcttggggtgatgaaaacattctggtgtagatagtggtaatggatgcaacagcattatgaagccacagaactacccattcccaaagggcaaaacttcaccttc

SEQ ID NO: 783805 - DNA, 586 bp, Homo sapiens
actctttaatgtttaatagaagtggtgggctcctcatttttttttcagtccaaagcaaaggtgtgtggcaaaatcatgttcccagtttgttcttcagtgaaacagctaaaccttgccttctccgaattgggatggggcaacagagtggagccatggtggatccagaaaggtcaggaaatacacacttggctgccatcctcatctgttgctccttgaaactgaccttcccatatggccttttccacttttctcctttactgatgcctattatccagctgtcaagcactctttcttaagttcccaagaaggttgatggttatgtgttgttcttagctattttaggtacaaggtatgtactgtcattttgatgactgactaactgcacaggtgatcttagcatatgaaggcagcttctggtctgtattttgtggaaaacctacttacatcrtaggaaaaagcctcaggcattggtttttaggctgcattgtttgtgttatgcctgtagacgttgtgctgccagagggggatactaagtgactacagaaaaagttaagtggttaatgatgatttttattttaatggaatc

SEQ ID NO: 783806 - DNA, 558 bp, Homo sapiens
tctcctgctgtacttgcccctgttcactcccagtcctactcccccaagacagcatcttttgccagttgctgtttatggattttctccacactccaaatcacatacttatacctccgttcctcagttaccatctttagacaacagctattcactccccaatacctaagatgagcatttagctcactrctcccaatgtctgaactttcatgactatttttgactcctgcatgagcatttcctcttctgacagcagtcgctgattcccagctctgtaagatgaggacatcagtgcccctccctttctttctgcttttctcttcccttcttcaatcactcgtgttttgtgcctctgcttctaccacttcatagcactgtggtgtttaatctcgggtgcctgggcttcctgggagagcagccatgaattccttaaaattaagtgtaaaattgtgtgtgtgtatttatgatccatttcctggggagagtccagagctttcatcagacactcccagaggggtcaagctcgggtgctgtatgggactctgtactgaggtcttccgt

SEQ ID NO: 783807 - DNA, 563 bp, Homo sapiens
gaggctcagaaaatgtcagtgctctgcctgagcttctcagtgaaaaagtggtcaagtcaggattcgaacccaggtccactgaggcccatgatacccagcactcagagttgtgctttttccttggcagtaagtgctgctgccgtgaactttctcccacactttttcttgcagttcctgagcaaccggacatacactgggctctggttgctgggacaccagagttgagaggtcagcataggaggctccrctcacttcggtcctgtgacaatggactcatgaccattcatgacatctccagccttgatgccccacccccactactgcccatgagtcttatgttaaaaataacaatgaacgacaagaactggggctctgcagtcagaaggacaacatatgttttccattttcttctttctcttccctgcttctctaaaagtggattaaatatgaaaaagcacttcccgaacgcttgggagacactgggaaggattgtccaatggagaaattattctccagagaatttcttaaaagccacttgtttttaagaaaacacataaaactct

SEQ ID NO: 783808 - DNA, 591 bp, Homo sapiens
gggggcggcgctcgtcggggaggctgtacaggagtccacggcgggttgggggaggctcaggcatggcgggctgcaggtcccgagccctgccccgcggggaggcagctaaggcccggcgaaataatcgagccagcgtcggtgggccggcactgctgggggacccgacgcaccctccgcaactgctggcccgggtgctaagcccctcactgtctcccgggccggccggccgttccgagtgcggggcccgcgaagcccacgcccacccagaactcgcgctggcccgcaagcgccgcgcgcagtcccggttcccgcccgtgcctctcyttccacacctccctgcaagctgagggagccggctcaggcctcagccagctcagaaaggggctcccacagtgcagcagcgcgctgaagggctcctcaagcgtggccagagtgggcgccgaggccgaggaggcgccgagagcgagcaagggctgcgagggctgacagcacgctgtcacctctcaatcctgtctactgttctgctagagaggcaacctaaatgccaggccaaggtgaggaacaattatttgctcgatcaacttcccagaa

SEQ ID NO: 783809 - DNA, 609 bp, Homo sapiens
ctcccccaaattgccagcattttatagatagtaaattgagactcacagaagcaggtgactgtcccatggccagatgtggcaaggtcagcatgggccgaatctttactgctctctccacccactgccaccccaaatgcaagcccctggttattccatcccaccaacggaggctttctttcagaacctatgtaagcaaagctccctggaacctttccaccctgcaacctgcccgtcactgccaccccaacacgcatgccccaccccctagacaggaagcctccatgatgagcagggtcatgtcctcaggaccagcacagggcctggagcagagtggacaggcaaggggtgcctataagataaacacacagaggaaccagtgctccttatctgcgtcttcctcctccytgggattattctgagccagggtgtcactgagctcttaataggagattatccctcctccattctcatgtttgacccccctgagttgtgatgccccaagctgtggccctcactcaaggtcatcctccccgctgacagcagcaacagcagccgcccacaccagccctttcaagcttcacagctgcccgctgccctcacaggggcgcc

SEQ ID NO: 783810 - DNA, 623 bp, Homo sapiens
catctgccatccccactgcacagagtggccgaggccagcccagactcacgcaccaggaggaatgagcccctctccacgggagacgtgtcagggacctgtggcatcttccatccaccaatccgctgtcaatccataccccttcccaaggtcagagcagcccctccaaggatggaattgccccyaacccccacccctcctctgtccaaggagacaggtggcacctctcaggcacctgccatatatgttctaggctccccctaggcacagttctccaactcatgcctctccaccaggctctggcaggagcaagtagaggccatgattctcacttaatagatgtggaaatcacatccaaatcacaaagcctcgacaggtcaatgacagtcaccaagaggccaggctgggtgtgcagctctatctggtcctgaaagcccagctgggcagcttctctaagacccgtgtttgtttctctagaccccaacatgctgccacacagccacactctctccaggctgtccctggcatccttcctctgttgagactggggagaagcaaggggcttcatttcatgtaagggtcaagcaaatcaggctgggaagctgcccatggtggagcccctggca

SEQ ID NO: 783811 - DNA, 599 bp, Homo sapiens
aaagtacgtacaaatgtgctcagcaccactgtcattagggaaatgcaaattaacaactaaaagatcctcctgcatacatactaaaatagccaaaatttaaaagactgaggcaggcatggtggttcacgcctgtaatcccagcactttgggaggccgaggcgggcaaatcacttgaacccaggagttccaaaccagcctgggcaacatggtgaaaccccatctctacaaaaaatacaaaaattagccaggcatggtggcgtgcacctgtagtcccagctactcaggaggcagaagtgggaggctcacctgggcctgggtggttgaggctgcagtgagctgtgatcacaccactgcactccagcctggacaacagagtgagaccctgtctcaaaaaaaaaaaaaaaaaaaaagamtaaccttaccaaatgctgaggatgatgtggaaaaactggaactgatggaaactagaactagaaactcttggaaacagttttgttggttttttaaatggtaaactcacaccttccgtactgtcactgaatgacaaaggatcctgtcattccactccgaggtacttatttgccaaaaaataatgtagc

SEQ ID NO: 783812 - DNA, 616 bp, Homo sapiens
gaaaaaaaaaaagtgtataaacacagcaggatataaatgcatgcatctggagaagatgaacttttacactagttctgccttttcagctttctaaaatgtggaccttaccaatttctttgacctccccctcctttttttccattccaatgcatggcggtgacaaggcattgaattaccagtttgtcactaacgccataggctttattattcctttgaacagaagctgggcttaaaaagaaaagtttttcttaataagtagctgttcatcctttgatatgcacatctggatctgtggtcttatctgcrgcatgctaatgctgcttcctgcagataatgataaaggaacaactcaaaataacaaaaaaggaataaaatgtgccagatgcctaaaaaataaggaggacaatgcaaataaaagcaactggtttttctattctggagaataaactctacccacaattgaagtaatcattttggtggttacttgatacacacttttttttttaagagattaggaaggaaaaaaaaaaagcaaacatcagctgacaagcactgccacattctgttagaaattaagagggaaataaacctaagtacgctataaatcactttgggg

SEQ ID NO: 783813 - DNA, 596 bp, Homo sapiens
cagatcaacaggttcccaaggcagaagaatttttcttagtacagaacaaaatgaaaagtctcccatgtctacctctttctacacagacacagcaaccatccgatttctcaatcttttcccctcctttcccccctttctattccacaaaaccgccattgtcatcatggcctgttctcaatgagctgttgagtacacctcccagacggggtggtggccgggcagaggggctcctcgcttcccagtaggggcggccgggcagaggcgcccctcacctcccggacggggtggctcagccaactgattttcaacaaaggcatyaagaacatacattggggaaaggacatcctctttaatatatggtgttgggaaaactgaatatccctatgcagaggaataaaactagacctttatctcttatacaaaaattaactcaaaatgaattaaagatatagatataaaacctgaaactataaaaactactagaagaaaacataggggaaatgcttcaggacattggtctaggcaaagactttgtggctcagacttcataggcacaggcaaaaaacaaaaaaataggcaaatgggaccatattaaa

SEQ ID NO: 783814 - DNA, 596 bp, Homo sapiens
cagatcaacaggttcccaaggcagaagaatttttcttagtacagaacaaaatgaaaagtctcccatgtctacctctttctacacagacacagcaaccatccgatttctcaatcttttcccctcctttcccccctttctattccacaaaaccgccattgtcatcatggcctgttctcaatgagctgttgagtacacctcccagacggggtggtggccgggcagaggggctcctcgcttcccagtaggggcggccgggcagaggcgcccctcacctcccggacggggtggctcagccaactgattttcaacaaaggcattaagaacatacattggggaaaggacatcctctttaatatatggtgttgggaaaactgaatatccmtatgcagaggaataaaactagacctttatctcttatacaaaaattaactcaaaatgaattaaagatatagatataaaacctgaaactataaaaactactagaagaaaacataggggaaatgcttcaggacattggtctaggcaaagactttgtggctcagacttcataggcacaggcaaaaaacaaaaaaataggcaaatgggaccatattaaa

SEQ ID NO: 783815 - DNA, 531 bp, Homo sapiens
gccctctctccctgcactctgcccccagagatgcatgacctattccgcagtgggaagcaaggaaggaatgcgtggggttgccgtgcagtgcctggttttcctgtcccaatgaccaagatgagatccagagttgccttctgtgatcccagaaatgtttcctgcagcagccactgggctggaaaggcaggtgcctactgagctgtgtctttctcagctgtctgccgaagctgcacttctmaacatagcagagcctctactccctgtaatttcagccccatctggtaaagcccacctggctctcttgaggcattccctttgcgtaagtggctgagaagcagctgagatacccctccaggaattggcagctgctgtcaagcctttggtttctccagcttcagcgagcagctctgggtcattttcgtgaagccgagacactcctcacgatgattcaatccaaaggatcagatatgaccctgaggtccttttttgatcccacgagtgtctgaacatgcattacaggaagatgttttg

SEQ ID NO: 783816 - DNA, 643 bp, Homo sapiens
gtggatactaagtggattaaatacctaaaataattagacgacaatataggggaatattgccatttccttatataggaaaatacttttaagtgttaaacataaaaaagattaataaattcaaaacgaagagcttttcttcaaaaacatccagaagaaatggaaaagacaagccataggaatcactgaagacttttacaaacacgaaattgactgaaatagtatccaggctatagagagaattcttgcctcacaatttttctcacaatgagaaaagaaggttgaccatcctaaagaaaagtgcttgaaaaagcacttcagtcgaatgaaatccagatgcctaaagtcatccagaaaaatgcttggcttcagagtaattagataaatgcagtaagatacaggaccaccaggttgccaaaatgtagaagtcygataaaagtaggtaatgcttacctatgacctaacaattccagttctgtgtatgtgtccgatataaatgtgtgatgatgtggaaagaaatgtatgtcaaagaatattcacagcaagaatatttatatttgctaaacattaaagcaatctaactatctcccaaccatacaatgaataaactgtagtatatgtacacagtggaaaattatacaacaat

SEQ ID NO: 783817 - DNA, 643 bp, Homo sapiens
gtggatactaagtggattaaatacctaaaataattagacgacaatataggggaatattgccatttccttatataggaaaatacttttaagtgttaaacataaaaaagattaataaattcaaaacgaagagcttttcttcaaaaacatccagaagaaatggaaaagacaagccataggaatcactgaagacttttacaaacacgaaattgactgaaatagtatccaggctatagagagaattcttgcctcacaatttttctcacaatgagaaaagaaggttgaccatcctaaagaaaagtgcttgaaaaagcacttcagtcgaatgaaatccagatgcctaaagtcatccagaaaaatgcttggcttcagagtaattagataaatgcagtaagatacaggaccaccaggttgccaaaatgtagaagtctgataaaagtaggtaatgcttacctatgaccyaacaattccagttctgtgtatgtgtccgatataaatgtgtgatgatgtggaaagaaatgtatgtcaaagaatattcacagcaagaatatttatatttgctaaacattaaagcaatctaactatctcccaaccatacaatgaataaactgtagtatatgtacacagtggaaaattatacaacaat

SEQ ID NO: 783818 - DNA, 617 bp, Homo sapiens
aaaagaaagatctaaaatcagctacctaagcttctactttagaaaactagagaataaagagtaaattaaatctgaaataacctggaaaaaagagacactaaaaattagagtagaaatcaatgaaattaaaaatagaaagttaatagagaaaatcagtgaaaccaaaaactggttctttgaagagctcaacaaaagtgataagccttttgccaggctaaccaagagaaaaaaaagaacaaattactaatatcatacatgaaagaggaacattactacagatctcacagactttaaaggataacaaaagaatactatgaaaaactctatgcccacaaatttgacaacttagatgaaagggattgaaaatcaacttagatgtaatgracaacttagatgaaatggacttgaaaaacatactctgccaaaattcacacaagaagaaatagataatgtgaataggcctgtatctattaagaaattgttaatttatctattaagaaaggttatgaatcaataattaataaccttccaaaacagaaagcaccaggtccacatgggtttgctagtgaattctacaaaacacttaaggaagaaattataccagttgtctacaatct

SEQ ID NO: 783819 - DNA, 621 bp, Homo sapiens
attcagcattttaacaggcagctgcccaccccaccaatacctcctggcttcccaggatgcagatctggagctagagaggacaagatggtactgggcggttagagcaatggaaatattctatagttgaaccgtgctccttgattaatgagcttttaaaaaatcattcttttaaggagctcttcrttcctgaagagaagaagcatttgcttccatagagcaaagaaaccatagaaatccagcagctgacttgcactggtgagtccaatccatccaagcacaaatctgattaatgacccagctttttaatgacacaaattctgttacgtcattcaaagggaaatgccctttgcttctctgagcctagtcgtggtcaggcctggaacacagttgagagcttactgagtgtgtgtgtgaaatgtgagggattctacacctgacaaagtaatctatgtgggtgtcactttattgaaggtgggagagcctcgtggttacactgggttctaaagccagactgcctggtttaactcccgcctctgcctctgccacttgctaacgaagtgtactggggcaagtttatcagcatctctgtccttctgtcccacagttgtagaatggagatta

SEQ ID NO: 783820 - DNA, 605 bp, Homo sapiens
tgggtcaacctgagtgctgctccagctcagggtactatgcctggtaagtgctgcccagagctccttgggaggggcaaggcaagagacatgtgagcacagtctgagggacatatgggcagtttattctttgatgtccttggaagagtggtcataatttgcgtgatataagccaacaaccaagatagataagcctcaggagagctaaggtcatttcaactaacaaatcacttgctccatagtggaraaagcaaactacagatccatacacaaacatggtaagttcatgggaaaagattttaagtcagttctctctctccctgtcctttacatctctctctctttctctctgtcatttacatctgggggaacctttgccaggtaactgaataacacaaagcagcatctaggagaatggcttctttcttaagcacacccaacatgatgagattacctagagatgagtgcttcttttgtggggagaatttgatctgtgcaccattacaaaccaggcttgggggaagccaagcccacaatcagaatgtaattgaagtatgttacctataataggttcagatgtttgtgatcttcagcactttatgaattct

SEQ ID NO: 783821 - DNA, 524 bp, Homo sapiens
caccagacaggatccaaagggggaaggaaaatttgtcagatgggctgaaatacctggcatttttggcttgttaagtgggagaagggaactttgggtctcagagagtaaagtgatgggatacaagtggacaagataaaatatttatctatgaatatgaaaaccacacaattgggcaagaaatggacatgtcttcttcactgagaacaacttttgagtacctctctgctaacacttttcttcaaagtcagactcaattttttttttttttaaagacaactttctcaccaggcacagtggctcatggctgcaatcccagcactttggaaggccgaggcgggtggatcacttgaggtcaggagttcragaccagcctggccaacatggtgaaaccccctctctcctaaaaatacaaaaattagatgggtgtggtggcatgtgccggtaatcccagctacttgggaggctgagacaagagaattgcttgaacccaggaggcagaggttgcagtgaggtgagaacatgcc

SEQ ID NO: 783822 - DNA, 510 bp, Homo sapiens
cacagatgaccccaaatcttgaagcattccttctgtaaccatttcacaagtgcttattacatgctgggcactctctccaggacctaggatatagcaccgaagagacggctgtctcatgaagctcatattccaggtgggtgagacagacaagaaatgagcaaagaaggaagtttcaggtaataatcagtttacctagaaaataaaacagcatgacgggagragtttttttgccgcctatcctggcttcagactctaaccggtaagatgagtctcagcaacgtgcaggttaaaacctaatgacctgacgtgtaattaatcccagcgcttttgggggcagggatgatggcttgcgcccaggagttccagaccagcctggtaacagagtggtgctctgtctctatgaaaataaaataaaataatccgggcatggtagcgcacacctgtggtcccagttacactggaggctaaggcgggagaatcgcttgagcccaggaggcggaggctgcattg

SEQ ID NO: 783823 - DNA, 513 bp, Homo sapiens
gggtggagagtataggatgataaggagactgattctgaggtgtgggctcaccttcactgaatgaggccaattggtaagaaggtcaatggatgataggagtcaggtgacacaaagatttgcattccaggctgggcacagtggctcatgcctgtaatcccagcactttgggaggctgaggagggygaatcacctgaggtcagaagttagaaaccagcctgaccaacatggtggaacaccgtctctactaacaattcaaaaattagctgggcatcgtggcatctgcctgtaatcccagctactggggagactgaggcaggagattcacttgaacctgggagacagaggttgcagtgagtcgagattgcgccattgcactccagcctggacaacaagagcgaaactccatctaaaaaaaaaaaaaaaaaattgcattccaaatagccaccatgcaatagttcattcattcatgagggcagagaaggaatggtctccagccacagcatggatccatga

SEQ ID NO: 783824 - DNA, 597 bp, Homo sapiens
tcagatccttagtctcactggccacatttcaagtgctcagtagccacatgtggtatggctgtcacactggtaaatacttcttactgaatacctatgatgtataaaaaggccttaggtagagataagttaaagacatactgcccctcccctcttcaagaatggaggagttgagagaggtacaaaatatagcaatggtgtgagagtagttatttgtctcttcctatagactaatgtgactttatgkctaaaagacctctttttgtgattcattttgagttagtgtctataactgagatcactgaggttgctgacagtctgacttctccataggtgaggcattattttgtatttgtcacatattagggttgtgcatgattgttgtaatgcttttcatgatcaaataaagcactttgcatttaaactgtggctttgatcaaatagctccatatttccccatgtggaatcagattttctaatgttaaaatgtacacctttctcaattattcgagctccctgtccatattattgttaacctcagatttctgtctcatttcatcccttcaagtaactagctttttctcattattttctgcttat

SEQ ID NO: 783825 - DNA, 597 bp, Homo sapiens
tcagatccttagtctcactggccacatttcaagtgctcagtagccacatgtggtatggctgtcacactggtaaatacttcttactgaatacctatgatgtataaaaaggccttaggtagagataagttaaagacatactgcccctcccctcttcaagaatggaggagttgagagaggtacaaaatatagcaatggtgtgagagtagttatttgtctcttcctatagactaatgtgactttatgtctaaaagacctctttttgtgattcattttgagttagtgtctataactgagatcactgaggttgctgacagtctgacttctccataggtgaggcattattttgtwtttgtcacatattagggttgtgcatgattgttgtaatgcttttcatgatcaaataaagcactttgcatttaaactgtggctttgatcaaatagctccatatttccccatgtggaatcagattttctaatgttaaaatgtacacctttctcaattattcgagctccctgtccatattattgttaacctcagatttctgtctcatttcatcccttcaagtaactagctttttctcattattttctgcttat

SEQ ID NO: 783826 - DNA, 561 bp, Homo sapiens
tggccaattttattttatctatttaaaccattttgagaaaaaatatcacttttctgctattcattctttctttcttcaattgtttaatggtctcatttaacagtagttttaaaaaaatgttcttattgagattatatagaatatttaggaaaattttcttccctccttgttttcatttattttgagggacaggacggttgtatacctcgtcaagacatagttcagctggacaggtgtggctgaaaccgttcctgtaggtccttttggctgctctttgctttggtgatatacagtgactggtacctagctgttttgctgaagagtaagatttgagtctgtaggtggtactgagctaagacacagctttaaaaaagtcctggctgtcctttgyccagctgcctgtctttgcaccgagagtgaagactggtggtacccacgtggcaagtttgaccctcaaaaacaaatgccctgaccttcaaggaggacacatggaagcattttgcgtcaatcccttttcttactttttgatcaaaataataaatgggtagagggctttgcttt

SEQ ID NO: 783827 - DNA, 553 bp, Homo sapiens
tgattactgtggcttgatagtgagccttgaaatcaggttacgtgaatcttgtaatttagttcttacttttcaaaatcactttggaaattctagagtctctgcttttccatataagttttagaatcgcttgtcagaatctacaraaaagtctgctgagattttgcttgggataacattgaatctatgtatcaaatctgggagaactgacatcttaacactattgccccttttgatctgtgaacacaagtatctctcctttgatttatgtcttctttaatttctctcattaacactttacagtttttggtggagagctcttgtgtatattttgttgaatttacccttaaatattccatgatttttaaagtgatagtaaatggtatttgaaaatacagttttaatatctcattactggtacacagaaatggaaatgagttttgaatattggctttatatcctgcaaacttgctaaactcatgtcttagttctagtaatgttttgtagactctttgggattttttatgtagacaattatgacatctgtgaaaatgat

SEQ ID NO: 783828 - DNA, 503 bp, Homo sapiens
ttctggggctcccaaaagcccacctggttctagagtacctcccttgccttcaaaggcagacttagcattctgtgtttggaacagcatcctctaactagctctggagggctttggaatgctcgcttctgaagtccagagcatgtctttcttggcatggaactaaaggaggtccactccattctctgtcttcattcctctgccctctatctgcttataggcagcagcagcggcagcaacagcagcagagagctcgaatrgcaccctctacaccaccacagctcagcctgcaccatctccaggcctcagcacctgcttcagctcctacaggcacaggggacttgcccagacctggactttcccagcagtaaccctaagccctcacacctctctcctctcctttgcaggaggcccctctgagaacaagctcctggctggtgaccagattgtggctattaatgaggaagacgtgagtgaagccccgagggagagactcatagaactta

SEQ ID NO: 783829 - DNA, 616 bp, Homo sapiens
aggaaacgtgcttgggccggggagaagctggcctggcctgacctgtggttctgaagaacgccatcccacagggagctgtggcgctaaggtggctctttagtgttgccccagatggaggtgaggggactgcccaagcctttgatttctgcatcatctggtcatttcagcataagtgagaggcctaaaaatgaacagcaggcagttcccttgggtgaaggagttcactgcagtagagggcagtcccattgaagggcgagctgcaagcccagccgctgatattcctgaggttgggggatgagcatatggaagagggctggagagtaccactgtgaccatctcagggagatttcccaggaaatcaagggccagcatgtggatgacttttagtgayggtcactcacttgctcaaggttcttctttgtctcatgaagtgagagagatgtgtcatctgctctgcgtaggaaaggcaggatagttactttttgggtccaagggaagacaaatggtaattaatggagtttttaggggctcaaagatgctcttagatgctccagggtgggattccagagtccttgcactgagctgtcacatatcttcctgtgtgttagggaggact

SEQ ID NO: 783830 - DNA, 616 bp, Homo sapiens
aggaaacgtgcttgggccggggagaagctggcctggcctgacctgtggttctgaagaacgccatcccacagggagctgtggcgctaaggtggctctttagtgttgccccagatggaggtgaggggactgcccaagcctttgatttctgcatcatctggtcatttcagcataagtgagaggcctaaaaatgaacagcaggcagttcccttgggtgaaggagttcactgcagtagagggcagtcccattgaagggcgagctgcaagcccagccgctgatattcctgaggttgggggatgagcatatggaagagggctggagagtaccactgtgaccatctcagggagatttcccaggaaatcaagggccagcatgtggatgacttttagtgatggtcactyacttgctcaaggttcttctttgtctcatgaagtgagagagatgtgtcatctgctctgcgtaggaaaggcaggatagttactttttgggtccaagggaagacaaatggtaattaatggagtttttaggggctcaaagatgctcttagatgctccagggtgggattccagagtccttgcactgagctgtcacatatcttcctgtgtgttagggaggact

SEQ ID NO: 783831 - DNA, 643 bp, Homo sapiens
aatcttattgaggatcctttgtatgtgatgaatcacttttctctggatgctctcaaggttctctctttgtctttgggttttcaccatttaattatggtgtgtctaggcatggctatttgagtttatcctacttggagttcactgagcttcttggatgtgtagatgaattttttttgtaacattttggaagtttttgcccattatttcttcaaatattcttatcgccttctcttctctacttctgagactcccatggtgtgtgtgttggtacacttratggtgtcttacacgtccctaaggctctgttcatttttcttaattcttttgaaaaatttttctcagactggaaaacctcaatggattaatcttaaaggctgccttattttttatctttcctgctcaaatctgctgttaaaattctctagtgaagttgtcattccacttcttatacttttcaattccagaatttccattttatcgatattttctatttggtgagacattattcttatactttcctttagttctttagacatgatttcttttgttttttgaatatatttaaaagagctaatttaaaggctttgtctattaagtgcaatgtctgtgcttcctcaggcacagtttctgttgaccacttctt

SEQ ID NO: 783832 - DNA, 593 bp, Homo sapiens
ttcattctgtacgtaattgaaaaactgctttcatagccggatgagagggatttgtgtgttttgtgcctaaaataaaagccatgggattattggtgaatttggaggttttgtttcaaattgactataaataggagagaaggctccaagctgatgttggtaagacccmctcaggaaacccattgtggcgtgaatagcttttttcccctccaataaatgaaaagttaaattggttgtgcccatctctgtattttctctctttgtaattggtttttgtggtgctggaaacatatggatgtgttttataagaattctgatcagatggcaccaatgaaaggtagcacgaggcacatccagtgaattatcatttcagcggtgcccattcacttgtatttcaacttcactgtccctggcttcctgttcttagctaatattctgttgtgggtataaatgaaacaggtatgagtaagaatgtgagcaactggaactgtcaaacagtcaacatcctacaaacaaatgtaaaattacaacagtgataagattcataagatgcttataacactggaatatagtcggtggccaacaaaggttagcca

SEQ ID NO: 783833 - DNA, 599 bp, Homo sapiens
aattaaggtatatgcctcataggttcgttgtaaggtttaaatgaatgaacgtaaaaagtgcttagagtgttctgagcaaatggtaagagctaaaaaatgttacctatttttaaaaatcattatcactgttattctcataattagtcaaggaaggcttcccagaagaaatgacttggagctgagctgtagcagtagcaaggcaacaatggaggsataagcattccaggcagaaggaacagcatgtacgaaagtcgtatggtgggaacagaccgtggtacatttggggagccgaacagggctagtggggctggagcagagtgatcaaggaggagtgggaggagacctgaggctggagagatcagctgggggcctgaggaggtagggcctgggggcttttttttagggctgttagtctttatgctggaagcaataaatgccaacaaggggtttgtaagcagtggggaggcaaggtctccctgttgatttgcaaagctccctctagtggttttggggagggctgaggatggtggatgagggcttttggtggggtggggctgggagggatggagagatgattgcagagaggagtctaagatgcg

SEQ ID NO: 783834 - DNA, 536 bp, Homo sapiens
cattcgcggggtttgggagccatcccttaggcctcctgggactctcaaccctttgcaatcctcatgatcaaacactcctgacctttctgagccatgggcctcttctctgagcacatcttttaaatgcacaaaataaaaatatattagattacaaaggattccaattatgttgaaacatggttatcaaaatattaaaaacacttttgatatagtaataaatgtacttcttcattaatgcactaaataacaagcgctagggacaggtctaattagcatcttaactttgaagtggkactgggtgtaaacgatctatggagatagtagcaatgactgtaatgcgatatgaaaatatctatatttcttttggtgacaaagccaagaacaccactaatacaactgtggtttgttgttgacattcgcaagggaaggaaatgctaactttcagggcagtggtgctgaagagacagatgtaatattttttccacctcccaagattaccaactccctccgtgaggatcccctgtcattcatggggt

SEQ ID NO: 783835 - DNA, 620 bp, Homo sapiens
agacaaccggttcagcagtccctggagcccacgtgcctccccttccttttgccttggctcccttatgcccacccaccagctcttccaggctccaaaggggaagttgaagaagaatctggtacctggcccagctgccaagccccaagrtcacacagccctagaaccctgctgccaagtccgtctcgggggacctaggagaggaagtccgccagcctgggaagctgcctctccagccttggccaagcaccacctggcaaactgcagctgaaatgccgagcacactacagggggataccccctccaccccagccctgctgagaagcccagccgcactcttgatctccctgaaatccttgaatctaggtcaagggtggtgctaggggttggatgcacagggaagaggctgagcaccaagacatgtggaccagtcaggactagagacctccttccttccagacatgcacactcagccacgctggagatgacaaaaccttacacactcaaagccaatacatgcgtaggggcggccacatgccacgcactgttctaaatatcttgtacaaactcagctaatcctcaggacaattctcattttacagatgaggagaccgaggcacagc

SEQ ID NO: 783836 - DNA, 611 bp, Homo sapiens
agaagtcagcagagggattctggaggtctgggggccatgactgggaatgggcaagagggaaccttctggagtgatgggaatgttcttcgatcttggtggttccatgctatagacatatgtaagcatttgtcatcctgggggtggacttactgcatggatgctacactttaattaaaaagcttttttaaaatctcatacttggactgggcagagtgactcacacctgtactcccagcactttgggaggccaaagagggaggattgctttagcccaggagttcaacaccagcctgggtaacatagcaagaccccatctccacaaaaaaaaaattaaaaattagctgggcatggtggtgcacactatagtcccagcttctcagaagactaaatgggaggatggcttgagtmtaggatgtcgaggctgcagtgggccatgatcaagccattacattccagcctgggtgacgcagcgagaccctatctcaaaaagcaaaaacaaaacaaaacaaaaaatttcagactctttccattgactaaatgctccttcattacctggtttctttcaatctctctgacctcatctcctcctgcttttcctcttatggccttca

SEQ ID NO: 783837 - DNA, 643 bp, Homo sapiens
tttcagttaatcaggcttgatgctatcaaatcctcatttcctagtataattaccttaatttacttaattttgtagtataattacacttaattttaagacacatacttttcatattttaatagctatgaaatcataacatattacaatcaatagcatagtttaattggaagcatttttaaaattttcttaatggaacaaatagtactggtgtgccttttagtggatgttgtcttatattaggtgaaataagtaacttataagtggctataaaatggacawgtctacttgctagagcctgggtcacatgactgcaccttcactgaaagttgagtaaaagatgttttcatcttttattgtggagagtgagtagtgccttaaggtgataaattcctcagccatggaaaatgggttcaaaataatgatctgttttatctttaggaactgatttcaaaatatttgaaaatattggggaagccaaagtaacagtatatgaaggttatattcagcctatgtgacattggcttatgatttctagtttatactttccataaaaatctctgataaaaatgttcatgagaaaagaaccaaggacattctgggtaatgtattctgggtaacaatattctgggtaaaatatttcagt

SEQ ID NO: 783838 - DNA, 662 bp, Homo sapiens
cctggccaacttttacctttttgcctaaagaaagtattttgtggcctatctttggcatatctgacttgctggcatcactactcttgtgttttggggccattaataagtaaaataagggttacttgaacacaagcactgtgataccacaacagtccatctggtaactgaaaaggctactgaatgactaaggggcaggtagcatgtacagttcagatacgctggacaggggtaattaatgtcccaggtgggatggagtgggacagcatgagatttcattacaatactcagaatggtgcacaatttgaaatttatgaattgtttatttctggagttttccatgtaatatttttgaaccacrgttgggtgagatcaactgaaactgcagagagcaaaatcgcacataaggggggactactgtaaatcattctgatttcactgttgtttgacctttaaaattttttgggtgggtatggtggctcacacctataatcccatcactttgggaggctgaggtgggaggattgcttgagcccaggagttcaagaccagcctgggcaacttagtgagacctgatctctacaaaaataaaaataaaaataaaaaacaaataaaattcttcaagctctgtctccaatgaaggatcctgctatgtggtgcctttt

SEQ ID NO: 783839 - DNA, 579 bp, Homo sapiens
aaaattgagaaaaaaaaaacttttggaacttgtaatctaataagatggcatgaaactatttctccttgttcttccctgctaagcaactatgaaccctggaaatgcaagaggcaaccaaaggagaacttggagatttagtaagaaggtgaattagtttggggccccaggactggaggaacaatatggtgtccgagtgtcttctgtcctcctrcccaactgaagaaggtgacccagacccagtgcatcctaacctgcaacctagcaacaagaaggtggcccgggaccttctccccaggactgacagattatctatccaacatgaccaggaaagcccagcccccgggaaggggagattaataggaggccactaagtagccagaggaagtgctcaccttcagagggcctgggacttccttcccctgctgagtgagagctctgtggcaagcatgcacatgtgggaggattctgccagttcaacaaatgatctggcctgggaagcctctttgttcccctgggccagagcctccctcccctgcctacattcactggggagctggggggcactggcagaggggatcc

SEQ ID NO: 783840 - DNA, 485 bp, Homo sapiens
tgaaaagaattctcatataagtggacctgcacagttcaaacctaccttgttcaaggatcagctgtagttacaaaacaaagcaggcaaagacggaaaaaaaatacctatttaccacagaagcaataacattgtacagtaaatgaaacgtagtacatttagtagcgatcartctttgtatagttatgatagtataaacactgaatattgctctaataaaaattggatatgagcatatttagagaatggggcaagggaagcacctgtgtatctgtgcatatatgagtttgtgtgcatgtgtgtgcctgagacttatatgcttacctgctgtaataggatgtcaacacataatgtctaaaactgatacattatcatatatgagcatattaattagacatataaagattttaaaagccaaaaggaatagtaagttggagtggtagattatgggaaatggaaaggagaatggaaggaatagaaaacttctt

SEQ ID NO: 783841 - DNA, 584 bp, Homo sapiens
ttctttagatttaatgacgtacctttgtcatgtacttaatcttcagcaaatatttacccttccaaaactggcagatttgcattttacaacttgtcatgtcaaatgaaatattttctcttttctttgcccctagaaggatttctgctcaaaattataatcttttaaaaaatagctgacacmttctcctttgtggggaatattcaacatttctatcctgtgatttgaaactgacccttctcacttctctccagctttagcctatacatattgatatatttattttggatacagtttaatgtttttattcttatatctgggtcatagagagatgaatgggtaaatgaagagatggatgaatggataaattagatagaaagatagatagatagatagatagatagatagatagatagatgatagatagacagatagacagaaaagcagaccaaagtataccacagatgtgtggaagtacatgttcagataacagaaaatacactgcaagctttagtctcaagctccctagaccataaaagcttatagaatggtcagctttccaaagcagaggctaaataactgtcatt

SEQ ID NO: 783842 - DNA, 584 bp, Homo sapiens
ttctttagatttaatgacgtacctttgtcatgtacttaatcttcagcaaatatttacccttccaaaactggcagatttgcattttacaacttgtcatgtcaaatgaaatattttctcttttctttgcccctagaaggatttctgctcaaaattataatcttttaaaaaatagctgacacattctcctttgtggggaatattcaacatttctatcctgtgatttgaaactgacccttctcactyctctccagctttagcctatacatattgatatatttattttggatacagtttaatgtttttattcttatatctgggtcatagagagatgaatgggtaaatgaagagatggatgaatggataaattagatagaaagatagatagatagatagatagatagatagatagatagatgatagatagacagatagacagaaaagcagaccaaagtataccacagatgtgtggaagtacatgttcagataacagaaaatacactgcaagctttagtctcaagctccctagaccataaaagcttatagaatggtcagctttccaaagcagaggctaaataactgtcatt

SEQ ID NO: 783843 - DNA, 601 bp, Homo sapiens
ttagaggtgggaagtgccagtgtcctggaaatgtttccatctgccactgcaggtaacccaggtgggccaaggggatattaggcaggatgtcaagagcatctgctacagagcaggctcttcatctactatgcaaattagtggattcatctctgcaagaggctaagtactgttacaagaaattgatggaagaccccaacgtcttatcagttttccacatccaatgggctctgtctactctaccttgtccctttttattactttgtgtcaaaaytattgtcagaaattaaggtcataaataggtagcttaaaaagtttacgttcacatctattcctgggatcacacatatttcgtgtacttctcactcagttctttaatttctaccagattaatacattgccataaaagcagcttccaagtgcagtaataatcacaataatcactgtaaaatgtaatagataattatattgatgaagaattatatttagccatatgccaatataagaatacttattgattcatgtctatcattgttatcttctctctagcctttaggctatagttacctgtcaggattagtagtgagaagtctttggatggatt

SEQ ID NO: 783844 - DNA, 543 bp, Homo sapiens
cattagtagacttcaaacaagaagaagctgtgaacacacttgtgctatctggctcatgccctcctgcatgcacactggcgaactgctgtcatgataagcatatccgaattagtcccagcatgaccatgcatggaacagacctgaaccttgtttgtggtctgaagccaattccagccaactttcagtgggaggcaaagccaatcccttgaccccagcctagatgagytgagcccagtccgcctacagacccaggagcatgagaaccagtacttgtggtgggaagtcattgagttttggcatgcctgttgtgcagcattagcgtagcagtagctgaccaatacagagccccagagcagctccagtggaatgtgtttcatatattgagtttctatataagcatgtttgaaataagaatttgattgttgaaaacagattgaaagcctctacaacagtggttttcaactggaggcaattttgttctccagcgtacatttggcaatgtctggagacacttttggttgtcacaactgggtgggggtcggt

SEQ ID NO: 783845 - DNA, 611 bp, Homo sapiens
agcccttcttacatatataatttgcaaatattttctctcatcctgcagattttcttttcgcttcttgaaagtgttctttgatgcacaaaagtttttaattttgatgggttgcagtttatctagcttttcttttgtcatctatgtcatagctaagattatattgccaaattcaaagttatgaagatttatccctacatttttctcttaaaagttttacagtcttagctcttgtgtttaggtctttgatccactttgagttaatctttgtatacagtatgcagcatagtcattcttttacatgtggatatacagttgccccagaattatttgtcgaagagacttttgtccaattaataawcttggcacccttgttgaaaattaattgatcatagatgtattggtttatttctggactctcagttccatttcactggtccatccttatgccacaaccatgattctttgattactgtagctttgtagtcaagctttgaaattggaaagtgtgtgtcttcaaactttatttttttttcaacatcgttttggctgtttggggtctcataattccagatgaattttagaatcagctttttcatttctgcaaaaaagac

SEQ ID NO: 783846 - DNA, 674 bp, Homo sapiens
tttataaatgtatgtgtctatggctataaattcctcacttagccttgcttttgctgcatcccattactgtggtatgttaagttttgtttgcatttgtcccaagatattctctgatttcttgtgtgattcatcttttgacccatttattttgagtgtatcatttaatttccacatatttgtgaattttctagttattcttctattattgacgtcgtttcattttatcatagtyagaaaatattctttgtgtagtttcagttcttttaaaatttattgagacttattttgtagcctaacatatgggctatcttagctaatgttccatgtacacttgaaaagaatatgtattctgctgttgttgggtggagtgttctgtctgtgtctgttaggtctagtgttcaagtcttctatttcctattgagcttcagttattttgttgtatgtattataaaaggtttagtattgaaatatctattattgcataactatgttttgtccctttaattctgtcaatgtgtgcatactccacttctctgttctttcttgtgtgttatgtttatatgttcttgatgaattgacccttttatcaatatacaaagtccttatttgtatcttgcaattgttttcaagtcaaagtctgttttgtccaatactattactgtataaccacccca

SEQ ID NO: 783847 - DNA, 598 bp, Homo sapiens
aggctgccccccagctgtgcatggcagtgtgtcggaaagaacaaggcctgtgggtgcccctgagccgggtctggagtcctgtcctgccacttctcagccgtgtgactggagcctctttgctcctctctgaaaatgggtctggtggtttgttcccaggttcttaaccactgtgtggagtcacacctgcagaaggtcagctcataacagatatrgcaaccaatgtgacctttgcatccttccttcctggggtcaggagcaggtctaagaggtggtcaggctaaacccctgtagggctgtgggtactgctggtttcctaagccccgggaccttctgggggccgggcggaccttaagttctgtccacctgcctctcctccatcctcactacccaccttgtccttccggctccttccctccctgctccgcctctcatcggccctctgtcctctccgtccggagaggggaacgtgaaggaggtgaggagggagtagtgcaggaggatttgggtctctccttctttcccttttccattctccgagggcttaaccagctggtgaaggttcttaaccagcaaaggaggaagcagccggggccggtga

SEQ ID NO: 783848 - DNA, 565 bp, Homo sapiens
ctagaaactggcacatgatagggcctttggtggacagaacctaaagtgattctcaaggcttgctcacttctggtatttactcctttgtagaatcttctcctgatgagttaataaaacccatgacttctttctaaccaatagaaggtgatgagatgtcactcttgtgaagatgttatattatataaggcctcattttatagcaggcacactctagaggtctctttgctggcttgacagagtgagggccatgmggaggaagctgatgtggcaaggaactacaggtaggttctaggaacagcaggcagcttctggagctatggttgccttattgtctcctgcccataaagggtttcagtcttacagatgcatcagaatgaattctgctaataattcaagagagacttcacagtggagttttctatagtaaagcctccagatgaaaacaccttgactccaaccctggccaacaccttgattccaaccctgtcaaagcttaagtagaggactctgctaagctgtgcctggactctgactgatagaaactgtgggatgtgtgttgtttgaa

SEQ ID NO: 783849 - DNA, 502 bp, Homo sapiens
caaaaaaaaagttccagttcattcttcggtttttaaaaaataacaagttgacttcaacaaagtgaactgagttcccctctactttcaaatgactttttgaaaagttaagaaatactcctattattttctattacaaaagcaatatttatatttattatagaaaaattaggagataaggaaagagaagaaaaatgcctaattccacttcctagtttaccatttggagtacatcattccaggccttctcccatccatacatatatgtatgtattatacaggttatcaaatgaacttccagaaagcattataaatgtatrtgtccacctccatataatgataaatgacaagtattgtcccttttcaaataatggacataaacattttaagaaaatggtttaaaaatagcctcttggttatgtatagtggctcacgcctgtaatcccagcactttgggaggctgaggcaagaggatcacttgagcccagatgttcaagaccagcct

SEQ ID NO: 783850 - DNA, 654 bp, Homo sapiens
tttgtaattctcagccacagaagaagctatgtaagataccagaagttacaaccaaagagactgttacatatttgatcctcccagaatatagctcagactcctgagtttctctttttaattattatttttatctaagatgagataacaaaatgtttacagtggacagtgtagatacttaactcaaatgatccaaaaattstacaggaacatttagtggtgtcagtggaacatttgtgccgttcagtcagtggcagatgagccatttctatgcttgagtagatttgtagctgattaaattcatggcacatgatacctcttccctggaaatatgctaatttcacatagctgttttatgatggtgaggtataagcacagactctcgcatgtgtatacatgtgtgtatgtgtgctttcaacacatacttcctctttctccaggcttactcaggaaagcattttccagagagctttcttctaggcttcacgtgcacatctgcagttttcaaggtgaaaatgattcctcacggattggttttaacaacaagccgggtagtgcaaagtgaaggggattaaggcagacaatgtgaccacacaccaatttcctcccttacaaaccttttatatcacttatcaggattttaattccatctgccaa

SEQ ID NO: 783851 - DNA, 613 bp, Homo sapiens
ctcacagaatggtgactacaataaacaataatgcattgtttatttcaaaattactaagagtagattttaagtgttttcaccacaaaaaataagtatgttaggtgatgggtttgttaattagcctgatttaatcattacacattataaacatatattaaaacattatattgcaccccataaacatatacaattgttgcttaattaaaaataaaccttaaaaaagagtgaggaaagattgttcttcttttttcatatcttagtgactaagcacctttgatctcctagtttgttatgtaggacatctggtgtttacccttggacgcyttgtctctctcattcttaacgccttatcaccaaaactggtaaatttggatgcaaatatatatgctaattatcctatcactttaaaaaatccctaccaccacaaccctaattcaaatcactatgatttcttttctggattctggcaatagtcttgcatccagtccttgcatccagtcttatgcctttacattgttacaacatttgatgaaatcatgtcatccatctccttaaaacttgtcagccactttacactacatttaagaaatactatattgtatacttaaaattt

SEQ ID NO: 783852 - DNA, 498 bp, Homo sapiens
gctagaaaaaaaatgcagaacaaggggaactcttatttattactgatgagaatgcaaaatgttaaaatcactttgaggaaccacttggcagtttcttataaagcttaaaataaactcaacatatgacccaaccccatcattcttcatagaactagaaaaaacaatcctaaaattcatgtggaaccaaaaaagagcccmcatagccaaagcaagactaagcaaaaagaacaaatctggaggcatcacattacctgatttgaaactatactataaggccatagtcaccaaaacagcatggtatgggtataaaagtaggcacatagacccatggaacagaatagagaaccaagaaataaaaccaaatacttataaccaactgatctttgacaaagcaaacagaaacataaagtggggagaggacatgctattcaacagatgttgctgggataattggcaagccatatgtaggataatgaaccaggatcctcatctctcacc

SEQ ID NO: 783853 - DNA, 520 bp, Homo sapiens
gtttatttttcccatggggaaaataaaagtgcttttccctatgcactcacttctcccagtgagtgcttagtcctcactgagtctgggacccatgagagcaggggttttttctctcttatagctcccctaccctggttcccaccctgccttctgtgcctgcacagaactgcyctgtggagacgcagtggcaatgcctaggacacagtgatgttcaatgaatgtctcttggtggattacgtaagaggagcagaacccccttcttcctccctggatctatgtcaggctgttttgtttatctgtgttctcctgctatcacacccacttcagagacaatggaacccagacctaggggaaggaagggttcaccccaggtcaactatagcccatcagcagcaaagtgaaggccagaacccagctggggacatgctctgctggagctgtggccctgctgaacatgggcaggctcctctgcttacctcttgagggctgtcctccagctatgaaggagctgggactgtcc

SEQ ID NO: 783854 - DNA, 620 bp, Homo sapiens
gcctcaagaagaaatagaaaatctgaacagacctctaacaagtgaagagattgaattagaagtcaaaaagcttcccagaaagaaaagcctaagaccagatggcttcgctggtgaattctaccaaatgtctaaagaataacaaacaccaatccttccaagcttttccaaaacccagaagaggagagaatacttcccaattcatgctatgagggctatattamcctgataccaaaatcagacaaaaacatcacaaggagggaaaactatagaccaatatcccttataaatatagatgcagattttttcaacaaagtactaacaaatttaatccagcaatatataaaaaggattatacactgtgaccaagtgagatttatcctgggaatgcaaggttggtttgacatatgaaattcaatcaatcaatataatacaccatattgatagaataaaggacaaatctaggatttgccacttactagctgtgtatcttgggcacatagcttggtacctttgaagaagtttctccatctataaaggagggatagtgctactgatctcttgacattgccaggaggatgaaattagatagttcacacaggaagtattcaataaatggtcat

SEQ ID NO: 783855 - DNA, 600 bp, Homo sapiens
atgtagctccaaaagctgaattctcattttttaaacacttcatgataatgtgaaaaaacaactttttatggcccgatcatggctgccctgttggatgtagatgctttgctgatccctcagtcacaagccccatgaaatacttatgaaatgtgtgaaaggcttctgtggtagcccacaggaccagggacagcgtgggtgtgaagagcatcaggaggagagcctatcagtcactcaccactgtggctgctgggggctgatggcaggaccctyggtgggcagcgaggtggcaggggccctgccaccaacctgcaccacccctgaccccagggccaggctcacccttgggaggccctgggctaaaacagtggtggtacctcccaccccaacgtgtccctatttacgacatcataaagtaaatagaaaagtccagcagagtgctgcttttaccaacaataactgctttatacttttaaaaaatcacatgggcgccccctcattttggtgccaccgtcttgcaaaggcctagacttgtgctttttcccatgaccagccacccttctcccaacctcggaggacatcctcctccttcagtccctcctg

SEQ ID NO: 783856 - DNA, 600 bp, Homo sapiens
atgtagctccaaaagctgaattctcattttttaaacacttcatgataatgtgaaaaaacaactttttatggcccgatcatggctgccctgttggatgtagatgctttgctgatccctcagtcacaagccccatgaaatacttatgaaatgtgtgaaaggcttctgtggtagcccacaggaccagggacagcgtgggtgtgaagagcatcaggaggagagcctatcagtcactcaccactgtggctgctgggggctgatggcaggacccttggtgggcagcgaggtggcagggsccctgccaccaacctgcaccacccctgaccccagggccaggctcacccttgggaggccctgggctaaaacagtggtggtacctcccaccccaacgtgtccctatttacgacatcataaagtaaatagaaaagtccagcagagtgctgcttttaccaacaataactgctttatacttttaaaaaatcacatgggcgccccctcattttggtgccaccgtcttgcaaaggcctagacttgtgctttttcccatgaccagccacccttctcccaacctcggaggacatcctcctccttcagtccctcctg

SEQ ID NO: 783857 - DNA, 678 bp, Homo sapiens
aaggatcctaggaggtttcttcccattttgtgaattaatcttctctccctttgtaggtgacctttaatcgtgatccctgctccccgccttgtctgcctccctccagcccttgaattctggaaattagagaacaaagccttatcctaacagctcacagtttaatcagcttcaatcatatctgcctggaaagcagtgtcgtgcagtctgttggaccccaattcttggcctcgttccatcactttattttttattttttttgagatggagtctcgctgtgttgcccaggctggagtacagtggcacgatctcggctcactgcaacatccgcttcctaggttcaagcgattctccttcctcagccccccgagtagctgtgattacaggcacgcaccaccatgcccagctaatttttgtatttttagtagagatggaattggccaggctggtctcgaactcccagcctcaagtratctgcccaccttggcctcctaaagtgctgggattacaggcatgaaccaccgcatccagcacatcacttattttgtctcttagggctatgtatgttacttctctgagcctcagtttcctcaccaaatttcttacgtgactttggtgaggatgatgttaggataatttatctcatcatccacatctgcatcctcagccctaagccctaaa

SEQ ID NO: 783858 - DNA, 510 bp, Homo sapiens
caggtagagaatcatgtcactggcaagtaatggttttgtccaatgtgttcacctcatttcttttttattatctatttcgctggttaataaagtgacattaactgagttttggaaaaagccgtctcgtgcatttgaggatctaaccctatgatgtctgtcttcaggatatggcagaggggagcctctgcattaccaactgtgtgataaaacaaaaattcaaggtggtccccacacccagaccccamtatttcatgttagagcctcgacatggcttccaactgtcctcagaagctcaacccaccttcaatttactcccacactgttgcagagcccatctgtctgccccactagtcatcaagagctaggcagctagggcctttgcctcctgggagctggtgcccagtatgcaatcaaaaagtgtttgatgaaataaacaaaggaaacaaacttagaccatattcacaagcctctccagaggcaattcatgccaagactcctgggtcaggatag

SEQ ID NO: 783859 - DNA, 651 bp, Homo sapiens
gccttacgttgcagagggagtgtgtccggtgtcgaggggagttgatgtcgctcggtgtggacgaccggtcgccttcggcggcagatgcgtcggagatgacagagggctgccgggagtggcaggggctcaccctgaccgctggaaagcagggacagctggtgagtgagggatggagagracgtcctcgcctgtgctgccttggcggttattccacccaacacccccgttctacagatgggaacactgaggtgtagagaagggaagagacttgcctggttctccaaccccctactccacagctccacacgttcccatagagcagctgctgggaagaacctcccatagcctctggatccaatgaaccctcctccaccagcgtgaacgaggagaagacatggaagttttcaagtcttctcattccaaattcaagtctcctcgtttccaagtccaatacaggaaagtgcttgatgtttataaattcatttctaagcagcaccgtgatgcattaatacgtgagtactctgtgactctactcacatgctcccaccacctggacattcctagacctggtgcaatcctaaccactgccccaaatcggtttcccaaatgagaaacctaaaggccaccaccactttctctctttcccccata

SEQ ID NO: 783860 - DNA, 624 bp, Homo sapiens
ctgatcagcctgccaggcccttgtaggtcagggctgtgtctgactcatctcctgcagctccaacagccagcccagcctgcagccttcacagtgaccagctcttacctctggtgcattggctgctgctggatgcctgttcccaacttgcatctatcacataagggcaactacttgcagaagggacagagaacagagcaaggtggcctgcagacgtgcaacaggacagcgagaagtttggagcctgttccatgggcagtaggtgcagatgctgtccacaggccagacttccctgccgagtgcctggagcaaacacctgtgacattgacatcagcccctcttggatgccctgtgattggccagagctgtcartcaaggagttctgctgcctcccctgccaaaggatgcccatgtgactctgatgtggccaatcagagtctttctttgggatttgctatggacacagggggaaagagatagtttttctttcttaagacttgagctgtgagggtcttaaacatctggaactgcaggggactattttactttcttgctgaaagagacagcctgaagatgaggccaaaaggaggtgggcagagctaagagatggagagacggtcagaggga

SEQ ID NO: 783861 - DNA, 476 bp, Homo sapiens
taaataatcttttagctttggggatccagtactttccttctatggcccttcttgcctgtcctctttcttgctcccaactgcctaaggtacttatttccagaatttaatatgcaggacaatccatttagatagaacatggggcctcaattttgcaaatgaagaacctgaagctcagagaggtgaattatttgctcaaggtcacactgccagttggcgagagacccagagcttgaacagctcaactcggagtggtcctggtatactgatgatcacataagctgaggcttgctgacgctgygccaaaagcttgcctgcttgatcttacgacagtccgattgggcaggcgccatggctatgtccattttacagatgaggagactgaggctcacagaggaagagtgacacattctcaaggtcatgcagccaagaagagagcagggatttgactccagaagggatgctcttattatgtactg

SEQ ID NO: 783862 - DNA, 573 bp, Homo sapiens
gctgtgtccactcagggttaaatggattaagggctgtgcaaggtgtgctttgttaaacagatgcttgaaggcagcatgcttgttaagagtcatcaccactccctaatctcaggtacccagggacacaaaacactgcggaaggccgcagggacctctgcctaggaaagccaggtattgtccaaggtttctccccatgtgatagtctgaaatatggccttgtgggaagggaaagacctgaccgtccccyagcccgacacccataaagggtctgtgctgaggcggattagtaaaagaggaaggaacgcttctttgcagttgagacaagaggaaggcatctgtccctgggcgatggaatgtctcagtataaaacccgattgtatgttccatctactgagatagggaaaaaccgccttagggctggaggtgggacaggcgggcagcaatactgctcttcaaggcattgagatgtttatgtgtatgcatatctaaagcacagcacttaattctttaccttgtctatgatgcagagaactttgttcacgtgtttacctgctgaccttctctccgctatta

SEQ ID NO: 783863 - DNA, 573 bp, Homo sapiens
gctgtgtccactcagggttaaatggattaagggctgtgcaaggtgtgctttgttaaacagatgcttgaaggcagcatgcttgttaagagtcatcaccactccctaatctcaggtacccagggacacaaaacactgcggaaggccgcagggacctctgcctaggaaagccaggtattgtccaaggtttctccccatgtgatagtctgaaatatggccttgtgggaagggaaagacctgaccgtcccccagcccgacacccataaagggtctgtgctgasgcggattagtaaaagaggaaggaacgcttctttgcagttgagacaagaggaaggcatctgtccctgggcgatggaatgtctcagtataaaacccgattgtatgttccatctactgagatagggaaaaaccgccttagggctggaggtgggacaggcgggcagcaatactgctcttcaaggcattgagatgtttatgtgtatgcatatctaaagcacagcacttaattctttaccttgtctatgatgcagagaactttgttcacgtgtttacctgctgaccttctctccgctatta

SEQ ID NO: 783864 - DNA, 540 bp, Homo sapiens
gggtctccccggtactcacctgggggctccagctccggatcctgtgccccgcgccggatcttccttcccgccctgcccctgcgactttagcgcccccgaatcccgctagctcctgcaggttccgccagcagcatcttcacctcgtgggacgcccggggccacgcctcttccagcttctgattggctattgttcacgccagtcacattaccattggttgaggggtcgtcggacatgcaaatcaggatgggcccgccgccgcaccgattggctggcgctcgcaaagcgyagccctcgacttgggctctgattggctccgcggccctgacggcgacagtgacgcgaggcgggttcttggactgagtgtgcggcgcggtgcgccgccttccgaggctcctcccgcgggtggcagcggacggggcgcgcccctcggccagtcctcggtcctcaggcttgtggctccgttgagcaccggccgccgggcctctgggtccgtcgagtggagactctctgaaaagcgtgggctccgtggcctccggcgc

SEQ ID NO: 783865 - DNA, 630 bp, Homo sapiens
taaaaggcatatggctaagtatattaggatctgaggctgaagaggcgattgaggccttatcatggggtgctgtaaattctttgcttaggagtttgaatgttattcttcaggcaatggaaagccactggaaatttttgaagaaggatgcttcattgtgtctcaaattcttctttaagtctccaggaactcatagacaaaaartgaaccaatgaggatattatataaataatccagacaataaatgacaaggcgctgtggtactgaacacagagcaagaataccaaaaaagagaactaacagaatttagtaatggattgtcggagcagaaacaggaggagttgaggatgatttccaaacatccagcctgcctgactgagaatgtggtgtcactgaaagaaatgcagaaccatcttagtctattcaggctgttataacaaaataccgtaaactgggtgccttaaacaagaaacatttattttttacagttttggaggctgggaaatccaagatcaaggtgctgccaatttggttcctggtaagggcctaattttgggcccccagatagtcatcttcttgctatgtctttacatggaagctagaaagagaaagagccctggtctctttttataa

SEQ ID NO: 783866 - DNA, 630 bp, Homo sapiens
taaaaggcatatggctaagtatattaggatctgaggctgaagaggcgattgaggccttatcatggggtgctgtaaattctttgcttaggagtttgaatgttattcttcaggcaatggaaagccactggaaatttttgaagaaggatgcttcattgtgtctcaaattcttctttaagtctccaggaactcatagacaaaaaatgaaccaatgaggatattatataaataatccagacaataaatgacaaggcgctgtggtactgaacacagagcaagaataccaaaaaagagaactaacagaatttagtaatggattgtcggagcagaaacaggaggagttgaggatgatttccaaacatccagcctgcctgactgagaatgtggtgtcactgaaagaaatgcagaaccatcttagtctattcaggctgttataacaaaataccrtaaactgggtgccttaaacaagaaacatttattttttacagttttggaggctgggaaatccaagatcaaggtgctgccaatttggttcctggtaagggcctaattttgggcccccagatagtcatcttcttgctatgtctttacatggaagctagaaagagaaagagccctggtctctttttataa

SEQ ID NO: 783867 - DNA, 645 bp, Homo sapiens
caaattcctacttagccagcctacccactccccataactcatgagtccacatatattctagccttggaacacttgtttttacacacaaactggatgattaggtgggcttccttagctcttcccactatgaagattttctcccatttcaatctcaccctgagtggagctatagttcagctaccaaacatacccacaactaagccaacccatccatgaatcacaatcaggtttttttcttctttcatcaacagatcatagggaataccatgtgtagccacatatgtgagctgaggaaaaggttctggtgtaactgtggcagaggtcatgagacctgggccacctgatagygcagcttgcttgtgccttttggtcctgtctgtgtacaattctagatatatcacttccatcataagaaagccaggccctcagaaagccaggccctcctgaccttatgacttggtggctctgaacaaacttagcttatgatggccaatcccaaatgcatgctaacttaatgtctgatgatcaagcattccagccctatggggagcattaacactttatgagctgtttttcaaatggtatgtaattctctgttacagataatacagccttgcccaagaattccaggtatctatgttgtga

SEQ ID NO: 783868 - DNA, 657 bp, Homo sapiens
acaaagaaaaaaaaatttttttaatgaaaaaggcttccaagaagtttgggactatattaaacatccaaacctaagaataattggtgtttctaaggaagaagagaaatctaaaagtttggaaaacatatttgagggactaatcgaagaaaacttccttggctttactagagatctagacrtccacatacaacaagctctaagaacactgggaagttcttcgcaaaaagatcatcacctaggcacatagtcatcagattatctaaagtcaggacaaaggaaagaatcttaagagttgtgaggcaaaagcatcaagtacttcatttatttttattgctgatgaatattccattatatgggttactacattttattaatctattcatcaatttatggacatttgggttttttccactgttgggctgttgtgtctggtgctgctatgaacattcatacaaaagcttttgtgtggacatgttttcatttctcttgggtagatatcaagtggtagaattgttggaccacatggtaactctattcttaatcgtttgagaaacagccaggctgcttttcaaagaggttgcaacattttgcattctgaccagcaacgtatgagggttccaattttcccacatccttgccaacacttgttattttttg

SEQ ID NO: 783869 - DNA, 508 bp, Homo sapiens
aaatttcttctctttaagaatgttgaatattggcccccactctcttctggcttttaggctttccgctgagagatctgctgttagtctgatgggcttccctttgtgggtaacccgacctttctttctggctgcccttatactttttccttcatttcaaccttgttgaatctgacaattatgtgtcttggggttgctcttcttaaggaatatctttgtggtgttctctgtatttcccgaatttgaatgttggcctgccttgctaggttagggaagttctcctggataatatcctgaagagtgttttccaacttggcttcatcygcccatcactttcaggtacaccaatcagatgtagatttggtcttttcacatagtcccatatttcttggaggtttcattcatttctttttactctttttgctctaaccttgtcttcttgctttatttcattaatttgatcttcagttactgataccctttcttccacttgattgattcagctattgaa

SEQ ID NO: 783870 - DNA, 561 bp, Homo sapiens
cataaagattactatccacaaccataataaagcacactttttttttttttttttttttttttgagatggagtctcgctctgtcgccgaggctggagtgcagtggcacgatctcggctcactgcaagctccgcctcccgggttcacgccattctcctgcctcagcctcgtgagtagctgggaccacaggcgcccrccaccacgcccggctaatttttttttgtatttttagtagagacggggtttcaccatgttagccaggatggtctcgatcttctgacctcgtgatccgcccgcctcggcctcctaaagtgctgggattacaggcgtgagccaccgtgcccggcctaaagtacacatttttaagtccacgtggaatattcatcaaaatagacaacattatggaccattaagaaaagtctaaataaatttcaaaaaaagaatggaaataatacagagtattatttgccagagtattattgtgatgtttgaccacaatggaacagagttaaaaattaactaaaacgtttctagaaaatgccaaaatatttggaaattaagca

SEQ ID NO: 783871 - DNA, 549 bp, Homo sapiens
tcaaacatttcaaccttctgggtttaagcaatccttctgcctcagcctcccaagtagctgagaccacatacagctaatttttgtaatttttatagagatggggtcttgccatgttgcctgggctggtctcgaactcctgggctcaagtgtgatcctctcgcctctgcctcccgaagtgttgggatgacaggcatgagccaccatgccaggctcctttctctgttttttaattggaatgtataatcttgttatatttaatataacttgtgatatggttaaatctaccatttagtatttgttttttatttctctttttttgtgttttgttcttttgttgtctctttgctgcattattttaagtttataaatagtttttggtgttccattttacatctmctgttggctttttaagctgtactttattatttttagcgattgctgtggggatagtgatatgcaattttaacttaatgtctacttaaaatattgtatggttttagtaactttacaaaaggattattcattttactcaattactatcctttgtac

SEQ ID NO: 783872 - DNA, 617 bp, Homo sapiens
tgagacaagaaccaggtcacctaaagctgactcactgcttcttccaatactccttattcttcattggctattgattacaaacaaagcaaaatatagaatcaatctgatttagatataaggaaacgttagtaagaatgtttggtgaatagctataaatcaattctctgactactaagaaataaactaaaatctactgaatttcaataaatgaggcagcattgactgcttattttattttaaaattggcttaaatgcagatcataattctgagttttggtgtcatttgaagatgacgtaaagcttaacaaatgtaaaacaaaattctaatgtttaaaattctctagatcargggttggagaataatagccaacagcctatgttttatgaggcctgtgagttaacaatggtttttatcattttaaagggctgtaaaacacacacacacacacacacacacacacacacacacaaagaagaatgtctcatagacatcatatgtggcctgaaaagccaaaattatttacaaactggccctttacattaaaaaagttcactgacctccattatagattcagaaagcatatgaaactgggctgaatatgtaacatgtcctgaaa

SEQ ID NO: 783873 - DNA, 568 bp, Homo sapiens
ccccatgttgaaagaacttttctccaactgatgtcattatcgccttatttcaagctgttcccacagaattcaccctgatcttctcctttgtgccttcatttatttatacattcaacacatgctttcatttcacatgaagagattgtcacattccaggcactgggcaagctattgagaatactggggtgtacaagatagatacacttcctgccatgatggagtttagcagggagggctgaccagttcttagagggtggtgagtataatcacagggcratatggtgggtattctcagcaggtactggggatgaggtggggcatctagacaggctgtgaggcagggaacatcttcttaagcaagtggagtgtaacccaagacctaaggatgagtagtactgggccaggggaagaggtagaacagagtgttccaggctatgcagatgtcgtccactggcactcaatatctactccaaccttcttctaccgtgttagtctggaaagctaaaagccacattttctgggtttctttgtagtacgtgttctgaatgtgaattagctccatcagtca

SEQ ID NO: 783874 - DNA, 597 bp, Homo sapiens
tcatatttgaaaattccattaaattttcttaacaaaaagttaaaaatcttttggaaaaaagatttttttttttttgagacagagtctcactctgtcacccagtctagagtgcagtggccgatcttggctcactgcaatctccaccttccaagttcaagtgattctcctgcctcagcctccagagtagctgggattacaggtgcttgccaccatgcctggctaattttcgtgtttttagtagagacgggatttcaccattttggccaggctggtctcgaactcctgacctcaggtgatctgccttcctcgacctcccaaagtgctggtgagaggtgacagcatgctggcagtcctcacagccctcgctcgctctgggcgcctcctctgcctgggctcccactttggcggcacttgaggagcccttcarcccgctgctgtactgtgggggcccctttctgggctggccaaggccggagccggctccctcagcttgcggggaggtgtagagggagaggcgcgggtgggaaccgaggctgcacggggcgctcgccggccagctggagttccgggtgggcgtcggcttggcgggcccgcact

SEQ ID NO: 783875 - DNA, 616 bp, Homo sapiens
ttgccttcagcttttttcctagctctgagccagaagccaccatggccctcagcatgtccccagtagctaaatggcagacacagaagttttcagccaatctgggtgcctgggtgcctttaccggccctgggaggccccagcagcacagcctttaggacactygggttctgccgctggcacgctgggagccatgtccgccgaagtctctcactgccaccagttcgcacacctcacaggtccctctcttttggtcttatgttctcacttccacctttgtccttctcaccatgggatgacccttgccaaatgttggcgccatgctcttggacttcccagcctcaagaaccatgcactaaataaatttctgttcattataaattactcagtctcagttgtccttttgtagcaacacacaatgaatcaagagaggcaatgtgtaccaagaaggggggattgttgctataaaaatatctgaaattgtgaaagcagcttggtactgggtaattggtagaggctggaagaatttggaagagtaggttagtaaaagcttgtattgctataaacagagcattaagggtgattctggtgagggctcagaagagctgacttgggaaagt

SEQ ID NO: 783876 - DNA, 599 bp, Homo sapiens
ttggtgcactgtgtcccagatgctccagccatggctgaaaggggcaaatgtacagctcaggctatgacttcagagagtgcaagccacaaaccttggcagcttccacatggtgttgagcctgagagtgcacagaagtcaacaattgaggtttgggaacctctgcctagatttcagaagatgtgtggaaatgcctggatgcccaggcaaaagtttgctgcaggggtgaggccctcatggagaaaatctgctagggcagtgctgaagggaaatatgggttcagagccccacacagagtccctactggggcactgcctagtagacttgtgagaagaggatcaccgtcctccagaccccagaaaggtagatccaccaacagcttgcaccrtgcacctgggaaagccacagacactcaatgccagcccatgaaagcagacagaagggggctataccctgcaaagccacaagggtggaactgccccaagactatgggaacctacctcttgcatcagcgtgacctggatgtgagacatggaatcaaaggagatcattttggagcattaaaatttgactgctcctctgaatttcggacttgcatgggc

SEQ ID NO: 783877 - DNA, 591 bp, Homo sapiens
caaccttgcatgcatacttcacaatgcgctcctgagaatctgatgccaccactgatgtgataggaggtggaactcaggcagtaatgctcaccgctgctcacttcctgctgtgtagcccagctcctaacaggccacggactggtaccagtccacagcctggggtttgggagaacccctgttttagaggaatctgcggctgggatgactagatactaaagactccagagcccaagatgttctatgtctcactccttccctactaaagtcaaaatggatcccagaatatccagaagggctgagtctgagtaggagggtgaaaggtgccaagtggttccagttttcaaggccagcgggcatttggtcattgggtcaggccctcagttatactgcatgcccacttggacactctggaaagttggtctttccccacgtgccctgtgttcatggcttgaagacraatcccttcccccaagagcagagcaacttccactctggctgatcaccccctggcctgtttctggaatctgactccacatctctgctaatggcacctcatctcccatctctctgagtcttgtcaattcctgcctg

SEQ ID NO: 783878 - DNA, 652 bp, Homo sapiens
gctgatcaccccctggcctgtttctggaatctgactccacatctctgctaatggcacctcatctcccatctctctgagtcttgtcaattcctgcctggctgtcgctcctgcttgcaggcaggatccagggtctttccagtccacctccaaaatctctatctgtctccctctcattgctttttcttttctgattataaaaataatgtggccaggcacagtgrctgatgcctataatctcaacactttgggatgctgaggcaagatgatcactttaggaattcaagaccagtctgggccacatagtgacatcctgtcctacaaaaaaattaaaaattagccaggaatggtggtgcacgcctttagtcgctgctacttgggaggttgaggtgggaggaccgcttgagcccaggagttcaagactgtggtgaactatggtgacaccactgcactgcagcctgggcaacagagtgagaccctgtctcttaaaaaataataataatatatgctaatcaaagggaatgtagaaactatagaaaagcatgctggatttgggttaatggattggtcacacacaatgaaatcccatgccctcctgaaacatcactcaagcacagcaaggtagtaggggggctttgttttgagagacgtgaca

SEQ ID NO: 783879 - DNA, 457 bp, Homo sapiens
gaacagggtacaccttcccactttctcaaaagacaggtttttttaaaaaagcttaagacaataaggaccatttgcacaatagagagcttttcataatcaccatttatatatcatgagggataaggaagaatgagggttgaacaacacccattggaaatgtagctggggcatgcatgtagggggcagggtgggagattttaggggcacagctaaaacaagttygtttccaataggccttacttgtcaggaatcaaagaactgataaagtggaagaaagaggctctttctcctaaccaatgccagaggaagaaaatatctgaaagggaagaagggggcttggatcctgtttgaccaatcctaacagtggttcatcagggtgccagaaataacaccactcagacaggaaccacactacatgttgaacaaactaaaaatcgtcatttctattcccagttag

SEQ ID NO: 783880 - DNA, 654 bp, Homo sapiens
ttcaacttggaggcccatgcttgatgtgattctgggatggaacaaatagccatgaaattaatctgagaatgttcaatcattcctttgccagagcttggctggcgtcaccttagtgtatgaagtatagctttccaggctgttagcttcctcaggagcatacgcaacacaggggaagatttgtccctgttacacatcatcttataaagggtgagggctgggaccaaaagaaacgaattaatgaagggggaaatatcttttgaagccaagggactataaatagcatagttctgaaagtattatatttgtgaagcaaggctgttacctaatgtgagttggagaataacttgtgtaagtatagtcctgggaaaaggaaaaaacaagccttgtctcagagatttcatatcataaggaaaacgaagaaaaaaaacctaaatgttggagggaggtcacttstttctaagagaaggcagtctcactttttgttgattcatttagctaatacatagtgagttccaactaaatgccagataatctcctgagaagtaaacattattctgaaatttgctaagtttggagaaaaacttcagtaattctaaaataactaaatcattaatgacattaaacatatcatatataattatatatatacagtat

SEQ ID NO: 783881 - DNA, 685 bp, Homo sapiens
cgtgcttcagggaacactatcaagaaagtgaaaagacaacccaagaatgggatagtattttgcaaatcacatatctgttaagaatcttgtatctattctagctataggactcttacaacttaataaaagagaaaacccacctgggtgcactggctcacgcctgtaatcccagcactttgggaggccaggcggacggatcacttaagcccaggagttcaagaccagcttgggcaacacrgcaaaaccctgtctctacaaaaaataccaaaataattagtcgggtatggtggcgggcacctgtggtcccagctaatcgagaggcagaggtgggaggatctcttgggcccaggaggtggaggctgcagtgagccaaaatcagaccattgcactccagcctgggcaacagagcaagaccctacctcaaaaaagaaaaaaaaaaaagaaaagaaagaaatcccaattaaacaatgggcaaattattggaatagacctttttccagagggcatacaggtggtcagtaaccacatggaaagctgctcaaaatcagtacttatcagggaaaagcaaatcaaaaccccttcaaatctgctaagcactaggatcatcagagtcaataaaatacagaaaataacaagtgttgagggtttggagaaatgggagacttaggacaccgccattgagact

SEQ ID NO: 783882 - DNA, 485 bp, Homo sapiens
ttatattttttattttttatttttttatttttttttgagacatagtctcattctgttgcccaggctggagtgatgcaatctcagctcactgcaacctctgccaaccaggtttaagtgattctcttgcctcagcctcctgagtagctgggattacaggcacccactacyacacctggctaattttgtatttttagtagagacagggtttcactatgttggtcaggctagtctcagactcctgacctcaggtgatccacctgcctcagcctcccaaagtgttgggattacaggcgtgagccactgtgcccggccaggaacctttctttatccttgagccttgggagtttgattatttaatgtcttgaggtagtcttatttacgttaaatctgcttggtgttttataaccttcttctacttggatattgatatttctctaggtttgggaagttctctgttattatccctttgaataaactttctaccc

SEQ ID NO: 783883 - DNA, 602 bp, Homo sapiens
gcatgggccttacctgcaccccctgcttccagcttaggacctggcccagggggaatgttccctaaagcagtggtccccaacctttttggcaccaaggaccggtttcatggacaataagtttttcatggactgggggaagggggatggtgttgggataattcaagcacgttacatttattttatttatttgttttgagacaagagtctcgctgggtcacccaggctggagtgcagtggcacgatactggctcactgcaacctccacctctggggatcaagcaattctygtgcctcagcctccggagtagcttacaggcatgcgacaccacatctggctaatttttgtatttttagtagagacaggatttcaccatgtcaaccaggctggtctcaaattcctgagctcgaactcctgagctcaagccatcctctccttggcctcccaaagtgctgggattacaggtgtgaatcaccatgccccacctgcattacatttattgtggactttatttctattattattacattgtaatatgaatacaactcaccatagagtagaatcagtgggacccctgagcttgtttttctgcaactaggcagtc

SEQ ID NO: 783884 - DNA, 602 bp, Homo sapiens
gcatgggccttacctgcaccccctgcttccagcttaggacctggcccagggggaatgttccctaaagcagtggtccccaacctttttggcaccaaggaccggtttcatggacaataagtttttcatggactgggggaagggggatggtgttgggataattcaagcacgttacatttattttatttatttgttttgagacaagagtctcgctgggtcacccaggctggagtgcagtggcacgatactggctcactgcaacctccacctctggggatcaagcaattctcgtgcctcagcctccrgagtagcttacaggcatgcgacaccacatctggctaatttttgtatttttagtagagacaggatttcaccatgtcaaccaggctggtctcaaattcctgagctcgaactcctgagctcaagccatcctctccttggcctcccaaagtgctgggattacaggtgtgaatcaccatgccccacctgcattacatttattgtggactttatttctattattattacattgtaatatgaatacaactcaccatagagtagaatcagtgggacccctgagcttgtttttctgcaactaggcagtc

SEQ ID NO: 783885 - DNA, 565 bp, Homo sapiens
gcctagtttactcttcaccaatagtaaagggcttcttagctttagcaatacggttagccactaagaatgatactctcattgcagacacatttgatgaaatggtagccttcaataattgcttctgttctttgtgcttatgttttttcttttgaaaaactccgaagccttgtcttttaatgcagggtgcttggtctccatgtggtgaagcagttttgaaggtttcmtggcttcattggatagccagtggccacatattacacaaagtgggcttggagaatgtgagtcacctgttgcaatgaacctgtaatttgagtatgactcctggtattttcttttaaatgcagcttgctttttgttggcaatcttacagtcttctgtctcatcattgggtcttcccccttttcaaagaagcttaccagtgatgtttgttttttactcatttcggctagggttagcttgtgggcttaccaaaactgtgactgagacaaatgtgcagtgcaggaaacaggcacacctggaagtggtaaataatgggcgggccatgagtggactaaaataagtgtcg

SEQ ID NO: 783886 - DNA, 565 bp, Homo sapiens
gcctagtttactcttcaccaatagtaaagggcttcttagctttagcaatacggttagccactaagaatgatactctcattgcagacacatttgatgaaatggtagccttcaataattgcttctgttctttgtgcttatgttttttcttttgaaaaactccgaagccttgtcttttaatgcagggtgcttggtctccatgtggtgaagcagttttgaaggtttcatggcttcattggatagccagtggccacatattacacaaagtgggcttggagaatgtgagtcacctgttgcaatgaacctgtaatttgagtatgactccyggtattttcttttaaatgcagcttgctttttgttggcaatcttacagtcttctgtctcatcattgggtcttcccccttttcaaagaagcttaccagtgatgtttgttttttactcatttcggctagggttagcttgtgggcttaccaaaactgtgactgagacaaatgtgcagtgcaggaaacaggcacacctggaagtggtaaataatgggcgggccatgagtggactaaaataagtgtcg

SEQ ID NO: 783887 - DNA, 610 bp, Homo sapiens
aaacacaaaaataggaataaaacacagtgaacatttaaagtttcaattatgaccacacctcctgggcttaataaatacttgtgtattgaggcctctggggcataaacaacccaaaaggcaaagcagttctgtgactgcctccaggggtaagtgggaagaattatttcccctcctcactatctggacacagggcagaagcagggaacataaccagccgctgagtacattgtctacttccctaaagatagcaatcacggaatggaactcacttcgcacctgtacttgaggataaaatatttaagacctctccaattcaacttcagctctttttccagcaatctctgaagttgtgagtacatactgagacctccgggctgagtctaagtgacttgagttctggaatgtgacttcaggacattcttttctttacaatggggcactcaggcagatgacatgttacagcatctgggtrgacatggtatggtaggtgcagcatcaagattaaccatggattgttttggctcccatatgagcagaagggttaggtttttttaagcagtctcctaaggctgttaaggccatgagaaagtaaactttggagtccaacaga

SEQ ID NO: 783888 - DNA, 594 bp, Homo sapiens
ggatggaagctataactttctgatgtgccttgttttatagttttgataaaaatatatacaaaattaaaaataaattttacaaaaaagtaatcactataaaaaactgaataaaaacccattggtctatcaagctgtgtcataaccacacagagaattctttcacataattttgcaacagtataattgtgtacagtgtatagtgggacagtgtatacaggctgtacaatatatagtgagatatatctgaagaaaacaaatataaagaaatsttaagcagtattcagtagacttattgctggtaataatactggtattggtatttcaaaactattatatttatgtaatgggataaaaactattatatttatgtaatgggataaaataggaaccaagatcttcggtgtgttttagtccatttgtgttgctataatttataagaaaaagaaatgtgtgtgatctgtgacactcatcctctcccattcccccttcctccccactcccggttctctgacatttacactgagactgaattaccacccaccagcgttcctggttctccagcttgcagatgacatattgtgggactttttgtcc

SEQ ID NO: 783889 - DNA, 593 bp, Homo sapiens
gtagttcaatattagtctgttcctatcttctaaacttgcaaatgaacttgcatggcaataaatctctgcacactcaaagccatgatttcctcagcaggtggatgcagaatgctcggagacctataataatcagcctttggcaacragcactttttcttctgactcattattgccgcgttttaagaggagaagggagcaactgctctcacggggctacagagacacggaaacacgctggggaggctgctctgtcaccaggaaagacaatggaatccatttaaaatgtcttattttcccttgctctgccaagcaaaagcatcagaaccctttggggaattcactttacaaggaaacaaaatgaggccccgcatctgcagcctggccctccccgccacctgcaccccttcctctgaggtccccggctctgcaggggccgagcgggcggcacccgctcctggtggtggcattgttgggacccgctcacaaaacacagttgttctctgcaatggctcatttccctttctgagactttttgtttgtttgtttgttttgagacagagtcttgctctattgcccaggctggagtgcaatgg

SEQ ID NO: 783890 - DNA, 593 bp, Homo sapiens
gtagttcaatattagtctgttcctatcttctaaacttgcaaatgaacttgcatggcaataaatctctgcacactcaaagccatgatttcctcagcaggtggatgcagaatgctcggagacctataataatcagcctttggcaacaagcactttttcttctgactcattattgccgcgttttaagaggagaagggagcaactgctctcacggggctacagagacacggaaacacgctggggaggctgctctgtcaccaggaaagacaatggaatccatttaaaatgtcttattttcccttgctctgccaagcaaaagcatcagaaccctttggggaattcactttacaaggaaacaaaatgaggccccgcatctgcagcctggccctccccgccacctgcaccccttcctctgaggtccccggctctgcaggggccgagcgggcggcasccgctcctggtggtggcattgttgggacccgctcacaaaacacagttgttctctgcaatggctcatttccctttctgagactttttgtttgtttgtttgttttgagacagagtcttgctctattgcccaggctggagtgcaatgg

SEQ ID NO: 783891 - DNA, 625 bp, Homo sapiens
ggggtcttactggccacggtgaggagtcagggtttcatgcgcccctgcagtcagaaagcatggcccaaccccagtgccctaagtccggaaacattcaaagctggacccagggtagcgggatccggggcctctggggacccgagagggacgttaagttcagggcttcagggtgcagccctggggtcggtacccccagcctccarcccagagctggcagcgctcgcccccttctccgcgcgggccctcagctcagctccctcttcgctccccgtgtccccgcgagcgggagggaggggatgctaggacgccctgtcggcgtcgtcgccgctttccgccattgtttagtcgtgatgctctcattttctctgaatcaacaattttctgctcggctccgcgccgaccggcgaacgcggggcttttcctcgcccgcctgatgacagcagagcggcgcggagcagctggtccggaaggaagcgccaggcgcctgcccggtcccaggcgtccgctgccgcccacccacaccagaccccgcccccgcgcgtcaagccccgcccatccataccaagtcccgcccccacaccctcacccacacaccaggccgtccccaccccgcccccagagcccc

SEQ ID NO: 783892 - DNA, 625 bp, Homo sapiens
ggggtcttactggccacggtgaggagtcagggtttcatgcgcccctgcagtcagaaagcatggcccaaccccagtgccctaagtccggaaacattcaaagctggacccagggtagcgggatccggggcctctggggacccgagagggacgttaagttcagggcttcagggtgcagccctggggtcggtacccccagcctccaacccagagctggcagcgctcgcccccttctccgcgcgggccctcagctcagctccctcttcgctccccgtgtccccgcgagcgggagggaggggatgctaggacgccctgtcggcgtcgtcgccgctttccgccattgtttagtcgtgatgctctcattttctctgaatcaacaattttctgctcggctccgcgccgaccggcgaacgcggggcttttcctcgcccgcctgatgacagcagagmggcgcggagcagctggtccggaaggaagcgccaggcgcctgcccggtcccaggcgtccgctgccgcccacccacaccagaccccgcccccgcgcgtcaagccccgcccatccataccaagtcccgcccccacaccctcacccacacaccaggccgtccccaccccgcccccagagcccc

SEQ ID NO: 783893 - DNA, 582 bp, Homo sapiens
ataagtgacaaataaatattgtgtatattgaaggtatacgctgtgatgatttgatatatgtatacagtgtgaaatatttaccagaatcaagttaattacaacctcatcacctcacatagttgccattttgtgtgtgtgtgtgtgrtaaaggcacttaagatctactctcttagcaaatttcaaatatacaataattattattgactataatcactatgactaccaacagaaggacatactgcttgccctggctgtctccttccccttcctccaagctcttggaataacattgctgtcaaaaagttgtgggtaaaatgcagatgtgtatatgtacacagctttatttgagattaaatttaggagttaaaattttagaaagtaagacatgatgtattttaaccataataagtaagatcttgaaataagaggaaggacacaaaagataacatttctacatcattatcatttgaaatattactattcttggcattctcatgccaaagtatctccaaccccagccaatggtatatttgctatcctggattttctgacattatttgtagagtactgggctggcagtca

SEQ ID NO: 783894 - DNA, 613 bp, Homo sapiens
gaattggaaaaggctgtctgggagctcggctgcccacccagcattcagtgtctgctacctcctgtctgttatgcttgtgtctggttttttcaagttttaattttttttttaattcttagtttttgtgggtacatagtaggtgtatatatttatgggttacatgagatgttttgatacaggcatgcaatatgtaataatcacctcatggagaatggggtacccatcacatcaagcatttatcctttgtgttacaaacggtccagttagactcttttagttattattaaaatgtacaattaaattatttttgacyatagtcaccctgttgtgctagcaaatactaggtcttattcattctttttaactattttattgtacctcttaaccattcccacttcctccccaccacacactatccttcccagcctctggtaaccatccttctactctatctccatgagcttaattgttttaatttttagctcccacaaataagtgagaacatgcgatatttgtttttctgtgcgtggcttatttcatttaacataatcacctccaggtccatccatgttgttgcaaaagacaggatctcattctttttatggctgaagag

SEQ ID NO: 783895 - DNA, 552 bp, Homo sapiens
tgtgtggactcgatatatcagagcaacccaatcttgccgggatcaaccctaaagggaccgggctacggggccaggaattgaagtgatgggttcaaagaggtagagttagccgggggtggagttaatgaggtctcttccctctttggggctcracggagggaggaagctctgcttgaagcacatggggctggcccaccctgtagtcagaggtagcaagtaatgaggagtcctcctggagtgcctcagctttagctgggtaaggtagggcgttgtgccattgtggtcaaataacattgcacgttctgaactgtttctttactaggttaacgtccctaaaacccgccggactttctgtaagaagtgtggcaagcaccaaccccataaagtgacacagtacaagaagggcaaggattctctgtacgcccagggtaagatggattccgcataatttggtgttaatgtgacatttgtgttgtagaataacatacgagtccgggtctctctccctccacgcctggcttgagcgttaatatttctgctgcgaaattaaga

SEQ ID NO: 783896 - DNA, 455 bp, Homo sapiens
tccagcacataaaacaggatcccccatttttgtgtcattccacttggtggggtttttcttctacatctattttatttgccaattttgtttatctaaattatatgatcagatgctaacaaatgctcctcactcttgtgccttgttctgatttgtgtttatttttagcaccagaaaagtaccactgtaagtcatgagatgtctggtctgaattggaaaccctttgtatatggcggccttgcctctatcgtggctgmgtttggtaagaatgtgagaaatgacaaatctgcattatacggtatagatggtagcttatgatgatggttatttttggtgaaagctaggtaaaaaataagaagctcgccttattttgaaaattgtctcaaagccatgaagtaatatttcagggaaagtactactgatggtatggcagatgagttaagaaaagtcaaactaag

SEQ ID NO: 783897 - DNA, 643 bp, Homo sapiens
cattatggcagttcttcaaaagtaaacacagaattatcatatgatctagcaatttcacttctggagacacatctaacataattgaaaacaaaaatgggacctcaaagagatgtttttgtagccatgcttctagcaacaktattcacaagtcacaaggtggaagcatcccaaatgtccattgatagaggaatgtgtaataaaatgtggtatgcacacacaatagatattttttgaccttaaaatggaataatattctgatacatactacaatatggattaactttgaagccgttatgctaagtgaaataagccagttataaaaagacaaatattacatgaccccagttacataaggtacctagaacagtcaatttcatagagacagaaggtagaatggtaattgctcagggttgggggaggggaaaataaggagatattggccaaagggtacaaacatttagttagttataagatgaataaactctagggatcaaatgtacagcatgggcactatagtttaaaatattgtgttgtatacttgaaatttgttgagagtagatcttaattgctttcaccacacactgaaaaaaaaattgtaactcggtgaagtgctagatgtgttaactaatttcattgtggatat

SEQ ID NO: 783898 - DNA, 664 bp, Homo sapiens
cattcctgcctggcaccacagggatccatcgggagggcagccagaggagtggaggaaagcaccacagggagaaggaagcctccagctgaactttgtaacaatttgaaccaggcgagaagcctcctggccagaactcgggggagggcatgaatccagtgtgcagactccacagatgggggaagaaccaagcccttttcttttgcagcttggtggcaggtagcctgcggcaagttctcaagccctgctcacccaccacctggaaayagacttggggctgttaataggggcacagtgggagtaagatcggccctttgatttgtgtgggagttgggtgaggcctgtgactgctggttttcccccacttctctgacaatctgcatgactcagcagaggcacccataatcctcctaggtacacaaccccattgatctgggaacctcacctccatcccccacagcagccacaataagacctgcccaaggagggtctgagctcagaggtccctagccctgcccccacctgatgagcctttcctatccaccctagtagctgaaaacaaagggcatataatcttgagatttctagggccccacctaccactggttcctctccatactaccacagctgatgctttctggaaagtgccacctcctggcaggaagcc

SEQ ID NO: 783899 - DNA, 602 bp, Homo sapiens
cagagggttcctgagccctctggcttctgattgggttcaaccagttggaagtcccagcagaataccagaggaggggacaagagttgggttagggtatttattttcatggctctttctctatgaggttacctcaggttggtttgtgactctcaattgaatgtccctactgctctcaagatgacttactattcctaattatcttcctttctggttctactaaccccttctcatgttttcaggtctaggtgtgatgggtatggtgacaagtctgctgttgctgtgctgctagacctggattcctgaacaaccatttgtgattccccctccacaccatctatatatttctaattaaactctcctcagattatcctaatttaagtgtgttgtacttttgytgttgatactccaacgaatactcaacacttctagtttccaaaatctagagaaagtgctttatttccatatgtgacaaaatgagggtgaattgataaaactgacatgcatgattaagcatgcatctttgactttgaactaagggatgggccagcagaaatatgacttaacaccacttaatctaagacctagtttatcaagagttattg

SEQ ID NO: 783900 - DNA, 618 bp, Homo sapiens
tattcatgaacatttcagctctccatgaaagtcctgaaacgtattttttcctttattttaatgtcactttcactcgcatccgtgtgaagagaccaccaaacaggctttgtgtgagcaacaaggctgtttatttcacctaggtgcaggcgggctgagtccgaaaagagagtcagcgaagggagataggggtggagccgttttataggatttgggtaggtaaaggaaaattacagtcaaagggggttgttctctgactggcaggggcgggggttacaaggtgctcagtgggggaacttttgagccaggatgagccaggagaaggaatttcataagataatgtcatcagttaaggcagggaccggccattttcacttcttttgtggtgcaatgtcatcagttaaggcargaacaggccattttcacttcttttgtgattcttcagttacttcaggccatctggatgtatacgtgcaggtcacaggggatatgatggcttagcttgggctcagaggcctgacagtcacaatctccaaagttaccagaaacttgcattcaggaacacctgtcagttctatagctgattataaaacaccatttaaagaggatcaaaacaagaca

SEQ ID NO: 783901 - DNA, 592 bp, Homo sapiens
tccaccaatccctttgtaagagataagaaactgagccaaatacttactcaagaatacatagtcatagaatcataatttagacccagaaaggtgtccaagtttctcccctacacaaatatacctccctagagggaaccttgtttccttcaaagaaatcttcaccaatatctaatttggtttttaggtccacccatggcacccataagtaagtataacatctctttttcttctttggttctctatggtccccttcatttcacttctgtcaaagtgatttgagtttcccattcttctcttgcttccttattaccctgcttgccctataatttttttaaaatactaattaaaagygggactaagctagcattcatcaacaataaactgaacaatactatgaaatattatttcatagtaggaggaattttcaggggggtggagagagaaagagagagagagatgaaatccaaaatgatgtctaaatggagagaaaccttcagtgttctttcaaacattatagtgcaaggatccagtggtcttttcccaacactatgcccaaagctgttcaggtccaataagtggagagggcctttaa

SEQ ID NO: 783902 - DNA, 592 bp, Homo sapiens
tccaccaatccctttgtaagagataagaaactgagccaaatacttactcaagaatacatagtcatagaatcataatttagacccagaaaggtgtccaagtttctcccctacacaaatatacctccctagagggaaccttgtttccttcaaagaaatcttcaccaatatctaatttggtttttaggtccacccatggcacccataagtaagtataacatctctttttcttctttggttctctatggtccccttcatttcacttctgtcaaagtgatttgagtttcccattcttctcttgcttccttattaccctgcttgccctataatttttttaaaatactaattaaaagcgggactaagctagcattcatcaacaataaactgaacaatactatgaaatattatttcatagtaggaggaattttcaggggggtggagagagaaagagagagagrgatgaaatccaaaatgatgtctaaatggagagaaaccttcagtgttctttcaaacattatagtgcaaggatccagtggtcttttcccaacactatgcccaaagctgttcaggtccaataagtggagagggcctttaa

SEQ ID NO: 783903 - DNA, 621 bp, Homo sapiens
gacagtatctcattcttttataatgctaaataatattccattgtgtgtatatactccattttctttattcattcatccactgataggcactttagttcattccatattttggttattatgaagtttttcagtaaacatggaaatgcagatatatctttgatatgttgattttctttattttagatatatacccaggagtggagttgcaaaatcatatggtagttctacttttagtttttggaagtacctctatactgttttccatagtgacyctaccagtttacatttccatcaacaatgtacaaggattcccttttgtctgcattcttgccagcatctgttattctgtgttttgttggtttgtttgttttgagatggagtctcgcctcgctctgtcaccaggctggagtgcagtggcaccatcttggctcactgcaacttctgcctcctgggttcaagcgattctcctgcctcagcctaccgggtagctgggactacaggcgtgtgccaccatactcggctaatttttgtatttttagtagagatagggtttcaccatgttggccaggatggtcttgatctcttgacctcatgatccatccacctaggcctcccaaagtg

SEQ ID NO: 783904 - DNA, 649 bp, Homo sapiens
ggggagaagcatgtcatagaacacatagctcttaatcttctctcaaagtaattctctttacatgcaatagaatgtggagaaattcaagtctaagagtgctctcaaaagcaagagaggttgtagtgaaaggaaattgggaagagatgactggattcatttgacatagacaaaactttatgccagatactttgagagaaccagaaaaagaaataagtgggaggagcccacttgggatgagaaaaaataaaatctcaaacagtgttctcacaaattatcctttccaaggagcctgaacttgattkgctttgtctatggatcaatttatgattcagaatattgctgaaaactatagagcaatcaactggcaattactggaacagaacagctgaatgaggtcaaggaaagagttcaaagagagctgtcaaaaccactgtcataccagaatgactatgagataaccaaggctatgccctatattactttgctagagctgccataacaacgtaacacaaactgtaacaacagaaatttatagccttgcagttctggaggctagaaagttcaagatcaagttgttagcaatgttgtctcctttgaggtttgtgaatgagaatgtattctatgcttctcatctagtttctggtggttt

SEQ ID NO: 783905 - DNA, 548 bp, Homo sapiens
ttcctatatataggtcacatattcatttacataaccttttctgacagtggggaacttaaacaaataatttggatatttttacacaaggaaagtagtcaagcagaaacacagggagataaatatcctctagaattccaattccaaaatggaaataaacaaaacaaaatatttccatgagttgtaagtaaaatcatctcaatactagccagtaggtaattgaaattgctacattactttgagtcagggaaatactaggatgatgactagaattggaaaataacagaaccttttcttcttctctaatgatattaatttcctacaccagaacatgracagaatgatactcttgacaaatgaataagagaactgtactcattctcacttcagctaatatgttctatggtgcgaaaagtggggaggtgataaatcaggccacttatactgagtacagtgaaagtattgttttctaacttcagccatgttcccaagtggccaggatcatggataagaaatggatgttttatagtacacaaggctcatacaggggg

SEQ ID NO: 783906 - DNA, 476 bp, Homo sapiens
agctaatatgttctatggtgcgaaaagtggggaggtgataaatcaggccacttatactgagtacagtgaaagtattgttttctaacttcagccatgttcccaagtggccaggatcatggataagaaatggatgttttatagtacacaaggctcatacagggggcaattttactttcattatccagattctgtacacattcatctttagcctccacttctacagatcatattttgaagaatttcattggccctctaattcacytttttgtttatatgagaacttttttttctcagcattactaacagagtgttactgtatctcttattgaagattattattaattacacaaggtaatatatttaattacaagaaaatattaaaaaattaaaactttggtatgacattgagctaaaattcatcaacatgtctacatttctcataacattgactacccactattccagtttttctaagt

SEQ ID NO: 783907 - DNA, 542 bp, Homo sapiens
agcaaaggtaaaagtaaatataaatatgaaaacttattgactgcatcatcatgtcttctgaagtttataatatgtaatgaaataaaatgcatggcaacaatatcacaaagggtaggagaattaattcagtcaaatgattcttacattcttgcattttccaggaaaaagttaaagtactaattgcattagattttaatgtcaagatgaataatgtaatagtgaagataatccctgaaactatagtatatctaagtataattaaaacactaatggagaagaaatactgaataataatggtactaataataacaatactggtcattacagaaatagctgataaagtagcrgaaaacaggcaaatatatgaaacaaaaatcaaacattgacaggatgttaaatataagctagatacaataattattatattaatggtaaatgaattttgaaactccaaataaaatacacatatcatcatattggtttaaagtaaaatcaaacccaatttcatactaattactgcacaaactaagatacagaatttt

SEQ ID NO: 783908 - DNA, 620 bp, Homo sapiens
aaatatatttccttgccttaccttgaaattgacctgcaaagtctcttgtgggaaaaatccacattgtatagaaaatcccctttcccccttgttttccttcctctctttctagatccagaagataatcaactaagagccaggcacccttttaggtctgataagaaacaatttacaacctgctctctctctgaagtcagctatctgagagattcctctgcacaataaaacttggtctccacaatcctttatcttaacctgaacatttcctttgatcccaggtcttcagataaactcaaccaattatcaatcagaaaatatttaaattgtcccgtctttctgaatgaaaccaatgtatttttttttttttttttgagacggagtctcgctctgtcgcccaggctggagtgcagtggcgcgatctcggccacctttttctctcagatgtgtttttgaggtgtatccatgttgatacaggtcactctrgttaattcacttatctgttatataatatttgtggatttaaaatatattttttcttgagtcaacatttaaaacttttaaaatttcttgttttacaaacattgctgctttgaacattttctacatctcaatatacaaga

SEQ ID NO: 783909 - DNA, 593 bp, Homo sapiens
aaaatggatgcgtcacaatcttatttacatcttgccgttttaaccaagacctccttgaatcccaagcctaggtctacacttccaggcccctgagaagacctaagaacgatcaagaagggatgcgcgggtaagcgttgtcatcacaacattaaagatttcgaaactcccagaccaccagraagcgtagagtatggggaagaaaaccaaacccagcaactctaagaggcaaactagaccgggaggaaacaatcggcccccaggacaaaaagcacattcacacctctccgtgcaacccactcatccctttatactcgcagcgctgcagccaaagcacaaagttctttcttttcacccagagtctgtgcctgtcgcggttaaacatgaacggaggaaaattcctagtcagaacccagaggggtaggacggggcttggagtgtggggacaacgccaagcagggagctgtccaggggcactgcccgcccggggtctccagctgtgaagttgcgctcctcgggagattcctggggtcagaacgagaggctggagtcggagcgaggcacaagggatgcgggagaagaaaggagtggggccg

SEQ ID NO: 783910 - DNA, 593 bp, Homo sapiens
aaaatggatgcgtcacaatcttatttacatcttgccgttttaaccaagacctccttgaatcccaagcctaggtctacacttccaggcccctgagaagacctaagaacgatcaagaagggatgcgcgggtaagcgttgtcatcacaacattaaagatttcgaaactcccagaccaccagaaagcgtagagtatggggaagaaaaccaaacccagcaactctaagaggcaaactagaccgggaggaaacaatcggcccccaggacaaaaagcacattcacacctctccgtgcaacccactcatccctttatactcgcagcgctgcagccaaagcacaaagttstttcttttcacccagagtctgtgcctgtcgcggttaaacatgaacggaggaaaattcctagtcagaacccagaggggtaggacggggcttggagtgtggggacaacgccaagcagggagctgtccaggggcactgcccgcccggggtctccagctgtgaagttgcgctcctcgggagattcctggggtcagaacgagaggctggagtcggagcgaggcacaagggatgcgggagaagaaaggagtggggccg

SEQ ID NO: 783911 - DNA, 594 bp, Homo sapiens
tggcctcaagtgatctgcctgcctcagcctcccaaagtgctgggactgcaggcatgagctaccatgcccagcctatgagggctaatactttcatagctcttcctatgcatcagaagactcattttaattctcaccacaattctatgagattaccattatcacactcatcttccagatgaggaaactgaagcaaagagaagttaagtaactcaccaaggtcacacagctaacaagtggcrgagctagaatttgaacctaggcagcttggtagagtctgtgctgtcactgcctctctgtgctgatatatctctaaattagttcagtttggacagagtgaacctgagagatccgtggggcagccgcgtggaggtgtctagcaggcatgcagatatatggttctgaagctcacatgggaggtggggactggaaataaagactgtggagtctgcatacaggtggccattgaagccacaggaaaggtcaggacccttaaggagagggtgggagataatcagaggaaagaaacaagggagccctggaaggcaaacacaagcattccagttgtgggaaggacatagtcctttctgcaaatga

SEQ ID NO: 783912 - DNA, 554 bp, Homo sapiens
gttaggatacatatttgtttgtatactgagctgcaatctacctccatggtcctagtaatggcttctggatcttccacggaatagaaaaggacttaatatcatttggttagagacaggacaatcatttactttattgcatgatggcataatggttaagtatatagcctgcaatgtagagtttctgggctcaaattttgactctcctgcttcttgctatgtgacttggacaagtttctaactcctctgtgcctcaattttctcaaacctgtaatataggactagtattaatactttcattagaatcttgttgggaggagaaaacaggaaaatgcatgtacagagtgatacagtaattttggctttcataatttcaayccataaagccctttaaagtcctcacaaagcctccagtaactgtagatcttaaaaattaggtcagattttttcctacttatgatatgaatacatttagcagtgtctttttaaaaaacttcactgatgattagaagtactcggtaaaaaagaatgtcaaaggtaagtgtgcatttcataag

SEQ ID NO: 783913 - DNA, 583 bp, Homo sapiens
ttggaaacctcatgcagttctttttttgttttgtttttttgagacggagtttcactcttgttgcccaggctggagtgcaatggcgcaatctcggctcaccacaaccttcgcctcccagtttcaagcgattcttctgcctcagcctcccgagtagctggaattacagacatgcaccaccatgcccagctgattttgtatttttagtagagatgggatttctccatgttggtcaggctggtctcgaactcccgacctcaggtgatccacccgcctcggcctcccaaagtgttgggattacaggcgtgagccmccgcgcccagcccctcatgcagttctttttggtgtggagtggacctcctcatgggtcaagctttctgcctaacttggagcctgctgggacttgagtgtagttacaattctagtagaaccaaggcaactgcctcaagggacatacctacaagttttcaggcaaaacagggttaaccttctcagacgggggtggaagggccacttctgctggcaacgaagactcagcagaatttaggagttcattgttcccagcttcaataggtttggtacatga

SEQ ID NO: 783914 - DNA, 613 bp, Homo sapiens
tccaagttttgtactgagcagtatatgacatcatgacagttaaaagtgaagggagctggtggggaggaaaagagggctgagagtagtgccaggggggataggaaagggcagggagtagccaagttggctagccgctggcaaggcctggatcgtgcttcactaatgayggcgggggaggaattagtggaagtgtcaaacgtgtgcttccaggtctcacgttgttctccaggcgtcagtgtccaaggtcattgatatgttaggagagcacctgccgtctacacaattgcccttgtaatcatgacagcagagcctcagacttctgtcacattctataattttcaaagtgccctcatggaccttggcttatttgatgtcttctagctgctgacacatgacaacttgtcagccaacagaagctaggttagtggttcccaggagtctggcctgggtacctgatgccaagtctgagctttctctgcatgcaacctgccagagccaggccagagacaggccccagtttttgtggagtgccagaggctacaactctgggcagcaccctggccttgtggtggaattctgcagcatgtccccagagccctgatgtcagaagaaa

SEQ ID NO: 783915 - DNA, 608 bp, Homo sapiens
acagagtgagactccatcctcccaggttcaagtgattctcatgcctcagcctcccgaatagctgggattacaggtgcccaccaccgtgcctggctaatttttgtattttcagtagagacaggttttgcctcttggccaggctggtcacagactcctggcctcaggtgatccacccaccttggcctcccaaagttctgggattacagccatgagctgctgtgcctggcctgcaaatttcatttttctttttttttttgttttgagacagagtctcactcttgtcgcccaggctggagtgcagtggcgccgtcttggctcactgcaatctccacctcgcaggtttaagcgattctcctgcctcagcctcctgagtagctgggattacaggcatgcaccaccacacccagataatttttgtatttttagtaaagaaagggtttcaccatgttggcgaggctggtctrgaactcttgacctcaggtgatccacccgcctcggcctcccaaagtgctgggattacaggcgtgagccactgcgccctgctgcacatttctttagtgtctgtttcaatagaagacaggctggatgctcatatctgcttctgcatt

SEQ ID NO: 783916 - DNA, 581 bp, Homo sapiens
ctcctccctgccatgccactaaaaccaccttcccctggtaccagtttccatctaatagccaaagtcaaatggccttttcttggtagttttctttattcatagagtgcctgctatatgccaggtgctagactgggtgctggtgcctagaccaggggtgggcaaactgtggcctttttgcccgcctcctgcttttgtaaataaagagttactgaaacagtcacacccaattatttacttactgtcttgctgctttggggctacaatgaccaacttgaatagttgcaactaagccttgatgggccacaaacccaaaaatatttgctatctggtactttycagagcaagtttgctgaccccgatctagacaaaatggacttctgtcctcgtagaccttacctacaagaagctacattatgactagtgtacaggaaatgatttattctttttctttttttttttttgagactgagtctctctctattacccaggctggattgtaatgacacgatctcggctcactgcaacctctgcctcccatgttgaagcgattctcctgcctcagcctcccatatagttgggac

SEQ ID NO: 783917 - DNA, 693 bp, Homo sapiens
aagttatgttccacgtcctggagggaggagtatctctaacatcaattatttacaatttttctgtatgggagatgtgtcacttctactgtatttattattcaatcatttatttgtcattatagactcaaggatatttattttctactttgatttgtttatttatttatttttgtagagacaaagtcttgttatgttgcccaggctggttttgaacttctgggctcaagcgatcctcccgccttgacctctcaaagtgttgagattacaggtgtgagccactgtactcggmctattttctactttgggttataatccaatactatcttatttattttattattcaaattgtcacagcttcagccattgggagctcttccagttggtgtccctttgacatgttatcattattttatcttttgagcacttccttactttctacctatacaagaggttccaagttcacctcaaatattccctaccccaggccaagaatcatccatatttccaaaaagtcctggtttccatttctggggaaatggtatgagaaactaacatctgggtcatgggtgcaacaaagtgtttttaacatgaaaactttactccggcgacttctgtttctggcaatatggaggattagacatgctgagtgacccttcccatcaaaacaactcacatgctggataaaatattgca

SEQ ID NO: 783918 - DNA, 693 bp, Homo sapiens
aagttatgttccacgtcctggagggaggagtatctctaacatcaattatttacaatttttctgtatgggagatgtgtcacttctactgtatttattattcaatcatttatttgtcattatagactcaaggatatttattttctactttgatttgtttatttatttatttttgtagagacaaagtcttgttatgttgcccaggctggttttgaacttctgggctcaagcgatcctcccgccttgacctctcaaagtgttgagattacaggtgtgagccactgtactcggcctattttctactttgggttataatccaatactatcttatttattttattattcaaattgtcacagcttcagccattgggagctcttccagttggtgtccctttgacatgttatcattattttatcttttgagcacttcctyactttctacctatacaagaggttccaagttcacctcaaatattccctaccccaggccaagaatcatccatatttccaaaaagtcctggtttccatttctggggaaatggtatgagaaactaacatctgggtcatgggtgcaacaaagtgtttttaacatgaaaactttactccggcgacttctgtttctggcaatatggaggattagacatgctgagtgacccttcccatcaaaacaactcacatgctggataaaatattgca

SEQ ID NO: 783919 - DNA, 561 bp, Homo sapiens
atttattttctactttgatttgtttatttatttatttttgtagagacaaagtcttgttatgttgcccaggctggttttgaacttctgggctcaagcgatcctcccgccttgacctctcaaagtgttgagattacaggtgtgagccactgtactcggcctattttctactttgggttataatccaatactatcttatttattttattattcaaattgtcacagcttcagccattgggagctcttccagttggtgtccctttgacatgttatcattattttatcttttgagcacttccttactttctacctatacaagrggttccaagttcacctcaaatattccctaccccaggccaagaatcatccatatttccaaaaagtcctggtttccatttctggggaaatggtatgagaaactaacatctgggtcatgggtgcaacaaagtgtttttaacatgaaaactttactccggcgacttctgtttctggcaatatggaggattagacatgctgagtgacccttcccatcaaaacaactcacatgctggataaaatattgca

SEQ ID NO: 783920 - DNA, 628 bp, Homo sapiens
aatggatgattactaagaaaagatagcaagggtggagtgaaattgcagtggttaatgtgtagcagttgaaacctaaagttaaaatctgagtgcagttaagtcaaagaacttagaacacccttgctctgactatcaagaaaaggtggtaattggttttaatgttcaaagaaacactattcaccttctatgtgttatgcttattgctctggaaatgtttctgaaatgtcagatgcaaagagggtttatttcattttatttttatttatatattttttgagataaggtcttgttccgtgacccagactggagtgcagtggcatgatcatggtacactgcagcctcgacttcccaggctcamgtgatcctcccacctcagccttccgggcagctgggactataggtgcatgccaccatgcccagctaacttttttgtgttttttgtagagacagggttttaccgtgttgtccaggctggtctcatactccagggctcaagccatcttccctgcttggcctcctaaagtgtgggaattacaggtgtgagccactgtgcctagcccaaagaggttctattttaaaggaaggatatctactcatacttggaagattgtaagccaatagaaaaata

SEQ ID NO: 783921 - DNA, 628 bp, Homo sapiens
aatggatgattactaagaaaagatagcaagggtggagtgaaattgcagtggttaatgtgtagcagttgaaacctaaagttaaaatctgagtgcagttaagtcaaagaacttagaacacccttgctctgactatcaagaaaaggtggtaattggttttaatgttcaaagaaacactattcaccttctatgtgttatgcttattgctctggaaatgtttctgaaatgtcagatgcaaagagggtttatttcattttatttttatttatatattttttgagataaggtcttgttccgtgacccagactggagtgcagtggcatgatcatggtacactgcagcctcgacttcccaggctcaagtgatcctcccacctcagccttccgggcagctgggactataggtgcatgccaccatgcccagcyaacttttttgtgttttttgtagagacagggttttaccgtgttgtccaggctggtctcatactccagggctcaagccatcttccctgcttggcctcctaaagtgtgggaattacaggtgtgagccactgtgcctagcccaaagaggttctattttaaaggaaggatatctactcatacttggaagattgtaagccaatagaaaaata

SEQ ID NO: 783922 - DNA, 421 bp, Homo sapiens
tgtggcatatgcagtattcattgttgttatttatgaccctgtctgccttccattgtggatttcttccagccttggggaatttacatcattcctaatagcaaaaggctttctggttcccacagagttgttcaaagcctgactcatgctccttatgttaattgttcagctctgaaaatacagcacttacagggtgtggctgtgaggggagaatctactgtacttatagggcatgtttagaagtgtttcacacataaatctcgattcctctcgmtctctctctttctctcagttgaattttaagctgtcactcattttggccaactagtaagtcttagaaaacaaaaaaaaagggagtataatccaataaaatccaataaaacctagaatattctgttcactagcttaaaactcacttgggtta

SEQ ID NO: 783923 - DNA, 603 bp, Homo sapiens
ggagtggttagagaacgtgggatgaggcctaatgataattgcaatcacctgacactggcgaggaccctggcacctgcatctcagccccggtgagcagcagtgtggttctgaaaacacctgtaaaatgtgcatgtgtgcatatgcgtgcacacacacaggcagcaataagacctagtgaggctgttgatttcctttctgaacctcttttcctgcaactcattttaattctatgaagcaaaarctaaaagggaaatcagaaacttcccaagaacaaaggaacagcctacaaaggagcagggcttaatcttcctttgatgcagaaaacacctattgctcctgggtttatacagatgtcactttctaggcagaaccagttcagattggcgacactgtcgtagcagtcgcttcctgtgacctcccttgagactttgcatccatttttgtgaagtgctgatctcccaaggttttaccttttaaaatcacactaagggcaggatgccggcataaacctcgcaaattcccagaagaggcagaaaacacagcagcccaagaagcaggagcccagagttctagttctggctattgctaactctgtataacttc

SEQ ID NO: 783924 - DNA, 603 bp, Homo sapiens
ggagtggttagagaacgtgggatgaggcctaatgataattgcaatcacctgacactggcgaggaccctggcacctgcatctcagccccggtgagcagcagtgtggttctgaaaacacctgtaaaatgtgcatgtgtgcatatgcgtgcacacacacaggcagcaataagacctagtgaggctgttgatttcctttctgaacctcttttcctgcaactcattttaattctatgaagcaaaaactaaaagggaaatcrgaaacttcccaagaacaaaggaacagcctacaaaggagcagggcttaatcttcctttgatgcagaaaacacctattgctcctgggtttatacagatgtcactttctaggcagaaccagttcagattggcgacactgtcgtagcagtcgcttcctgtgacctcccttgagactttgcatccatttttgtgaagtgctgatctcccaaggttttaccttttaaaatcacactaagggcaggatgccggcataaacctcgcaaattcccagaagaggcagaaaacacagcagcccaagaagcaggagcccagagttctagttctggctattgctaactctgtataacttc

SEQ ID NO: 783925 - DNA, 668 bp, Homo sapiens
tccctaagagcagcaagaaattatatttctctactgatttgaggtaagagcacagtcaaaatgaggccagatgtgtggctgattctgtataattaagcccttcatttgctggtcacgttgaggcccacgtcctccacttcaacagtattgttgtaattaatcctctgattaaatgcattgataccaggagttttgacagacttgcacaagcgctaaacacataatacccacaaaccccactgcaagggaaggtgccgggactgagctggcatggcagtactaactcagtttaatactcaaagaggaaagcatccttaggtcttgcacaagaacttggacgaccaagcagtctaccaggctcatcctcgccagaactgggaaaacctcagaagttgctgaccgacatcaccccacctggagagaaaagaattgcacacagccctacgtgcctggctctgtgattttccatgaactgcccttctttctcagaggcagagacagggtgagggcagggagctacagtgacrgcaacaaagcctggactttttttcctgtctgtttcagggaggggattagggtctcctggggcaggaggattcctcctgcccagccctacagagaaaaaggattccctccaaggttcctattaggaggcactcaacctccca

SEQ ID NO: 783926 - DNA, 616 bp, Homo sapiens
tggcaggatgataagttgggaacggaaaaacatgccaactttggacaaaatatgattgtgtattttcagttgcaatccaaagtcacaatttggactatgaagctggttctatatctttgccaagttgggcaaggaatcttggcggaaagatgctttttaaagacatggagtgttggactagatgtcaagacatttgtatttgggcttctttggtgccactgtttgagaaagcaaaggcaccctggctttgctatttctttccattttaatgtagaatgatgcctgagtcctcttacagaatgttgtatggctaaatcagaccttcmtttagaaatatttagaatccactctaagttggctatctaaaataattattaattaataataccacttctactattattattgctgctgtgttattaccgttttagctgtgattattgtaccaccatctctgtttattataaaatgagatgctcttctcactcgctgactggtatgttttccagacagaccaaaacagtcccagagaagttaaaagtgaaaataatttatgtcacactgctgaggaaactgaatacccagtggtcaagaaataaccatgtcaaaacttcta

SEQ ID NO: 783927 - DNA, 619 bp, Homo sapiens
aggccatcactgaacttgaacttgacatcactgaaccagcccaggcatctgagtctaggtgtgagagtaacctcattcctctatcttccctctcttcttgctctgggttctgaagatcctcaatgaataatggcaagttatactagtcagaggagagaaaattttcaaatggggcaggttgagaataaatctggctgagcgaagaaaattaattagtaatagtaaatataatttggcagattctgaagtagcttactgtattagtccattttcatactgctatgaagaaatamctgagatggggtaatttataaagaaaaagaggtttaatggactcagttccacatgtctggggaggcctcacaatcatggcaaaaggtgaaggaggagcaaaggcacatcttacatgggggcagcaagaaaacatgtgcaggggaactgccctttataaaaccatcagatctcatgagacttattcactatcacgagaacagcacaggaaaacccgcccccatgactcagttacctcccactgggtccctcccacgaaacatgcaaaacatggggattatgggagttacaattcaagatgagatttgggtgagaacacagccaaacc

SEQ ID NO: 783928 - DNA, 647 bp, Homo sapiens
gcttagctccatagtgcctgacacctggtcaggcacccagaaaaactacggtgacacaacccaagagatatcatctccatgttaccaacaaggaaccaggctcccaggggcaaagtccaagggtgggtatccagtaaccrgctgagccagaccttgcccctggcccctatgctgaggttcaccttcctgaaacttcacatcagatcatgaaatgccaacccagaagggttctccaactcccagagcccatggacttcttggaaaagctgaaacttatttgattacgagactaatgcatattcattgaagataatttagaaaatgcaattttgccaaaagaagaaaataaaactcaccagcactctcaccacccagagatagtcacggctgacgtgctgtggtgtgtattttaaggccttgagggaaattttaaaaacttaaaactgagatttcctgcactgcctttgatcacagcctggggcttcggcagggtgtctcagcctcagcacggctgacattctgagccggatggttctctgtcgtggcaatgtcctgtgcactgtgggatgtttagcggcatccgtgacctccacccaccagatgccagtggcgcccctcataggacaaccaaaaatgtctctggatat

SEQ ID NO: 783929 - DNA, 647 bp, Homo sapiens
gcttagctccatagtgcctgacacctggtcaggcacccagaaaaactacggtgacacaacccaagagatatcatctccatgttaccaacaaggaaccaggctcccaggggcaaagtccaagggtgggtatccagtaaccagctgagccagaccttgcccctggcccctatgctgaggttcaccttcctgaaacttcacatcagatcatgaaatgccaacccagaagggttctccaactcccagagcccatggacttcttggaaaagctgaaacttatttgattacgagactaatgcatattcattgaagataatttagaaaatgcaattttgccaaaagaagaaaataaaactcaccagcactctcaccacccagagatagtcacggctgacgtgctgtgrtgtgtattttaaggccttgagggaaattttaaaaacttaaaactgagatttcctgcactgcctttgatcacagcctggggcttcggcagggtgtctcagcctcagcacggctgacattctgagccggatggttctctgtcgtggcaatgtcctgtgcactgtgggatgtttagcggcatccgtgacctccacccaccagatgccagtggcgcccctcataggacaaccaaaaatgtctctggatat

SEQ ID NO: 783930 - DNA, 661 bp, Homo sapiens
aggtgctggcagggttggtttcttctgaggtctcattcaacagagagaggtgccgtcttctctctgtgtcttcgtgtggtctcgcctctgtgcatgtctgtgtcctgatctcctctccttataagaacaacagtcttattcgattagtggtccatcctagtgacgctattttaatccaattacctctttaaaggcccagtctccaaatacagtcacattctggggtcctgggggttaggacttcaacacatgaattttggaagggtacaacttggctcacaatactgaccattctatmgaaagaccccccctccccaaacattctgccttatcactctttagccacatcctattctatctgcttcagaaccactatcactttctaaaatgacctcaattaattttatttgatgatttatgtattatttaccagcaactctagagtggtgctgcccaatgaaaatataatacaagagtaaatgttgccatagatataattttacattttctagtaggcacatggaaaaagtttaaaagtgagattaatctttttttttttttaagttctgggatacgtgtgcagaacatgcaggtttgttacatagatatacatgtgccacggtggtttgctgcacctatcaatccatcacctaggttttaa

SEQ ID NO: 783931 - DNA, 661 bp, Homo sapiens
aggtgctggcagggttggtttcttctgaggtctcattcaacagagagaggtgccgtcttctctctgtgtcttcgtgtggtctcgcctctgtgcatgtctgtgtcctgatctcctctccttataagaacaacagtcttattcgattagtggtccatcctagtgacgctattttaatccaattacctctttaaaggcccagtctccaaatacagtcacattctggggtcctgggggttaggacttcaacacatgaattttggaagggtacaacttggctcacaatactgaccattctatcgaaagaccccccctccccaaacattctgccttatcactctttagccacatcctattctatctgcttcagaaccactatcactttctaaaatgacctcaattaattttatttgatgatttatgtattatttaccagcaactctagagtggtgcygcccaatgaaaatataatacaagagtaaatgttgccatagatataattttacattttctagtaggcacatggaaaaagtttaaaagtgagattaatctttttttttttttaagttctgggatacgtgtgcagaacatgcaggtttgttacatagatatacatgtgccacggtggtttgctgcacctatcaatccatcacctaggttttaa

SEQ ID NO: 783932 - DNA, 661 bp, Homo sapiens
aggtgctggcagggttggtttcttctgaggtctcattcaacagagagaggtgccgtcttctctctgtgtcttcgtgtggtctcgcctctgtgcatgtctgtgtcctgatctcctctccttataagaacaacagtcttattcgattagtggtccatcctagtgacgctattttaatccaattacctctttaaaggcccagtctccaaatacagtcacattctggggtcctgggggttaggacttcaacacatgaattttggaagggtacaacttggctcacaatactgaccattctatcgaaagaccccccctccccaaacattctgccttatcactctttagccacatcctattctatctgcttcagaaccactatcactttctaaaatgacctcaattaattttatttgatgatttatgtattatttaccagcaactctagagtggtgctgcccartgaaaatataatacaagagtaaatgttgccatagatataattttacattttctagtaggcacatggaaaaagtttaaaagtgagattaatctttttttttttttaagttctgggatacgtgtgcagaacatgcaggtttgttacatagatatacatgtgccacggtggtttgctgcacctatcaatccatcacctaggttttaa

SEQ ID NO: 783933 - DNA, 664 bp, Homo sapiens
aacccattaaaaagtgggcaaaggatatgaacagacacttccaaaagaagacatttatgcgaccaacaaacagattagattaatcttaataatacattttatttaatccaacatatcaaaaatatttcaatgtgcaatcaatataaactttatgattgagatactttacttctttttgtactaagtctttgaaatctagtatgttgtaaacttaattaaatagtatctgagacaggtctcaatcaacttagaagtttgttttgccaaggttaaggacacacttggaagaaacacaaaatcacagaaacagtctgtggtctgtgcctttctccaaagacgattttgaggactttaatatayaaaggggacaaggaggctggaggggaaggagggagggtaatgtcacataactgaatccacgtgttgtaggagaaagggggcaagtaggggaatagttatatattccactggcactcactgtaagataaggtgagagtagctacctggaggacttagaacaaaggagggaagcaccgtggtcagcttacattctgaaatgacgattctgctgtgggagaatagactgttggggatggagggagggcaaggtgaaagcggggaggcaggtgagaaatgataggagttcactaagcaaagaggggag

SEQ ID NO: 783934 - DNA, 680 bp, Homo sapiens
aggctcctcttcctgccctacatggtctcctgtttgcaaaatggaggggcctaggggtagagaaagggtgtggtgtctccagctctaaaagtctatctgagtcctaagatgctgcagaaaagctttgcctcccacctccctcaccctcatgtcctgaagggccagcctggggacagaaagctgcccgatggtcacgtatctgagggctctccaacatttttccaggacagaaagggagtgattctggcccactcatttgagcacacagcagagctggcagcctccctacacaggtagtgcrtttcagcatcacccctgcaactcattctcccactccttccccaccctcacctgcccctccaaacaagaacggtggctcaatacacaaagcttagatacacaaagcttagatgtgcagtggctttctctctctctctgtctctctcttttaagcttctgtttggaagctgttttatcacttctggttccctttcagagcacccaggaaaggttgcttttttaggggtgatggtgttttctcctgggaaattcgttttgccacctctgtactgtgtgatcttgagtaatgaaaagaactcctcaattctgggcagtgtttttcacagttcctggtaccctttcatacacatcatctcatctcccaaaaccctgtggaggag

SEQ ID NO: 783935 - DNA, 468 bp, Homo sapiens
ctcctgggtgattcctgctcattcttcatgtcatggttatttatgtgtcaacttgactgggctaagggaagcccagattgctggttaaacatgacttctaggtgtatctgtgagggagtttctggaagagctgagcattggaatccatagactgtgtaaagragaccaccctgcccaatgtaggcatgcatcatccagtcctctgacagccccagtagaacaaaaaggtggaagaagcatgaatctgtttcctccattggaggtgggacctccatcttctcccactctcagacactggtgctcctggttctcaggcctccagactcagactgggaattgcaccccaggctatgaacttgaactgaattacatcactggcttttctggatctccagcttgcagagggcacatcacgggacttattggccttcagaatcacgtgagcaaattctcataatgaatctcctc

SEQ ID NO: 783936 - DNA, 611 bp, Homo sapiens
ggtgtgcggctgtttctgtaaaggtcccgaaagttctcggtcccttcgccacggagtcccgcgctgctctcccggggctcaggaaacccgggcgtcccagcctcacagctgcactcccagtcaccgctgctgccgacctgggggttaggaacgaggctatcccctgcctttaaacctgggaacacccgaggctgcctccaaaaccaggaaattcagaccagccaggaagaaaggaacagcctttcagtctcacacatttcctcctaggtgctcccctctccccaggggaaaaaaaaaacggaaagaaagaaagaggccaagcgcggtggctcacgcctgtaatcccagcactttgggaggccgaggcgggcggatctcytgaggtctggagatcgagaccatcctgaccaatatggagaaaccccgtctctacaaaaaatataaaattatttgggtgtggtggcgcatgcggtaaatctcagctacttgggaggctgaggcaggagaatcgcttgaacccgggaggcggaggttgcagtgagctgagatcacgccgttgcactccagcctgggcaacaagagcgagaaactctgtcttaaaaaaaaaaaaa

SEQ ID NO: 783937 - DNA, 635 bp, Homo sapiens
catccacgtcctacctagactccacttctgcatttctaagttcccatgggatgcttttgcttgggagctccaccagcattctcactgcaatatatccagagtcatatgcatatgactcacatgaccatttctcaccccaagaygtctccatttccaggataatcaattctccctcccatctacttctgggtagctttgggggaatgacttagcttctcagagcaatttctttcccattaaatagggataatggtacctaccagactaggctattcggaggacttagtgggctaatgtatgtacagactacttggcatgtggtggtggtttcctattctcccctcctgtataaatgattaaatataccttacctgttcgatccctttaagtctagcaactggttcatctatcacaagtgcttggtggtagttgggatgggaagatggtgcttaagaggaaatgtaaccacctaaggtttctgtatagaaggcaggctatttgcagtggcatacaatatatgaccgtcatgggggccttggggttggtgaatataaaatgaatataattatggaaaccctgtgtcctatccagatgcttctgcatcccactgctggtatgagcttcctgctctggga

SEQ ID NO: 783938 - DNA, 601 bp, Homo sapiens
ggtggttggaaatggatgagtgtgcgggttagtttcacagctcaaaagaaggaaatttagagctgaattgatgcaaccttattcccatgggaataaaagaccctcagaaccagacggatattatcataatataactattatgataataatagtgtagagcagtgcttctcaaactttggtgtaaatttgaatcacctgaagagtcacaaaaaaatacacacamacacacacacacagaggctcaggatcattgaagtaggacaggacctagaattctacatggccatcaagttccccaagttattctgacaccagccactggaggttaaaaatatcagctttggtgtcagacagactcaggttcatagcttacctctgctgcctgccaactagctgcaagacccagggcaaatttcttactctaaatcctgaactattcttctgtatactgtggcagatgacaggaccaaccttatagggttgtgaggattaaatgagacaatgcataaaatacacagagcacagtgcctcgcacatagtggacactagacacctagcagttgctattcttgttttttctactattgccagtggatccaac

SEQ ID NO: 783939 - DNA, 566 bp, Homo sapiens
catttatatggctgtgaacttacatgcacttttcattatatacgataaacttcaatgaattaaaaatctgtttttgaaaaatgacactataagtggaggtgaggagaaaaggtgcagggaaatttggtactagatccttcatggcgattaatggatattgacgctgtgtgggagagacagagacatctcaagaaacagtgcaagagccaagcagtaggcagaacttacatggcaaaaggctgcatgatgtctttatgccagattttgcctattactatttgccccattcctgtccttggaagctctactctgaatgacaagggggttgggagactacattttgtaggcttccttgccagstgagttactgttagattttgccagtggacttcatagctcagggactagaaagtgggaggaaatgagaaacggtcctgtttctggctctagccatggcaggtgattgcctgtggttgcaagcagtcacaagtgattacaagcctccagcaccatcagcaaatacaggttataagcaccagaccaagggtgctatcctgatttctggg

SEQ ID NO: 783940 - DNA, 703 bp, Homo sapiens
cactgtgccattttccctttcttgggatcctaacagacaagtagacatgagcatggagaaatacaaagggtcaaagatttgcccaaaatatttatcagggggaaaatgaggagagcaaggatcacctggtggccatcaagcagaccatcaggaggcaaagcmccttatctgaagaactcagaatggtactttcctattatctaaagccacatctggtaccaggcttctttccctagaatttctatacatctccggaatgcacgcatgttggaacccattgtgcaacctttgctgtcatcaaggtgccaaaatgtctacaaatgtaatcatttactatgacctacaaaactaatgtggtcaaaattacccttcagttccctgcaagtgagctcaggcctctcttgccgaagcatcccgctgcgctctgctgtggagttctttccatctaataaaacttttcaaacctatactgttgttgataaattcttttaccacccgggagccaaccattcgtggctgcggctcccggggctctgacacccagcctggcacacaacatttcacttagcccctcgaggcccttagcctgcagcagacatctactttgtaccatgcactatgccaggagttttacacgtggccgctcaatcaaacttcattttacaaactgataaactgaggctcagagcggctaatgacttgg

SEQ ID NO: 783941 - DNA, 703 bp, Homo sapiens
cactgtgccattttccctttcttgggatcctaacagacaagtagacatgagcatggagaaatacaaagggtcaaagatttgcccaaaatatttatcagggggaaaatgaggagagcaaggatcacctggtggccatcaagcagaccatcaggaggcaaagcaccttatctgaagaactcagaatggtactttcctattatctaaagccacatctggtaccaggcttctttccctagaatttctatacatctccggaatgcacgcatgttggaacccattgtgcaacctttgctgtcatcaaggtrccaaaatgtctacaaatgtaatcatttactatgacctacaaaactaatgtggtcaaaattacccttcagttccctgcaagtgagctcaggcctctcttgccgaagcatcccgctgcgctctgctgtggagttctttccatctaataaaacttttcaaacctatactgttgttgataaattcttttaccacccgggagccaaccattcgtggctgcggctcccggggctctgacacccagcctggcacacaacatttcacttagcccctcgaggcccttagcctgcagcagacatctactttgtaccatgcactatgccaggagttttacacgtggccgctcaatcaaacttcattttacaaactgataaactgaggctcagagcggctaatgacttgg

SEQ ID NO: 783942 - DNA, 703 bp, Homo sapiens
cactgtgccattttccctttcttgggatcctaacagacaagtagacatgagcatggagaaatacaaagggtcaaagatttgcccaaaatatttatcagggggaaaatgaggagagcaaggatcacctggtggccatcaagcagaccatcaggaggcaaagcaccttatctgaagaactcagaatggtactttcctattatctaaagccacatctggtaccaggcttctttccctagaatttctatacatctccggaatgcacgcatgttggaacccattgtgcaacctttgctgtcatcaaggtgccaaaatgtctacaaatgtaatcatttactatgacctacaaaactaatgtggtcaaaattacccttcagttccctgcaagtgagctcaggcctctcttgccgaagcatcccgctgygctctgctgtggagttctttccatctaataaaacttttcaaacctatactgttgttgataaattcttttaccacccgggagccaaccattcgtggctgcggctcccggggctctgacacccagcctggcacacaacatttcacttagcccctcgaggcccttagcctgcagcagacatctactttgtaccatgcactatgccaggagttttacacgtggccgctcaatcaaacttcattttacaaactgataaactgaggctcagagcggctaatgacttgg

SEQ ID NO: 783943 - DNA, 535 bp, Homo sapiens
tcgctcctagagcacatcttctgatttcaggctgggttggttactttctttacccgggggtatagttgacatcccaggcctttctcatcgtcccttttctgtgcttaatctcatttattgaatgccatattgctctctttcttagtttaattctttgttttgctgaagcacatcctccagtagctttcyaagaaagggtatatgcaaggtcaaatttctgagaccttgtatgattgaaatgtcattattctaccctcccaattaataatcattcagacctatacatttctatattagacatcattttgagggcatttattgtcttctagctaccagtattggtgtttagaagtgtgataccattcttgcttcagatccgatgtatgtgatgtttttatttggtggaagctcttaggattgtctttttatccctgctaatgtgaatttcattatatgccttgatgttagctgccctgtttcatgtattgggctgtgaattggtggaaagttatggtctagagaatcatgtccttca

SEQ ID NO: 783944 - DNA, 588 bp, Homo sapiens
catggcaccatctcggctcactgcagcctctgccacctgggtccaagtgattctcctacctcagtctcctgactagctggaattacaggtgcgtgccaccatgccctgctaatttttgtatttttagtagagacggggtttcaccatgttggccaggctggtcttgaaccccagacctcaagtgatctgcccgcctcggcctcccaaagtgctgggattatgggtgtgagcctctgcacccggcctgctttgtatgtcttgaagttatgytgttaaagtgaatatgaattagaattgttacgtcttcttggtgaagtgaatgttttgttatgaagtgaccctctatagctgtagtaatgatttttaccttaaaatatattttgtgggttcttaagctctgctggcttgcttttggtagtgtttgcatgataaatgttttaccttctacatttctgcatctttttagatatcacttgtaaataacatatttatgtaaatatatatgtaaataacatattttaaataaaacccattttgtcttaacccatatagtcttttaacagaagcatttaacccattaatatttat

SEQ ID NO: 783945 - DNA, 588 bp, Homo sapiens
catggcaccatctcggctcactgcagcctctgccacctgggtccaagtgattctcctacctcagtctcctgactagctggaattacaggtgcgtgccaccatgccctgctaatttttgtatttttagtagagacggggtttcaccatgttggccaggctggtcttgaaccccagacctcaagtgatctgcccgcctcggcctcccaaagtgctgggattatgggtgtgagcctctgcacccggcctgctttgtatgtcttgaagttatgctgttaaagtgaatatgaattagaattgttacgtcttcttggtgaagtgaatgttttgttatgaagtgaccctctatagctgtagtaatgatttttaccttaaaatatattttgtgggytcttaagctctgctggcttgcttttggtagtgtttgcatgataaatgttttaccttctacatttctgcatctttttagatatcacttgtaaataacatatttatgtaaatatatatgtaaataacatattttaaataaaacccattttgtcttaacccatatagtcttttaacagaagcatttaacccattaatatttat

SEQ ID NO: 783946 - DNA, 615 bp, Homo sapiens
ctggtaaattctttttctctgaaaatgtttttattttgcctttattcttgaagaatatttttgttatgtatagaattccaagttggtattagtttttcttagcatgtttaaggtattgctcagtcatcttcttccattgttgataataagaaatcagctgttaatccattgcttttttttttttttttttttcaagacagggtcttgctctgtcacccaggctggagtgcagtggtgtgatctcggctcactgcattctctgcctcccgggctcaagcagtcctcctacctcagccttctgagtagctgggactacaggtgtgtgccaccatgcccatctcatttttatatggtttttaragatggagttttgcctgttgcccaggctggtcttgaacttttgagctcaagcaatccacccaccttggccttccaaagcgctctgattacaggcaagagccactgcacccggccatgttgctttttttgaaggcaattttgctttcttgtggctatttttaagattttctttgtgttttgtttttctcagtttcacaataatatttcttgttgcaagtttctgttttattctgcttgggatttattggacttttc

SEQ ID NO: 783947 - DNA, 541 bp, Homo sapiens
actggttttttttttttcatgaaaatagacagttgattacaagatttgtatgaaaatgcaaagggccaaaaatggcccataccatcctaaggaaaaacaaggtgggaagacctttttcagcagacatcaagacttaatggccagacacagtggctcacacctgtamttccagcactttaggaggccgaggcaggctgattgtttgagcacaggagttcaagaccagcctgggcaacatgatgaaaccctgtctttgcaaaaaatacaaaaaattagccaggcacagtgacacatgctggtagttccagctatgctggaggctgaggtgagaggatcacttgagcctgggaggcagaggttgcagtgagctaagattgggccactgcactccagcctgggtaacagattgagatcctgtctcagaaaacaaaaaacaaaaaaacaaaaaaaaaaacaaaaaaagaagacttattaaaaattaagaagatatggtgatagagaaagtgtggtgctgcttccaggaacaaatagttcagtgata

SEQ ID NO: 783948 - DNA, 541 bp, Homo sapiens
actggttttttttttttcatgaaaatagacagttgattacaagatttgtatgaaaatgcaaagggccaaaaatggcccataccatcctaaggaaaaacaaggtgggaagacctttttcagcagacatcaagacttaatggccagacacagtggctcacacctgtaattccagcactttaggaggccgaggcaggctgattgtttgagcacaggagttcaagaccagcctgggcaacatgatgaaaccctgtctttgcaaaaaatacaaaaaattagccaggcacagtgacacatgctggtagttccagctatgctggaggctgaggtgagaggatcacttgagcctgggaggcagaggttgcagtgagctaarattgggccactgcactccagcctgggtaacagattgagatcctgtctcagaaaacaaaaaacaaaaaaacaaaaaaaaaaacaaaaaaagaagacttattaaaaattaagaagatatggtgatagagaaagtgtggtgctgcttccaggaacaaatagttcagtgata

SEQ ID NO: 783949 - DNA, 541 bp, Homo sapiens
actggttttttttttttcatgaaaatagacagttgattacaagatttgtatgaaaatgcaaagggccaaaaatggcccataccatcctaaggaaaaacaaggtgggaagacctttttcagcagacatcaagacttaatggccagacacagtggctcacacctgtaattccagcactttaggaggccgaggcaggctgattgtttgagcacaggagttcaagaccagcctgggcaacatgatgaaaccctgtctttgcaaaaaatacaaaaaattagccaggcacagtgacacatgctggtagttccagctatgctggaggctgaggtgagaggatcacttgagcctgggaggcagaggttgcagtgagctaagaytgggccactgcactccagcctgggtaacagattgagatcctgtctcagaaaacaaaaaacaaaaaaacaaaaaaaaaaacaaaaaaagaagacttattaaaaattaagaagatatggtgatagagaaagtgtggtgctgcttccaggaacaaatagttcagtgata

SEQ ID NO: 783950 - DNA, 593 bp, Homo sapiens
catctgccaagttgatgacctagtagagggcatccagggaggtagcctcaaaagcagctctgtagtctcccagggtggctgcaatggctaacttctgactggacacgcagaaccccttgtgctggagggtgttcagacagaacctcatatctttgctggtcacagctttggggtcatttatattatttttcagtaagttgcaagcagacaacattttttcacttaatttatacctccctctgattttcaccttctcaggttcacgttcttgaaactgcatttcatcttccaccctggccracttgaaaccttcaatgttaatggcatggtgccctttggccattccccaagtgtcttcatcctcgtcttcttcaagaggatactactcaatgacactcaatgacatcacactcgtcatctgactcagaagaagagctttcatctgtgtgaaaatcatcacttgaagttgttgcataacctccattaatgccaacaaactgaagattctttttcatgccatttgaatctttgttaccatctttcttcttcataatgggctccagtgtactttcattgtttgtgcatatggaggc

SEQ ID NO: 783951 - DNA, 591 bp, Homo sapiens
attataatcctttttacaaaaattaatactagcctagaggcaacatcatatttcaagttattagatacactctgttcctttctagcactgcacttaaaggcattacaaaatcaggataaagtgaatcctgatcatggatttttaggacatgcgttttagtatttagtactgttcttgcaatayttacaaccaacactttaaaacaacatgcaaacactccatttttttttcccaaagcttcactatgtattgagaaaaggctatttttggcttttcaatatacaaccaatgcatgaatgattgctcagtatttgcttcatacaatttgagtgtacctttaagctaaaaaatgccctgtaatgggtgccatgctatattgccaagtaccctagtccagtggaggaacaggatggatgttacagaatgatttttgtctttgacttcttgattgccattcattaaagtgctattctacataactcctctggtggctggatgtccaaaaatcataaaattatccgttcatctgctccaaaggtgaatgtccattttaaacacaagacaaaaacatcctgtatttagctgtaccca

SEQ ID NO: 783952 - DNA, 591 bp, Homo sapiens
attataatcctttttacaaaaattaatactagcctagaggcaacatcatatttcaagttattagatacactctgttcctttctagcactgcacttaaaggcattacaaaatcaggataaagtgaatcctgatcatggatttttaggacatgcgttttagtatttagtactgttcttgcaatacttacaaccaacactttaaaacaacatgcaaacactccattttttttycccaaagcttcactatgtattgagaaaaggctatttttggcttttcaatatacaaccaatgcatgaatgattgctcagtatttgcttcatacaatttgagtgtacctttaagctaaaaaatgccctgtaatgggtgccatgctatattgccaagtaccctagtccagtggaggaacaggatggatgttacagaatgatttttgtctttgacttcttgattgccattcattaaagtgctattctacataactcctctggtggctggatgtccaaaaatcataaaattatccgttcatctgctccaaaggtgaatgtccattttaaacacaagacaaaaacatcctgtatttagctgtaccca

SEQ ID NO: 783953 - DNA, 556 bp, Homo sapiens
gtatacatgtacacacactcgttctctgttttgatagttatcatcttgggagctaatacaccaaagccaaactaaatctcatgacttaactgaagttaactgagggactgagattatgggggtggtggggactcttggcatccttacataatcttttttgcttcctctctctttaggccccttatgttctggatcttgagaaattgtttccattgtttcctggtcttctgggtggttgctctctggggcctctgccatgctgtcttcattctcttgytcagaagcctgtttttcctccagtgtgccattactttcttcaaccaaagcactgtcttttggctctgaagataacatcttggcagaaaatgttccatgtagaagactgtccactttgttgagagggaattcataaagaccactgagaaaagatttgggaaatccaaaacatgctgttgctgcccgaacaggtcctcctccagggtatagctgaataatggagccaaaacctgaacagataaaagaaacaaacatctgcccgtggagtgactctagacta

SEQ ID NO: 783954 - DNA, 556 bp, Homo sapiens
gtatacatgtacacacactcgttctctgttttgatagttatcatcttgggagctaatacaccaaagccaaactaaatctcatgacttaactgaagttaactgagggactgagattatgggggtggtggggactcttggcatccttacataatcttttttgcttcctctctctttaggccccttatgttctggatcttgagaaattgtttccattgtttcctggtcttctgggtggttgctctctggggcctctgccatgctgtcttcattctcttgtycagaagcctgtttttcctccagtgtgccattactttcttcaaccaaagcactgtcttttggctctgaagataacatcttggcagaaaatgttccatgtagaagactgtccactttgttgagagggaattcataaagaccactgagaaaagatttgggaaatccaaaacatgctgttgctgcccgaacaggtcctcctccagggtatagctgaataatggagccaaaacctgaacagataaaagaaacaaacatctgcccgtggagtgactctagacta

SEQ ID NO: 783955 - DNA, 535 bp, Homo sapiens
taatcagtctcaagtcttctcttggggtggcctgccctcctggagtctgaagccaccacatgggcagcgctgggtgacacgcaagaaagatgctgtccttgaccttcacattcataaaacatcaatgagacttaatatagccctgaagctgaatgatctgggagtgcrtttactgggatttgtgtcaggacaggagatggggcagtaggtggtgaaatctcagatgacagaagctaaacaacctaagtcactcactcatttcattcattcattcattcaacactcactgagctcctgctctgtgccaggcctgtgttgagttttaagggaacaaagatgaatctgacatagccactgctctccagaagctcaagtgttagagggagacatacacattcagtgataactacgttagcaccaaaatctccatgtacagcaagcaggcaggttgtggactcaagcccaggagggctcttttcatatagacagcaaggttaatggagttgtgaatggcagctctgattagcgtgtttgc

SEQ ID NO: 783956 - DNA, 623 bp, Homo sapiens
cagtttgttaagtatacagttgttcatcatagtctcagatgtatcagtctgtcttatcagttgtaacacctcctacttcatttctgattttatatgggtcttctctctctcttttttgttagcttatcaaatggtttatccatttttttcatttttttcaaacaccaacatttaatttcattgatcttttattttgtgttttgcctggattttatttagctctactctgatttttattatttccttmcttctactaattttggctttggtttgttcttgcttttctagttcctttaggtgcatcattaaattgtgtatttgaaatctttctacttttttgatgtaggtgtttattgctataaacttccctcttagtactgcttttgcaatatcccgtaggttttttgtatgctgtgtttttatttcagttcgcttcaagaaaattttttatttacttcttaatttttttccttgacctaatggatattcaacagcatgttgttaaatttccatgtacttgtacagtttgcaaagttcttgttattgatttctagctttattccattgcagtttgagaagatatttaatatgatttcaatttttaaatatttgtccatgtccct

SEQ ID NO: 783957 - DNA, 623 bp, Homo sapiens
cagtttgttaagtatacagttgttcatcatagtctcagatgtatcagtctgtcttatcagttgtaacacctcctacttcatttctgattttatatgggtcttctctctctcttttttgttagcttatcaaatggtttatccatttttttcatttttttcaaacaccaacatttaatttcattgatcttttattttgtgttttgcctggattttatttagctctactctgatttttattatttccttacttctactaattttggctttggtttgttcttgcttttctagttcctttaggtgcatcattaaattgtgtatttgaaatctttctacttttttgatgtaggtgtttattgctataaacttccctcttagtactgcttttgcaatatcccgtaggttttttgtatgctgtgtttttatttcagttcgyttcaagaaaattttttatttacttcttaatttttttccttgacctaatggatattcaacagcatgttgttaaatttccatgtacttgtacagtttgcaaagttcttgttattgatttctagctttattccattgcagtttgagaagatatttaatatgatttcaatttttaaatatttgtccatgtccct

SEQ ID NO: 783958 - DNA, 643 bp, Homo sapiens
gtctcatctgagagaaggcaagtccttgccacctatgaggatgtaaaattaaaaacaagttagttgcttcctagatacaatgggggtatgggcattgggtaaattcttctattccaaatgggagaaattgaccaaaacaaaggagctacaggccccatgaaaatccaaaatccagtggggcagtcattaaaattcaaagctccgaaatgatctcctttgactccacttcayattcgggggcatgctgatgcaagggttgggctcccatggccttgtgcaatttcttcacaggctggtattgagtgcctgtggcttttccagatgcacagtgcaagctgtcagtggatctaccattctggggtctggaggatggtggccctctcctcactgttccactaggcagtgcctcaatgggaactgtatatgggtgctccaaccccacattccttttctgcactgccctgacagaggttatccatgatcatatcagcagtagacttctgcctggacatccaggcatttccacacatcctctgaaatctaggctgaagtttcccaacctcaattcttgagttctgtgcacccacaggcccaacactatgtggaaaccaccaagacttggggctttcaccctctgcagcaa

SEQ ID NO: 783959 - DNA, 569 bp, Homo sapiens
acattttcaatttaatacatgcctatatgttatttgctacatactagcctgtcttctcaacattctataaatttgtatttattttataatcctcttgactatctcatgaggttgatagcacacccggtgagtagcagaaccagaatttgaatccaagcagcctggcattaaagcctgaggttgacttttaatattattttcagatggtactagtaaatatttaataaataccagctatcttcatttcaccacccttgggcagacaaggtgtttgcttgtcatgggagttagagctctagtgcccatgttatcctcctggactgtgaaactcctgcatgtttctcaatggtgagatccccatatttttctttccttggatcctgtaygctggccttattttttccccttccacataaactatctgagttttggaggaggatctctcttcttcctacccacgaaggaacagaacgatttcatggcttcccttgcacttccacaggtttggaaaatttctgtgccagtaggactgggggaggacatacacatgcttccttctcaagctaaca

SEQ ID NO: 783960 - DNA, 647 bp, Homo sapiens
agaggacaatatgccaggaacaaggaagaagtcaaatactataagaattttaaagaactcaagaagcttcaatgggaagcatgcccttagtatctttgacagatgtccttctggatgagcaatccctgttatgggaagctcttctcaagggtagtgcactccactactgaaccagtttagttgttataggtaatcttgcattcttgtgattatattgccctcaacagggggakaattggttcttagggttaatccaaaataattttactttttgtgtaaatatatgtgcataaacatatatatatgcagtatatctgtactattaaaacttaagtgcaagccaggaacactggcttacatctgtaatcccaacactttagaaggtcataaatgggaagatctattgaagccaggagttcaagacgagcctgggcaacaaatcaaaactccgtctctaaaaaaaaaagaaaaacaaaaacaaaaattagccagaggtggtggtgcatgcttgtagttctagctactccagaggctgaggcaggaggattgcttgagcccaggagtttgaggttacagtgagctatgatcacgccgctgcactccagctgggtaacaggctggagttaccataccatataataataata

SEQ ID NO: 783961 - DNA, 565 bp, Homo sapiens
tttaaggtgtgttttccatattttctgacatgtgatttacaacagggaggatttcagtgacagaagaaatggcagaaataaaacacatttgaatagtttctcagagatacttggagattaattaactataaaagataatggagaatgaatccagacccagacctcacattcttcaaaaaaaaaactaactcaaaggatcacagacctaaatgtaaaattcaaaactataaaactcttacaaataacatgggggaaaaatctagatgactttgggtttggcaattactttttaggtaaratgccaaagtcatgaaaggaagaattgatgtgctggacttcatttaaaattaaaaatttctgctctgagaaaaacactgtcaagagactgaaaaatcaagccccagaatggaagaaaatatttacaaaagacatatctaataaagaatgcttatccaaattacacaatgaactcaaacctcaacaattagaaaacaacctgattaaaagatgggctgaagacctcaccaaagatgtacagatggcaaataagcatatgaaaagatac

SEQ ID NO: 783962 - DNA, 565 bp, Homo sapiens
tttaaggtgtgttttccatattttctgacatgtgatttacaacagggaggatttcagtgacagaagaaatggcagaaataaaacacatttgaatagtttctcagagatacttggagattaattaactataaaagataatggagaatgaatccagacccagacctcacattcttcaaaaaaaaaactaactcaaaggatcacagacctaaatgtaaaattcaaaactataaaactcttacaaataacatgggggaaaaatctagatgactttgggtttggcaattactttttaggtaagatgccaaagtcatgaaaggaaraattgatgtgctggacttcatttaaaattaaaaatttctgctctgagaaaaacactgtcaagagactgaaaaatcaagccccagaatggaagaaaatatttacaaaagacatatctaataaagaatgcttatccaaattacacaatgaactcaaacctcaacaattagaaaacaacctgattaaaagatgggctgaagacctcaccaaagatgtacagatggcaaataagcatatgaaaagatac

SEQ ID NO: 783963 - DNA, 565 bp, Homo sapiens
tttaaggtgtgttttccatattttctgacatgtgatttacaacagggaggatttcagtgacagaagaaatggcagaaataaaacacatttgaatagtttctcagagatacttggagattaattaactataaaagataatggagaatgaatccagacccagacctcacattcttcaaaaaaaaaactaactcaaaggatcacagacctaaatgtaaaattcaaaactataaaactcttacaaataacatgggggaaaaatctagatgactttgggtttggcaattactttttaggtaagatgccaaagtcatgaaaggaagaattgatgtgctggacttcatttaaaattaaaaatttctgctctgaraaaaacactgtcaagagactgaaaaatcaagccccagaatggaagaaaatatttacaaaagacatatctaataaagaatgcttatccaaattacacaatgaactcaaacctcaacaattagaaaacaacctgattaaaagatgggctgaagacctcaccaaagatgtacagatggcaaataagcatatgaaaagatac

SEQ ID NO: 783964 - DNA, 604 bp, Homo sapiens
gaatagctcagttggttaaatttatcatcagttagttaatactgtagagaatttaatgaactgggagataagaaaacatttattacgtatttaaatcccatttggttttcctaacttaatttttttcccagggtgtctcacttcagagatgactttcctaactttaatatcttyttacaataactttgttatgcctttaagaaaggactaaaatatttgtaaaattagttcaataggaatatttccaggtcaaatggatccaatttcctcttactcctgaaaaaataaagacaaataaaattatttttattttacaatggataaatcttcttacacaatagattgttcctttttttattttacaatagataaatgttcctacacaatagattctgatctggtatttagtgatgtcaaatgtataatcaataagagaagtaatatcatcatcatgttttggtaatatcatccaccaccttatcagctgaatacaaagtagtgatttttcttctccctcagataccatcggaacagttctcggactcacaggcttgttacctctttactccaataagaagggggaaaaaagcaaacctcacttttc

SEQ ID NO: 783965 - DNA, 604 bp, Homo sapiens
gaatagctcagttggttaaatttatcatcagttagttaatactgtagagaatttaatgaactgggagataagaaaacatttattacgtatttaaatcccatttggttttcctaacttaatttttttcccagggtgtctcacttcagagatgactttcctaactttaatatctttttacaataactttgttatgcctttaagaaaggactaaaatatttgtaaaattagttcaataggaatatttccaggtcaaatggatccaatttcctcttactcctgaaaaaataaagacaaataaaattatttttattttacaatggataaatcttcttacacaatagattgttcctttttttattttacaatagataaatgttcctacacaatrgattctgatctggtatttagtgatgtcaaatgtataatcaataagagaagtaatatcatcatcatgttttggtaatatcatccaccaccttatcagctgaatacaaagtagtgatttttcttctccctcagataccatcggaacagttctcggactcacaggcttgttacctctttactccaataagaagggggaaaaaagcaaacctcacttttc

SEQ ID NO: 783966 - DNA, 601 bp, Homo sapiens
aatgatgtatgatataaccacatttatttaagaatgtattccaatatcaaatggcaagttctaacaatgcaaaaacctcaattacatttgcaccaacctaacagaagtatgcaaaggaaagggaatatgaaacagtgtttaaatcaaaatcttgtgctgtctaaaacaatgcccatggaaataaatccagagaaggaaagcagaaagaccaacaaaatatatacttcaaataaacaagacaaatgttggayagtaatatgtgctaagcagagtgatttcaaaaatggtgatgtttcgacaagtgacctggatctcctaaaagaataagggaaaggattctttcaatccacggccctaaaataggaagaggttggatgtgtataggaaagagcaagtggctagtaaggctggagcacactgacagtggtacatgaggtcagtgaaagtggtccacagtgtccggagtttgcaagccagagccaggattttgaatatattattcatcactgtctttcattctctacatcctcacactgcataatccagagcttaatgcattgcattgcacatggtaagtttcaataaatgtttattagacata

SEQ ID NO: 783967 - DNA, 614 bp, Homo sapiens
agaactcacagtccccagaacggaactcactgtccttagagactcaccacaagaaaagcaaagccaattatttgcagaaaaattgattgtgaccaggacccaagcgataaaagtcccactgtgagaagcatctttacaggtgtgggtttcaccggggtttccttcagcccaacccagcaaaagccactgaagttcctttccacgttctgaagactcttactatgcaggacgatgagagcttgcttttcaaagagatgtgtgggagacaagaatatggaaaaagtgaatctgacatttccatctttttttctaacttttggcatgactgcttccaaattttacactttatttataaatgtttctcctagtgctcggaaaactgygatcaaaattactgtgagattttcagagttgagggtgcagcacctgcccttcacaactctttctctttccacagtaggcgccatatgcaggcggggccacagtcataaaggagaacgtctcctcagtcccccagcagcaccagccaacaatggtggctttccttcagtcacaaaatgtacctattcattagatgttgactgtcaaaatctcccagggaccccaaaggatgg

SEQ ID NO: 783968 - DNA, 621 bp, Homo sapiens
ttattgggagcagcttcctatctggtctctctgcttctgcctttgccccacttcagtctattctcaaccaaacaactagaaaaaacaaatttttttaatcaaactatgtcaagcttctactcaaaaccctttagggacttttaaccctagartaaaacctaaagtcctttcactgacctacaacagggcgcacggcccagcctctgacttcatctccgaatgctcctccttgtgctcactctgctccactcactcttactgccatccccaacacgacttcctgccttagaacgaggaattggctgcttccttgacctggaatgctgtgacaattagtcacaagtctcaagtttcatttcttcacctccttcaagtctttactcaaatgtcaccttctcaatgaagccttctctgaccactataaaattgataggtctcccatgcccctagcacctagccttatttcctgctttatttcgaattagctattataattatgtaacacccataatgtactcacttttcttgtttgtatgactcctccactagaatataaattctgtcaaggcaggacttttaatctgttgtttgtttttgtttttcactgctatatccccacta

SEQ ID NO: 783969 - DNA, 621 bp, Homo sapiens
ttattgggagcagcttcctatctggtctctctgcttctgcctttgccccacttcagtctattctcaaccaaacaactagaaaaaacaaatttttttaatcaaactatgtcaagcttctactcaaaaccctttagggacttttaaccctagagtaaaacctaaagtcctttcactgacctacaacagggcgcacggcccagcctctgacttcatctccgaatgctcctccttgtgctcactctgctccactcactcttactgccatccccaacacracttcctgccttagaacgaggaattggctgcttccttgacctggaatgctgtgacaattagtcacaagtctcaagtttcatttcttcacctccttcaagtctttactcaaatgtcaccttctcaatgaagccttctctgaccactataaaattgataggtctcccatgcccctagcacctagccttatttcctgctttatttcgaattagctattataattatgtaacacccataatgtactcacttttcttgtttgtatgactcctccactagaatataaattctgtcaaggcaggacttttaatctgttgtttgtttttgtttttcactgctatatccccacta

SEQ ID NO: 783970 - DNA, 614 bp, Homo sapiens
aaatatttaaaaactcttagttcagtatgtgaggtaagcccatttgagcacttttattctaatacttattttctgattcatttaaatatgttttgaaggagctaaaatttcaaatacacatatatgcttgaaatagaccagaatttttttttctttgagacagagtctcactgtgttgcccaggctgtagtacagtgacacgatattggctcactgcaacctccacctcccaggttcaagcagttctcccacctcagcctcccgagtggctgggaccacaggcacgcaccaccacgcccagctaatttttgtatttcttgtagagatggggtttygccatgttggccaggctggtctcaaactcctggcttcaagtaatgcaccctcctcggcctcccaaagtgctgggattatgggcatgaactaccatgcctggccttagaccagaattttaaactcgatatatatgatattcttcttagaattataccttgaagaaattgctgatcgcataatagaagttgatatggaatgccaaacagatgcatttttggacagaccaccaacaccactctttattcctgccaaaactggcaaagatgtggccacccaaa

SEQ ID NO: 783971 - DNA, 614 bp, Homo sapiens
aaatatttaaaaactcttagttcagtatgtgaggtaagcccatttgagcacttttattctaatacttattttctgattcatttaaatatgttttgaaggagctaaaatttcaaatacacatatatgcttgaaatagaccagaatttttttttctttgagacagagtctcactgtgttgcccaggctgtagtacagtgacacgatattggctcactgcaacctccacctcccaggttcaagcagttctcccacctcagcctcccgagtggctgggaccacaggcacgcaccaccacgcccagctaatttttgtatttcttgtagagatggggtttcgccatgttggccaggctggtctcaaactcctggcttcaagtaatgcaccctcctcggcctcccaaagtgctgggattatgggcatgaactaccatgcctggccttagaccagaattttaaactcratatatatgatattcttcttagaattataccttgaagaaattgctgatcgcataatagaagttgatatggaatgccaaacagatgcatttttggacagaccaccaacaccactctttattcctgccaaaactggcaaagatgtggccacccaaa

SEQ ID NO: 783972 - DNA, 583 bp, Homo sapiens
aggtggagactttcttttactggcattgctcaatcccagatttgcattgcatttggattggagttctcccaaacccacatcctccccctgcctccctgatccatctcagattgcacctatgaaggaaactccaaatgccttgactccaaggaaggcctcatagttcttaaaatattgggcaaggygtggtggctcacacctgtaatcctagaactttgggaggccgaggcgggtgaatcacgatgtcaggagattgagaccatcctggccaacatggtgaaaccctgtctctactaaaaatacaaaaattagccaggtgtggtggcgtgtgcctgtcgtcccagctactcagaaggctgaggcaggagaaccacttgaacctgggaagcggaggttgcagtgagcagagatcgcgccaccgcactccagcctgggcaacagagtaaacctctgtctcaaaaaaaataaaaaaataaaaataaaaaatcacttatgcaacagaaaggaaactgaccagaacatatataaggaatatggcaaaagttatgctgtatgagtctacttaacattttatattaagaaa

SEQ ID NO: 783973 - DNA, 583 bp, Homo sapiens
aggtggagactttcttttactggcattgctcaatcccagatttgcattgcatttggattggagttctcccaaacccacatcctccccctgcctccctgatccatctcagattgcacctatgaaggaaactccaaatgccttgactccaaggaaggcctcatagttcttaaaatattgggcaaggtgwggtggctcacacctgtaatcctagaactttgggaggccgaggcgggtgaatcacgatgtcaggagattgagaccatcctggccaacatggtgaaaccctgtctctactaaaaatacaaaaattagccaggtgtggtggcgtgtgcctgtcgtcccagctactcagaaggctgaggcaggagaaccacttgaacctgggaagcggaggttgcagtgagcagagatcgcgccaccgcactccagcctgggcaacagagtaaacctctgtctcaaaaaaaataaaaaaataaaaataaaaaatcacttatgcaacagaaaggaaactgaccagaacatatataaggaatatggcaaaagttatgctgtatgagtctacttaacattttatattaagaaa

SEQ ID NO: 783974 - DNA, 597 bp, Homo sapiens
ggatgtctccaagcttaaaatacacctaggtttttatcctagcactgccacttcctaactctgtgaccttggccctttgttttattgtgcctcagtttcctcatctgcaaaatcatgataataatttctaccacttaagagtcactgagaagattaaatcagaggcaataggtaaagtacctgacttacggtctcaataaatgttagctrcttctagcagtaatgagaacatttccggggaatatttgtgtatttacatgatttactgtgtctgcagggttaatttcgtcatgccatcataggctgaggatgggcacaattacttgtcccatcctcaaagagcctggagacagggcagggtcctgagcaaactatgcaatccctgaagagcaggaagtaagcaatgagaaaataaataggatcaaacaccatgtaaacagctgcacaaagctcacaatgcctttcctataaaggaaaaacaataatgacagtgaagcaacaattatgacaattaagtttaatggaggtaattaagctaacttaaataaatgagcattctttagatatcttgctgacttcttccacttactattctta

SEQ ID NO: 783975 - DNA, 538 bp, Homo sapiens
taaactggctatctagataatacgtttgcattccaattaattactgccaggagaatgaaagtcctgtttaaactaactttggcttattggatgggatgttttctgctatgattaacagacaagaaaaaaatacatatatataacaacacactcatccatggtgtttctaaagaaaatatcatttcttaacacgaaaaatggtatttatagcaacttagttttttgttttactgtaccagttgtgtgagaattttcttaaaaacttcctaarcctgagtctcatagccttgtcactaattaactgttccactcatttaaacatttgcttgcctttgaacctgggccctatggacccctggttgctgaagactgggcctgtctgtccagcctgcttctctttgcggctatgttgaattctctgtcccagtgggagctgaaccggactccattctgtatctccaaagcccacagggtttctgatccagtaaatgtttgtaaattttaaatgacaacctccttgttattttctgatcagtaa

SEQ ID NO: 783976 - DNA, 618 bp, Homo sapiens
agaaagacaatgtatggaataaataggtcataagggtaaattacacagatgatatataaaggtaagaaaagcttcatattctgtaatatataatgtctaaatattaagaaaatatgaattaggaatgatgcaacaggaaaagtctaatcagaataaatgaccccccctgaccatctctcctgatagttaaaaaaaaaaaaaaaagcccacaaaatgacaattctgctgactaaaggaataaacctggagcaggaagggtggaaaagcgaggaactcccgaatggctacagacactaaccctgtgacacgtccactgtgggtgctaacgagcaaccaccacccactgtccccacttcacarctgcagtgaccgtctgactttcacactgcctttcatttcagtgttttatgctgggggagagggttgggggtgggatggagatgggggctgtggcccggtgagggacagggcaggggacccaggaatcttcaggaggagtatgggatggcaaagtggaagaggcaccagcataaccctgttctacgacctccaactcacaagccactctacacactgcagacgcccaatggccagaagagacgagtgcagccttattcg

SEQ ID NO: 783977 - DNA, 608 bp, Homo sapiens
ttcaaaactgaattgtaaagttgatcccgcactttttttttttttttttttgagatggagtttcacttttgttgcccatgctaaagtcctgtggcacgattttggctcactgcaacttccgcctcctgggttcaagtgattctcctgcctcagcctcccaccacgtcagactcacttttgtgtttttagtagagatggggttttggtcaggttggcctccggctcctgacctcagatgatccacctgacttggcctccgaaagtgctgggattacaggcgtgagccaccgcgcccagcggtcctgcacttcttaatgcacattctctagaatgctcaccaacaggcrtacagaaagaaggcactctgtatttttgtgaagagataaacaataaaagaaggataaaaagaaacacacagtagaaataatggaaactttctcaaattagtatgatatttggagtatactaaagcatttttctgctgaaattaacctagtggctggtgaattaaaggaattgatttctgatgctaatttttaagttcattttaaaatttgtttacaagtcatatgcttttttatataattaaagtgcctaatttttaagtg

SEQ ID NO: 783978 - DNA, 621 bp, Homo sapiens
ttgtgtgtgtgtgtgtgtgtgttagtgcaaagttttaaactttctagtctccataaaattcttcttgctttggcaaaagccatcggttggtaatttaaggtagttactcaggacatagtatcttatctgatcaacattttttttttttttgagatgaagtctcactctgttgcccaggctggagtgcagtggtgcgatcttggctcactgcaacctctgcctcctgggttcaagcgattctcctgcctcagcctcccgagtagctgggactacaggtgcgcgccaccatgccaagctaatctttgtacttttagtagagacgggatttcaccatgttggccaggatgctctcaatcttttgaccttgtgatccgccygcctcggcctcccaaaatgctgggattacaggcgtgagccatcgcgcctggccttgatcaatttatttttgaactcagtctatgtgacttcactttatatatcataatatcacaaatcctaatgcttcttttcagtcttgtagcagattttaaagtggggcaaaaagaggaatccattaccatcacaatgctggagtactgatgtgacataatgtctagtaatgtttttatagatccaatagca

SEQ ID NO: 783979 - DNA, 646 bp, Homo sapiens
acttttttgtttccctttaattatttagttcctgcttaacctattagtttggtatttcaggatcttgagccttcgaatctgggtccgttcccattcccattgcaccctctggtggccatctccatatccatcttagttaattaagccaattttgattaattccatactcttacactggtggcaggttggttcagaaaaaggcaactgatgcgattctaaccagtagaaccagaagtaaattctacaggaagccgcctaaggaaagttttcttattcacaaaatagagtcacaggaaactgtagtatctcctctattttccaaaatgcactattattatcactgttgctrctgctgttgatgttgtttaattttgttttgtttgacatagttctgcatctgctattaccatagttataacagcttaacattaaaatttttttaaatggaaaacagagacatgagaagaaagtctgtttctgttcgctttgtgacatcaatgaatcagccggtgttagaggtcaacttcagcagtcattttacatttattttgtccatccagaatgtgaattgccttctatgtttgcagacacttccgcttcttgaaaaacagcctgaaactcgttatgaaatctgaaatgccttata

SEQ ID NO: 783980 - DNA, 598 bp, Homo sapiens
tatcgcattttgttatagcagcctgaaccagccaagataacagccctctgactaggcttacggttagaaaaagaaccttatcacctcctctatactcttttctcagtggagagtaggttaaggctaacggcacttcctgaaaatgtggctcaaaactcatccttttctatccatactctcaaacacttcacatcatagatatgaacaagggaaccatttatcagtcaacagctttaaatctccayatggaccagcaaatcttttgagataaaacaaattttggactttgatagtttagctaagagttttgagtttagcttttttttataggtgctacatattagacattatcatggagatgcaattctgaacacaaataattatggtgtctgtgctcatggagcttagtgtctattaattgaagggaaattagacattatttaaataataataaagtgtataagtatgggaggtgcttggaaagggaagcgaatgttgttgtgagacgtattctaaagatggttggacgagtagaaggataagtggagccttctctaggtaaggaaacatttctttgagatttgaatgttgataacaa

SEQ ID NO: 783981 - DNA, 560 bp, Homo sapiens
ctgcatttactaaagtctgtcacccactgaccaagtcgtgtgccttataccattgcccgtattccatattcagggactcaacatccttttcttcaacatttcagctcccagttgtgcaatgaaaccttaagctgactcttccaaaaaagatacggaagtaaaacaaaactggaatctgacttgttatgattgcagtttggagaatggtttaaagagagggtatagtacctttaggatattttggattcagggatttgtttatgaattgtatttcgacaatatattctgatttcctaaccaaactccttgaaaacaagggctatggattggattcttcactcactccaagccccagtaaaatctgagaaagtatctcagatattgtatatcttaattgtatattgtayatcttaattgtatattgtacattttaatatctctgatattatatacattattaagtcaaaataaggcaaatatttttattaataaaaatgctgatatgtacaaatatatttttgttgaaacatttatctctcttaaaatattttatttaactc

SEQ ID NO: 783982 - DNA, 560 bp, Homo sapiens
ctgcatttactaaagtctgtcacccactgaccaagtcgtgtgccttataccattgcccgtattccatattcagggactcaacatccttttcttcaacatttcagctcccagttgtgcaatgaaaccttaagctgactcttccaaaaaagatacggaagtaaaacaaaactggaatctgacttgttatgattgcagtttggagaatggtttaaagagagggtatagtacctttaggatattttggattcagggatttgtttatgaattgtatttcgacaatatattctgatttcctaaccaaactccttgaaaacaagggctatggattggattcttcactcactccaagccccagtaaaatctgagaaagtatctcagatattgtatatcttaattgtatattgtatatyttaattgtatattgtacattttaatatctctgatattatatacattattaagtcaaaataaggcaaatatttttattaataaaaatgctgatatgtacaaatatatttttgttgaaacatttatctctcttaaaatattttatttaactc

SEQ ID NO: 783983 - DNA, 603 bp, Homo sapiens
agtgggttatgtccaagggatgcagaggtggtttaatatatgcaagttaaaaaatgtgatacatcacatcatcagaattaaaaacaaaaaccatatgatcatctcaatggatgcagaagtgactgacaaattttagctctcctttatgaaaaaaaaaaactctcgacaaactagacatagaaagaacctatcttaaaataataaaatccatatatgacaaacccacagtcaacatcatactgaatgggaaaagttgaaagcattttctctgagaaattctggtctctgagaccagaaaagacaaaaatacccacttttaccatttctattcaacatagttctggaagtactaaaaagagcaattaarcaagaaaaaaatatggggcatccaaattgaaaaagagaaagtcaaactactgccatttatagacgatatgagtgtagtacatctagaaaattctaaagactcctccaaaagattcttagatttgaaaaacaaatttaataaagtctcaggttacacaatcaacgtacacaaattagtaacactgctatatatcaacaacaacccagctgggaataaaatcaagaactcaataaatt

SEQ ID NO: 783984 - DNA, 548 bp, Homo sapiens
aaagtaaatgcaacaaaaacaaaaagaaataaatgagagataattaaatgaaaaatcttctgcacagcagaagaaatactcaccagagtaaacagataacccacagaatacgagaaaatatttgcaatctatgcatctgacaaagaactagtatccagaatctgtaaggaactcaaacaccaagaaaaaaatcaaataattcctttgaaaagtgagcataggaaatgaatagacatttmttgaaagaagatacacaaattaccaacaaacatatgaaaaaaaagctcaacatcactaatcattagggaaatgcaaattaaaactacagtgagataccaccttattcctgcaagtaaggcgattattaaacagtcaaaaagcaatggatgttgccatggatgtgggaaaaagcgaatacttacaaactgctggtgggagtgtaaattagtacaacctttatggaaaacagcatggagattccttaaagagttataagtagatctaccattcaatccagcaatcccactactgagtatctactcaaagga

SEQ ID NO: 783985 - DNA, 590 bp, Homo sapiens
tgaaaaatcttctgcacagcagaagaaatactcaccagagtaaacagataacccacagaatacgagaaaatatttgcaatctatgcatctgacaaagaactagtatccagaatctgtaaggaactcaaacaccaagaaaaaaatcaaataattcctttgaaaagtgagcataggaaatgaatagacatttcttgaaagaagatacacaaattaccaacaaacatatgaaaaaaaagctcaacatcactaatcattagggaaatgcaaattaaaactacagtgagataccaccttattcctgcaagtaaggcgattattaaacagtcaaaaagcaatggatgttgccatggatgtgggaaaaagcgaatacttacaaactgctggtgggagtgtaaattagtacaacctttatggaaaacagcatggagattccttaaagagytataagtagatctaccattcaatccagcaatcccactactgagtatctactcaaaggaaaagaagtcattatatgaaaaagacatttgcaaatgcagcacaattcacaattacaaagatgtggaaccaagttaagtgcccattgacta

SEQ ID NO: 783986 - DNA, 666 bp, Homo sapiens
agccatagctgaccaaacccaacattagtagtagaaaagaaacagtaaagatcagaacataaataaatgaaattaaaatgaagaaatgaagaaaacaatacaaaagattaataaaatgaatcaaagttggttttctgaaaagttaaacaaaattgacaaacctttagccagactaagataaagagagaagacccaaataaaattagagatgaaaaaggagacattacaaccaatagtacagaaatttaaaggattattagaggctgctttgagcactatatacccataaattggaatatctagaaggaatggataaatttttagacacatacagtctaccaacattgaaccgtgaagaaatttacaatctgaacagaccaataataagtgatgagatcaaaatgataataaaacatctcccaggaaagacaagcctgagatataatgacttcattgctgaattttacctaacatttaaagaataccaatmctactcaaactatttagaataacagaagaagagggaatattttcaaactcattttatgagcccagaattactttgataccaaaaccagacagacccatttaaaaaaaaaaacaaaactacaggccaatatccctgatgaatcttgattcacaaatgcttcacaaaacactagcaaa

SEQ ID NO: 783987 - DNA, 689 bp, Homo sapiens
aatgataataaaacatctcccaggaaagacaagcctgagatataatgacttcattgctgaattttacctaacatttaaagaataccaatcctactcaaactatttagaataacagaagaagagggaatattttcaaactcattttatgagcccagaattactttgataccaaaaccagacagacccatttaaaaaaaaaaacaaaactacaggccaatatccctgatgaatcttgattcacaaatgcttcacaaaacactagcaaactgaactcaataacacatcaaaaagatgatttatcatggccaagtgggatttatctcagaggtgcaaggatggtccaatatatgcaaatcaaccaatttgatatatcaacagaataagacawaaacaatatgataatttcaactaatgctggagaagcatttgatataattcaacatcccttcataataaaaaccctaaaaaaacagtatagaaaggacatatctcaacataataaaagccatatatgacagatccacagctagtatcatactgaatggggaaaaactgaaaaccttttctctaagattgagaacatgacaaggatgcccagtttcactgctgttattcagcatagtactggaagttgtagctagagcaatcagacaagataaagaaataatgagcgtccaaattggaaagga

SEQ ID NO: 783988 - DNA, 649 bp, Homo sapiens
ctaaaaagtcatccaactatactgtatccacatgaaactgacattagatttaaggacacatatagctacaagtgaagggatggaaaaagatatttgatgtggcaaatttggttgaagtggcaaccaaaatacaacaaaggtggatacacttgcatcaggcaaaatagatttttaagtcaaaaactttcactaaacataaaaaagatgttttgtaatgataaaacaatcaatttcccaggaagatacaatgatwataagtacatacacctccaacattagagcatctaaatatatacagcagatgagctttgtatatttatgacaaagctgagggtagaaatagctatgcaataatagtaggagacttcagtgccacactttcaataatggacagacatccagacagaatatcaataagtaaacagaggacttgaataacactatagactaaatggacttaacagatatatgtagaacatccaacccaagagaagcagaatagaaagtcttctcatgtgtacatgaatatttctttaggattgagcacgggctaggtcacaaaatgaatgctaacaaatttaagaagattgaaattatactaagtatcttttatgaccacaatgaaatgaaactagaagtcaagagcaga

SEQ ID NO: 783989 - DNA, 649 bp, Homo sapiens
gtctttttaaatgaggcctgtcattatgtcatcggatctaaaactcatctaatgtctgaatagtgggcttctatgaagcatggttatgtttattccctaatgattttacatctggtctggccaaatgcaatattctaaagtttatcttgtactaattgctctaatgatctctagcttgcattttctggaaaacagaaactatctaaaattagattgtgattattaaataaatctggttcaaataaggaattgtgttacatatgcaaatgtgttctgtttcttttaagcactttagtattttccatatgaaagaaaaccttccagatctcctgattttcaggggaaagattgaaaaattatcagaaagtcaaaagtgcctgactcaacagagtttatcctgtgtttttaatgtctgctagttaactccatgcaaaactctgcaacacaaacttttctacagagttcttytagagagctgtcccaaaaggagatttagcagcagaaagctgacttccgatgcccaagattcaggaaggcagacaaccgtgctttaatcatggacaattatattttggttaggatacaaggtgcagggctagaaaacagatgcttttttagcaaaacctcatgggataattagtagaaatca

SEQ ID NO: 783990 - DNA, 548 bp, Homo sapiens
tggaaaaattatctttgcgatcccattataaaaatatagaggtgcttgaggaatctctcagctgaggcttcccaataaggagacttcctaatagaggtcctttggctatgaataaaatgcacataagagcatgaccagccagagaggcctgagttcttggctgcaacttttgccagagacttcaatgcacggtctgtatgtcaagtttggtgtggggagagtagatttccccatgaggcctgccaggtaaagcctyttcaggtgcctatttccaggcctgaaaaatgttcatgtggatttgaattactgtctaacttcttttcatttgattctgaaggagttgcttcagtatttatggtagtataggtctgttagttacaaatttccttttttttctttttttctttttttttttttttggcctggggatatcttaatctctctttaatttttgaaggttagttttgctggatattcaattcttggttgacattcttttgctttaagcactttgaatatgttgttttactgccttataacctccatga

SEQ ID NO: 783991 - DNA, 587 bp, Homo sapiens
aaaaggttcattcagacatggcagaaaataggtaactggacaagaaattagctgtgcaggggccctaggtgggtagaacaaaacacatttgaggacattgctcagggtttatgaaatgttactgaaaccacccaagctgtcccatagaaccaatgtctgtggtttcctttgaataaacatagaaactgttcctccmagtcttgaaacttgaaaagcttcatttgttttatctgagttcctttctcaggaaaccagccatcagggcttaagatagaatcaaggaactgacattcaccagatcaccacatctgacaaggagataccagacctctcacccatcatgatcacctgaccacatattgaccaattccttttctttactcttccctaactcctgttttcccatacatggttacatttcttccttcccatataaatccctaattttagtcagtcagggagatggatttgagactgatctcccatctcttcagctgccgccccagattgaagcctcttccctgcaatacttcttgtctttatgactggcattatgtgttgtaagcagcaggacctagacaaaactc

SEQ ID NO: 783992 - DNA, 517 bp, Homo sapiens
gaatgtgaattgtgtctcaattttttaaattaaaaaaaaaaaaagaaagaaagatggccaggcatgctggctcatgcttgtaatcccagcacattaggaggccaaggcaggaggatcacttgaggtcaggagttcaggactatcctgggcaacataatgagaccctgtctttactaaaaataaaaactaaaatataggcaggtgtggtggtgcgtgcctgtagtcccagctacttgggaggtggaggtgggaagattgcttgtgcccaggagttgaggctgcagtgagctatgatcgcaccactgcactccagcatgggcaacctggtaattgtgtgcacccagcttcataactgtggtcatctgaamtactgtgacaaacaactgaagtctttgatgaggttgttcaaaaaccacagtggattaccactacacctgcagatcctgtctcaaaaaagaaagaaaggaagaagaaagaaagtgttgcaggagaacttccattttcagctctgacatgc

SEQ ID NO: 783993 - DNA, 574 bp, Homo sapiens
ctgtctcaaaaaaaaaaaaaaaaaaaaaaaaagaaattgctttgctgacacagcccccttgtacagagcaccttgtctttgagggaacagctgtcctctgttggggaaaatcgggcccagccagcctgacttgctctgcacatttgggatgtggccggagcctcaraatccacttgggagggtgtgtaccggctgccgtgtttcctttcggcaggcttaaattcatttcttcaagtgttcccgttagttaacaatgattgatagagtgaagatattattaataaaaattaggtacccagctaggcaatggacttttgttcatgcctcagcactcatcaaagggcaaatgaaaaaggtgttttcagcagcatgcgattggaatgagtcgggccaggtggaaaacgaatctggccattcatcagagctgtcaggacgggtctctcaccagaagtgtttaccagtgttcaccatgagcttccgagttctgctaacgggagcttcgactgtaactcagaggacttggaaaacgacttgggtgacttagcgtacctatgttattgaattcgcctaagtg

SEQ ID NO: 783994 - DNA, 741 bp, Homo sapiens
aggccccgctcccgggaccactgggcagattccaggaagagtggccggcaccggatcgatgcgggactgattgttacagaactgtttccacgcaccatattctctctacaatctgggccctctcttagctccacgatagagctcagaggtttctctgatgctgcagagccgggatttagggatgccacagaggagcggcggacgtcatttggtccacagtagcaccgtagtgggaccaggaacacatwtgccttgttgacacctgcttgcgtctttgcactggacacttattcctgggggtgctgggcctacacagcctgggccgcctcagagctgtttcgtctgtgagccccttggtaaagggatatgtaaatgtgaatgttcaccagtctgaatggcaaaactcctctccaggcgaggcaatttgcagcaaaatatgctgtaaatatttgttcagcctgggaaaattactctaattgcataattaaactcgttgttgatgctacttccggacagaatgcctgcagaggagggcccagcctgcagctgcccttcagagctttttcaatagagagactgtttgcagagacttttctctggcccctgtctcttcacagggagaacgaagaaaggaacttggggagaggttgtctgtgggagagaggagggtgtggaaaggtcccagaatcagaggaccactggtgtggggcctcgcggatcctccctgaggattagggctat

SEQ ID NO: 783995 - DNA, 548 bp, Homo sapiens
tttacaaatgaggaaactgaggtttcctgcagtgggtcgtaggggatggggatccagagtgctagctttattttattcatttatttattgagatggagtctcactctgtcacccagactggagtgcagtggtgcgatctccgtttactgcaacctctgcctcccaggttcaagcaattctcctacctcagccttccgagtggctaggactacaggcgcaagccaccatgcccggttaattttttttttttttttttttgkatttttgatagagacgttttaccatattggtcaggctggtctcgaactcctgacctcaggtgatccacccgctttggcttcccaaagtgctacgattacaggtgtgagctcccgcgcccagcctagagtgctagctttaaaagccccacctgctctactctggttcagctgcctggtggaaggaaaggaatttcccatcatgcttctcttcccaaaaagattctggctccagttccttccagtgaggacccacggggtggcagagttgggtctggcctctagatccca

SEQ ID NO: 783996 - DNA, 595 bp, Homo sapiens
cttattgtgaatttaatttgtatttccctgatgactagtgatgttgagcattttttcttgtacctgtttgtcatttgtacgtcttcttttgagaaatgtctattcaggtgcttagctcattttaaaattgagttatttgtttccttgttattgatttgtttaagttccttatatagcttgrattttagccacttacatgtatcatttacaaatattttctctcaacctgtgggttgtcttttcactctattgtttcctttgctgcggagaaatgttttaatttgatgcaatcccatttgtttacttttggttttgctgtctgtgatttgaggatcatatacaagaaatcttgcccataccaacgtcatggaacttttctcctatattttcttctaatagttttacagtttgcagtcatatgtttaagtcattaatccattttgagttaattctcatatattgagtgtcataaggatccaatttcattcttctgcatgtggatattcagttttccaacatcatttattaaaaagacttttctttcaccgtttcatgttctgtttatatgatcatatggttttatctttaattctgt

SEQ ID NO: 783997 - DNA, 652 bp, Homo sapiens
aaaatgcaggctctattgttttcaatttagcagcctttcaaatgtatatggttctggccacattaaagttgcaaataacactttttttgagactgaaataaaggtgaaatattggaaggaaaagtttaatgttttatttgtagtatttttttccattttccactaaagagtccagaaaaaaaaagcaaacwtaatataacctttgagttataacagaatatttcaacaagaactttgttgctatcaagtaaccatatagtataggttacacagaactcctatcttctggattaagactccgtcttcaaagtatttgggcaccctggttactgaacatgagccagaagaaaatgaactgcttttccttaagcatctctctacccctgggtcacctccagtggagtggtatgtcaagaaatgtaatttgtcctttctgatgccataatctaccatatttttttaaattaagtcatgccaggaggagatttctctgctcctcatcacatgtttccaccagaaacatgggcagctccgcatcttgggcttcaccacctttaaggtgaggtggatggtcttcttcttggaaatttcataagacgatagcattttcttgggctttggggtcttaaagcccagcagaaaaaccaagtcc

SEQ ID NO: 783998 - DNA, 606 bp, Homo sapiens
cacagtgacatcaacaaaaataacagagtaatgacttccaaaaatgacctacttcctaagagtaaaatgaactatggaagaattgtcagaattaatattgtttagaactctagaaattaaccaaaggcttgctgcaatctggrgagtgtttgttcaagaataatagctgaatcttgataagaacagtgagctctgtgatgttttaactggttccactcctgttccttcctcctcagctcttaaaaaccaacggtccacaatcatggtgaaaaccagcagacatgaaatcactggaggggacacaatagggttacagatcctttaatcccttatttccagaggactgttattattttacctgtctggttgttccctagaactcacaatgctatccttatttgacttgactcagagctatcccagagagaacaatgtatttcctggggaaatgagtaaaaagaatcataggcagttgttgaacatcatggttgccgatggtcataaataacagttggaacaaacaatagcctaaccaagaacttaaaaacgaaatgtcagggaatgagatgcccataaaggggattgaaaagccttaatatactccag

SEQ ID NO: 783999 - DNA, 585 bp, Homo sapiens
aacaaaaataacagagtaatgacttccaaaaatgacctacttcctaagagtaaaatgaactatggaagaattgtcagaattaatattgtttagaactctagaaattaaccaaaggcttgctgcaatctggggagtgtttgttcaagaataatagctgaatcttgataagaacagtgagctctgtgatgttttaactggttccactcctgttccttcctcctcagctcttaaaaaccaacggtccacaatcatggtgaaaaccagcagacatgaaatcactggaggggacacaatagggttacagatcctttaatcccttatttccagaggactgttattattttacctgtctggttgttccctagaactcacaatgctatccttatttgacttgactcagagctatcccagagagaacaatgtatttcctggggaaatgagtaaaaagaatcataggcagttgttgaacatcatggttgccgayggtcataaataacagttggaacaaacaatagcctaaccaagaacttaaaaacgaaatgtcagggaatgagatgcccataaaggggattgaaaagccttaat

SEQ ID NO: 784000 - DNA, 606 bp, Homo sapiens
tcaagtcagtggcacaatgtcttgaaaaaattagaattatccacttttacttctggcatcttcagaatattgtcctcattcctcactgggcatgttttccgaatgcttaggatatgacttcatactcagaatatgatataaaaaatgcragaaaaaagaacttcctttccttccatctctttttatatctgtgaaaactcttcttagagtcataccacatagaatgtcctgcgatatctcattggaatgccctcaccataaccaacacttaggcctttttcacctacccccaaattatatacacctccctcccttgtccaagttaaaattaaaatatttgcatctatttgaaatgcattcattattttgtcaagaactgtatgtacctagtatcatcttgttactgcctctagctccattctggcacccacgtgacaggcatttaattccattcattcagtgagtgtcctttccagctagacattcttgggtaaaagaacagacagaatcacacttgttgtcaggaaagtaagttccatcactctcaagctcacagttctctgttcttctcattggaaggattcacctaatctatttagtgaattg

SEQ ID NO: 784001 - DNA, 610 bp, Homo sapiens
tgtgatgatgcctcttggtaattccgacaagctcaagctctatctaaggaggagatagacaaagggaggaaaatctgtggctggatttggaggatgttccaggataatgattgagaataatgcatggccttttgtatggtctttatttgggattccacaggtaccaggaaagtctcactgggtcccattcccctcatcgttggaactggagcacattcaaactgggcttactgcctaggaaggaagttaatgtctcttccaaccacaaacagcaaggggttgttttgaaagtccatgaaagctgaacttgattagaataaagcattgatttgatgcagcagccttatgakgcagaacaggctgggttactatgtgtacaattccccagctcagatgtgggaaattatgtttccacatcgaccctgtgctccctgggaagaaggttctccacatgctgagtagagtgtggttgctccattgggtcgatgccagctgcctttttgttcctccccacctctggcttatctgctaacgcccgttggagaatcactctgagagattccttcagccttttctttctgaggctccccacaaagaaataaatgatagg

SEQ ID NO: 784002 - DNA, 601 bp, Homo sapiens
aaaatcttgaatggatgttggggaaggagatttggaaaaggtatgcttaaacagttcaaattgtatgactaaacaattcaagaatcaatatactacaaagcaaagaagaatgagggccctaccagctattaagacattttataaagccaaagttgtaaactgtcaaatcagtgtaacaataagcagtctcagatttgacccacatgtgtatatgtgtacgtctgcatgtgtgtatatgtgtgtgcatgtgtgtgtgtgtgtgtgtgwgagagagagagagtgtgtgtgtgtatttaataaaaagctacattccaactcactggtaaaagatgagttattcaacaaatggtgtagggacaattagttaaccatttggaaaaataaaattggatgtattcatacatcttaaagcaaaattaattctaggtgaaataaatatcaagttgtacaaattaaactataaggatactagaggcaaatgtgggggtatatttacataattgtagtataaggaaagactgtaatcatgacccaaggtcagaaaccataaaggaaagtacgggtagatttgaaaacttaaaaattacaaaagaaaatctga

SEQ ID NO: 784003 - DNA, 631 bp, Homo sapiens
aaatgtgcagagatgcccaggagtcatagtgaattacttcatccaacaaatataacgagtgattaatatccatattatataaaggactccaagtggccaggcacagtggctcacgtctgtaatcccaacactttgggagtgtgaggcaggaggattccttgagcccaggagtttgagaccagcctgggcaacacagtragatcctatctctataaaaaaaattgtttaaaaattagttaggcacattggcacatgcctgtagtctcagctactcaggaggctgaggcaggaggatcacttgagcccgggaggtcgagcgtgcagtgaatcatgatagtgccactgcactccagcctaagtgacgaagagaagcctgtctcaaaaaaaataaaaaataaagaactcctataaatcagtacaaaacaatgtctgaatttttctaaataagggaaagatacaaaaagaaaattcacaaaagaaatatgaatagccagtaagcagcaaaaactgaacaacttcactactaacaaggaaagaacaaaataaaacaagccattctccatatgtcaggttggccccccaaaaatttttttttagtttttttaatgagatagggtctcgctacattgcc

SEQ ID NO: 784004 - DNA, 592 bp, Homo sapiens
gactgatagcacgtcggtggcagagatctgagtgtctaaagctttcatagcctgagtaatgtcaatgtgaatagtctggaacatacacaaaacattcagttttgatcatacacaagttcccccttgggccgctggtacgttaaaatgtccacatatccarcagtttgtctgattatgtaaagaggctaaagtctatgcccactcagtaaataagttactctctgcatgattccaacttatacccaaaagtagaatgccaattcgtatctttatgttactcatccctctcatttcttctgaacaggagtcagaggtcacttattggctcacaggaataaacaggattagtctcttgtgttccactggcctgtgggacttcataagagacagatttaatttaagataagtggacccagctgtttattcacagaagtttaacttcagttggggtactaaggagaacttgataggatcccttccatttggggggacagttgatctgctggggatcatttcttccaagtttttaataggacccagtctcccggctgggttgtaacaagattctcttccttagtgggggaagggagtc

SEQ ID NO: 784005 - DNA, 609 bp, Homo sapiens
aatgctttataccttgacaggggtgtgtattacccaggtgtattcatgtgtcaaaatcctttgaattgttcactcaagatttgtgcatttcagtgtatgtaaatctcccttaagcaaagagccataaagaaatattgagctctagttacttgtgtgcatgctgaagtgtactagtttttgcaacttacttgaggctagtctgaatgtatgtgtgccccgaacattcatgcactgcaacgtgatccccaatattatgatgttggagagtggggcctttgggaggtaattaggtcatcatggggtctctgctctctgctcttatgaacaagattggtgcgcttgtataggagaccccagaaagacagctaacccttctaccatgtgaggacacagcaagaaggtatcatttatggaccagaaagtgggtccttaccagaccctgaatctgttggcattttgatcttggacttcycagcctctagaactgtaagaaataaatttctctggtttgtaagtgacccagtctgtggtattttgttacagcagcccaaacagactaaaacctttgaaatctgttaaacagaagatggaatgatcaatggatacagt

SEQ ID NO: 784006 - DNA, 524 bp, Homo sapiens
tgttgggggcagggtatgggtggggcatcactaatgcctgcggtaaccagggatcaccaaaatctgctttgggatggcatttctctggccccattatgtcagaaaagaaatggactcaaacagcatatagcaggaagacataaaagactacgcaccatttgcttccatttatatgaagttctagaagaagcaaactaatctataatgacagaaggcagaaggcagattcatggttgcctgggamtgagggttgggggactttcagggactttctagaataatgggaatgtcctgtaacttgactgcagtagttacacagggtgcacacttgttaacccacctcccaactgtacacttgagacctgtgctaaattactgtgtttaaaattaaaaatttaaatttaaaaattttaaaaacaactcaaataaataagtaaactgcgtaactatctagtcctttcaagctttgggaaaggacttctggactaagcctccacttgggaagctctccaaaatagttttcc

SEQ ID NO: 784007 - DNA, 608 bp, Homo sapiens
ccactcttgctaacactctctctcctgccgccatttgaaaaggtccaagctcatttcccccttgccttccagcataattgtaagtttcctgaggcctccccagccatgtggaactgtgagtcaattacacctctttcctttataaattacccagtctcaggtagtaactttatagcagtgtgaaaatsaactaataacgtactatatatttccaaattactaaaacagtaggttttaaatattcttacaaaaaataagtagattaggtgatggacagagtaattagcttgatttaattatttcataagtatacacatatcaaaacctcacactgtaccgcataaatatatacaattattacttgtcagttaaattttttaaaatagagtccgccaaggtgtaatgggccttcattccaatgagatttctcttcttggtctaaaaatagagtgacctaccagactaagagaactttcaggatatagaattttgacttttaaaaccagaagcatcccaggcaaacaaggaccagttggttccacaggccatttgctttggccagctggatcaagcgagaaaagatgactctgctgagatgaaatagctcc

SEQ ID NO: 784008 - DNA, 608 bp, Homo sapiens
ccactcttgctaacactctctctcctgccgccatttgaaaaggtccaagctcatttcccccttgccttccagcataattgtaagtttcctgaggcctccccagccatgtggaactgtgagtcaattacacctctttcctttataaattacccagtctcaggtagtaactttatagcagtgtgaaaatcaactaataaygtactatatatttccaaattactaaaacagtaggttttaaatattcttacaaaaaataagtagattaggtgatggacagagtaattagcttgatttaattatttcataagtatacacatatcaaaacctcacactgtaccgcataaatatatacaattattacttgtcagttaaattttttaaaatagagtccgccaaggtgtaatgggccttcattccaatgagatttctcttcttggtctaaaaatagagtgacctaccagactaagagaactttcaggatatagaattttgacttttaaaaccagaagcatcccaggcaaacaaggaccagttggttccacaggccatttgctttggccagctggatcaagcgagaaaagatgactctgctgagatgaaatagctcc

SEQ ID NO: 784009 - DNA, 637 bp, Homo sapiens
ggatcctaaggctgccatggctctggagagggagctccccaatgctggggcagccagcacatgggacagtgaaaccggtgcctggcccttcccctcccagcctgcaggccgattccaccggaccagccctccacacatccatgctgccagaaccatcagcamaccaggcaggcggcagggagcctatgagaggtcccacacagcctctgcatgttatttgtgagggtcttgagtcccggagagggggacaggacttgcccaaggtcacgcagctgggtggtgcataccgatgcaggtcttccagtcccactctggccttaggtaggcttttgtgctgggcctgtggaggctgagagagtccttgcaaaacagactcatctcagagagtcagagcttgtgggccccaagtccacaatggcatgaactgaccaatcagatagagtcttaggcctcaccttccctggggagggacctcattgaccacataggctgacgtagcatccatgaaaactttagctgatctttcctgcaggggacatgagcaggttcgctggggtgggccagagggtacttggggcaagtggagtttcagtctctaaacccctctatcgccctcaggcccctttcctgtcctagg

SEQ ID NO: 784010 - DNA, 620 bp, Homo sapiens
tgagacacattcatgttgttgcatgtatcagtatttctttcccttttaatggctgagtaatattccattgtatggatataccagaatttgtttattcattcaaatttaaagacattgggttgtttagaagtttgactattgtgaataacactgctatgaacatttgtctacaaatatttgtagggacaagtgctttcatttctcttcagtaaatacctaggagtagaatgsctgggtcatgaggtgggtgtatgttcaactttttaagaaattgttggtcgggcacggtggctcacgcctataatcccagcactttgggaggccaaggcaggtggatcatgaggtcaagagatcgagaccatcctggccaacatggggaaaacccgttccctaaaaatacaaaaaaaaaattagctgggcatggtggcacgagcctgtagtcccagctacttgggaggctgaggcaggagaatcacttgaacctgggaggcggaggttgcagtgagccgagattgcgccattgcactccagcctggcgacggggtgagactccgtctcaaaaaaaaaaaaaaaagaaattgccaaaatgttttcaaagtgatcatatcattttacattcc

SEQ ID NO: 784011 - DNA, 489 bp, Homo sapiens
ggtacagtgcagtgtgtacaggatcctcacatcttcgtaaaaaaagaaaacacatacatgtaaatgcttgtgtgtgcacagatcagactttcaaaccttccgtaccttgggcaggcaataactaagaaaatatataaaaatacgcacaaatagatacatgagtgctgggggtgcctcggggaccctctaccggcttgattgtgagaccccaggcaggtcccttcctctctgtgtcctgaatttcttgtgtgctctcagaggtcagaaaaccttgaagmtggtgaagtgaggcgtgtgtgcgtggagatggagtggggagggggtggggggctagtttgcgttgcctgttagaacctcctcctcctgctgcaatgaaacccactcccaaggccataggctgctccctcctgtgacattccttaagagagtttggatttcatctggcccttttccccagtccccactccttccttccagaatccctcggaa

SEQ ID NO: 784012 - DNA, 627 bp, Homo sapiens
taaaccagggtataccatgttagcacacttgatctttttgtgctttttatctgtttactactgcaaaaggccttatcttcaattcagattttaagctcacatggcttgcaggagttctaaacaaatttctgctaaaaattagtatcttcagtatttttgcaaacatcaactgatacaaataacttttcmaggtattggtatagctttcttttcaaaatagacacatttttgaagttgcaagaaaagccagtaacatcctaatattttagataaatggctcccttatattcctggcaaggggttgaggagcagagactggagtcagtaatccatgataggccaacccatgcctaacatcatatgtctgtagtgtgatcaagaaaatgtaggcaagccatttcaaagaccatcattaataaaaatgtgttctcattatttatgaccactatgaatatcttgagtgcttattgtatgccacacactgggcaaagagctttacaggtattgctcattcactcatggacttattaacctatttattgtggaacaaccgtgaaccaactactctgcccacattgaccttaaattctcctggaaggcaaataaatgaacaaatacataatatct

SEQ ID NO: 784013 - DNA, 627 bp, Homo sapiens
taaaccagggtataccatgttagcacacttgatctttttgtgctttttatctgtttactactgcaaaaggccttatcttcaattcagattttaagctcacatggcttgcaggagttctaaacaaatttctgctaaaaattagtatcttcagtatttttgcaaacatcaactgatacaaataacttttcaaggtattggtatagctttcttttcaaaatagacacatttttgaagttgcaagaaaagccagtaacatcctaatattttagataaatggctcccttatattcctggcaaggggttgaggagcagagactggagtcartaatccatgataggccaacccatgcctaacatcatatgtctgtagtgtgatcaagaaaatgtaggcaagccatttcaaagaccatcattaataaaaatgtgttctcattatttatgaccactatgaatatcttgagtgcttattgtatgccacacactgggcaaagagctttacaggtattgctcattcactcatggacttattaacctatttattgtggaacaaccgtgaaccaactactctgcccacattgaccttaaattctcctggaaggcaaataaatgaacaaatacataatatct

SEQ ID NO: 784014 - DNA, 615 bp, Homo sapiens
tatgttctttttttcttgatcagtttagctagaagtttatgaattttattaaattttttttttttttttgagatggagtcttgctctgtcacccaggctagagggcagtggcgcgatcttggctcattgcaagcttggcgtcccagattcatgccattctcctgcctcagcctcccgagtagctgggactacaggytcccgccaccacgcccggctaatttttcttgtatttttagtacagatggggtttcaccgtgttagccaggatgatctcgatctcctgacctcgtgatccacctcccagagtgctgggattacatattaatgttttcaaagaaccaacttttagttgcatccattttatcttgtattttgatctctgttttattgattttcattctgatctttattatttcctttattctactttcagtttcatttactctttttctagtttcttaaggttattcatttgagaaccttcttttttcctagtacaggtgtttagtactaaaatttctctgtaactactgctttagttacatctacaaattttaatgttattttttcatttagttagaaacactttctaatttacctttgttattttctctg

SEQ ID NO: 784015 - DNA, 615 bp, Homo sapiens
tatgttctttttttcttgatcagtttagctagaagtttatgaattttattaaattttttttttttttttgagatggagtcttgctctgtcacccaggctagagggcagtggcgcgatcttggctcattgcaagcttggcgtcccagattcatgccattctcctgcctcagcctcccgagtagctgggactacaggttcccgccaccacgcccggctaatttttyttgtatttttagtacagatggggtttcaccgtgttagccaggatgatctcgatctcctgacctcgtgatccacctcccagagtgctgggattacatattaatgttttcaaagaaccaacttttagttgcatccattttatcttgtattttgatctctgttttattgattttcattctgatctttattatttcctttattctactttcagtttcatttactctttttctagtttcttaaggttattcatttgagaaccttcttttttcctagtacaggtgtttagtactaaaatttctctgtaactactgctttagttacatctacaaattttaatgttattttttcatttagttagaaacactttctaatttacctttgttattttctctg

SEQ ID NO: 784016 - DNA, 520 bp, Homo sapiens
tcatagatgggcatttgggttggttccacatttttgctattgcaaattgtgctgctataaatgtgcaagtatcttttttgtataatgacttattttcctctgggtaggtaactagtaatgagattgctacttttagttctttaaggaattgccacagtgaaacacaatttcttttaaaaccaacttttccttttcttattttaccatatattatataatatttaccaacaatacatgtatctagaactctttaagctgtagttcatgctaatktggaatagccttcaaaatgacatcatgtagtattttaaaaatttctccttacatggtatttgaaatgcagttctatgagcgacatgaaggtgagaaaggtttgcatttagaataaaaggacaagtaaaaccttcagcaactctaaaataagaatctattcaagagagttagaatgaacactgctaaatttctctaatgaagtaattatttcaagctgggtttcttaaggaatatttagtaattaagt

SEQ ID NO: 784017 - DNA, 520 bp, Homo sapiens
tcatagatgggcatttgggttggttccacatttttgctattgcaaattgtgctgctataaatgtgcaagtatcttttttgtataatgacttattttcctctgggtaggtaactagtaatgagattgctacttttagttctttaaggaattgccacagtgaaacacaatttcttttaaaaccaacttttccttttcttattttaccatatattatataatatttaccaacaatacatgtatctagaactctttaagctgtagttcatgctaatttggaatagccttcaaaatgacatcatgtagtattttaaaaatttctccttacatggtatttgaaatgcagttctatgagcgacatgaaggtgaraaaggtttgcatttagaataaaaggacaagtaaaaccttcagcaactctaaaataagaatctattcaagagagttagaatgaacactgctaaatttctctaatgaagtaattatttcaagctgggtttcttaaggaatatttagtaattaagt

SEQ ID NO: 784018 - DNA, 715 bp, Homo sapiens
ccccatattgttgaatgcacaaaccaagtgtgttggtccatttgtgttgctgtaaagaaatatctaaggctgggtaaattataaagaaaagaagtttatttctcttatagttagttaggctatacataaagcacactgccagcatgtgcttctggtgaggactttaggaagcttacaattatggtggaaggcagaagagagcctgcatgtcacatgaagagagagcaagaaaacacaaaagtatgtgtataagactattttttgttaarcaaaacctgtatgcatatacattgtagatgtttctgtgtcagcaaattgttacatgaacacaaaagaaaaaatgaaaaataaaactagggattctgatttgcatggaaggaaacacaaaaattattaaaaagagtaagtaaaatctttagcagtggaataaaaatgtcaagaaatacaaaatttacaactgtaattcattattttgggggatcaagtttctttatcacagaaattctttcaacttttaaagctgtaaaagctcccgttttgacttattgatgctcaagccactgagagctatcataagatcatcttgacttgagattctcaatgaacacagtgaaaaaattagatatgtaaagtaaatgaagaaagtgaggaatgtgaagtcaaaataacatgatataaccaaaaagatagaggactgatatcttcatgtgagtaa

SEQ ID NO: 784019 - DNA, 621 bp, Homo sapiens
gacttactttggcagttacataaattcctgcaattatactagacagacaaatatttgtacagttaacaaaaacaaatactttttttaaataaagaggcaccaactagtgaaattgaaaagcaaagtaaaatgtaggctgagtttcagaactggatcttcaaaaatgggaactcagttagggcccagttagaaacagtatcaaaagtcttcatattcaatcagaacctaaactctacccataactgccacttgtaaaaccatgtgcctctttcttttggctatttagtccaattccattatactcactataggtgtttgaagaaagaatgggaaagcccaaactaatcagtttttatagtgttgtaaatctgtgcaatggccaaaagctattgctctgctgttttstgcagcagcacagaccacttttcctctgggcagtcactgcttgaaataattactgacattaatgatgcaagctcctgaatttaatagatctaggtttatgttgtcatccatcactgtgcaacatcttctatcttctctgctattaccaaaagtttctttaagtgttttaagatattttatttgacccagcgatgcattttaactacaagaaaccac

SEQ ID NO: 784020 - DNA, 406 bp, Homo sapiens
aaagcagatggctgagtgtaacagacctggcagattgtagaaaaccatatcgtaagttagcagtagggaaagcagagaagcaactggatttacatctcatctcagaacttcccaaagctgagggactggtggtatcagttgcccctagagtggagcttttagtgggcatacataacagaacatagagccactgtcatgtccacaggtgattcatatgttgagaaaattaaataaatgaatgttttaaagggagaactgggatacrggcctaggaatatgactcaccatgctgtgttttattcattatgtgtttagatatagtgtgtgtgcatatatgaatgtaggtgaaagagagaggctcttaacgtattatgtgctaataaaaaagaatcatgacatatctcaa

SEQ ID NO: 784021 - DNA, 621 bp, Homo sapiens
  misc_feature 147, 158, 159, 160: n = A,T,C or G
agtcaacattcatacccagatctgtgtaagtctagaacagcaagttggtaaattaaaaactattttacattttcaaagagttgttaaaaaaatgggacagagaccatctgtagcctgcaatgcctgtaatacttactgtctgaaccnttagagaacannnttgctgactgccactctagtgcagttttttcttctgtaatatcagactaggctgcctcctgaaaaccagatgcctattttaattgataaaatcattcatgttttcatttatttgacagatatttattgagtacttgatatttgtgaggcgtgtgtcaaagtttgttcaggctgctctaacaagataccttagactaggtaatttacaaacaacggaaatttattgctcacagttctggagcccagtaagtctaagatcaaggcagcagcagatttggtgtygggagagggttcattctctacttcatagatggtatcttcttgctgcaccctaacatagtaaaggacaaacaaacttctttgtcctctttcataaaggtactagccccatgaccgaatcacctcccaaaggccccacctcttaaaactattgccttgggaattaggtttcaacatacaatt

SEQ ID NO: 784022 - DNA, 496 bp, Homo sapiens
gataatgatgcttgtatttattgtcatgaaagaaatccatgccataatgattaaatgtaaggtaggggcttgtttcaataatatatatggttgtatgttcattaaatatatgaaaaagtatttatcagggtatttctatgtggaaaattatgggtgcttttattttcttattgtgctttttaatgttttatttgtagtgtcatgcattaacaggcactttttatgaccattaaaagacagaaagtctacttctatttttgaaaagtgatattgasaatttaattgtaattagtttcaaggaaagcgtatgagtaacaatactctgttacaaagtcaaaacattccgtagaaaatagctatgagtcttaaaggaaagacttctctagtcatatcataaatgatgtctgtttcccttttgagcaaagagacacaacttaataaaattaataggggaaactcaaatgtatagaaaatagaatatgagtaagaaaggcat

SEQ ID NO: 784023 - DNA, 585 bp, Homo sapiens
atggagtcaggtggattccatttttttggctattaggaataatgctgcagtgaacatgaaagtacaaataactctgacatactgatttcatttcctttggatatatacatgattatatccaccagtgggattgctggattgtatggtagttctatttgtaattgttttgagaaacttctatattgttttccataatggttgtactaatttttattcccaccaacagtgtgcaaggtgggtcattcacatcctggccaacacttatcttttgtctttttgataatagacactaatgggattttctcatacacatttaccaaacttcagtttgctgcagaacacaattaccagatatttcagtgrgggcaagggttgttgtaattacaatttcacttgccttttgtgaatgtccctgtgataccaaggcatgggaatgacatgtgtagaggcagaacaatatcactccataaagatatcatctctcattgtgattttaatttgcattttcctgataattagtgatgttgagcatttttttcacataccagttggatatttgtatgtcttattttaagagatgtttat

SEQ ID NO: 784024 - DNA, 656 bp, Homo sapiens
aagccatttctatacactattttactagctagtgttactggaaagaatatcattaacctaacatcaaggtataatctcccttggaatgctattaaactgtgtatattgcctaatctttaaggttttgatttactattattgctacttgaaaacatctaatttacatacataaaacttgtttrtgttatataactttgtgttattgcagactgaaaccacgtgcttgagatgccaacacttccttcctcctgaagtggcttaaaacctggtgttctaaactgtagtgagtgtagggtatgaggtttgggatttacagtgtatgggaatcaggctctttctcctcttcatagaggctgacccactcctcctcattgccaatggctccaacctgtgaaaaaggagatcctaaggttggctggataagccatggggactggagctgccatatacactatgttcacctgcttggtatgtagtaggctgggcagagccacaccacaacgccgacacctggggataagttgagtcctgaaaaaacacacacatgtgtacacacacacacaccctctcataccttggaagtacaggctcttgctattcctaccattgaggctgggtgagttttagacaaaagctcatggtcaagaactgggccc

SEQ ID NO: 784025 - DNA, 632 bp, Homo sapiens
cttgctcatgatattttgttttattgtgtactcagttgtcttagaaggatatgcccattttacaaaaagaatatttacaggactctttaaggactagatgaggttgccctcctcaagatgatttggctttgcttctaggtacactaagagtctgagaattcttcaattcaagttcatagtttgaggacactgaaaacactaatctcaggatgtgaatgcaaaacttcagggactgttttctacctttctttgtctcctaagctcatatatgccctaagcgtgtaactctttaatgacccagcttaatratgggagggtctttactacatttcccaccttgatgggttcaagaccttgattcttcaaggccacaaatatgaagcccaaatctacttagatcgttcaatgcctttgggacaaaagtgggtttatttctacgtgcctgctcacatatctggacacctgcttcccctacaattttgtcccagttgctcctcattggctaatctaatcttcaatacttttagagacatttaaaaaaaatacatgttctgtactattaatggcttttacaaaaggatgtgctcaataactagccaatattaaagtaacttgttaaaacatggtgtctt

SEQ ID NO: 784026 - DNA, 607 bp, Homo sapiens
ggtatggagcttccatgccctccctgggcttgccaccctctaggaacctccacatgttcatctatctggaggctccctgaaccccatccttttggggttttatggaggcttcattacatagtcacaattgacaaccgtgtagaaatgtgactggacaaataacacataatctaaacccaatgaggcttgtctcttcagacttttcttggcctctttgtgtagcattctttcttctagggtaggagcagggaccttcttyggaatgagaactttttttttttcttttttttgagacagagtctttctttgttgccaggctggagtgcagtggcacgatcttggctcactgcaacctctgcctcctggattcaagcgattctcctggattcaagcgattctcttgcctcagcctcccgagtagccgagactacaggcacacacacaccaccacacccaggtaattttcgtattttttagtagacatggggtttcaccatgttagccaggatggtctcgatctcttgacctcaagtgatccgcccgccttggcctcccaaaatgctgggattacaggtgtgagccaccatgccctgatggaatgagaata

SEQ ID NO: 784027 - DNA, 622 bp, Homo sapiens
cttgagagaaattattatgtcttgagggcaagaaagggaactaattaagtttgcattttaaaaattgttaagaatagatgtaggatgggatagagggtaccttagagatgcaaggattgtggaggaatactttcatatgttttatgatgaattgaaagaagataatattctacttcctgtgcaagtcatatatatgtttgacacattctaaagcagacctaacttagggatcatttagatttgagtggtaagagatagaaagtaatgaggataattctcatgtttctcacttacctaagttttattctatttaaacaaagtagaaattagtcatagcaggaacactctgagtgttcataattttttaaatgagtgaactcagcagctttgataatataattagacatawgtaacaatacccatctacctgggttggctttataaaatgtagatatcaatacttggaaaacaagttatcctttcatgtttattcattaacaatagtatgtccttcatcttaagtagtcatacatcttgctctttcttgattggaaccttaaagctaaaaatgacatatggacctctttgtatccatataattaacaacaaacagatataattg

SEQ ID NO: 784028 - DNA, 622 bp, Homo sapiens
cttgagagaaattattatgtcttgagggcaagaaagggaactaattaagtttgcattttaaaaattgttaagaatagatgtaggatgggatagagggtaccttagagatgcaaggattgtggaggaatactttcatatgttttatgatgaattgaaagaagataatattctacttcctgtgcaagtcatatatatgtttgacacattctaaagcagacctaacttagggatcatttagatttgagtggtaagagatagaaagtaatgaggataattctcatgtttctcacttacctaagttttattctatttaaacaaagtagaaattagtcatagcaggaacactctgagtgttcataattttttaaatgagtgaactcagcagctttgataatataattagacatatgtaacaatacccatctacctgggttggctttataaaatgtagatatcaatacttggaaaacaagttatcctttcrtgtttattcattaacaatagtatgtccttcatcttaagtagtcatacatcttgctctttcttgattggaaccttaaagctaaaaatgacatatggacctctttgtatccatataattaacaacaaacagatataattg

SEQ ID NO: 784029 - DNA, 528 bp, Homo sapiens
aatcagcagcccagcagcctttaacgggcttgagggacaagtgtgattatttttacaaggatatttcatgaattaaatgaaaagaatcatattattcctgagcaccaatctccatgagaaagagcaaaactagaacaggtgagttattccctctccagagcaaattttattttaaataaaagcagtkccccataatttaagtaggcaattcaattcaactttgattccttagaagaaactgaagattaactaatgtactattgtattagtatcggtaaacttcttaaggaaaaacgctattgaatgtgtcaatattagattaccttcattacattgttaaactcataaccctgctacaaaagaatctcagctggacaggatgttacaatttgttgcattgttgtcatcaaataaaaaccttccttgagcttccatgtgttggtgatgatagcagctactctgatttcagccatctaaatatggtctgaaattttcagacctcttgactgtccaatgtatgtgtcactt

SEQ ID NO: 784030 - DNA, 528 bp, Homo sapiens
aatcagcagcccagcagcctttaacgggcttgagggacaagtgtgattatttttacaaggatatttcatgaattaaatgaaaagaatcatattattcctgagcaccaatctccatgagaaagagcaaaactagaacaggtgagttattccctctccagagcaaattttattttaaataaaagcagtgccccataatttaagtaggcaattcarttcaactttgattccttagaagaaactgaagattaactaatgtactattgtattagtatcggtaaacttcttaaggaaaaacgctattgaatgtgtcaatattagattaccttcattacattgttaaactcataaccctgctacaaaagaatctcagctggacaggatgttacaatttgttgcattgttgtcatcaaataaaaaccttccttgagcttccatgtgttggtgatgatagcagctactctgatttcagccatctaaatatggtctgaaattttcagacctcttgactgtccaatgtatgtgtcactt

SEQ ID NO: 784031 - DNA, 528 bp, Homo sapiens
aatcagcagcccagcagcctttaacgggcttgagggacaagtgtgattatttttacaaggatatttcatgaattaaatgaaaagaatcatattattcctgagcaccaatctccatgagaaagagcaaaactagaacaggtgagttattccctctccagagcaaattttattttaaataaaagcagtgccccataatttaagtaggcaattcaattcaactttgattccttagaagaaactgaagattaactaatgtactattgtattagtatcggtaaacttyttaaggaaaaacgctattgaatgtgtcaatattagattaccttcattacattgttaaactcataaccctgctacaaaagaatctcagctggacaggatgttacaatttgttgcattgttgtcatcaaataaaaaccttccttgagcttccatgtgttggtgatgatagcagctactctgatttcagccatctaaatatggtctgaaattttcagacctcttgactgtccaatgtatgtgtcactt

SEQ ID NO: 784032 - DNA, 528 bp, Homo sapiens
aatcagcagcccagcagcctttaacgggcttgagggacaagtgtgattatttttacaaggatatttcatgaattaaatgaaaagaatcatattattcctgagcaccaatctccatgagaaagagcaaaactagaacaggtgagttattccctctccagagcaaattttattttaaataaaagcagtgccccataatttaagtaggcaattcaattcaactttgattccttagaagaaactgaagattaactaatgtactattgtattagtatcggtaaacttcttaaggaaaaacgmtattgaatgtgtcaatattagattaccttcattacattgttaaactcataaccctgctacaaaagaatctcagctggacaggatgttacaatttgttgcattgttgtcatcaaataaaaaccttccttgagcttccatgtgttggtgatgatagcagctactctgatttcagccatctaaatatggtctgaaattttcagacctcttgactgtccaatgtatgtgtcactt

SEQ ID NO: 784033 - DNA, 592 bp, Homo sapiens
ccttctgaggaattatgttcctcaaaatatattttatgtatttccattaaaatattaaattgttacattcaaaatttaacagatcatgcctgatgaaattcagtgattaaaatgttaacatattagttaaaagtgaatataaaagtatttcactttcttcaaataatcaatgtgaataaaactgtgatatcatatcagaatgatagattattctttatctcaatataaaaaatgtattatgacataatttttgaaatccctttttgtccactttctggaataacaaaggtctgtatacaaaaaggttgaagaaaagatggcttaagtaaagccatcttttggcttatttccaactaaaaatatttttgttggaaaaatattttcatatacattcacatacctttatgctttagtgtacactgcttaatattgtcwaatatcaaataaggggagcatttgctctgggtatcagcacaatgctaacacccaaaacagggattatttcatattctgtcatgggcaaggtatcatcccaatacatttggagacaataattacatagcatctctcttttagcacagtgtttcaaaaa

SEQ ID NO: 784034 - DNA, 578 bp, Homo sapiens
agaggcgggcggatcacttgagaccaggagcttgagaccagcctggccaacgtggtaaaacctcgtctctactaaaaatacaaaaattagctgggcgcggtggcacatgtttgtaatcccagctactcaggtggctgaggcacgagaattgcttgaacccgggacgttggggttgcagtgaaccaagatcgcaccactgcacttcagcctgggtgacagagcgrgacgcctgtctcaaaacaaaaaaataaaacacaacacttttttttttgttttaaatctaagagaaacctaagctaacacaaagctccggaccacgtttttaggcacaggagctgaaacacgtgctttggcgcctgagggcctggcttcctgactggaacactcgatgcgtctctctgggcatcagtttgcctgcagtaaaacaggggttttatgtaccacaaagggatatgagggctacatgcgaatgatacaaacctctctgcacaatgcctggcacatggcaagtgattaacaaaacagtaaaacatttaaaagagagttgttattattattctttttagctttcctgtgac

SEQ ID NO: 784035 - DNA, 630 bp, Homo sapiens
acacaaaggtggctaaatcacctgtctaaaaaaatcagtacatgcttcacctaatctatgaatcgaatcactgttctccccaatccagggttttccctgtagtactactgtgttcaagaaatctttatataacagaggttgatctgacacaaagaattgttttcctggtctagaaaagtaggctgatactgttgtctccatttaatagatagaacaaaaagaatttatctaattttcccaagtcctttagtgatttaatgacagaaccagatttgagttcagagactcctgctttctaatttgcctcaaacaccgcacaaagggattatttcctcctcactttaattttttcctaggattttcttggaatcagttctgagttgattttggaataataaagtattatgctaagtacacagagtagatactactggagtctcagtaaattccttaatagactcaaagcatttgatttccttgaggcttttttttttaatttaaaaaccaatttggctcaaactgagaatgctcaacatttttaagtagcagtgacttctaaatgctctcctgatrtatagatagatggatggatgtattttagcacaatgtaactctgcttaggaaaaagcc

SEQ ID NO: 784036 - DNA, 585 bp, Homo sapiens
tgtacccggccaataaattaatatattaatggattaatctattcatgatggcagagcctgcacgacccaatcacctcttaaaggcccattctctcaatactgccactttgggattcagtttcaacaggagcaatgaagggagacaaatattcaaaccaccgcagatgtgtattaagcaygcacattgttacgacatcatacacatgctgtacatacactaatatcacttacatacactgcgtttccttacaacagcctcttcagagattatccacccgatctaaagcagctactcttgaggggcctcctgtttggtgtctgttctttttgtttggtgtgtgtttttatacaaaaaaaattctttttagagataggatcttgctatgttgcccagcttggccttgaactcctgggacaggcagagtcctcctgccttggcttcctgagtggctgggactacaggggtgcaccactgcacccagcttggaccttaatttatacggacaactccacgcctacatctacagatagtctctgcgcttacacatcctgctccgttccgaacccagccagctccacacatgt

SEQ ID NO: 784037 - DNA, 585 bp, Homo sapiens
tgtacccggccaataaattaatatattaatggattaatctattcatgatggcagagcctgcacgacccaatcacctcttaaaggcccattctctcaatactgccactttgggattcagtttcaacaggagcaatgaagggagacaaatattcaaaccaccgcagatgtgtattaagcatrcacattgttacgacatcatacacatgctgtacatacactaatatcacttacatacactgcgtttccttacaacagcctcttcagagattatccacccgatctaaagcagctactcttgaggggcctcctgtttggtgtctgttctttttgtttggtgtgtgtttttatacaaaaaaaattctttttagagataggatcttgctatgttgcccagcttggccttgaactcctgggacaggcagagtcctcctgccttggcttcctgagtggctgggactacaggggtgcaccactgcacccagcttggaccttaatttatacggacaactccacgcctacatctacagatagtctctgcgcttacacatcctgctccgttccgaacccagccagctccacacatgt

SEQ ID NO: 784038 - DNA, 585 bp, Homo sapiens
tgtacccggccaataaattaatatattaatggattaatctattcatgatggcagagcctgcacgacccaatcacctcttaaaggcccattctctcaatactgccactttgggattcagtttcaacaggagcaatgaagggagacaaatattcaaaccaccgcagatgtgtattaagcatgcacattgttacgacatcatacacatgctgtacatacactaatmtcacttacatacactgcgtttccttacaacagcctcttcagagattatccacccgatctaaagcagctactcttgaggggcctcctgtttggtgtctgttctttttgtttggtgtgtgtttttatacaaaaaaaattctttttagagataggatcttgctatgttgcccagcttggccttgaactcctgggacaggcagagtcctcctgccttggcttcctgagtggctgggactacaggggtgcaccactgcacccagcttggaccttaatttatacggacaactccacgcctacatctacagatagtctctgcgcttacacatcctgctccgttccgaacccagccagctccacacatgt

SEQ ID NO: 784039 - DNA, 566 bp, Homo sapiens
atttacatttttttgtgtgaggccccatgtcacctgcatgactaggtgatgccgccagcacctggagggagcagatgctaccagcagagaagggcctggggcttctcttgggcagccagtgcttgggcctatgcccttcaaaggcttgactttgcctctccagagcttctgatgtgctccttacatatgcgcttgctcaaaaaactgctcaatcccccaaaggacttctctccacgtgtgcactgtccctgagggcttagaggctgcgagcggccacaaccctgcctgcaccccagctatgcttccaggccatcagtggccactgcacttgatggtgtgatcttcggactgcgtctacctgctcccgcactcagctgggratatgggaaatagtggcattgggctcgcgggctgccctgagacaacccaggtttctccaaaggattaccctgtgtgttagcttcctaatgctgcagtcaaaaattacccccaaacaggtggctttgaacaacacaagtttattctcttacagttatggaggccagaagtcaaaaatcagtttcact

SEQ ID NO: 784040 - DNA, 578 bp, Homo sapiens
ttttaatcaactacattctggacctttattctcaaagtttctaatggcaaacgaataaacagagaaaccaaccatatctgccctccttgcaattttttcttcttttggattctgattttcccctattgttgcacctcctttccttctctgtttaaccaaggctggggaccttaggccatcagacctgggttcaagtcccagcttggccatgtattagttctgtgaccatggataccctggtttcaggtactttctatgmaaatgggatataataatgacacctcatagggaggtgaggtctgaggtatgcaaaatcctgagcacagtgcctagtacacagtaggccctcactaattgttagctattaacataattattctttctttgtggtctctcctttggccaccttgaaaagcatctgagatagcaaatgtgcacatgttctgtgagcagcagagtgtcatgcatttactaattctcaatcgagcctccagctctcccctgcaagcgtgtaaccgctgcatgctcaggctctgactactatcttgagttgtagaactacagctgaaccaatctct

SEQ ID NO: 784041 - DNA, 500 bp, Homo sapiens
gggaggttgcagtgagccgagatcgcagcagtgcactccagcctggatgacagagtgagattccctctcaaaaaattaaaataaatatagatatgtatcaaaaataaaatacatttaacataccacttagcaatctcatgtctagatatttacccaagagaaataaaaacatatgtccacacaaagaccctcatgtgactgttgatagcatttgatagcattattaaaaatarccaaacgataggaaccactggaatacctaacagctactaacagcgtaaacaatcgtgatacattcaaacaatgcattatcacccagcaatcaaaaggaacaaagagcaaataaacaacatgaatgaatctgaaagcgttatgctaaatgaaaagagccagatttgctgggtgcagtgcctcacacctgtaatcccagcactgtgggaggccgagccaggaggatcgcttgagaccaggagtttgactccagcctgggcaacatagtg

SEQ ID NO: 784042 - DNA, 579 bp, Homo sapiens
gcagatcaggtaggatcggggctgaaccaacctgtctcagtttatccattatgagaggtttggattcactctctccgggtataaatgacctcaggcagtgggtccaggggcctccgcctccctaggaggtacctcccgtgtccacgggggcaggatgtggggacaggccatggctgctgttggcagggagtggtcattgccggggagccgccgggggcagcctcactcttgaaccctggccaggacacagtctgggcagcctggtcccacacgccttccttctgcctcctgccccacatttcctgctgtgttgccttttttctcaccagcctttctgcaggttcaggcccctgggcctcaaatgtcttcctcttccccaccctgcctttctctgtctyttcgcttttcaaagcccagctcaagggcatgcccctgccgaaacccatcctgctctccctggctcagtgactctgcttgggaggggcagccgagactgaggactctgacaaggaagagcccaactgggccctgcagccttgggcaggtccttcagtttctgcattctgaaatgcggaccat

SEQ ID NO: 784043 - DNA, 559 bp, Homo sapiens
aaaccccgtctctactgaaaatacaagaattagctgggcgtgcaggcgcatgcctgtaatcccagctactcgggaggctgaggcgggagaatcacttgaactcgggaggcggaggttgtggtgagtcaagatcacgccattgcactccagcctgggcaacaagagcgaaactccatctcaaaaaaaaaaaaaaaaaaaattcctagactcaggagttccatcaaaaaagcccaaaattttctgcccttagcacaaacacgtcaaaagcctgaattcaatttttccccttcccaccttccggtctttttttttttttttttttttttttttaggtgtagagagctctgagmactgcctaccctgtactccactcaggatgccccccacagggtgggtgtttccatgttagtgcctttccccttttcaaataggggaatgagacaagactcactgctggactttccatttttcctaacactgccccccttaaccttgctaagacccaggtcaaaggtttaaagttatttctttcaatggcacttcacctctatgatcttcc

SEQ ID NO: 784044 - DNA, 643 bp, Homo sapiens
ctgagaatgaaagtgtgggagggggctggagtactgatacatcctgaggcaggatagtgcagatggactgctggcctttccagctgaaaacaaactgcttcgggtggtctttattagcagggacagaggaaaaaataacatttgccggatcaatggctgtataccaggtaccaggagatgtgttgatttgctcaagcaatgaaaccacatctggcacagaagcctgtgattgtagttaccacccagttaagcctatgcttaattgtcattctccaagatccatctctctcctgcacaggccaacaggagagatgaatgggaatgcaatgggaattgccacctctgcatccttcaaatctttgatggcagcagtaatctctgccattcctccagtaatgtggtattgctttckgtttactactggtggggggtggttagagaaggcactagtggcttccacatggtctttctcatcataatagccctcactatgtaggttagggaaccaatgtggggattctgccatgtgctgaacatgtcttcaattatgcattccagaactggggaaatagccatagcatgggctctggggccattggacccactgtgagatggacctgagctaaaactccactgatctcct

SEQ ID NO: 784045 - DNA, 478 bp, Homo sapiens
atctgtagctccttcccagggagatcctgggtctctcaccgccttctgacctccctgtggctgcaggagctactgcttctcggtcagatggtatccccttcccccaagcagtatctcaggataaaaataaaccatcctgttctcttttcctgctgagccaactgagggggagcctagccaggaggagcggcagatggagtgggagcagaggggaggggaggggaggaaggttggaggacaaggaggagaaggaagagcaatgcaaagtgccatgcagaaccccggcacaaargttcgaggtgaggtttaacccaggggtctcagcctttcccaggaaagaacctgctttggatttccccaacacatcctgctggctggagggtgtggggcgatggggggcaaggggagatgtggagagggcttatcccagtggaggctgtgagggcagctgcgagccaagagaggggcacctggcttg

SEQ ID NO: 784046 - DNA, 478 bp, Homo sapiens
atctgtagctccttcccagggagatcctgggtctctcaccgccttctgacctccctgtggctgcaggagctactgcttctcggtcagatggtatccccttcccccaagcagtatctcaggataaaaataaaccatcctgttctcttttcctgctgagccaactgagggggagcctagccaggaggagcggcagatggagtgggagcagaggggaggggaggggaggaaggttggaggacaaggaggagaaggaagagcaatgcaaagtgccatgcagaaccccggcacaaaggttcraggtgaggtttaacccaggggtctcagcctttcccaggaaagaacctgctttggatttccccaacacatcctgctggctggagggtgtggggcgatggggggcaaggggagatgtggagagggcttatcccagtggaggctgtgagggcagctgcgagccaagagaggggcacctggcttg

SEQ ID NO: 784047 - DNA, 608 bp, Homo sapiens
catactacctgtatgctttctgaatgttaatcatcttatggtagccatgttgtggtagatttcacctcaacagtaatctcatagagaggagggtctcttctgtcctaggcaaccgcatctaaataatgaaatgccaagttgagaatctcacaagtcattgcagtgctgttctaatccttccaatcctgtcatttttctttgcaatgagaacatatctgatcaagtaaacgttactactcaaggctttcagaaaatattgaacatgaaatttgagtttttcaaagcagccaaaccttctttaactgtttgaaaattttgcatatttactaatgaccaattctgcagcgatctatgctggacagcctgggagaggattgagctgatgtatttctccattaccttcttctcaagatgcttaaaaatatgccaggtatgyagcttgttgacaaagcccccttttacacagactgtatttcaattcctggaaagggagcaatgacactttggctagaaggagaggatttcacttggagaaagattatttcttttcttctttgactgttgccttactgaacctttctcagagcaagaaacaaatacataaaggt

SEQ ID NO: 784048 - DNA, 638 bp, Homo sapiens
caagtccatatgcttataatacatttgcatggctcccacacatatttcacataacaatatactcttttttagtaatttccaaaagaaattcatcctaacgattttctagttttctaatatgcttcaatatgactcagcatttagtgatcagaaataatttacatatatttttaaatgttatatttataaatatgctrttaatagtcatccgtagaggctgaggtgagaggactgcttgaggccaggagttccagaccagcccgggcaacatagtcagacccagagtcagtctctacaaaatttttttaaattagctgggcagtgggcatgtggtggggcaggggtgtgatgtggtcctagctactcaggaggctgaggctggaggatcacttgagcccaggagttcaaggttgctagccatgatcataccactgcactccagcctagatgacagagtgagaccctgtctcaaaaaaaaaaaaaaaaagtcatcaacaaaattcataaaagggttaaataattcaatagctctaggaataccacacacatctgtgtctcatcctccaagataagcagcctgcaggatgagagtctattccaggatgtgcctccaagtgcagtgatttcctttcagcatc

SEQ ID NO: 784049 - DNA, 501 bp, Homo sapiens
attcttaaatctctgttcatttaaatttcaggagttattccacagtgggtaaagcaaggctgagaaaataaaagagctgcaagatttctttttctttctttatctctcttttttcttttttcttttttttttttttgagacagagtcttgctccgtcacccaggctggagtgcagtggcacaatcttggctcactgcaagctctgcctcccgggttcatgccattctcctgcctcagcctcctgagwagctgggactacaggcacctgccaccatgcccagctaattttttttttttgtatttttagtcagagacggggtttcgctgtgttagctgggatggtctcaatctcctgaccttgcgatctgcctgcctcggcctcccaaagtgctgggattacaggcgtgagcaacagagccaggcctctctttttcttctaattgaatagataggtcttgctatgtttccaaggctggtctcgaactcctagcctcaagggat

SEQ ID NO: 784050 - DNA, 456 bp, Homo sapiens
ttggatgctagtaaaagacaccccaggccagttgcggtggctcacacctgtaatcccagcactttgggaggccgaggagggcggatcgtgaggtcaggagatcctggctaacacggtgaaaccctgtctctattaaaaatacaaaaaattagccgggcgtggtggcgggcgcctgtagtcccagcwattagggaggctgaggcaggagaatggcatgaacccaggaggcagagcttgcagtgagccgagattgcaccaccacactccagcctgggcgacagagcgagactccatctcaaaaaaaaaaaaaaagacattccaaacatatgggaggtcatgttctgctgtgtgaaagaagtcaggaggcaagcggttgggggtttgtatggcatctttgtgggcctcaggacccaggatcctgtctctttctgccctgtcacctttatctctggcccc

SEQ ID NO: 784051 - DNA, 388 bp, Homo sapiens
cagcagattaaagtaagtggtttaaaacacactgtttgagaccattactcaaagtggagaaaaggaagctgagactcagagaggttaagtaacttatccaggattgcacagtattggagtccagactcaaatccaggtctgctgactcctcagcccaacactggtgcagctcttccaccaaaggggttccttaagggtctmcggtgattccgggcatagggcccatgtccatctgtttgttcaatttagcatactttgtttccactgtgatgctgtgaggtcttgctaaggacagccaggggataatgactttctgataagcccaaacattctctaaatcagttttgatttatttttaaggactaaagccaagaaaactgaataagcc

SEQ ID NO: 784052 - DNA, 388 bp, Homo sapiens
cagcagattaaagtaagtggtttaaaacacactgtttgagaccattactcaaagtggagaaaaggaagctgagactcagagaggttaagtaacttatccaggattgcacagtattggagtccagactcaaatccaggtctgctgactcctcagcccaacactggtgcagctcttccaccaaaggggttccttaagggtctcmggtgattccgggcatagggcccatgtccatctgtttgttcaatttagcatactttgtttccactgtgatgctgtgaggtcttgctaaggacagccaggggataatgactttctgataagcccaaacattctctaaatcagttttgatttatttttaaggactaaagccaagaaaactgaataagcc

SEQ ID NO: 784053 - DNA, 644 bp, Homo sapiens
ccaaaagtttgctaaacgatgttctcattcttttcgtctaactatcccatgtctgctggtttaagttctttctaactcaaaggttttgttttcctttccattaattaaatattttccctctaaccttttcttattgtttcctatttttattatatggtggttagagaatttaacatataacttttatttggggaaactgttgattttttttctttttggctatcatgtaaacaatttgtattaatatatcaagagttcttgaaaagaagcttcttytctagaatatagtctccactctgggttgtgcatcacagagggaacacaggattatccaatagagtataaggaaaacattaaaacttgcattcaatatttattttcatcatgtcccttctctatttttgtatatgtttcatgtatcttatattagtattatagaagattaatattattaataatatgcactattgggagcatatacttgaaaaggttttaaacagagaagtgcatagtgaaagtgatagagactatcagtctaaaaagcacagaagtcaatattttaattcagtggtatgtctaaataattaacaaatatatttatatttaaactctatgctcaaaatgttctacatattgggattcac

SEQ ID NO: 784054 - DNA, 644 bp, Homo sapiens
ccaaaagtttgctaaacgatgttctcattcttttcgtctaactatcccatgtctgctggtttaagttctttctaactcaaaggttttgttttcctttccattaattaaatattttccctctaaccttttcttattgtttcctatttttattatatggtggttagagaatttaacatataacttttatttggggaaactgttgattttttttctttttggctatcatgtaaacaatttgtattaatatatcaagagttcttgaaaagaagcttcttctctagaatatagtctccactctgggttgtgcatcacagagggaacacaggattatccaatagagtataaggaaaacattaaaacttgcattcaatatttattttcatcatgtcccttctctatttttgtatatgtttcatgtatcttatattagtattatagaagattaatattattaataatatgcactattgggagcatatacttgaaaaggttttaaacagagaagtrcatagtgaaagtgatagagactatcagtctaaaaagcacagaagtcaatattttaattcagtggtatgtctaaataattaacaaatatatttatatttaaactctatgctcaaaatgttctacatattgggattcac

SEQ ID NO: 784055 - DNA, 559 bp, Homo sapiens
tcacagatgtgtgctgggccagacacagtggctcacacctgtaatttcagcactttgagaggtcaaggtggacagatcacctgagtccaggagtttgagaccaacctgggtaacacagtgaaaccccgtctctacaaaaaatacaaaaactagctgggtgtastggcatgcccccatagtcccacctacttgggaggctgaggtaagaggatcacctgagcttggggaggtcaaggctgaagtgagccatgatcgtaaccactacatttccacctgggcaagagtgagcccccgtcttcaaaaaaataaaaaagatggatgctgaaagtgtggactctggaagtaggctgcctgggtacaaatctaaggtccacactgagcaagttactaaatctttctgtgcctcagttttcccatctgtaaaatgatataatctctctgatagttattgtgaggtgtaagtgatataatatttgagaagtactaataacagcacatggcacataaaaatgctattggttgattaaatgattgattaatttaaaagggtcagcactgg

SEQ ID NO: 784056 - DNA, 620 bp, Homo sapiens
agagagaagttgaaagaattatgaacacctgtattttcagcaactagttccacaattagcaccttgtcacatttctctaattattcattttctattttcaccttgtcacatatttctctaattattcatctcattgtttattgatctacattattttttatgtaattaaaaacataagatgtagacatcattatactctatactctacctgggaacacttttggttactctccactgccttcaagtagttgtttattatacttggaaagaaagtttagagttgttacatgttagtttgatccaaaaggaacattcctgtyagtagtagaaatggaatcctcaagttattttttagtttttgaattttcgtaggccttttctaaattaaaaaaaaaaagccaccagaataggcctaggtattagaatctttttattaaataacttgacagttggaaggagccttttgatgttcggcaatggtcagccatctggttagaagagattgttttagtcttccggtagctgttaatttagctccaacgtctttctctgttccatactgtatttgagcttcttcaacctgtttctcaagtttctgtctttgtttctctttgtctctg

SEQ ID NO: 784057 - DNA, 488 bp, Homo sapiens
atgatgttttcaatacttttttcaagacacataaaaatatcttgtttcaattattttagcagttcttttagctgctgaatatttgcttcgaggacctgcttaccccaccccctacccccaccagaaatgtgtctggtacatgaaatttattcctggagcrtgtgaacacttctattgtgttccattaaatgtaggatatctttatagcatgtgtcagtcataagaaaaaaataaactctcaggctctatatatgtgtacgccagcttaataaattctaggcaacagatgtagctgccagttcctccttctgccacttttccccagttcaataaagaggtacagatggttcttttcaccctggtatcttgaatcttggcatgagggctgggactttattgatctttttctggaaacttctttcgacccaaaggaccatggcaagctaagtgtcaaatgagattgtcttgcacagatctggccatttggg

SEQ ID NO: 784058 - DNA, 608 bp, Homo sapiens
cttggcatgagggctgggactttattgatctttttctggaaacttctttcgacccaaaggaccatggcaagctaagtgtcaaatgagattgtcttgcacagatctggccatttgggagtcaggggcccttaagagttgaaaaatagctcagagtacctctcagcctttcacatggagaaactgtcgagttacatttactcttcggcttttgattttttacatgctcatcttgcagaagcccagggctgggagaaaggtcatctagatctyggctctgccttaggaagagcctgtgctaatctttcaaaaaagcaagtgaatccagccatggcttacagttttccagttcaaccaagagaaacaaaagcaacctgaatttggtggtaacaaagaagtttaaaggatcaaaaaaaaaaaaaagatctcaaatgatcctattgaataaatgtagttttgtttcttctgtatagtaaatgctgtccttggaggatggacattagtggcttgttgttacccactggtgtcataagaggtctgtgaaagaactctgactaatcacacactgggacaatcaatataaactgggacaagcctgggtaacctgggca

SEQ ID NO: 784059 - DNA, 520 bp, Homo sapiens
tttctaagatcaggatctggctctttgtgcctaggacatgctttggaacatgatatatctctaaaacaaacaaaaaccttgctacaaataaaataatacacacacctgaatggctaagatgtaaaagtgaaaaacgccaagtgtacaagctctttgccagcctatttggctgtgtctcctgaagttaaacatgccaaaaaacccaataattctactactgagcatatatagtcactaaaaacatgggggttgatggtcrtcaaaagacttgttcaagatttacagtatcactatttgttatagtcagaaactggaaattactcaaatacccagaaatagaagaatgcgtaaacgaattgtagcatattgtggtatatgtgtacaaaggaatactatacagcaatgagaatgcacaaactaaaacaacaaaaagctagacacaaaaagtacatctgtatgatttcatttatacagtttaaaaagtggccaaatgaatttaggaaattagagttcagaagag

SEQ ID NO: 784060 - DNA, 373 bp, Homo sapiens
agagctgcatctgaattagcacaaaatcttacttagttggctgggaagcttgaatgggccttttttttttaatatggaaaattacatctgtttgaattataaccactgaattctcaatgtttgcgaagcaaaagatggtacctctaagaatggatgcatccttctaagcatccacatggctaccagtgagtgaacraggaattctagctcattcagctgaaaacatagtttttgttagcttgccaggggaggcctgattgtcaattgtgcctgaaggaagtgagtgctgttaagcatagacatttctcctttgtgtacagtggaaatgatgggcacacacacctcctgctcacttgcagtgactggattctat

SEQ ID NO: 784061 - DNA, 373 bp, Homo sapiens
agagctgcatctgaattagcacaaaatcttacttagttggctgggaagcttgaatgggccttttttttttaatatggaaaattacatctgtttgaattataaccactgaattctcaatgtttgcgaagcaaaagatggtacctctaagaatggatgcatccttctaagcatccacatggctaccagtgagtgaacaaggaattctagctcattcagctgaaaasatagtttttgttagcttgccaggggaggcctgattgtcaattgtgcctgaaggaagtgagtgctgttaagcatagacatttctcctttgtgtacagtggaaatgatgggcacacacacctcctgctcacttgcagtgactggattctat

SEQ ID NO: 784062 - DNA, 544 bp, Homo sapiens
gtcacgtctcagccaggagtcgcagaaggagcgggactcagctcaggccaggctcaaatccaggcacagccccccttgcgctggagtctttgggcaggacctctaccctgtccaggactcggatcaggtgcagggtagctatgatgacccagccttgtgggttgatgtggaagctagaggtggggagtgggggctccaggtgctgataacaggggccctatacctttcaatgctctgagaggtagctggggtgggagggaggaaggggcctctattagtgtgagctgtcaggacctaggagaactgtctgcacacagctacaaggccagggcttgactctcccacargacgggccttggggtggggcagccacgtgcttgtgggcctcagccatgcacacaacatgtccagacctgggaacctagagcctagggcctttgccacagctgggacaccccagtggttgtgttccttgctgtgtacaggcgggaccctcgggagggactcatgaaagtaggggagtctgcaaacttcttcccagtca

SEQ ID NO: 784063 - DNA, 559 bp, Homo sapiens
tgcatgttattcaactgtttcctcaaattttgtagcaaaatatatttctaactataatttatgagaatgtaagtttcattacccttttatctgtaatctaacatttctaatggttgttttaggtttacatttttatgtttttacatttacatttttatgtttgagagtttttccatttattttatcctataaacttttatgttctgtcctgattaacctatgtgacactcattcttattgatttgtgtcagttctttaaatattaaaattatttatagttgtgttgtatattgatgtttacattatattcacatttgagttacactyttaaaaaatgagacattaaattttgctatggtacattcaaatctgtttatcctttttgtggcttcattgattaatcttaaaatcaggcagtcctcttctttttataaaataaatatagttaatgttttagaaaactatgtatcatgttagcatgtaagaggtttttgttattttaaatgaatcaccaaattaatattttaacaatttctcagtttaaatttaaaatatagct

SEQ ID NO: 784064 - DNA, 590 bp, Homo sapiens
agaatgggtgtgttaagtggctacaccgggaatcaagtatagtgctagtgagtggagaggcggggaaaatggaggatgggagggtcccagatacaagctcctcaacctcatcaatgtcatgattgtgcctggaccagccctgttcattacaatcagaatccctcctgtgcgtcttggacataagccttagctagctggccaacctcagaacagaccctgcccatgtttgtcccaaggcagcctaactccattttttatttagatatgcaattctggccattcaagcttctttcaccaggaactatttaattatatgcattccatgttcgtcctgaggtaaaytagcctaagtgattattgtatcaaaccctccaactaaattgtgctcaaggacatctaacctcttaaatgttatataaatgaacataactggacttacataatttttaaataatgcatgatatttgtacctatttgggggggtacatgtgacttttttatatacgtatacaatgtgtaacgatcaaatcacagtatttaagatttccatcacctcaaacattatcatttatttgtgttggtaacaattt

SEQ ID NO: 784065 - DNA, 583 bp, Homo sapiens
ttcagcttcataaagatggggtgtcactatgttgcccaggctggtcttgaactcctgggctcaagcgatcctcccaccttggcctcccaaaatgttgggattacaggcgtaagcccaggatgaaccatattttaatacacatttttttttttttgagatggagcctcgctctgtcgcccaggctggagtgcagtggcgtgatctcagctcactgcaagctccacctcccaggttcatgccattctcctccctcagcctcccgagtagctgggactacaggcacccgccaccacacccggctaactttttgtatttttagtagagattgggtttcaccatgttrgccaggatggtcttgatctcctgacctcatgatccgcccaccttggcctcccaatgtgctgggattacaggcatgagccactgtgtgcgacctaatataatatttttaaaacaaaatttttgttttaaaattttggcttatcatgccaaaactccatgataagctttttttaaaaaggccagatgcggtagcttgagcccaggagttcgagaccaacctaggcaacatagtgagaccttg

SEQ ID NO: 784066 - DNA, 610 bp, Homo sapiens
acagttcttcccatccagatttgaagatggagatgagtccttatgtgtgccacatgcctgggccctgctgcccccatctaaaaggtgaccttgaggcctgcgggttgcagattccatacatttctccacccctatccaaaagcaatacgtgtcagcgcgtgggttcgtgtgtttttgcaagcggtcatgccagagccagtctgcaagcctcattgcttgtggatcacctcagtcctgtgtcctgggcgcctggccttgcggcagcctgcctggraggcaccactgagtccttctttcagccccgtctggggaaggcagacagctgtcttagctggggcaaggtcagcaaagacatcgccttcaggatgactttttccagtggttccatggacgagacaggatggcaaatgtcctccctttcctttttggcatttctggacctgatttatccagatggaatttctcgactttcaggcctgtgtctgtatgtgtcacctccgaacgaagggtgtgacaacctgactctggtcattaatacacatgattcattgattgagaatctacttactgttaggtggtgtatgtgtgtgactgggtggggcgtgggcag

SEQ ID NO: 784067 - DNA, 575 bp, Homo sapiens
gaatcattactgatttgttaattttaaactttggaagacaattgttagcagacaaaacagggctatattgaaagttagagtgtcttagtctgtttggcctgctataacatggcctgctataacaaaataccatcaactgggtatcttgtaaacaacagaagttatttctcctagttctggaggctgggaagtcctgtgtcagcatactggcagatttggtgtctggtgagggcctgtttcctggctgataaaaggccctcttttcactctgtctctcrcagcagaaggagcgagggacctctctggggtttctttcataaaggcacacatccactcatgaggaaccccacccccaggacttaatcacctcccagaggccccatctccaactgctatcatattggggattaggtttcaacatatgaattttaggggacataaacatagtctatagcatagccattaaattaaacaaataactaagtgaatgagttttcaaagacttaggcaggccagtagccaaaaactaaaactaaaaaaacacaaaataaaaacagaaaaacccactacttgat

SEQ ID NO: 784068 - DNA, 575 bp, Homo sapiens
gaatcattactgatttgttaattttaaactttggaagacaattgttagcagacaaaacagggctatattgaaagttagagtgtcttagtctgtttggcctgctataacatggcctgctataacaaaataccatcaactgggtatcttgtaaacaacagaagttatttctcctagttctggaggctgggaagtcctgtgtcagcatactggcagatttggtgtctggtgagggcctgtttcctggctgataaaaggccctcttttcactctgtctctcgcagcagaaggagcgagggacctctctggggtttctttcataaaggcacwcatccactcatgaggaaccccacccccaggacttaatcacctcccagaggccccatctccaactgctatcatattggggattaggtttcaacatatgaattttaggggacataaacatagtctatagcatagccattaaattaaacaaataactaagtgaatgagttttcaaagacttaggcaggccagtagccaaaaactaaaactaaaaaaacacaaaataaaaacagaaaaacccactacttgat

SEQ ID NO: 784069 - DNA, 575 bp, Homo sapiens
gaatcattactgatttgttaattttaaactttggaagacaattgttagcagacaaaacagggctatattgaaagttagagtgtcttagtctgtttggcctgctataacatggcctgctataacaaaataccatcaactgggtatcttgtaaacaacagaagttatttctcctagttctggaggctgggaagtcctgtgtcagcatactggcagatttggtgtctggtgagggcctgtttcctggctgataaaaggccctcttttcactctgtctctcgcagcagaaggagcgagggacctctctggggtttctttcataaaggcacacatccactcatgaggaaccccacccccaggacttaatcacctcccagaggccccatctccaactgctatcatattggggattaggtttcaacataygaattttaggggacataaacatagtctatagcatagccattaaattaaacaaataactaagtgaatgagttttcaaagacttaggcaggccagtagccaaaaactaaaactaaaaaaacacaaaataaaaacagaaaaacccactacttgat

SEQ ID NO: 784070 - DNA, 546 bp, Homo sapiens
aggatgcataaagatacattttcagagctggagcagaaatgagaaatagtcatctactccaagatctttattttgcagaggcctgtgggggctgggggctggggacagagcggggactggaaccccagttttgagctccagcttgatctcttcttcggggtatagcaggtcagctaagatgacatccaggggttccagagaaagaaaggactaggggtggagagctgcatacctttgccttgtggcttctgcagagctctcttggtaaaaggaatgggaactcaagaggaacgccaggttttttttttttttttttttttttttttttttttttttggagacagagtctcactcagtcacccaggctagagtgcagtggcatggtytcagcttactgtagcctctgcctcccaggctgaatcaatcttcccatctcagcctctccagtagctgggactacaggtgctcccctagagcctccgcagcaatgcagcaatggtgatcaagcgaccttgatcctgtctcagtgagaccctcatcccatgt

SEQ ID NO: 784071 - DNA, 635 bp, Homo sapiens
atctgtggagtcagagagagggagggaagggctctacctaagtcttaagaatgaggatggataccaggaaagggtgatggaaaaaaaatgaggatggagatggagtggtccttcaaaggaaaattggggtactggtatgaaaagatgggataatgaatgtgaaacaggcaggcagaacatctgtcccaaaattaaggtctcaggtgagtgagtcctgggaggcttcaccaggctggccatgagcacaaagatgcttttcctsagtttctgttccgtgcatgtgttgtgcttaggaagagctgaacaataatgtctccttgtcatctgagtccctaactctgagaagggaaaggagatatacaaatgaccaggattcaaggaagggcaataagttcttggagagcattatggggacagaaagtaagaaaatgacagtgatgacattctcatggaagagaccagcttgagaaaggccttaagggaggattagagctttgtaaagcagtatttacaaagaagagggtatttcgggtcaaggaagcagcaggaccaaaggcacagaggctgagatatggggtatgtttcactggctgttcaagagaccattttctcagaagcactgacgcacgtaggaa

SEQ ID NO: 784072 - DNA, 562 bp, Homo sapiens
gtcagtagcactaaggttgagaaactgggctctggttgaaaaaccagacacattcttcatccagagcctggcataagcagctgagagtcagacttctagcaatgtgttagtaataagagtgaaagtcccaaagtttgtaaacaaattcctttttcatcaattagtattctcagttatctctaggataacatcattcattcatttattcaatgcatgtatttcatgcctgctctatggcaggcactgaagacacaacagtggacaaagcacacaaaatccctgccctttgaagcttayatcaaagtgggagagagagaaaggaatcatataattaagtaattatatgtcaggttgaaacaaataaagcagccatggggaatgaacagtgctattttatatgtggtggtcaaggatggccttgctgagatgacatttgagctgagacttgaacaatgtgaggggtgagtctcgtggcatcagcaggaagaccgtaccaggcagaagggacggacagtaagtgcaaaagccctgaggtgggagggtgcctagaacagcaaggagg

SEQ ID NO: 784073 - DNA, 610 bp, Homo sapiens
actccgtggtgtggcccctcaacagaggaggaaaagggggcacagagcagttaagcaacttgcccagccttgcccagcagggacgtgatcgagccacctccccagaccctcagaactgactctggaatgcccttgtggcctctgagggtcgctggctctgtggccatccccagggtgacttacaagggcccagtgcccatacacttttagggcccacaaagacattttaattttaatttcttttaaaaccagaagaaaaaaactgatgctataataataataataataataataataataataataatawtattagtggatcacaaatccagcctggattttacttgtctttatacagtgcagtcacaagctagagggagggtccctgaaagcaaacatccctggagcccaggaaagccatcattcgactgagccagccccatctcttgcaggaacaagatgtggctgtggcaagcggccagccatccccggtgccgagggacctgggagaagctagggcagctccggcattgttcctgccctgtggtccacagcctcgtcttcatctagcgtctgcaccccctaaccgtctttccaaagcctcggggat

SEQ ID NO: 784074 - DNA, 577 bp, Homo sapiens
gtggaagcgatcacaggaaattggtaacagtggctgcccctggggaggaggacggggtggctgggggacagggtgggagagaacttttcactgtgtgcccttttgaacactttgactttcatactagggaaatatagtagctattcagaaaactgacattccagtatttttagaattttgaccttatctytaaatgggttaggtacacaaacagggacagaatgataacaacgaaaaaagactgcattcctcaaacaacactacccctgcatcccttactgaaccactcctagagaatgccatgggtttaaaatacgaatatataaacaaatcgaataaatcctggggttatcttgtgagttatgtgagttacacatttatattatgttgtgattttatgcaggttgtcacgatttgctcaatgttacatcttaaatgtactgcaactttagggatgtcttcattttgttgttgttttctttataaattaatattccaggagtctcaaaaaaatagaagtcttccaggcttctctccgctggagggaccctgtcccaattctccttagggagtgaaa

SEQ ID NO: 784075 - DNA, 639 bp, Homo sapiens
cgatattacaacagagtacattaccgggagttttattgttttcaactcttatttatttgtcatagacattactacagctaatgacatctatttatgttataccactaattattttgtttttgttttttttaaacctctgtttaatccagttttgcagtttggattgcacctttctctcctgcccccacctcttaacccctggctttgtgtccctgccatgacaacgccttcgtgtagatgacaataattacttttcatctatagtcataaatattttaatagatttgtagaatttttttaaaaaagaagttttcaaaatgtcttcattcyttaatgacactgatgaattcttccactaaatctctaagatgagcccatgttactaatgataaatgcacaaatatatcactgtttaggctgtttttgtgggggcagttagtcttgctgattttttgtaattacttttatattgcacctggttcctcactacgttgcattttttaagcataacaaactttgacatctattaagtagaaaggagagactgacaaactgcagactgagcgaaatacgcatggcctgatttaaaatgaattgataggtgtcactgatctctattatatatagaatgtgtgaaat

SEQ ID NO: 784076 - DNA, 604 bp, Homo sapiens
attgaggttagattgatctatgcttcagaagctagatgagctggtggtgatgttgacatgatttggtaaaatcttagaggcttaaagaacagcaaaaagcaatggctaaaacagtaagcttgtactataatatatgtgcaacttttctgcaaatctaaaattattcccaaactgaaagttcattttgtataaatggcaagccctagagctgaccattggggctgcaatctcggccctgccatgtatttattcaacgtcactgggtgttcactcatgtcaacctcttcatccatcacctgyggatggcaataataaaggctctggctacacaggagagtaagggaattcacacagaagtgcttgcccatggtgagttctcagtaactgttagctactcctgttatcatttccctttttaccaccagagagctaaagaagagggtcattccccattcccacagaggtgagccatggggctaatgcaggtgagggaggcacagggtgaaagagattgagttctgagtaatcatcatcatactgcattctctagatgttgctataacttcatttccttgagacgatttgcagatgtgcacataccacg

SEQ ID NO: 784077 - DNA, 625 bp, Homo sapiens
aggctgcagagcagcgattattgctgaagagcaaatgctgctgcctgatcgctcctctggaaactttatctcagaggggtactggggcatgtgaggtgtcagtctgcccctgctggtgtgtccagaattggtgggttcttggtctcacygacttcaagaatgaagccacggaccctcgtggtgactggtacagttcttaaaggtggcatgtccggagtttgttccttctgttgttcggataagttcggagtttcttccttctggtgggttcgtggtcttgctggctcaggagtgaagctgcagacctttgcagtgagtgttactgctcataaaggcagtgcggacccaaagagtgagcagcagcaaggtttattacaaagagcaaaagaacacaccttccatagtgtggaaggggaccctagtgggttgccactgctggctggggcagcctgcttttattcccttatctggccccatccacatcctgctgattggtcccttttacagagagctgattggcctgttttgacagggtgctgattggtgcgtttacaatccccgagctagacacaaaagtgttccaagtcctcactagattagctagatacagagtgctgattggtgt

SEQ ID NO: 784078 - DNA, 625 bp, Homo sapiens
aggctgcagagcagcgattattgctgaagagcaaatgctgctgcctgatcgctcctctggaaactttatctcagaggggtactggggcatgtgaggtgtcagtctgcccctgctggtgtgtccagaattggtgggttcttggtctcaccgacttcaagaatgaagccacggaccctcgtggtgactggtacagttcttaaaggyggcatgtccggagtttgttccttctgttgttcggataagttcggagtttcttccttctggtgggttcgtggtcttgctggctcaggagtgaagctgcagacctttgcagtgagtgttactgctcataaaggcagtgcggacccaaagagtgagcagcagcaaggtttattacaaagagcaaaagaacacaccttccatagtgtggaaggggaccctagtgggttgccactgctggctggggcagcctgcttttattcccttatctggccccatccacatcctgctgattggtcccttttacagagagctgattggcctgttttgacagggtgctgattggtgcgtttacaatccccgagctagacacaaaagtgttccaagtcctcactagattagctagatacagagtgctgattggtgt

SEQ ID NO: 784079 - DNA, 536 bp, Homo sapiens
gcttcctggccgctttgtttacctactcaagcctcagcaatggctggcacccctccccaagccttgctgccgccttgcagttcgatctcagactgctgtgctagcaatgagtgaggctctgtgggcgtgggaccctctgagccaggcacgggatataatctcctggtgtgccatttgctaacaccattggaaaagtgcagtattagggtgggagtgacccgattttccaggtgctgtctgttaccgcttctcttagctaggaaagggaattccctgactccttgtgcttcccgggtgaggcgatgccttgccctgcttyggcccccactgtctaacaagccccagtgagatgaacctggtacctcagttggaaatgcagaaatcacccgtcttcctcattgctcatgctgggagctgtagactggagctgttcctattcagccatcttggaacctaagccaaatagatactttttaaaggtacgttttaacttgtaatttgccatgtgaccctcatttatagttttatgtatctgc

SEQ ID NO: 784080 - DNA, 636 bp, Homo sapiens
gtctaagatggcagtccaatgagaacatccatattttagtcttcctatagctttatcctcttggtatgtggcttttattctgatgattttatgatagttgctacaattccagaccacattgcaggcataaagaaaactgaagaaacaagaaagagcatgaaaattttgttttagtaatacaaaacgtttccaggaaccctgagtagaatatggcttatatctcattgagcaacaatgtgtcacatggtgatatggtttggcactgtgtccctacccatagctcatctrgaattgtaatctgaattgtaacccccaagtgtcaagggagggacatggtgggaggggattgggtcatgggggtggtttctctcatgttgttctcatgatagtcagtgagttttcacgagatctggttgtttggtaagtgtctggtgtgtcccctgagctctctttcttgcctgctgccatgtaagatatgtcttgcttcccctttgccttctgccataattgtaagtttcctgtggcctcctcagccatgcagaactgtaagtcaataaagcctcttctttataaattacccaggctcaggtagtatctttatagcagtgtggaaattgactaatacagagaattggt

SEQ ID NO: 784081 - DNA, 636 bp, Homo sapiens
gtctaagatggcagtccaatgagaacatccatattttagtcttcctatagctttatcctcttggtatgtggcttttattctgatgattttatgatagttgctacaattccagaccacattgcaggcataaagaaaactgaagaaacaagaaagagcatgaaaattttgttttagtaatacaaaacgtttccaggaaccctgagtagaatatggcttatatctcattgagcaacaatgtgtcacatggtgatatggtttggcactgtgtccctacccatagctcatctggaattgtaatctgaattgtaacccccaagtgtcaagggagggacatggtgggaggggattgggtcatgggggtggtttctctcatgttgttctcatgatagtcagtgagttttcacgagatctggttgtttggtaagtgtctggtgtgtcccctgagctctctttcttgcctgytgccatgtaagatatgtcttgcttcccctttgccttctgccataattgtaagtttcctgtggcctcctcagccatgcagaactgtaagtcaataaagcctcttctttataaattacccaggctcaggtagtatctttatagcagtgtggaaattgactaatacagagaattggt

SEQ ID NO: 784082 - DNA, 645 bp, Homo sapiens
gtgacagatttcactctttttaagttattaagacttgttttgtggcctaacacatgatctgccctggagaattctttgtgtgctcttgagaaggatgagtattctgatgcttgttgatggatattctgtatatgtcttttaggtacattaggcttaaaatcttgttcaagtacgaagtttacatgctgattttctatctaaatgatatgtccattgttaaaagtgggatactgaagtctctgattataacaactgtattgctatttctgtcttcagatctattaatatttgttttatatatttatgggctttgatattgagtgtatctatatttacagttattatatcatcttgatgaactgacatcatttatcattatataatgaccctttttgtctcttgttacagttttttacttaaagtctattttgtctcctgtaagtatagcacttttttggttttcatttgtatggaatatctttttccattccttcacrttcaacctatgtaagtccttgaagataaagtaagtctcttattggcaacatagagttaggtcttgttttatttatccattcagctactctatgtcttctgattggacattctaatccatttacatttaaagtaattcttgataggtaa

SEQ ID NO: 784083 - DNA, 576 bp, Homo sapiens
ctcaccctaaaaaaagggcatgacacacacatctacatgcacacttaaccactcatacagttgtttctaagctgtctcttggctagcttgcttatagaaacctatgccaaatgattggggaaaagtttcttacttcttttgctttatatatataaccttcattccaggctccatgagatatcccatggctggggacagattaggatgaattacagaaagaattcaaatattaccattaagtaatattcagtttctgacattccaaaaatataacttatcaataaaacaatacattatatgcaaaactcttatcttgataaggattctataaattattttaactccattttaagggacagttgtagcagttgacaccttatagttttagataaaataggtacagatgagargaagaaggaaaagtcttgtctttatgaccctgagaaaattgtgagcagaggagaaagagtgattagcagtgcaaaatgagttaatgtgtaaaactttgcttctccaagctttgttcctcaatagaagatactttttgtcctcatgttccctatttgggacactaag

SEQ ID NO: 784084 - DNA, 610 bp, Homo sapiens
caatcaaaatttatttccaagtcctactttggggcacattattagcttctttctcacctttttaaaaatttttaattaatgaattataattgtacatatttggggggtacaatgtgctattttaatataagtatgtcatcatgttatcactaacactagcagctggatttctataaaggtcatcatttataaagaaacactgtttctaatcacttcaagagttatctgtgtacaatgaaattagataaagctaaatggatatatggagcctgggcaaacagctacactcactcagtagcacactggctcctatgacatcaaacacytggattgtatgtgtacacactggattgatgccctgtacacatgattgcaacacataatctgggtcatttgtaagtagtcaaaattgtaaataataaactcacaaataccaacagtctacagtaattttatgtgttaagtctctataagcagtaaaaacaagctattatgagagcacagaggatggactgattaattctgctgagaagtatctgagaaagtgtcacagaagtggtgacaattaagccaggcctagaaaaatgactagatttttaccagttgagga

SEQ ID NO: 784085 - DNA, 468 bp, Homo sapiens
ggattacaggaatgagccactgcgcccagacttcatctgtatttttaactgtacctttccaaaggatgccattggaaggacattgatttaacttaactagggggaaatgtctttgctttggtgtgtgtctctggtttggcttctctagtctctacttttaacaccaggatttgaaagatgaaagagcttgagggtggttttattgtcaagtagcatctaatcgatgggtagcagagggktttattaaagctgtaaattcaatttcctaggaattttgaaggttcagaagggttctggagggcaaaaatatggtaaaacactgcttttttttcagccagaaatgtacataatggttacagattgtcaaagactggagctaaagggtaaagtaaccatggcctttttgttgtcactatttagtttgtgtagttgccaagtgtgtttctaatgcaaccttaggtcatcggc

SEQ ID NO: 784086 - DNA, 691 bp, Homo sapiens
tgaaaaatccctatgggcctattcttaaattgcacttcacagattagagggaaatgttagcttaccttccttctgatctcacttaagataaccttctttaggtcacgtgttataattacagtcaggatttcaacctaggcccagcgggctccaatcccgtgctctttaaaccaccytgtgaactccctgaaacatttattcctataaatatgtttgtggagccctcagtccatgcacaggctgggaggtgctgaggacaaaaatggaaaggccgggtgcctgctctgagaggctctagctggggggctggccggcggtgcagggaaggacacacagataagacagctaagacagaaataagacagcaaccccaaagcagactacagcaaacgagtaagggccaaatgatggcagaagtcctggggaagattttctggaggaggcagtgcttccgcggactttgaagaaaaggaagattttggtcggcagaaaggaaggtatccaggtgaaggagtagcttggacaatgagatgaaggcagagggcaggggtggcatcctatagaggcaaatggctcccagccatggacattgagttcatcaaagtcctccagaagttggttgggtggggagcactaaaggtggggagcctacatggactcacctgtggcaggaggtggatcctcagtcagg

SEQ ID NO: 784087 - DNA, 591 bp, Homo sapiens
gagtttgggatggtggatggttgattatttaaaatataacttaatgattatgattatatgatatatgtcataatttgtgaatgttagtctacccataaaatgaaagtttgttgtcttccaaatgatgctaaaatagattactagtcctgaaaatgtggtttyttatgggttcctctagtcatttcaataggataaatgtgctgataacaccccattaattaaagtcaatggctatcccataagcaccaatgccacagtaagcaaccaaagccataccatgcatatatatccaggccaaatgtctcactcaggccagaaagagaccagctaagaagtcaaggatggctgggatggggtagcaagtggggagaaggaacacagtaaaattaggaggtgggttgaggtcatgctagataggacctggaattttatgttgaatatttgaactattttatagaaactaaggaaagaataaagtttttttattaaggaaaggacataatcatatctgtgtataagatgaataactggtagtatggtgggagatggactctggtggagaagagctaagagcagggagagctgtgagga

SEQ ID NO: 784088 - DNA, 591 bp, Homo sapiens
gagtttgggatggtggatggttgattatttaaaatataacttaatgattatgattatatgatatatgtcataatttgtgaatgttagtctacccataaaatgaaagtttgttgtcttccaaatgatgctaaaatagattactagtcctgaaaatgtggtttcttatgggttcctctastcatttcaataggataaatgtgctgataacaccccattaattaaagtcaatggctatcccataagcaccaatgccacagtaagcaaccaaagccataccatgcatatatatccaggccaaatgtctcactcaggccagaaagagaccagctaagaagtcaaggatggctgggatggggtagcaagtggggagaaggaacacagtaaaattaggaggtgggttgaggtcatgctagataggacctggaattttatgttgaatatttgaactattttatagaaactaaggaaagaataaagtttttttattaaggaaaggacataatcatatctgtgtataagatgaataactggtagtatggtgggagatggactctggtggagaagagctaagagcagggagagctgtgagga

SEQ ID NO: 784089 - DNA, 631 bp, Homo sapiens
ctatagctgatgagaataagtgatttttatgtatgtctttatgcttatctcttttctaaacttgctaaaattaatatgcattcaaccatatgcaaaaatgtaataatcatttttaaatggaagcataagaaagataatgatttcattttgaaatgaacattggcatttctagtcaattctacatgttcagaggcacagcctgcctccaatgctccttcaacattagagctttgtgctagacgctcactaacctaaacacacggcttacatcccttggataaaggtcgaagcacagccctctagcaaactatcctgccagtgtcatataaaccctggaacaccacaaatcctcacgttttgaggacaaatccttccartaggcagctctcagagaggctatacagaaagccttcctatgattccaaaccagtaaagctgtttttttattttacttctactgaatagcagtcatgatttatttcttcaggtttccaggtagaacagatttctatagtttggtctaaagtcttaacactggaaacacttcctccatgtgttctgtggtttctcctcctgagtagaaaggatatcagctgaaaccctaggcaagggcaggctgtgggaaggcaag

SEQ ID NO: 784090 - DNA, 577 bp, Homo sapiens
tttaaatacagcagagactctgttgctaagtttaacttcccagcttgcacaaactccggaattttagtgaaaggagcagtggctttacagaagaaaaatctctgtaaacccctcagaacaaacaaagtgaagccttaattcctgtaccaggtaccgattagcagtggaaagcgcctgccttgaggcttcccgtttgcaatgaaacytagtggaagagggtcctgcctatgggtgcctttgattggcaccagcagccgcagccttggccccccagcactgggggcttctgtgagcccagcagtgatattcagcacctgcctgttcacctggccccgcaggaaggaagaaccagaaagaattgcaggttgcaaacagttgatagaaagcagagataaaatattattgtgttattgttgttttcatcctatttttattcctgggctgagatattctggggaagtttggattataagaactgcaggctgtatctccaaaatacctccagcctccatcccttgtttgtcctactccctgtcacaagtcagatcctcttcagctctcagctggacttttgcaa

SEQ ID NO: 784091 - DNA, 619 bp, Homo sapiens
acaaacatatggaaaacatgctcaacatcactaatgatcggggaaatgcaaatcaaaaccacaatgcgataccgtcttcctccaacaagaatggccataaacaaaaaaataaaaaaataacagatgttggccaggaggcaatgaaaagggaacacttctacactgctggtggggatgtaaactagtacaaccactatggaatacagggtggagattccttaaagaactaaaagtagaactaccatttgatctggcaatcccactactgggtatctactcagaggaaaagaagtcattatatgagaaaagatacttgcacatgcatgtttatagcagcacaattcaaaaatatgaaaccagcctaaatgccaatcaatcaatgagtgactaaagaaactatggtatatacataagacagaatactactcagccataraaaggaatgaattaatggcattcacagcaacctggatggaattgaaaaccattattctaagtgaagtaactcaggaatggaaaaccaaacatcgtatgttctcactcataagtgggagctaagctatgaggatgcaaaggtaaagaatgatacaatggatgttggtgactccaggggaaagga

SEQ ID NO: 784092 - DNA, 538 bp, Homo sapiens
atcaatcaaatatctgcagcttgacaactttagctctaaaagggggcacttttttatcttgtaccttttcttataaattttgggatataatttatttttggtaaaaaaaaaacttcagaaagtggtttagttgaaagcaccttaggctttctyattaagaattaagctgcccatgctattcatacttgtagtttaattcctcacttattgttgtaattgcaattggattttgcaacaacagcaacaaaagcctccctggcaagttcctggtgattctggggaagagggcttgagcctgagctgctctaacctctccttcagtcctcagctccctgcggtctctctatagagatatgagacaccccattcccagtacaagccacttttccagcttcacacacacgccctcttggatatgctccctgtgacgggcaaccgttctactggaagtaattctgaaaaaagcctctgaacccatgaggcccacgtggggcttacctggcattcaactgtgttctcctacatgtcaccatgtcct

SEQ ID NO: 784093 - DNA, 538 bp, Homo sapiens
atcaatcaaatatctgcagcttgacaactttagctctaaaagggggcacttttttatcttgtaccttttcttataaattttgggatataatttatttttggtaaaaaaaaaacttcagaaagtggtttagttgaaagcaccttaggctttcttattaagaattaagctgcccatgctattcatacttgtagyttaattcctcacttattgttgtaattgcaattggattttgcaacaacagcaacaaaagcctccctggcaagttcctggtgattctggggaagagggcttgagcctgagctgctctaacctctccttcagtcctcagctccctgcggtctctctatagagatatgagacaccccattcccagtacaagccacttttccagcttcacacacacgccctcttggatatgctccctgtgacgggcaaccgttctactggaagtaattctgaaaaaagcctctgaacccatgaggcccacgtggggcttacctggcattcaactgtgttctcctacatgtcaccatgtcct

SEQ ID NO: 784094 - DNA, 538 bp, Homo sapiens
atcaatcaaatatctgcagcttgacaactttagctctaaaagggggcacttttttatcttgtaccttttcttataaattttgggatataatttatttttggtaaaaaaaaaacttcagaaagtggtttagttgaaagcaccttaggctttcttattaagaattaagctgcccatgctattcatacttgtagtttaattcctcacttattgttgtaattgcaattggattttgcaacaacagcaacaaaagcctccctggcaagttcctggtgattctggggaagagggcttgagcctgagctgctctaacctctccttcagtcctcrgctccctgcggtctctctatagagatatgagacaccccattcccagtacaagccacttttccagcttcacacacacgccctcttggatatgctccctgtgacgggcaaccgttctactggaagtaattctgaaaaaagcctctgaacccatgaggcccacgtggggcttacctggcattcaactgtgttctcctacatgtcaccatgtcct

SEQ ID NO: 784095 - DNA, 590 bp, Homo sapiens
gttccatcatttgcccagccttaataataattgtgcaaggccgggcgcggtggctcacgcctgtaatcccagcattttgggaggctgaggcgggcagatcacgaggtcaggagatcgagaccatcctggctaacayggtgaaaccccgtctctactaaaaatacaaaaaattagccgggtatggtggcgggcgcctgtagtcccagctactcgggaggctgagggaggagaatggcgtgaacccgggaggcagagcttgcagtgagccgagatcatgccactgcactccagcctggatgacagagcgagactccgtctcaaaaaaaaaaaaaaaaattaattgtgcgaacgccaccccctaccctcgcccagcaacacagcaacattgctgaggaaactgatgcactcccacattttaatgacccagtgttggaagaagtcaactaaatgagttaaaagtgtcccaaggtaggtggcccagtaagaccatcccaaagaaaggaacctgggcagaatccaaaataggctcaaaggagaagattttctctttagggggcttgtacgtgtgagtggacatagatatatacgct

SEQ ID NO: 784096 - DNA, 671 bp, Homo sapiens
agggaagaggaaagaggaacaggaccatagaagggcactgctattcaaatctgtcttaaagtgtattacaataattgttaaaaagaaaagctaatacttctatgatgcttagtaggaacaaaacactcttcacagtgttatgcrtgtaattcatttactactcatgacaaccctataaggcaggtactatttttatccccattttaaagatggcgaaatcgaggcagaaaaagaactaaactaatgaagtcatcaaagccgggtagtgtgtacatggacattgattatgctactttaaatatctaactggatgtctggaacttttcataataaaaatctctagatgaaacctttaaagtacatctaaaaataaccttggaaaaggctgaataaaaattcaataacgtatagacctgagtttgtgaacatatatgagcatgaatgtagtctggagaaggaaaaccttccaatacaaccactaattagtagacataacttatctgagtagtatagcatgaaactttgtaaattttgatgctttcagaataagctgaaagaagccatgaaatattatctattcaatttcttacttgtagatgaggcagttaccagtccagaagatgcgaagtatcttttaggagctcagcatagtgtgtatgaagctcagatag

SEQ ID NO: 784097 - DNA, 671 bp, Homo sapiens
agggaagaggaaagaggaacaggaccatagaagggcactgctattcaaatctgtcttaaagtgtattacaataattgttaaaaagaaaagctaatacttctatgatgcttagtaggaacaaaacactcttcacagtgttatgcatgtaattcatttactactcatgacaaccctataaggcaggtactatttttatccccattttaaagatggcgaaatcgaggcagaaaaagaactaaactaatgaagtcatcaaagccgggtagtgtgtacatggacattgattatgctactttaaatatctaactggatgtctggaacttttcataataaaaawctctagatgaaacctttaaagtacatctaaaaataaccttggaaaaggctgaataaaaattcaataacgtatagacctgagtttgtgaacatatatgagcatgaatgtagtctggagaaggaaaaccttccaatacaaccactaattagtagacataacttatctgagtagtatagcatgaaactttgtaaattttgatgctttcagaataagctgaaagaagccatgaaatattatctattcaatttcttacttgtagatgaggcagttaccagtccagaagatgcgaagtatcttttaggagctcagcatagtgtgtatgaagctcagatag

SEQ ID NO: 784098 - DNA, 574 bp, Homo sapiens
atattttattctcatatgttaatgtgtagtttctaaactgaatccataaatattcccagataattatgtgtaatggcccaaggtgggtacattcataacaccatcatgcaaataaagaatctgaggcttggaaagctcaatgccatttttataagaggagtaaatggggccaaaaatcattgttttctggataaaaatcacttatttttatcattcagtggctctctaagtktgttacctcaataatgtatttattattcacgcattaaattcaattaataagagatagagcccattcccaaaaaattcatggtataacacgtggttacaatctcattgtgtgcatgaaatgataagaaacagtataatgtggtgactcatgtgaatgggaaatttcagagtcagatgttgtttttagtcagtttgaactgctataactaaaatatcatagactgggtgacttaagagcagaaatatattgctcacagttctggaggctgagaagtcctagattagggtgctagcaggtgaggtcctagtgagggtcctcttctggtttgaagatggccatctt

SEQ ID NO: 784099 - DNA, 628 bp, Homo sapiens
tatgataaatgtaaatgtactaaacaataaaaggcagaaattgtcagactagagataaatgcaagaccaaattgtgtgctgtctacaagacgtgcacttcaaatggaatgtgtttttatgtttatttttgtactatggagtgtgaaagtgtttaccaagcaaactgaaaatgggggaaagtttaaactgctcagatattaagcagctctccagtaattttgaactagtaattttgctaccagtacttgttatgatcttttgaattcactagagaaagtcaggcagggcaatacttgattcttctttcttarctatcattctgtttttatgtatatatagttgctcttgagtgaaattgtctaataattcagtttttcataattacaacaaaaattgtataattacttagctttgatgaattaaaaggttttattacagacttttttagtaaaacattacttgctttctcagagaagaaaaatatatactttttcttttttgagagtaataaatattaatataaacaaggattaaattaaactgtttcatttttaactctgcaaaaaaatgtagtcaaataactctataaaatgaattattattgaaaagcctccaaacccagcatgga

SEQ ID NO: 784100 - DNA, 590 bp, Homo sapiens
tcacagggctaggatcacagcagctactcaccttagtattaaatagtttggaattgactgatcctcacttaggcagtccagggctctctctctcaattctgtcatgatcatgctgccttgactattgatgcccatgcttcctcctataaaccacccttcaaggttttcaaatccctactcatgagtctgtctaccttttatttcaatactgagcagccatcctcaaccaaggtcattttaataccaaggtccatgtccatcacrggggtgcccatctctggatggcaactccagtcttgtttgcttgtctctctcacaccatttctgtttactgactgttgaaggaagaggctgcgagagctccctatccccacatggcctgataatagaaatgagttattccactggctgtcaaaatactaaatcttcccttcatggatccaaaactgggcttagacactcctctactgtgctctccactgttcagattctaccattgaggacctcctggagaatctggaatccccaactctgacatgaagtccacagactacttgtcagtaacccccagggcatggtttctatggacc

SEQ ID NO: 784101 - DNA, 616 bp, Homo sapiens
acgttaatgccaagctttcagaggctccagagatgatgattatttttccagtttaataaattgtactttatagtttctttaacccacagaaataattggtggaaattctaccatattggtttattgccagttcttgttgaaaatattgctataaaaaagggggaataagaaataaatgctattgagaaaaaagcccccatcagtctgtatgtgccccaatagtcacatgaagttgattaacaaacatgcaaagcctacatgracatggatgctccagtaacttatgaagaaatccaatagctattgaaatgagttttattaccacatccctcttaaacttccttttagctatcaacaactattttcactaataccctaggcttaaagctatctctgattttttgttctttctttaaatcaattcactgatgacaaaaacagcttttccctaataaatctccctgcctttgctctctatcttctttggtctctaagaaaataggacatgtgagtgaggtaaaatgattcacttcagatggacaggatgcctcttccattgtaacaggagagaaggagcaaaggtaggggagctgacagatttgagggctggaggtga

SEQ ID NO: 784102 - DNA, 632 bp, Homo sapiens
agttcaggagtcatttattgtgtattctctcaagtagactggaaacactttctctctttctttcaaacatgccacctggaggatctgcgtacttgtggtcaaatactgacagaggctgtgatcctctgaaaaactgacttaaaattaggaagaccaaaggcacagaatctgatttatgaggatcttggggtctacaaaatctctactattttaatcggagacaggttgccttctgaatgtggtgcatggaacatttgttcctggtgctccctaataaccaaaactaatgcagagtaacaaaaccacctctccaaargacagagtaacaaacctaatgagtggtagaggaggcatatgggtatttccacagacacagccctagtcatagcacagcaatttcagctatcaagaatctagacaatggtacttacccgttcattcaatattttatgccctcaacacagtgtttatgtatgacttaactcctccctcagagagttttaactgggttcaatcagatgacagtatcatgtgggttgctacaattttagaacttgtgtcaagggcatgcaggtctccatgaaagcttggattgagtagattccctggtttctctctgggtatagttcccc

SEQ ID NO: 784103 - DNA, 583 bp, Homo sapiens; identical to SEQ ID NO: 772267

SEQ ID NO: 784104 - DNA, 552 bp, Homo sapiens
atgggagcaatgggttctatggaaggtgagcatccaaggggaaaagcagcattagttcacgacaagtctgctgtctaagagaagaagcgtatgaactctctgctccaataatgagctcccccactgcagcactccgaccagatctccttagagaatctggatcacaagctgcatccttcatgagaatcagccaattgtcacatcctggatacaagatatgatctgcaagccaccaacccgggcatcagggaagatcaaatggagagtaggtcaggggtgaggggaagagctcccagtggcacctgaggtcacctggtaggccttgttgcagatcccgcagctgaagggcttccctccaacgtgggtcaccaygtgccgctccagcatggacggggcactgaagatcttcccacacgtggggcaggggtggtactctttggagtgcacctcatggatgtgcttccggtgatcctgaagagtggggaaactcatcctgcacttcttgcagtcataaggatcttctatgtctagtttcacgggacatccatgaga

SEQ ID NO: 784105 - DNA, 575 bp, Homo sapiens
tttatcatttttttcttcgaatgttgattaaaattcaaccactgatggctctttcagcaaaaaaataactatctttaagtcataaaactgcccaaaatatatgcaaacatatgattacaaatttcccaatccactgccactasaactataaggtggggccgggcacactggctcacacctgtaatagcagcactttgggaggccaaggcaggcggtcatttaaggtcaggagttcaaagccagcctgaccaacatggtgaaaccccgtctctactaaaaatacaaaaattagtcgggcgtggtagctactcaggaggctgaggcaggaaaattgcctgaagccaggaggcggaggtttcagtgacccaagatcgcaccactgcactccagcctgggtgacagagtaagactccgtctcataaaaaaaaacaaaaaacaaaaaaacaaaaaaaccctatcaggtggatttgtgacttgacctcaaaaacatttaggtgactattaatatagccgggtgcaatggcatgtacctgtagtcccagctcctcaggaggctggcacaagagaatggcttg

SEQ ID NO: 784106 - DNA, 575 bp, Homo sapiens
tttatcatttttttcttcgaatgttgattaaaattcaaccactgatggctctttcagcaaaaaaataactatctttaagtcataaaactgcccaaaatatatgcaaacatatgattacaaatttcccaatccactgccactagaactataaggtggggccgggcacactggctcacacctgtaatagcascactttgggaggccaaggcaggcggtcatttaaggtcaggagttcaaagccagcctgaccaacatggtgaaaccccgtctctactaaaaatacaaaaattagtcgggcgtggtagctactcaggaggctgaggcaggaaaattgcctgaagccaggaggcggaggtttcagtgacccaagatcgcaccactgcactccagcctgggtgacagagtaagactccgtctcataaaaaaaaacaaaaaacaaaaaaacaaaaaaaccctatcaggtggatttgtgacttgacctcaaaaacatttaggtgactattaatatagccgggtgcaatggcatgtacctgtagtcccagctcctcaggaggctggcacaagagaatggcttg

SEQ ID NO: 784107 - DNA, 633 bp, Homo sapiens
gaattggtttagaccagttgcacaatgatatctctaggaatggttttcttacatttattctgctgggggcttctgaatctgtggcttgaggcatttaatcagttttagaatactttctgccattatctcttcaaatgctgcctctgccccattccctttgtcctcttcttctggaattatgtattacctgctgtgtatgaccatcagtggtcttggattcaagatgacattcatacctcaggatacaaaaggtggtaatgttacatcagttttacttagctttttatgagaacttaggacagaaacacagaacgtcaggatgscataaccaaaaacatcttcatcagaagtccttaaaatattcagctgctacttccatgcctcctcatcacacaggggtacatgaagttgggaagcccgtatcagtggatacagtacactccagcatatacaagcctcaaacaagaaatacttcataaaataagcccattcttgcaacttctaagcctcccatcaggaagtgcttgagtttgaagagacaccttaaagggaaactggacgtctgtttccctataagttttatgctggtagaaatggtgaataatgtagtctcttgggagtataacatgtcca

SEQ ID NO: 784108 - DNA, 582 bp, Homo sapiens
aaacacacagaaaaattatctgggtgtggtggcacacaactgtagtcccagctattcaggaggctgaggtgtgtggattgcttgagcctgggaggttgaggctgcagtgagctgagattgcgccactgtactccagcctgggtgacaggatgagaacctgtctcaaaaaatatataataataatactaatrataataattcaccaattccttctactgctgcatctagtctacttttcagcctctacattaaattttttatcttaagaactatattttatgatctctataactcctttctccaaatctatagggcattcttttccctcagtctcttgtttttacctaatggcttttattcttcactttatttcttggaatactaaaaacacatgtattttaaattaacgttcatgttattctattatttaggtcccccattagttatgccttctgactatcttactgcagctcatctccttgtgtgattttcagttttcactatcagcttattttgagtgggaatttgttttctttggaaactacaggtgccgtggattgtggaagcatctttacagaataa

SEQ ID NO: 784109 - DNA, 583 bp, Homo sapiens
ttgctcctgctaagtacagctaaaagccccaggcattatgtatgtaaaacaaacataagaagactagatgactctgaaaggtagagagaagaaggtagaccagctagggacatcaggccccaaggaaggataaggtggtgagttccctggttttcttcttgcctcgaatatgtcagttttggaggtaaaaaagttagcaactcagaaacaccagtgggcacaacaacagcttcagctgaagcctgctctttctagccaaacgaccaggaaaagggcaacctagaaagacagaaaacctctagacaataactagtctactccagccaaacatcatagaaaaaaatgtggcccaccaccaacagcaatgctgaatggggagcytggacatctaccctcagcaggctgcaatgatgcacccaactcctccactggagtgatgtcagagaaggtcaagtagggagctgggatttccacccctgccaggtggtaataaaattccacttagtgtccataaagattatgtgaggaactttgactttcactccccttccagcagtaacaagatgcccttctccctacctca

SEQ ID NO: 784110 - DNA, 583 bp, Homo sapiens
ccagcctgggcaataagagcaaaactccatctaaaaaaaaaaaaaaatagacataatatgacaacagattcaagaaaccaagcaaatctaaaagaaatgcaatctcgcgaagagtcataatcaaacttcttaaagacagagaaaaattcttgaaagcaagtagcaggaaggaaacaataaggataagattagaaataaatgaaatgaaatgaaaacaaaaaacaatagagaaaatcagtggaattaaagatgtgttctttgaaaaaaaatcaataaaattgacaaacttctagcaaggttgaaaaaattgataaacgtctagcaaggctgaaaaaatagataaacttctagcaaggctgaaaaagaaacagaaaaaagatakaatattaagactgaagcagggatatcattatagactctgtagatatcaaaacaataataagggaatattatgaacaactctccacatttaaacttaacaacttagataaaaaaaggaacaattcctcaaaaagcacaaattaccacaactcactcaaaataaataatttgattagccctgtaactctcaagaaaaactgaa

SEQ ID NO: 784111 - DNA, 583 bp, Homo sapiens
ccagcctgggcaataagagcaaaactccatctaaaaaaaaaaaaaaatagacataatatgacaacagattcaagaaaccaagcaaatctaaaagaaatgcaatctcgcgaagagtcataatcaaacttcttaaagacagagaaaaattcttgaaagcaagtagcaggaaggaaacaataaggataagattagaaataaatgaaatgaaatgaaaacaaaaaacaatagagaaaatcagtggaattaaagatgtgttctttgaaaaaaaatcaataaaattgacaaacttctagcaaggttgaaaaaattgataaacgtctagcaaggctgaaaaaatagataaacttctagcaaggctgaaaaagaaacagaaaaaagatataatattaagactgaagcagggatatcattakagactctgtagatatcaaaacaataataagggaatattatgaacaactctccacatttaaacttaacaacttagataaaaaaaggaacaattcctcaaaaagcacaaattaccacaactcactcaaaataaataatttgattagccctgtaactctcaagaaaaactgaa

SEQ ID NO: 784112 - DNA, 553 bp, Homo sapiens
ccagcctgggcaataagagcaaaactccatctaaaaaaaaaaaaaaatagacataatatgacaacagattcaagaaaccaagcaaatctaaaagaaatgcaatctcgcgaagagtcataatcaaacttcttaaagacagagaaaaattcttgaaagcaagtagcaggaaggaaacaataaggataagattagaaataaatgaaatgaaatgaaaacaaaaaacaatagagaaaatcagtggaattaaagatgtgttctttgaaaaaaaatcaataaaattgacaaacttctagcaaggttgaaaaaattgataaacgtctagcaaggctgaaaaaatagataaacttctagcaaggctgaaaaagaaacagaaaaaagatataatattaagactgaagcagggatatcattatagacyctgtagatatcaaaacaataataagggaatattatgaacaactctccacatttaaacttaacaacttagataaaaaaaggaacaattcctcaaaaagcacaaattaccacaactcactcaaaataaataatttga

SEQ ID NO: 784113 - DNA, 671 bp, Homo sapiens
tacacacacacacacgcttctttgtttatttatttatttcaaagtccttcaagttgatctggaaaaagaatagacctccctacccaaactctcaaccgtatgtctaagatacactctttggtacaacagacatcatatttaccccctctttatgtgacaattcttaaaacatctaaagactacattcttctctaaattaaaactctcattattttcaaccataatgtataaaacaggagtctttgtgttctagctgtatttctatatatacatattttaatcatcttaacccagcacacttacaatagccatctttcatttctggacctctttgtgtctaaaacatgagaggtgacattgtataaaggaacaagtgcaggttctaaagtcacattggcatagatttaaacccctcttccataccttagacaagccatttaacagctcagatcttygatacacacatctgtaaagtgggcacaatattattatttactttattgtcatcaaagccaagtgagataaattatatcaagcatggaaaacacaaactcaatgagtctcagtttctctaaaccttggcctctccatcccttgttacctctgaaatattaatgtctcattagtttccaacagtgagatggctctttggagattattctttgtcatca

SEQ ID NO: 784114 - DNA, 602 bp, Homo sapiens
ccacctcataaagagattatgttccaaaagtttttaatttagaaatatttaattcaacatggaaaaaataatctattgaaccaaaaatctagctgagctatagtaataaataagtttcatgatttagagaaggaagagaaatagagaaagtagtttcyaggtttttagattaaagacaaggtatagaccacaaataggcaacaatagcctgtacctttctatctctttctctttaatctctcacttcctagtctttttctcaaataccctattaaggcatcctttccacgtatgtttatcccagaaagtgtttggagtataaaaatcacattttatgtaccttttacccctgacaaaaactgttctctaatcaagttattagacgttacacctaaggacctctttgtggatcagttcagaagggcttttttccaactgcatgcatattttcaggtaccttggtttatatgcattcatcagggaaagtgcccatactttcatgagattttcaaagaagtctgggactcctcccctctcttcaaaaaaaaaaaaaacaaaaaaacagttatgcatcatttccttaggagaaaatgcagattgaa

SEQ ID NO: 784115 - DNA, 544 bp, Homo sapiens
agttgatataaactgctcaaaatcacatgtctagcaagttctaaaactgggactcagacctgtgcctaatgaactctaaagcccaggctcataaccactacaccatattgccaagtgggaaacaatgatattgccagatggaacaggctgaggttttgctgatttgggggaaggggaattagtaaaagataggttttcacaaggcaagtgcaaagagataactattcagcaaattaatgcagtagtttaaagggtagtttgagcagatgccatgtggaagttaccagagaaaacatcagttctttaagccaaatggtattttgagagcatgaagataatgyaattataagatttttaaccataaaaacaaatccatatacataaacacttagctagaaggagaatagggcatagctgggtatattacattaaacacgtcttttactaattaataagatattggtcatactgaaattacaagtactcaaatgcagtgattatattgggatttgatgtataattactgatgtttatatttacccag

SEQ ID NO: 784116 - DNA, 696 bp, Homo sapiens
acggagactaagtcctctaatcactagctttacatgcactgagattgacaagctggtgggcagccccaaatggcagccctaggcatgatagagaacttagcttctccacagcccagctcggctgccagaactgtgctccctgcaactcccatggccaaatgggtagacgaactgtttgtcttttgtttggtgtaaaaayccatagagaaatccagcttgtatgcaagctctgcaatgctagggttttatctgacctcacttttattgctcaaatgctccagactctctttcccttcctcttgctcagcgattgacccttttccttgaaataagcaaatagcatgtattaaaaatcatttcaggctatggggtcctggagccagggatgaggatcagagtgtgtgacatcacactctgatgtcagagtgtgttgacaccaacattctcctgcagtatgcagacacataaggatgctggtggaatttcagagattgtctcctggagctgctgtgtcccctgtgcagcaatctggaggctccctggtgcctgggttcacctggggagctctgctaccactggcccctggttctcccctctagaggctcatgagattcagttctcagggtccttggctctggaaattgctgcttctgtcagttactacagcttagactcagtgtacgttagggtgtgtta

SEQ ID NO: 784117 - DNA, 696 bp, Homo sapiens
acggagactaagtcctctaatcactagctttacatgcactgagattgacaagctggtgggcagccccaaatggcagccctaggcatgatagagaacttagcttctccacagcccagctcggctgccagaactgtgctccctgcaactcccatggccaaatgggtagacgaactgtttgtcttttgtttggtgtaaaaacccatagagaaatccagcttgtatgcaagctctgcaatgctagggttttatctgacctcacttttattgctcaaatgctccagactctctttcccttcctcttgctcagcgattgacccttttccttgaaataagcaaatagcatgtattaaaaatcatttcaggctatggggtcctggagccagggatgaggatcagagtgtgtgacatcacactctgatgtcagagtgtgttgacaccaacattctcctgcagtatgcagacacataaggatgctggtggaatttcagagattgtctcctggagctgctgtgtccmctgtgcagcaatctggaggctccctggtgcctgggttcacctggggagctctgctaccactggcccctggttctcccctctagaggctcatgagattcagttctcagggtccttggctctggaaattgctgcttctgtcagttactacagcttagactcagtgtacgttagggtgtgtta

SEQ ID NO: 784118 - DNA, 705 bp, Homo sapiens
gtaagtttccaatgagttttctttctcatgtttggttttcccttcgcatgatgacctactaaaaccaaatagattttgaatgcctatggcaatgcctcgtgaaagcactggttctctgcatgctcacttgttccctttccagtaaaaaatcaattaatattaaagttaaaatatatcaatagaacgtattggttgtaagtacatcactttttcttgcatcctagttttgcctttttttttttttttttttagtttcttcttaggtatgaagagaatctattatcttgattagatataaattcaaaacaaatgttgaataccrgctgttgtattctcaacattttagaattcaactttaaatgaaatcttcaaaaaagcaagtccaagaaaaacctcatagtaatatttgtgtctcattcactaccatcaccaaatgatattgattgcagtacctgaagaaatcattaggcaccatatgacactgatgtctatttagagtgttttttattctgtattggaaaataaagcacattacctaaatgattcaaatggcaagaaaaaaatttatccctaaaagccatctgtgaattagcatatgggcttctggaacccaacatcttgattctatatgtgagtcaggaggaaaaaaaacaacaaaaaaagaatgaaaggaagaaaatgggatcctgtctctaaatataaaac

SEQ ID NO: 784119 - DNA, 665 bp, Homo sapiens
ttgatgagtggcagagcagacatttaagcccagacctttttctttttctccaaagcttgtgcttttttatgcaacattgagttgtgctgatagtgttggcacagtgacagagagaaaattgtcctaaataaatgtgaaaataaatcttgggctattcattacccaagctttacaagcaaaccatcatccctgtggcagggttgagctgcactagagaaatctcagtgtacaaataggaagcatcattccagtttatggtgcccttacctgccagattatagaggtgggatctggaggagaaagtctccccygaaacagtcttacctggaactgaaaaaataataagggaaacagaattccagcaaacaggaaaaggcctctcagattgagtgagctattttattcaggaaacattatgcattaattttaaccaattctcatttaatctccatctggtttggaattttaagagaacctaaattacacaatattttaaaaatatagttagctgactgagtccactgcatgtgacagtgtggatcatcattgtcacaggtgaatatatttttatgccttcatccaaatacttactgagcatcaattatgtgccaggcacttcagtaattggtcaaagaaacttctaaatcctgttggtgttcttcctg

SEQ ID NO: 784120 - DNA, 623 bp, Homo sapiens
tctggtaagcaccattctattctgtaagtctgtaagacacactttttgagctctgatataccagttaaaatgtgatatttgcctttctgtgcctggtttatttcacttacaataatgacctgaattccattcatgttgctgtaaatgagagaatttcattctgttttctggttgaataaaatttaattgtgtaagtacaccaaattttctttgttcattcatccactgatggacacttaggttgataccacatcttgactattgtgagcagtgtcataataaatatgacagtgtggatatctccttgatatactgatttttttcttttggatatatacccagcagtgagattactggttcatatggttgttctatttttgtgtttttgaggatccttcatatcattctccataatggctgtactaatttacattccctccaacaatgtatgcatattcttatttttccacatcmttgccagcattttatttattttttgtctttttgataggagtcattctaacttgggtgagatgttatttcattgtggttttgatttgcattttcctgatgattagtgatgttgaacatttttttcatacagctcttggctgttcatatgt

SEQ ID NO: 784121 - DNA, 388 bp, Homo sapiens
aatctgcctagcctctgcatatttatgtattccctgaactgcttgctctcccaaatggagaaagaatctcaccagatggactcttcacttggcaaatatttactgaatgtctggacgtgctggacattgggtccctaacttctcagagccttccaatctaatcatggagaccatgactgagcaaacatttcatgttttyacatataatggcatgtaaaaggtgaatgccttcaatgttctcaagtctaaaatagggtcaataatgatacttcccacacagggctatggtgaggattaaatgaaaaaacatgaatgtcaattgattactatagtggttggcacaggaaaaatactttggtgattatttcctggaagcatggggtaggga

SEQ ID NO: 784122 - DNA, 626 bp, Homo sapiens
gcatctttcttaacaaaattttgttgttattattgttttgatagctttgtctgttagtcttcatactaaagatatgagtgattaacacaccacaattacagtattagaatattctgaatttgtctctatactaacttttaccagtgaattttatatcttctgatgttttcctgttgcatgttagcttcctttcagactgaagaactcccttcagtatttcttgtaagactggtctggtggtaagtcatatcctcaactattatttatctcagaaagtctttatctatttttcatgtttgaaggctagcttgctagatacrgtattatcatttggcagttttcttcattaagcactttgaatatattatctcactccttcctgggtatgatttctgctgagaagtctgttgcccaatgaacttgagctttttcatatgatgttgcttcttttttattgctgattttagaattctctctttgaccttgacctttgagtgtttgtttattatatgccttggtgtagtcttatttgggttgaatctattttataatcctttataatccttgacaatccttgacttttctgtacttgcatatttatatttttctctaggtttggaaagtgt

SEQ ID NO: 784123 - DNA, 552 bp, Homo sapiens
ttacatgtattccttcatttaacccttgcaaacttagcatagtggctggcacacagtaaaagctcaataaatgtttgctgaatatatgaatgaatgaatcaatgaacaaggcgagtctctttactctggcccagtgctgggattcagacagacccgggctcaaattcttgcactgccacttaccaatcggttcccttggtcaagtcacttcccttcttggagattttagttttcctgtcgrtaaagtaggcgtgatgatatcttcctatcaggttgatgtgagatttcaatgaagctccgcatacaaaatgcttgcatgacacctagggtggcccagagtagaaacaaaaggtttttgttattgctattgttgtggatgatgtcattgtctccatctgtccactcggcttgcagttatgggtcaggaattcagagaccagaggtcacacattggtgatctggagaccttgtccagctcccagatgtattttgtttggctaatacagcacttcattgatttttttaaaaaaatctaattagttgccaatattt

SEQ ID NO: 784124 - DNA, 552 bp, Homo sapiens
ttacatgtattccttcatttaacccttgcaaacttagcatagtggctggcacacagtaaaagctcaataaatgtttgctgaatatatgaatgaatgaatcaatgaacaaggcgagtctctttactctggcccagtgctgggattcagacagacccgggctcaaattcttgcactgccacttaccaatcggttcccttggtcaagtcacttcccttcttggagattttagttttcctgtcgataaagtaggcgtgatgatatcttcctatcaggttgatgtgagatttcaatgaagctccgcatacaaaatgctygcatgacacctagggtggcccagagtagaaacaaaaggtttttgttattgctattgttgtggatgatgtcattgtctccatctgtccactcggcttgcagttatgggtcaggaattcagagaccagaggtcacacattggtgatctggagaccttgtccagctcccagatgtattttgtttggctaatacagcacttcattgatttttttaaaaaaatctaattagttgccaatattt

SEQ ID NO: 784125 - DNA, 534 bp, Homo sapiens
attcatttaaaaaattgcttattgagcacctattacattccagtcactgttccaggtactgaaaataaagtgtacaaataaagagacagcacatctcacgcctgtaatcccagcacttcgggaggctgaggcgggcagatcacgaggtgaggagtttgagaccagcctggccaacatggtgaaaccccgtctctactgaaaatacaaaaattagctgggtgtggtggtgggcacctgtaatcccagctactggtgagcctgaggcagaagaatggyttgaaggaggtggatgttgcagtgagctgagatcgtgacactgaactccaacctgggtgacagagcaagactctgtctcaaaaaataatgataaatatataaaataataaatatataaaaaataataaaaattaataataataataaaaagagacagcacatttgccctggtggaactgaaattctagtagtagacagaagaggcagcagacaagaatccaggaacaaataaatatgtactatgagaagcagtgataa

SEQ ID NO: 784126 - DNA, 582 bp, Homo sapiens
cagtgtcttttagtaaaaggccaggaaaaatgaaagcagggaagaagagaccaatctcccttatggaagaattccaaataatttatgtagatcctcccgcttctgggaggtggagcttaattctactccatcccttgagtgtgggcagtgctaagtgacttgcttccaaagaacagagtatggaaagaagggaatctttaattttacagggcagaaacctggcatacatggcctgggtcaggggrttgggagaacaatttcagtgatgagtcatgcagacagcagtaccctctggtgtgatgtgccttcacctctgaggtcaccttcccgccacataaaaccaactggaaggcagcggtaattccctgccaccagaagtatagacaaggcctgccaagggaccgtgtcagtcgcgcttgcatcttggcttgaccttgctacgcctttggtttcttcatctatagaagtgagggcaataaatggagcctcccaaggcattcggaggattaaaagggattcttatacattaaagtgctttgtaaaccacacagggccgcccacgaggagtgattaccagtgctc

SEQ ID NO: 784127 - DNA, 582 bp, Homo sapiens
cagtgtcttttagtaaaaggccaggaaaaatgaaagcagggaagaagagaccaatctcccttatggaagaattccaaataatttatgtagatcctcccgcttctgggaggtggagcttaattctactccatcccttgagtgtgggcagtgctaagtgacttgcttccaaagaacagagtatggaaagaagggaatctttaattttacagggcagaaacctggcatacatggcctgggtcagggggttgggagaacaatttcagygatgagtcatgcagacagcagtaccctctggtgtgatgtgccttcacctctgaggtcaccttcccgccacataaaaccaactggaaggcagcggtaattccctgccaccagaagtatagacaaggcctgccaagggaccgtgtcagtcgcgcttgcatcttggcttgaccttgctacgcctttggtttcttcatctatagaagtgagggcaataaatggagcctcccaaggcattcggaggattaaaagggattcttatacattaaagtgctttgtaaaccacacagggccgcccacgaggagtgattaccagtgctc

SEQ ID NO: 784128 - DNA, 582 bp, Homo sapiens
cagtgtcttttagtaaaaggccaggaaaaatgaaagcagggaagaagagaccaatctcccttatggaagaattccaaataatttatgtagatcctcccgcttctgggaggtggagcttaattctactccatcccttgagtgtgggcagtgctaagtgacttgcttccaaagaacagagtatggaaagaagggaatctttaattttacagggcagaaacctggcatacatggcctgggtcagggggttgggagaacaatttcagtgatgagtcatgcagacagcagtaccctctggtgtgatgtgccttcacctctgaggtcaccttcccgccacataaaaccaactggaaggcagcggtaattccctgccaccagaagtatagacaaggcctgccaagggaccgtgtcagtcgcgcttgcatcttggcttgaccttgctacgcytttggtttcttcatctatagaagtgagggcaataaatggagcctcccaaggcattcggaggattaaaagggattcttatacattaaagtgctttgtaaaccacacagggccgcccacgaggagtgattaccagtgctc

SEQ ID NO: 784129 - DNA, 515 bp, Homo sapiens
ctagcctgggagtttaaggctgcagtaagccatgatcccaccactgcactccagcctggacaacaggagtgaggccctgtctcaaaaaaagaaaaaaaaaagagtaatctattcttacaatggaatattattcagccataaaaaggaatggggcactgacrcatgctgcaacatggatatacttggaaagcatcttgttcagtgacagaagccagacataaggccacatactgaatgactcgatttacatgaaatatccagaacaagcaaatctacagagacacaaagtagatcagtgggctccagagaatgggggagagaaaagagaatggggagcgattgcaaacaggtaccaggtttctttccagggtgatggaaatgttctggtattagagagtggtgataattgcacaatgtgtgaaggtactaaaacccgcgaatcatgcacattaaaagggtgaattttatggtatgtgaattacgtcttaatgaccaaaccatattgacatcctttt

SEQ ID NO: 784130 - DNA, 538 bp, Homo sapiens
aactatttatagatatgatccatacaaacataagttctttgggatcctcaataatttttaagagcattggccaggcatagcggctcttgcctgtaatcccagcactttgggaggccgaggcaggcagatcacttgaggtcaggagttcaagaccagcctggccaacatggtaaaaccccatctgtacataaatacaaaaaaattagccaggcgtggtggtgcgtgcctgtagtcccagctactccagaggctgaggtaggagaatcacttgaacccaggagatggaggttgcagtgagccargatcatgccactgcactccagcctgggcgacagagtgaggctccatctcaaaaaaataacaacaacaataataattttaaagagcatcaaggggtcctgaggctaagaaatttgagcactgttctcactaaagagaaatgttgtcttgtctcaggtagcttttatcccacccagactctgggagggaaacttcacttgcgcttaaagcttgttctaaaatgtgaccccatctattc

SEQ ID NO: 784131 - DNA, 574 bp, Homo sapiens
gaaagaggccagggatttagcattaccaccaccccctcatatcaccacgagcaggtctctgatcctcagcttgtcatctataaaatgccatttcagcagtgggctctgcagatatcttactgtgtcctcgctcttcactggccaatccatccctgggttttgcagactcacctgcattgccagccttccaaaacagggtggaggggtgaggccttcatccatgcccttcctcaatctctccctctcctgagtgcctcctccacactgaaagcattgcttgccagggccgctactttgcacagcagagtgcyggcgcctacagcggtgtagctcgcggccctgccatttaccatctgtgggccgataacccccaacttccatctgtgccctgacctctcctctgcgcctcagatcttgatatctaagtgcccacttgatatatccaaactgaaaatgccttcgatgtaaatttgctgttcttcctattttcccacctagaacctggttgtagaaacctcagagtcttcctaatatgcaccatccctcactcatgccttgtttacagtcagcactg

SEQ ID NO: 784132 - DNA, 463 bp, Homo sapiens
caggcagcccccagtcacgtaccctctgcttgctcaatcgatcatgaccctctcacacgcacccccttagagctgtgagcccttgaaagggacaggaattcctcactccgggagcttggtggttggagatgtgagtcttgctgaagctcccagccgaataaagcctttccttctacaactcggtgtctgaggggttttgtytgcagcttgtcctgctacagacatatctgaaaggctccatattataaaggtgccagttagcaattgtattgaaaataccagtagaggccaagtgaagtagctcacacctgtaatcccagcactttgagaggctgaggcaggaggatcacttgtgcccaggagtttgagactagagtgagatatgattgtgtcactgtactccagcttgggctacagagcaagatcctgtctatccctcaaattttttaaattaaaaatattt

SEQ ID NO: 784133 - DNA, 504 bp, Homo sapiens
atcatttcacagaattctgttggtcaaagcaaatcacaaagtcaactcacatacaacagggagggaaacagacttggcctcttgatgaaagctgctgccaaatcacattacagacctggtgtgctggctcacgcctgtaatcgcagcactttgggaggctgaggcaggcggaccacttgagctcaggagttcaagaacwgcctgggcaatatggcgaaaccctgactctactactataaaaatacaaacattagccatgcatggtggcgcatgcttgtaatcccagctacttgagcagctgaggcacaagaatcgcttgaacccaggaggtggaggttgcaatgagccaagattgcaccactgcactccagcctgggggacagagcaaaaccctgtcttgaaaaaacaaaacaaaacaaacacacatacgcacacacattacagagggatatgcatacagggatgggaggaacttgcagctgttaatcaattgttaatttatta

SEQ ID NO: 784134 - DNA, 578 bp, Homo sapiens
gtacatacatcgctgaaagaaatctcaggcgcaataagctctccctgtttttgaatttctacaggtcggagaatagtaaaactgctccaggtgaggcttgaactcacaacctcggcattgctcacaggtgcactgtcttataagtaccgcgcgctaaccgattgcgccactggagccacagaaataataaggatttggaaaggtataagagaagatgctcttacagattgacgatgaactctttaaacattgttttttaaggtattaaataatatgaactttaggcaccttytaatacaggacttccacgaatgggatgaaaagcaacaatcaagagaaccctggaattagctgatccggagcccttttccttccaactcagagatgccctagggactcagggttgacgtcaccggtaccttgaatttctgctcagattttcccacggcttctctaaagtcagacaataatttaaaaacatttgaatgaaagtcacatcggttcaccaaaagcaggaagctaagatggctgcatgtaaaatagacgtgtcaatcactacattcggagtgaagtttcca

SEQ ID NO: 784135 - DNA, 578 bp, Homo sapiens
gtacatacatcgctgaaagaaatctcaggcgcaataagctctccctgtttttgaatttctacaggtcggagaatagtaaaactgctccaggtgaggcttgaactcacaacctcggcattgctcacaggtgcactgtcttataagtaccgcgcgctaaccgattgcgccactggagccacagaaataataaggatttggaaaggtataagagaagatgctcttacagattgacgatgaactctttaaacattgttttttaaggtattaaataatatgaactttaggcaccttctaatacaggacttccacgaatgggatgaaaagcaacaatcaagagaaccctggaattagctgatccggagcccttttccttccaactcagagatgccctagggactcagggttgacgtcaccggtaccttgaatttytgctcagattttcccacggcttctctaaagtcagacaataatttaaaaacatttgaatgaaagtcacatcggttcaccaaaagcaggaagctaagatggctgcatgtaaaatagacgtgtcaatcactacattcggagtgaagtttcca

SEQ ID NO: 784136 - DNA, 578 bp, Homo sapiens
gtacatacatcgctgaaagaaatctcaggcgcaataagctctccctgtttttgaatttctacaggtcggagaatagtaaaactgctccaggtgaggcttgaactcacaacctcggcattgctcacaggtgcactgtcttataagtaccgcgcgctaaccgattgcgccactggagccacagaaataataaggatttggaaaggtataagagaagatgctcttacagattgacgatgaactctttaaacattgttttttaaggtattaaataatatgaactttaggcaccttctaatacaggacttccacgaatgggatgaaaagcaacaatcaagagaaccctggaattagctgatccggagcccttttccttccaactcagagatgccctagggactcagggttgacgtcaccggtaccttgaatttctgstcagattttcccacggcttctctaaagtcagacaataatttaaaaacatttgaatgaaagtcacatcggttcaccaaaagcaggaagctaagatggctgcatgtaaaatagacgtgtcaatcactacattcggagtgaagtttcca

SEQ ID NO: 784137 - DNA, 563 bp, Homo sapiens
caggcaagcacgtcctgtttgtcaatgtggccgcctattgaggcttggcagctcagtatcctggtaagaactcacgtttcaactcttttggaagcagcattgccagatagccatattctaattccagaaggttttaccaatgtgttattggaggatgcgatgggagaactgatcaggtgactctacctccctaaatgctgctcctgctctgctccttagaatatcaggataattatttccagatttgagaactaagaccttcccaaagacttaaagaccaccaggagcacacttgcagttgaacaagttgaatgtgttactcggtaccctgaaggagaacatgttctatagagaaccatggggtttyttaataagaaagtattagaaaggacttactatagaatctgaacttttgttacgtgatttggagacgagttcaaggaattgaagttctgttctggattggatgccatcaagaactgtgagcaattatatgatttggtgtcttaatcaatcatatctacatggggagagaaacgaagactaaagctgtaactggtaaa

SEQ ID NO: 784138 - DNA, 639 bp, Homo sapiens
tgtcttgtcaaggactctgccctcaactgcagcacttgctgagtagctatgaaaaatgaattatatatcatgtgaccttttactttgtggctgaagccacatctctagtcttcatttctctctctcttcagttttttttttggagtttcatctgcctgctggagtttccacctgaaagagctaakagttacctcaaattcattctgttgtgtagtaaagaatttggctggggccgggcgcggtggctcacgcctgtaatcccagcactttgggaggccgaggcgggaggatcacgaggtcaggagatcgagaccatcctggctaacacggtgaaaccccgtctctactaaaaatacaaaaaattagccgggcgtggtagcgggcgcctgtagtcccagctactcgggaggctgaggcaggagaatggcgtgaacctgggaggcggagcttgcagtgagccgagatcgcgccactgcactccagcctgggcgacagagcgagactccgtctcaaaaaaaaaaaaaaaaaaaaaaaaaaaaaagaatttggctggtttttgtctttggtccttgggtggaagcctccaaacccttggatttcccacgtgataggagtgtttgttatttatggtttattagc

SEQ ID NO: 784139 - DNA, 620 bp, Homo sapiens
ccaacagccctgtaaaagacagagcacttctttttctttgctagctgaactggatccattcatcctcaatgtcacagaagaaaaacgatgtgatgaaaacctttcttgaatagacataccagagatcaggtaagaaattttggacgtggccaagtagcaaacagtaaagaaagatggcattcaaaggcagaaaacagatgaattggtgatttcaacttcasacttacaaagtctttcagttttgttgctactttcttagacaaactcctctttattactccttcaattgatctgaaacctctacttggttatctgttagtatgctcaaaaccacccccacaaaagcataaaatctaagttatattcttgtgtatgctatgggaacacaacctccaaagaagtgctctgccttcccagttttcaatcaccattaagctcttccctccattgtcagagatgcacctccattttcctatggattacttcagtaagttctgtatcagtctcttgcttccaatattttctctctgcaacacacactatggggtgcttttaggttaggcttcctaaaatacagcagttagcatgccactctcatattcaaaagctttcactggctc

SEQ ID NO: 784140 - DNA, 495 bp, Homo sapiens
ttaagttctggaggcactggtggcagggagcagctgatcttctcacctttccatgttattgtgtccactgacaacatctgcatcctggccagcactggtctatgttgaagctactgcatcctccctgccttcctgtgaaagcaattgtgtgtgcagttttctctgccagacttgcttcactcttgctagtgcagtgaaacatcctatagatacttctacaggattgcgcctcacacagagtggtgtggacaactctgtgaggcttgctgcctcccagactcccctttagtcagaggtcctctctgtgttccaaacccatctgaggcttttattggataagtgacacagtgtatagaasccatattaaaggccatgctaatattttagatattgctgcctcttgagctctcttctgagcctggacaacctttatcttgcagacatatgtaggtaggtagtagaagtcttttatatctactgtttaatgcataaact

SEQ ID NO: 784141 - DNA, 543 bp, Homo sapiens
ttctgaaaaattattaaacttgataagaccgtgggaacccccgaatttgtagccagccggtcagaagtaagaatagcctggagtcccccaaacttgtgagtgttgtatgaagtagaattttgtggaaattttgtggaaaactgtgcccttagtttgtgaagtttggcctatctatgggcatcccctttgtctctttgcttgctctctccaatcttctcagaagtgtaaatcttagctcttggcccatgattgaacctatctgtgccagaacktctggataccaaaagcctcttgagttatctgcctattacctgctgctgcactcccctgagcatgagggagcttctactgggatcttcctggacaatcgcaaacttcagagagactgatctaactattttagttgttgtctttgttcgtctattttctggcatctcttgttacccattgaactaaaggtttgataaggtaccagtacggttaagtcatttgttcaatacaagaagacactgattgtgagtcatatatacatgtatatataca

SEQ ID NO: 784142 - DNA, 813 bp, Homo sapiens
tccagcttctgtacctgggtgaaaacagctgagggctttatcgtaagagcttctcttaggctgtcactttggagagttttcttgaagttggtacagatgtcattattagtacatggaaatgatgttttgattttcataattttgtttattttgtwatatatttgtttattttggtatgtgttagaaaaactaccaccagcttttcaagaatgttatttaatggatagtattgcctaggaattgatttaaaagtgagttggtttaaagaaagtattaagtgacaaatactaggttggtacaaaagtaattgaggtttttgccattacttttaattaaattactgttaatggcaaaaaacacaattacttttgcaccaacctaataatataaatggttgtactggataatttccttcccccaaatttatgtcctccccaaaatttcaggatgtgaccctatttagaaacaatgcatatgtaactggctaagatgagatcttactggaggagggtgagcctttaatccaacaaagacttaaaattcagtatgttcttatgagaagaggagaagaaagacagagacacaagaggaatgccacgtgattgataaaaaccagagactggagtgacacctctaaaaatgtaggaaagccatttccagcagccaatggaagctaagaagaggcaaggaagtatcctccctgctaacacttttattttagatttctagcctctggaggtaagaaagaataaaggtttgttgtttcaagccatccagttatggtactttgttaaggcaatttgaggaaaataa

SEQ ID NO: 784143 - DNA, 557 bp, Homo sapiens
agttcatagccctaaaggcctacatgaaaaagacaaagagcacaaactgacactctaaggtcacacctcaaggaactagagaaaaaagaacaaaccaaacccaaaaacccagcagaagaaaggaaacaacaaacatcagagcagaactaaatgaagctgaaacaaacaaaaaaccrcaaaagataaacaaaaagctggttatttgaaaagataaataaaattgataggccattggcaatatgaaccaagaaaagaagaaaattcaaataacctcactaagaaatgcaacaggaaatattacaactgacaccactgaaatgtaaaagatcattcaaggctactatgaacacctttatgcacataaactagaaaacctagaggagatggatacattccttgaaaaatacaaccctcctagcttaaataaggaagaattagatgccctgtacagaccaataacaagcagtgagattgaaatagtaataaaaattaccaacaaaataagtccaggaccagatggattcacagcagaattctaccagacattcaaagaagaa

SEQ ID NO: 784144 - DNA, 633 bp, Homo sapiens
aaagaagaaaaaagatttaggggcaggaaatattccctgggtactttacctttctagaggtttttattctaccttgggtgaatttctgaatctagtcacaaagaaatgttggatttttaagaagttaatttttagcatttcatgaattttagacaagcacatttatcaaatggcatttccatttttgatctatgtccttcagttgagtcagtatgggattttaacctgacaaaagctgaaagtattttacaaactttgaatgtgtagtaactggtagagcaaggaccacattaattcttgatgaaagaagaatttcagccaaattaaatttaaaggagtttaatttgagcaatgaacgatttgtgaattgggcagcccccagaatcagcagattcacagaggctccagcgtagtcacatggtggaagaagatttatagacaagaaaaagggaaatgacatacagaaattggaagtgaagtacagaatggctgsgttgtttacagctcggtgtatgccttatttgaacacagtttgaatgctcagcagtgtatgaattgaagtatggccactgggattggccaagacatagctattgttacagcataccactaagttagcttttcaattttgtc

SEQ ID NO: 784145 - DNA, 613 bp, Homo sapiens
cagttggatatgtcactcctcctcacattgcattggtgagaacccactcacaaggtcacatctagcagcatgggtaccactaaatttggatgagaatgggatgggttctatcactaaaaagaagaaaggcagaatggataatgggacaattaacagtgtctgccacagggtacatagaatgtttaagaaactgaagtaaatgtagtatggctggagagtacagtgagacatggagagtgctcagaaagaggcagtagaggtaagggaggggrccaagattaaggaggcctgaaaacattgacttagaggtaatggaaagcccctgaagagttttaagtggaagaataccacaatcagatttgcattttgaaagattctcttaatttcaggagggaggatagaatgaagatgaattaggcagtttttgcaggttccagagaagagctcgtggtcacttacactgggttaggggctatggagagaggaagaggaaattgaattccatagctatgtagaacacagaatcaagaatatcaaaagatgcagatgagaaatataaaggctgagggaaagggaaaagttaaagatgttcccagattttctggctttcgga

SEQ ID NO: 784146 - DNA, 613 bp, Homo sapiens
cagttggatatgtcactcctcctcacattgcattggtgagaacccactcacaaggtcacatctagcagcatgggtaccactaaatttggatgagaatgggatgggttctatcactaaaaagaagaaaggcagaatggataatgggacaattaacagtgtctgccacagggtacatagaatgtttaagaaactgaagtaaatgtagtatggctggagagtacagtgagacatggagagtgctcagaaagaggcagtagaggtaagggaggggaccaagattaaggaggcctgaaaacattgacttagaggtaatggaaagcccctgaagagttttaagtggaagaataccacaatcagatttgcattttgaaagaktctcttaatttcaggagggaggatagaatgaagatgaattaggcagtttttgcaggttccagagaagagctcgtggtcacttacactgggttaggggctatggagagaggaagaggaaattgaattccatagctatgtagaacacagaatcaagaatatcaaaagatgcagatgagaaatataaaggctgagggaaagggaaaagttaaagatgttcccagattttctggctttcgga

SEQ ID NO: 784147 - DNA, 625 bp, Homo sapiens
gaagttcattgtctacaaatctcagtaggttgtggggaccacttgtgagattacctctcctacacttccaaatgtgaactgggcaatggcctctgcccttcatgtccactcttccctgcctcttccttccatgactttggccagagaggtgggcaaagcatcacatctcaccttagatttgcattacttttcctttctttgtcttcttacaagtcaccagaaatctgatgggatgggctttctctccttcatgcttaacattctcytacattaaatgctccttctgactgtggtcatatttgacctgttcccttccctggagctattgtcagctgttgaggtaaggtgggggagaatcagcctcctgataaagaaggtatcaggatctgaagctatagatcaggatgaagtggattcttactgctggaaaaccataaaggctaagatagccgaatatgcaaccataagcaaaagactattctagatctgtacacacacacacacacacacacacacacacacacaaagactctttagaccactatctgttttatttagattttaagggtaactatgctccttgttaactgagagtccttgttatagaaagttcagctaaaaagac

SEQ ID NO: 784148 - DNA, 634 bp, Homo sapiens
gtttaaactcaggtagttgtctcacacatccttccatttgttagagtgtataattacaagagtcagttgtgcttgctaatgacttgaaactaagcctattgtacgtgttcctttaatgacaaaatctagttaaatattatgtaactaaggctgggtgtggtggctcatgcctgtaatcctagcactttgggaggccaaggcaaaaggattgctaactcaggagtttytgcaacatagggagatcctgtctctacaaaaaaaattttttaaattagtcaggcgtgatggttccagctgtagttccagctcctcagtaggctgaggtgggagggttgcttgagcccaggaggtcaaggttgcagtgagccatgattgtgccactgtactgcagcctgggtgacagagtgagcccctgtttaaaaaaaaaaaaaatatatatatatatatatatatatatatatatatatatataactaatgatacttcagcgtaaaaagagaactgtttctatgaaaaattgaatgctttctcaataaaggtgagtcagtcaaaaagaaagataaacaagctgcccaagaatgtataaggaagattattgaggaataatctttttgtgtgttcacataccattaac

SEQ ID NO: 784149 - DNA, 585 bp, Homo sapiens
ctctgtgtattttaaaggtttcactatgatgtatctatgtggggatctctttgtgtttatcttatgtggcgttaattgagcttcttagatgtgtagttgtttttaattatctttggatagttttcagccattattttttaaaataatctttctattcctttctctctctctctcttctcctctttgacttcctttatgtgtatgttggtaaacttaatgatrtcccatgggtctctgaggcgctatcctttttttctctattctttttttttttgcttgtatcttagactagatcatctcaattgacatatcttcaatttttcttattctttcttctgctaattcaatatgctgttgaactcttctactaaattttaatttcagttcttttatactttgaaatagctagtttttaaaatagtttctatgtattgatatttgatgagacatcataattacctttaattccttagacatagtttctgttagttctttgaacatatttaaactctttgtctcgtaagtccaacatctgggtttcctcagagacagtctctattggctgtttttcccctttttgggggc

SEQ ID NO: 784150 - DNA, 606 bp, Homo sapiens
aattctgctgaaactattttaaaaaaactgagaagagggatccccccataactaattctataaaaccagtattatcctgataccaaaatctggcaaagatacaacaacaaaaaagaaaaccacaggccaatatccctaatgaatatagacacaataaccctcaacaaaatataaacaaactgaatccaacaccacatctaaaagataattcatcatgatcaaktggattttatcccaggaatgcaagcacggttcaacatgcacaaatcaataaacatgatacatcaacggaatggatacaaaccatatgatcatctcaaaatgagatgcagtaaaaaacattcaataaaatcaaacatccgtttatgataaaaaccctccacaaactaggcatcaaagaaacatacctcaaaataataagagccatctatgacaaacccacagccaacatcacgttgaatgggcaaatcttgaaaccattctccctaaaaatgaagaagacaaggatgtccactctcactactcctattcaacatacttctggaagtcctagccagagcaatcaattaacagaaagaaataaaaggcatctaactaggaaaagag

SEQ ID NO: 784151 - DNA, 585 bp, Homo sapiens
ctctgtgtattttaaaggtttcactatgatgtatctatgtggggatctctttgtgtttatcttatgtggcgttaattgagcttcttagatgtgtagttgtttttaattatctttggatagttttcagccattattttttaaaataatctttctattcctttctctctctctctcttctcctctttgacttcctttatgtgtatgttggtaaacttaatgatgtcccatgggtctctgaggcgctatcctttttttctctattctttttttttttgcttgtatcttagactagatcatctcaattgacatatcttcaatttttcttattctttcttctgctaattcaatatgctgttgaactcttctactaaattttaatttcagttyttttatactttgaaatagctagtttttaaaatagtttctatgtattgatatttgatgagacatcataattacctttaattccttagacatagtttctgttagttctttgaacatatttaaactctttgtctcgtaagtccaacatctgggtttcctcagagacagtctctattggctgtttttcccctttttgggggc

SEQ ID NO: 784152 - DNA, 585 bp, Homo sapiens
ctctgtgtattttaaaggtttcactatgatgtatctatgtggggatctctttgtgtttatcttatgtggcgttaattgagcttcttagatgtgtagttgtttttaattatctttggatagttttcagccattattttttaaaataatctttctattcctttctctctctctctcttctcctctttgacttcctttatgtgtatgttggtaaacttaatgatgtcccatgggtctctgaggcgctatcctttttttctctattctttttttttttgcttgtatcttagactagatcatctcaattgacatatcttcaatttttcttattctttcttctgctaattcaatatgctgttgaactcttctactaaattttaatttcagttcttytatactttgaaatagctagtttttaaaatagtttctatgtattgatatttgatgagacatcataattacctttaattccttagacatagtttctgttagttctttgaacatatttaaactctttgtctcgtaagtccaacatctgggtttcctcagagacagtctctattggctgtttttcccctttttgggggc

SEQ ID NO: 784153 - DNA, 585 bp, Homo sapiens
ctctgtgtattttaaaggtttcactatgatgtatctatgtggggatctctttgtgtttatcttatgtggcgttaattgagcttcttagatgtgtagttgtttttaattatctttggatagttttcagccattattttttaaaataatctttctattcctttctctctctctctcttctcctctttgacttcctttatgtgtatgttggtaaacttaatgatgtcccatgggtctctgaggcgctatcctttttttctctattctttttttttttgcttgtatcttagactagatcatctcaattgacatatcttcaatttttcttattctttcttctgctaattcaatatgctgttgaactcttctactaaattttaatttcagttcttttatactttgaaatagytagtttttaaaatagtttctatgtattgatatttgatgagacatcataattacctttaattccttagacatagtttctgttagttctttgaacatatttaaactctttgtctcgtaagtccaacatctgggtttcctcagagacagtctctattggctgtttttcccctttttgggggc

SEQ ID NO: 784154 - DNA, 658 bp, Homo sapiens
ctatattttttgcatgtaactactgaagtctctatagttagcttagtggttgggtaatggttggatagagatttccttaaggaatttgaaccagtaagtcttccaacctttgccaaatggctacggtgtatgttgaggcatgccttcagtgatctggcaggcaatttacaactttgctttaatcttcctaaagatgaaytttagcctctctaaaaccaaattttgcacggagcctcaagatcagcctaaggtgagaaactggagccttctcaattctttcctgggcatgcacacaaccctaagcatgcatgtggcctcctagaatctcagaaatatgttggaatttttcaaagccctttatggatatctcactccccagtttttccttttaagatttttggtcagcctcatgctgcctccagcagtggtgatgttaaaccattgctattcattgatttttacaaatgctctggtgaaaaggttgtttgcatggaacatgctctcagtgaggtaaaataaagacaagctttgagaatggagcttttccagggagtttccagagatgtcaaatatgacaattctctggggatggggcttttggggggagctccaaatccattctgcccattgccgtggctgctaggctgctggttttcat

SEQ ID NO: 784155 - DNA, 493 bp, Homo sapiens
cctgtcccggggactgccaaggccgtgggcgctgcgtgcagggcgtgtgtgtgtgccgggcaggcttctcaggccccgactgcagccagcgctcctgccctcgaggttgcagccagaggggacgctgtgagggtgggcgctgcgtgtgtgacccaggctacactggtgacgactgtggcatgaggagctgccctcgcggttgcagtcagagggggcgctgtgagaatgggcgctgcgtgtgtaaccccggctacrctggcgaggactgtggggtgaggagctgccctcggggctgcagccagcggggacgctgcaaggacgggcgctgcgtgtgtgaccccggctacactggcgaggactgtggtacgcggagctgcccctgggactgtggcgagggcgggcgctgcgtggacggccgctgcgtgtgctggcccgggtacacaggcgaggactgcagcacgcggacatgtccgagggactgccggggccgcgg

SEQ ID NO: 784156 - DNA, 544 bp, Homo sapiens
gcaataacaatgtcgtcagcgtcctcaccgtccaggaaggcagcaggccagctccttctcaagccctgggatggctcctcaggcagacaccagatcccttccctgcctgagctccccggcatcatccccctcaacattctcacaggcagcccacgctccttcaccaggcccagtgggagccttagttctcccgggccagccggtgcagaataagaaagggaacggagaagggtgagaactacctgtgtcgtaacatcctgcctccctgacctgccgagtgcccccatcagggatcctgcgctcctcggggccggccaaatcacccctttcctcaggggccggccaaatcacrgccaaatcgtgtgctcctgggtaagaggagatagagacccagtctgtaagaagctgcaccctgctggggaagcagtctgtgagaggcggaaagaggctggacagaaaggggagtaagatgaggcagggagctagggaatctcttttcctggaggtgactcaggacaggtgaccctccccacttgggtcaagg

SEQ ID NO: 784157 - DNA, 618 bp, Homo sapiens
tttgtaataggcaggcattaagttgtcgtcctgccagaaaaggagggagtactttcagttcaggacaaggagaggctcagggaggggctgggggtgggcctgaggggctgtgaggcaccttgatcttgtctccgaaggtgaggtaacagatgatgctgcaggtgaggagagagaattcctcctcaatggccacaggggtgccgggctgggctctcatgcgctgtggagaaacagtgtgagttcagcaggccgctgtgcagcgggcagggcgggggctactgtgagaggcraggctgacccgaggtggcctcaggagcccagccttacctcacagaactcctgggtcagctgctccaccactggctccatggagtcacggatgcccagcagcagggctgagcgggtgagcttcttgtgggctttccagagcagggagtagtctcccaaggacaggtccgggtagttcctagacaccagcttgtctgcaggaggaggtgggggctggagggtgggaactgatgaaggcagctgagggcctgaccttcttcggcctccccaacccctgctttctccccaccagatatgcccccccaagagcttccagggacctggattggg

SEQ ID NO: 784158 - DNA, 617 bp, Homo sapiens
agagtaatacagtttaagcctggtttgcctggggcattccagtatatacaggtatcccagtgtgattgttattagtgcctcctttcactcacaaaagtgcccagaagacaaaggaggaagtggtttcccgctgcggagtaatagcatgtaccagacactgctctaagtgctttgtgggcactcactcaactcttcacagccatgctctatatgcaayacgggtattgttcgcatgttgtggagggcaggattccagcctggaaatctagctgtcgaatatgtacctttagccaccaggagcacctttctttggttgaaaggaaaacagcccaccttgagctggtttgagataaaaaataagaattggggaatttcacagaactcaggaaaaagaagcagaggaggggaccccactggtcttagaaagtcaaggatagggaacagaaaaagccccggagacgggcagtttcctcgctctgttcctctctcctctttcttctctctgcagtcaagtttcttgtgtttccaggcacaggcagaacatgactgccctcaggactacagtccacaggttctactccagccagggaaagtatggattcccagcacaactgggc

SEQ ID NO: 784159 - DNA, 617 bp, Homo sapiens
agagtaatacagtttaagcctggtttgcctggggcattccagtatatacaggtatcccagtgtgattgttattagtgcctcctttcactcacaaaagtgcccagaagacaaaggaggaagtggtttcccgctgcggagtaatagcatgtaccagacactgctctaagtgctttgtgggcactcactcaactcttcacagccatgctctatatgcaacacgggtattgttcgcatgttgtggagggcaggattccagcctggaaatctagctgtcgaatatgtacctttagccaccaggagcacctttctttggttgaaaggaaaacagcccaccttgagctggtttgagataaaaaataagaattggggaatttcacagaactcaggaaaaagaagcagaggaggggaccccactggtcttagaaagtcaaggatagggaacagaaaaagccccggagacgggcrgtttcctcgctctgttcctctctcctctttcttctctctgcagtcaagtttcttgtgtttccaggcacaggcagaacatgactgccctcaggactacagtccacaggttctactccagccagggaaagtatggattcccagcacaactgggc

SEQ ID NO: 784160 - DNA, 585 bp, Homo sapiens
taggcacctattcaagtcttaacagacttgcttcagcaagaaaagtcagcttatccagagattctgggcggacattgtggcagaacctgcagacaggcttgatactggagtccttgggtaggttgacctggtgtctgaatcagcaaatgggcaggcctagtgtctgagtccactgggtcttgcctgatgcctgggtcttcagggttgggcctatagcctatttccaccagacactcctggagttttagagtttgagtctgccaggatggctcctgtggagacaggagcctccctggatccggagtctgctggtgtggatctgtccactgggtctgcagggatggtcttagagcccagatccataggggccaaactagcactggagtaggccttgatcctgaattcatgaaggccaractagaggctggctctgtaagtgttaacctggagctcaggaccatgggggtgatactggagtctgggtttttaggggctggctcaatgccagggtctattggtacaggcctgaaacctggatctgctggagcatggaaccacaggaacttgcctggagcctggggctac

SEQ ID NO: 784161 - DNA, 569 bp, Homo sapiens
caacattaatttttttttattttttattttctgattatgacctttcttgcaagagtgaagtggtatcacattgtggttttgatttgcatttgcctgataattagtgatgttgagcatttttttcttatgtttgttggccatttgtatgtcttcttttgmgaattgtccattcatgtccttagtccactttttaatgggattctttttattttctcactaatttgtttgagttccttgtagattcttgatatcagtcctttattggatgtatagattgcaagattttctcccactctgtgtgttgtctatttgttgattatttcttttgctgtgcagaagctttttagtttaattaagtcccatctatttatctttgtttttgttatgtttgcttttgggttcctggtcataaactctttgtctaagccaatgtctagaagcatttttttcaatgtcatcttctagaatttttatggtttcaggtcttagatttaagtctttgatccatgttgagttgatttttgtataaggtgagaggtgaggatccagtttcattcctccacatgtgg

SEQ ID NO: 784162 - DNA, 578 bp, Homo sapiens
cagtttaaagagcgatacgttcttaccctttactaaataagtttaggataacagagtttagagcaaatactttattcagggaatctcgaaatcctaaaatgccaacagagtactattgttttgctaccactcaaaaaggaaacattttaaacataaatgctctgaagaaagaattaattttttgaatttaaaatattttgtatatttacataggatcggttcccaattcctctatcaattgaataagcctgtgaatgtgctccaagctggctccttccctaaagaaaagaacacatttctccagagaggattttgaggaatgtgtccaaatcctaaatcccttcttccccaagagaaaaaaaaaaatgggagagaatcargacatggatttctatttcaactcttctttcttagatctttgaattatgggatattaaaaataaacctagaggatattgcaatgaatttttggagcagctggaaaagaaaccataaaacgagtgattacaatcagcaaagtgtgataacagctgaacgcattagacccatccttaaaaagccagaccccaccccctccc

SEQ ID NO: 784163 - DNA, 552 bp, Homo sapiens
attttctcaaccttgccagactgtagcaacatttatgatctgaagatttattgattttagtttttatccctctcataataggaaaccaccctttagaccattgacctcctcttgttataatgagagtagaataaagaaacatatttataatgccattcttggaaacaggcaagttttttaaggtgttataaagaagtgctggtgatataatggcagtgattgtaacaaaggttatatgaaatagccatttaacacttgaagcttatattgattggatttttcccctgtcttattacctaggtaacttgaccatgtttcatatttgtaactaattatttaaataattaagtgtatacatttcagaacatcgtastctagaaagcaaatgctctccaaacaaaatcagatgtcaaacaggtcactgttttgaatatgaattattctagaaggaattttttaaagaaagaaacagagaaagagaaaaatatttttctctagataatgaagatttagaaacaatacacttttaaacttttataatgacgttgggaa

SEQ ID NO: 784164 - DNA, 606 bp, Homo sapiens
attctaggtgaagtaactcaggaatggaaaaccaaatatcatatattagtggaggccgtggtgaagttttgctggggactggaatgccatgcaggccggtcttttggtcccactggtgtcaatggcaggctgagcatctctgtcttggggccctagagtggtgtacactggtactggtattagcaggtccaggcagaaaatatcataaatgggagctaaactataaggaygcaaaggcataagaatgatataatcgactttggggattcagggggaagaacggtgagggggataagggataaaagactatatattgggtacagtgtacatggctcaggtgacagatgcaccaaaatctcagaaatcatgactaaagaacttatccatgtaaccaaaaaccacctgttcccccaaaactgttgaattaaaaaaaaacatacaaacaaggccagcttcacagacatgcaacctatgcacatggctttgcgctcagaacttagtctctgctgttgccattttgaaattctaaataatttttgaacacggagacttgtactttcattttgcactgggccctgcaaattatattgctgatcccacacatgt

SEQ ID NO: 784165 - DNA, 620 bp, Homo sapiens
tgccatggttactgctgaaagccatataggctctgtgatttaaaaaactatggacggtgggccgggcacggtggcttatgcctgtagtcccagcactttgggaggccaaggtgggtggatcacttgagggcacgagttcgagatcagcctggccaacatggcgaaaccctgtctctactaaaaatacaaaaattagctgggtgtggtggcaggcacctgtaatcccagctacttgggaggctgaggcaggagaatcgcttgaatcaaggaggcacaggttgcatgagccaagatcctgccactgtactccagcctggacracagtgagactccatctaaaaaaaaaaaaaaaaacagctatggagggtggagaaatcaaattcttttttaaatttagaactggatgttaaaatggtaaggaacacattgcaatctgcagagtcattaagttgtcataaggctttgatctctacagagattcatgcaatcgccttaatatgactaacaatacaaataaacttgttcaaaaaggaatgtcataattctgggggtttgtgtaagaaatttatttttattagtttttttttcttccaatacccctagtcattgtcatctagttt

SEQ ID NO: 784166 - DNA, 600 bp, Homo sapiens
gaatcaaaagaaaagtttaactctgtgagatgaatgcacacattgcaaagcagtttctcagatagctttcttctagtttttatcctgggatattctcttttttgcctttggtctcaatgagctcctaaatgtccatttgcagaatgggcaaaaacagtgtttccatactgctgaatcaaaggaaatgtttatatctgtgagatgaatacacacatcacagagcagcttctcaaaaagcttctttctactttttatctcaagatattttatttttctctataggctttaatgcactcccaaatattccttcacatattccacaaaaagagtgtttccaaactgctgaatgaaaagaaagatttaactctgtgagatgaatccacacatcacaaagcagtctctcagaaagcttctttcaactttttatctgatgatatcttcttttttaccatakgcctcagtgcactcccaaatatcacatcatagattctacaaaaacagagtttccaaactgctgaatcaaaagagagttttaactctgtgaggtgaatcaacacttcacaaagcagtttctaaaaagcttctttcaactttttatct

SEQ ID NO: 784167 - DNA, 600 bp, Homo sapiens
gaatcaaaagaaaagtttaactctgtgagatgaatgcacacattgcaaagcagtttctcagatagctttcttctagtttttatcctgggatattctcttttttgcctttggtctcaatgagctcctaaatgtccatttgcagaatgggcaaaaacagtgtttccatactgctgaatcaaaggaaatgtttatatctgtgagatgaatacacacatcacagagcagcttctcaaaaagcttctttctactttttatctcaagatattttatttttctctataggctttaatgcactcccaaatattccttcacatattccacaaaaagagtgtttccaaactgctgaatgaaaagaaagatttaactctgtgagatgaatccacacatcacaaagcagtctctcagaaagcttctttcaactttttatctgatgatatcttcttttttaccatagkcctcagtgcactcccaaatatcacatcatagattctacaaaaacagagtttccaaactgctgaatcaaaagagagttttaactctgtgaggtgaatcaacacttcacaaagcagtttctaaaaagcttctttcaactttttatct

SEQ ID NO: 784168 - DNA, 652 bp, Homo sapiens
ctgagaagctgctttgtgatgtatgcattcatgtcacagagatgaaactttcttttgattcagcagtttcaaaacattctttttgtcttttctgtggatggtcacttgggagctcattgaggccaatggtgaaaaagtgaatatcccaggataaaaactacaaagaaactgtttgagaaaatgctttttggtgtatgcattcatctggctgactaaaacctctatttcattcagcaatttggaagcatttttttttgtataatctgtgaagggatagttaggagcacatggagrcctatggtgaaagataaaatatcttcagctgaaaataagaaagaaggtttctgagacactgatttgtgatgtgtgcattcacctcacagagttaaaccttccttttgattcagaggttggagacactgtatttgtccattctgcaaatggaaatttgggagctcttgaggccaatggtgaaaaggtgaatatcccaggaaaaaaaaacctgaaggaaattatctgagaaacaggttttgatatgtgcattcatctcacagaattaaatgtttcttttcactcagcagtttggaaacaccgtttttgtagaaactgcaaagggatatttgggagctcattgaggtcgatggtgaaaaag

SEQ ID NO: 784169 - DNA, 479 bp, Homo sapiens
tattgcaggagtaaggtggcatcacattgcagttttgatttgcagttccctgatcattagtgatgctgagcattttttcatatgcttgttggccatttgtatatcttcttttgacaactgtcaattgtctatgcatgtccttagcccactttgtgatgggattttttttttcttgctgatttgtttgagttccttgtagattctgtatagtagtcytttgtcagatgcatactttgagaagattttctcccactctgtgggttctctgtttactctgctgattcttttgctgtgcagaagccttttagtttaagttccatctatttatctttgtttttgttgcaattgcttttgggttcttgatcataaagtctttgcctaagccaatgtctagtagtgtttttccaatattatcttccagaatttttatgattctgggtcttagatttaagtctttcatccatcttttttttaaattt

SEQ ID NO: 784170 - DNA, 604 bp, Homo sapiens
cactgcactccagcctgggcaccattgagcactgagtgaacgagactccgtctgcaatcccggcacctcgggaggccgaggctggcggatcactcgcggttaggagctggagaccagcccggccaacacagcgaatccccgtctccaccaaaaaaatacgaaaaccagtcaggcgtggcggcgcacgcctgcaatcgcaggcactcggcaagctgaggcaggagaatcaggcagggaggttgcagtaggccgagatggcagcagtaccgtccagcttcggctyggcatcagagggagaccgtggaaagagagggagagggagaccgtggggagaggaagaggaagagggagagggagagggagagggagagggagtgggagcgggagcgtctttcatccatcttgagttgatttttgtataaagtgagagatgaggatccagtttcattcttctacatgtggcttgccaattatcccagcaccatttgttgaacagggtgtcctttcctcactctatgttttgtttgctttgtcgaagatcagttggctgttaagtatgtgggtttatttctgggttctctattctgtttcattggtctaagat

SEQ ID NO: 784171 - DNA, 594 bp, Homo sapiens
caagatattcacatggccttaaagtatcattccacagattattcaacaattacaaagaaaagaaaattaatttttacaatgaagagatctggtgttcaccaccttaattaaggactaaacttgacaacaccaaaagtgggacaagctgacatgatatgcacccgatatgatgcaaaccatttacatgtactttgtagattttttttatagtatttttgccaaaaaagtttagcctgaatataatcaggatgaaatacattcaaaatgttggacattttataagacagtgggtcgaaggccgggygcagtggctcacgcctataatcccagcactttgggaggccaaggtgggcagatcacgaggtcaggagttcgagaccagcctgaccaacatggtgaaaccccatctctactaaaaatacaaaaattagctgggcttggtgacgcatgcctgtaatcccagctactcgggaggctgaggcaggagaatcacctgaacccgggaggcaaaggttgcagtgagctgagatcgcatcattgcaatccagcctcggtgacagagcgagactccatctcaaaaaaaaaaaaaaaaaa

SEQ ID NO: 784172 - DNA, 600 bp, Homo sapiens
attccctatttcctactgaaaatcatccaaatttattcgccggacactcaaggcaccactatcagctggatgtatctttccttacatgtttccagactggtttccctgatgtctccatcacatactagagtaatcagggtatgctggctgctgtaacaaataacccccagatctcagtggcttatcacaaccaaggttgattgcccactcatgacacaatccaatgtagctggcagtgggggagcagtagagttctgctccacacagacatttaggaacccaggctgcctccatctagtgawggagacgatgaataatgataccatcatcttcaaattgccatctccaaggttaccatgcaagagaaggagagactgtggaggagaatgcagaaggatttggaaaggatggaaagcttagaagcagtgttcattcctttcctccatattcgattgtccagagctcagttatgtggcccaactgaactgcaagggagtctaggaaatgaagtctttctatgtgctcaagagaaaggatgcagcttgttgagtacaaaacattgtctctgtcacacatgccttgttcttagctctgagcctc

SEQ ID NO: 784173 - DNA, 592 bp, Homo sapiens
aaaattggtaccagagaagttgggcattgctgtagagatacctgaaaatgtgaaaacaactttggaactgtgtaataggctgaggctggaacaatatggagggctcagatgaaggcaggaagatgagaaaaagtttagaacttcctagaaacttgttgaatagttttaaccaaaatgctcatagtgatatgggtaataaagtccaggctgaggagatctaagatggagataagaaayttactggaaactggagtaaaagtcactcttgctatgctttaataaagacagtggcagcattgtgcccttgccctagagatctttagaactttgaacttgagacagataatttaggatatctggtgaagggaatttctaagcagcaaagcattcaagatgctgcttctaaaagcctaggctcatatgtgtttgcaaagagatggtctaacattggaacttatatttaaaagagaagcagagcataaaagttttaaaaattgcatcccaaccatgtggtagaaaagataaacccattttctgggaaggaattcaagtccactgcataaagttgcataagtaatgaggagccaaatgt

SEQ ID NO: 784174 - DNA, 569 bp, Homo sapiens
cactcctggtggaaatgtatactagtaaaaccactatggaaaacagtaggaagattccttgaagaactaaaagtagaactgccattcaatccagcaatcccactattgggtatctacccagaggaaaagaagttattatatgaaaaacacttgcacatgcctatttatagcagcacaatttgcaatagcaaaaatatgaaaccagcctaaatgctcatcaaccaacaagtggataaagaaatgtggtatgtatataccatggaatactactcaaccataaaraggaacaaaataatggcatttgcaacaacctggatggaactggagaccattattctaagtgaagtaactcaggaatggaaaacaaaatattgtatattctcacttatcagtgagagttaaagatatgaagatgcaaagtctgaagaatgatataatgactagagaaggagggtaggagaggggtgaggggtaacagactacaccttgggtatattgtacactgcttgggtgatgggtgcaccaaaatttcagaaatcatcactaaagaacttatccatgcaaccaaa

SEQ ID NO: 784175 - DNA, 651 bp, Homo sapiens
tgggttctgacacaaatgaccaaacagcatccaaagagactgatggatggataagaagaatgtgaagagaccagaaatcagcataagaaaaaaattcaaattcattgggtttgatgaaaagtgacctctagggtgagacagaatgtaagtgctaggttcaatataaaaataaataggttattttttattatgtcatgaaacttggcatttctaatatgtaacataaacttaaggttttgtcctttctagcagcaatgttatacaacacataattcatgaataaattctagtttttcacagtactttgctgatgttcacaggaacacacccattggtatcttacgtttaaagacacctagaaaacagaaaatatcccaccactatttaccaaaaaaggagagggaaacttatagattaaaagattactaagagacatatcaacaaaatgcaatgtgtggaccagatctkgtttggatttcaacaaaacaactgtaaaatgacatttaggtaacaatcaggaaaagatcaacactgactggatatgtgataatattaattattatttttattctttaggtttgataattacacatggggtatgttttcaaaagcttttttttaaaaaaaaaagacaatcacattgaaacaatt

SEQ ID NO: 784176 - DNA, 625 bp, Homo sapiens
agaagagtttacaactgaaactatgaaggcctaaagataaaataactcaaagtcactgaagtgctaaataacaataataataataacaacttttattccataccaggtataaattatctggaaaaaggaaggagaaataaacacatttttttaaagttccaagaggattcattgccaacagactggtaacaaaagcaatcctaaagggaattctttaggaagaaggaaaattatcccacatgacagaatcttaacaaatatggaatgaacagcactggctgttctggctaaagtgaatatgtatatataactaatgaatattgataacttaaaacaataataaaaatattttggaaawaaaacatatattgaattcatgacaatgaccaagatgcaagagaggcattagtagaattaaagtgttcaaaggtccttgtactgtctagattgtactaagaatactaaattctaatacagtttaaaatgtcaagaatgtaaatttattattatataaataacacacaacaaacaagctcataaatgaggaaactgaataataaaacctatgtgaatgatcctacagaaaaaaaaaaaaacaaaaaaaggaataaagaacagatggggt

SEQ ID NO: 784177 - DNA, 624 bp, Homo sapiens
ccttaacttccttttatatttggtaatgtcctgaactctttatccaaatgaagcataaagcacttacaactgtgttttgccattgcactgaccgaggaatatattcatttgcagtaacatgggattcaatggagtggaaaataagctctgaaaattgctcttgccacgaaattgtatcaataaataggaaaagcccatttagatttcactgaccaatctcccccctgtgacagaaattaatatggccaagtagtgtgtatggaaggtaagacgccggatgtgccagacgctgagtgagccatgtgtcaaggcctgcagtrtagctaacttattttactgttcacagagccagctgaggatgcctttgtgtgtatgtggtggggggaaaaggagtgtgagaggcaaaatcctctgaggggtgaaggagaggtgctgagagcacccatctataggtcacttaccacactcctaacattgcatctcagagtctgtgcaaactgaaacttttcccgaaaggcatcccacctaagttatgaaaataaaaagcaggctcatattgtgcttctttgagtcagtgtggcttctggctattaatttcaatatactacattctcataataaaat

SEQ ID NO: 784178 - DNA, 531 bp, Homo sapiens
ggggcaataggagtttaaatattgataatttttcatgttttaattagttcagatatgttatttgtatccttgtatattaagacttaatgtaattaacagtgtattatcagtattgatgacagtttttaacatgactacctcctttcataataaatgtactcttagttatggatgtatccttatattgaaagaattaatawtatactttacatttacgtgtttacccagaattttcacataatttcaattaatcattataatttgtaggttaagtaacattcaaaggagttttcctttaattttttaatatttctctttttttttcccccagacagttcagtttgttcagggaatttttgttgaaaaatatgacccaacgatagaagattcctacagaaaggtaaaatgtgaaacttgtacacacatgcttacaagtagttccttatgatgttaaaatttgatctgtagatttgctttttgaaaatagttttgagaaataatacaaatattgtgcatctgtttttaaaagtt

SEQ ID NO: 784179 - DNA, 551 bp, Homo sapiens
tcacatgccttttcttggacatattgtgcagatttcctatttaaatggatgctttgttcttggggttagtggggagaaggtaggatgatttaaaaatcttgccaggagtccttgaggaagcaggctggagtcctgtttgcagaagtcaataggcttgttgtaagcaggcattgtgtgttctagcataggcggctgaaacaaatcaatttcaatttacttgtccagcaaaaggagccattatttagaactgaatggcctgagctcccataatatattgtgaaaacttattgtagtttttacagagaactagcttatgatgaaattatttgtttagaagcaaagtgtggatgtttattgaatrtaaattctggagttattgattagaggcagctgaagaatgagtcacatttcttttctaaatgtggtggttggatgatattgatatgacggacattgatatcacagtacgttgctggctggagacctggcaggatctttattttgacaataagcacaattaacacgaggggagggtgtttactagttaggga

SEQ ID NO: 784180 - DNA, 575 bp, Homo sapiens
acatgtgtgtggtcagggagagctgcagggccaggtttgctttgctaaaacaagttcccaaatgatatctgtcactgaaggtgttagctgacaggattgagagaatgataccaaagttatgtgtactcaaaagcctgttctacaggcgtggtctgggcaaatgttacctggctctataacaacttcagttggattgacactccccctttcttgtcaccctgacaagtcagagattatcattgctgaaggaagggtagctgtttcacaggctgggtkcagtagatgaagtgagttgtagtggggtgtattagtacattttcatgctgctgataaagacatacttgagactgggaaatttacaaaagaaagaggtttaattggacttacaatttcatgtggctggggaagcctcccaatcatggtggaaggcaaggaggagcaagtcacatcttacacggatggcagcaggcaaagggagagcttgtgcagggaactcccatttttaaaaccatcagatctcatgagacttattcactgtcactagaacagcatgggaaagacctacccccatgatt

SEQ ID NO: 784181 - DNA, 568 bp, Homo sapiens
atgttaagttatttgtgtatagtcacaaagctaatgaaaaacagagtcaggactagttgtcaagttttctaaatcccagtcttacgctctttcttgactcctggttttacttccattgaaacagttagtttgatagaaggagtaagatctagtgttcaatagcacagtacaatattatagttaagaataatttattgtatatttcgaaatagaagagaatatttgaaatgttctcaayataaataaatgataaatatttgtggtgatgaatacctcagttaccctgagttgataattacacattgtatgcatgtattacaaatcacatgtacttcataaatatgtaaaattattatgtatcaattaaaatacataaaataaacttttatatttacagtaaaatatgtgtaatccattgaatgatagagttaaaattaaaggggcctttagaggtcatttcatccagcccttcattttcatataaaaaaaaattgaaggccaaagaagttactttttcaccatctcatatcttattagtggcataaccaaaagcaaaacctggatattc

SEQ ID NO: 784182 - DNA, 631 bp, Homo sapiens
aataagccagggaaatcatcactttttactgattccagttagttcacccttaacaaagaaaaccattataggtgtcaatctaaataacaaagagaaaaaaagatctctaaaagataatcatatttatttgggaatagggcattaktttgacaatacaactgctgtactaaactgtgggcactttcaggaaggtaaaggaagacaaaggtttttaaaggtcaaataggaggaacacataattgttttcagataatacgcttggctacaaggctcaattacaagggtggcactggtccaagaataggcaggcaggtgctgggtctaggtcctcacaaatgtattatctctaaggttacagtggcctttgcacaaggttcagggttttgcagagtctttttacagagcagtagtgctcattatcaggaatttgcatgagaaatctcccttcatggcttttcctggctttttttcagtatcttattgttttcgtattgttttttaacatgagtgactcaattttgattcctactcttttcacataggaaagagtattatatgttgatatggtttgaatctgtgtccccacccaaattgcatgtgaattgtaatccccaatggtggaggtggggcc

SEQ ID NO: 784183 - DNA, 631 bp, Homo sapiens
aataagccagggaaatcatcactttttactgattccagttagttcacccttaacaaagaaaaccattataggtgtcaatctaaataacaaagagaaaaaaagatctctaaaagataatcatatttatttgggaatagggcattagtttgacaatacaactgctgtactaaactgtgggcactttcaggaaggtaaaggaagacaaaggtttttaaaggtcaaataggaggaacacataattgttttcagataatacgcttggctacaaggctcaattacaagggtggcactggtccaagaataggcaggcaggtgctgggtctaggtcctcacaaatgtattatctctaaggttacagtggcctttgcacaaggttcagggttttgcagagtctttttacagagcartagtgctcattatcaggaatttgcatgagaaatctcccttcatggcttttcctggctttttttcagtatcttattgttttcgtattgttttttaacatgagtgactcaattttgattcctactcttttcacataggaaagagtattatatgttgatatggtttgaatctgtgtccccacccaaattgcatgtgaattgtaatccccaatggtggaggtggggcc

SEQ ID NO: 784184 - DNA, 522 bp, Homo sapiens
acactgcctagaggagctgtgagaagagggctactattctccagaccccagaatggtagatccactgggagattgcaccctgcacctgaaaacactgcaggaactcaatgccagcccttgatagcagccatggggactgaaccctgcagagccacaggggtggaggcctggtagccaaacccaccattgcagtagtgagacatggtgttaaaggagattgaaatgagaatgtttaccaaatgcttgttttttattttactggttcataggtagaagaaacttgccttgattcagttgtgaatttggaccttggacttttgacttaatataggacagaattaaaactttgggggaactgttgggaatgcaagattgtatttygaaatatgagaaggatatgagatttgggaaaggccaggggaagaatcatatggtttggatctgtgtccccactataatctcatgttgaattataatccccagtgttggagttgggcctgatgggatgttattgaatcatgg

SEQ ID NO: 784185 - DNA, 623 bp, Homo sapiens
tcttaggaccactggaaaacagagaatactaatatttcaaattacatttatagagaaacatcaaattctgagagagtttctgctgtgactacaagactgtaggtgtatatagaaggagtaagaatgcttgaaacagtctatgaaaagaggtgagagaattcaaagaattaatgaagcacagacaaaattatcctaagaaggagaacagaaaatgctaagagccaaattactaaacacaagtttggcaccaaatatatgaaagggacttgaaagtataataaatgacactgaaagtggtagtattagacaaactttgttctaggagagaaaatagagaatgcgtttgtgcccttgagaaagatgayagtaaaaagaaaagaaagaaaagagcaagagagaaagaaaagagcatgagatctagtggtttaagtgtgtagcacctcccccctcactctctcttgctcctgctcctgtcacatgagatgtctcactcccgctttgtcttccatcctgaatggcagcttcctgaggcctccccagaagcagaatccactatgcttcctgcacagcctgcagaactgtgaaccaattacacgtcttttctttataaatcacctggtctc

SEQ ID NO: 784186 - DNA, 586 bp, Homo sapiens
tagaggtccacttcagaccctgtttgcctgggtatcagaagcggtggctgcagaacagcggtggctgtagaacagcggatattggtgagctgcaaatgctgctgcctgatggttcctctggaagttttgtctcagaggagtactgggccgtgtgaggtgtcagtctgcccctactkggggtgcctcccagttaggttgctcagggatcaggggtcagggacccacttgaggaggcagtctgcccattctcagatctccagctgcgtgctgggagaaccactactctcttcaaagctgtcagacagggacatttaagtctgcagaggttactgctgtctttttgtttgtctgtgccctgcccccagaggtggagcctacagaggcaggcaggcctccttgagctgtggtgggctccacccagttcgagcttcctggctgctttgtttacctaatcaagcctaggcaatggcagacgcccctcccccagcctcgctgccaccttgcagtttgatctcagactgctgtgttagcaatcagcaagactccgtgggcataggaccctctgagccaggtgcaggatatcatc

SEQ ID NO: 784187 - DNA, 637 bp, Homo sapiens
tgagcgctccacctcctgcagcccagttcgcagctccccggcctccttgcccacagctgtccgtgcctcctctaggagtgccagcttctgctccttgtcctcattggcaagcttcaggctggagagggcagaggtcaggggctgccctgggtcctgggagtagtcagtggctctacacaaaagcygtctcctccaatttctggagtggatcaggcactgcctgcccatgtggcctctctgaagagctaagccctgagccctgcagggctggggcccaggccctcggctgggaggggtagaccagtgactccaggaggggacctggtttccagggtgatgacggtgggtgggtctgagtctggacccaaagctgcccactgcccctctgcccctttccccaatcaacagggaggaaaccttcctaaaatcacccaggtgccaggctctgcttaggagacagaggatccgtatctgggcaatttccccagaacgttgggggtgaagttaggtttcagggatgggatcccatgaggactcaggactggtcctcctgcgacaccccacctgatgcgctcgctctctgccttcttcacagcagaccgaagctcctcattggaacgccgcagggcctcgcgct

SEQ ID NO: 784188 - DNA, 670 bp, Homo sapiens
gttggaaaaggatcctgattcagagttctgctccctccccttctctctgtccaagaacttggtagagtgcgggatgtccgagacagctgaaggtagggtagggccctaccactccccccgcaatcccagaaagcagccaagtccaatgatctgtctccctgagtaatgggacggggccttggaaaggtgtggctggtgtgaatgaaagggtggggttatgctggggtttgatctgccccctctattccaagcatttaaaacctccccattgctagggttggaggggtcagtgctgggggcagggagcatgcaggactctgaggtgggaccctgtgctgacaccggatgagtcccctatcctctctgcctcaagctgaactcacacggaggcaccatcgtggtttatggctctcaaatcatcctgacacctggagcaccctgcctctyccaggcccccaccaacccatcatgtgtctccccacacagccctggcagccctcccacctgcccaaccagtctcctgccaccgctgcagaggcactggccacgctgataccaacaagccccaggactagggacccactccatgcctctgtccctggcctcaacctctgccttcccctgggcctgggcttcagttgtcccccatgtaaacctcagaggtggactg

SEQ ID NO: 784189 - DNA, 494 bp, Homo sapiens
tttttttctttgcacaacttctcatcgtttcttaatgttactagttgacatttattgaacacttattttgtgcaggcttctcaacactttgcatgctcatctcacggacatgtaataatttacgtatttaaaccttgcaacaactttatgagttaggtacaattattgtccccttttcgcagctggggaaactgaaggaaggagtgtttgtccaggatggcacagccagtaaactgtggggtgcagagcccaggcccctgcctgctctgccaggctgccctcctggtacttatgtttcaggcktgcctcctccttgtttgtgatcctccctggagtcaatgaagggctccctgaatgaatgaatgaatgaacgaatgaatgaatgaatgtggcctgtgatgcctgtggactggcctgtcatggggctgagctccccacccccagcctcaagggacaggcaccgttggatgggcctgtggaaggtcaagggcatg

SEQ ID NO: 784190 - DNA, 601 bp, Homo sapiens
attttaagtgctcaatagctacaagtggctatcatattggaaggtattgttctagaaacttgtctgccaggctgagcgccaattgtggaaataggcacattccttaaacccccagagtccactagtttgactgcaatggttaataaaagtttattattattatattgaaaaragaaatgtaaaatagatacgagccatcactggccttggtatgcagacccttgcccttccagaaagtcttcttgtctgaaccatggctgctgccaagttaccaggacccccctctctctctgcaaggtgattgcctttggccaggtcccctctgcccactgtcaagatgggaacccccaccaggtcctctttttcccctcactcttcctgtggatacagcctggttctacatttaatctaaaatgtgtacttggagtcccaggtgagagcagctcgttatctcagattcctccggcattccagatgggatcagagccacaccttggcatagccaaaaccccacggaagtggttggggggaggtctctcctccgaaacaaaaagcagccaggaatgaatctgcctctccagtgagattcatgtaggatcct

SEQ ID NO: 784191 - DNA, 601 bp, Homo sapiens
attttaagtgctcaatagctacaagtggctatcatattggaaggtattgttctagaaacttgtctgccaggctgagcgccaattgtggaaataggcacattccttaaacccccagagtccactagtttgactgcaatggttaataaaagtttattattattatattgaaaagagaaatgtaaaayagatacgagccatcactggccttggtatgcagacccttgcccttccagaaagtcttcttgtctgaaccatggctgctgccaagttaccaggacccccctctctctctgcaaggtgattgcctttggccaggtcccctctgcccactgtcaagatgggaacccccaccaggtcctctttttcccctcactcttcctgtggatacagcctggttctacatttaatctaaaatgtgtacttggagtcccaggtgagagcagctcgttatctcagattcctccggcattccagatgggatcagagccacaccttggcatagccaaaaccccacggaagtggttggggggaggtctctcctccgaaacaaaaagcagccaggaatgaatctgcctctccagtgagattcatgtaggatcct

SEQ ID NO: 784192 - DNA, 627 bp, Homo sapiens
tcaaaaccaaaatgaggtaccatctcataccagtaagaatggctatgattaaaaagtcaaaaaatagtagatgctggtgaggttacaggaaaaagggaactcttatacactgttggtgggagtgtaaattagttcaaccattgtggaaagcagtatggcaattccttaaagagctaagaacagaactaccatttgagccagcaattccattactattatatacccagaggaacagaaatcattccaccataaagacacatgcatgagaatgttcactgctgcactgttcacaattgcaaagatatggaatcaacctaaatgcccataaatgacagactggatgaaaaaaaatgtgatacatatacaccatggaatactatrcagccataataaagaacaagatcatgtcttttgcagaaacatggatggagttggaggctattatccttagcaaactaatacaggaacagaaaaccaaataccatatgttctcacttataagtgggtgctaaatgatgagaattcatgaatataaatggaacaaccgacactggggtatacttcagggtgtagggtaaaaggagggagagggcagaaaaaataattattggctaataggtttaatac

SEQ ID NO: 784193 - DNA, 644 bp, Homo sapiens
cattaataaacttttggggtgattctttctctcccattagaccctaagttccataagagcagcaataggactgtcttgtccacaattaaatgttgaaggaatttgaattgaatgaatgaataagcccacatgagcatgacagcattcagcatcttgaatggtacctaatacatagcaggtgacaatatatgtygaataaatgaacaagtctgtgaatgaatgagataaaccagcatggagctctgagcacctgtgcagtaagtacttactgaggctgaatgaaaaggtgcagcatgaaatttggttttcttatgcaagagcctctaaaacaattgaacaatacaatgtcccttgatctggaagttgcaccattaggtaggtgataattataatcttcattcagctctgaaaaagcaactggtttgaaaataccattaagctgatggacaattatggttgtttgcccaagtatttttttttttaatggctttaatgttactctctttcagactcattatagagcacctgcttgcacagaccagcgtggtacaaatcagtggactgcaaagatcacaatcctacagtaccagataaggaaccaggatatactgcccaaggcctgcccttatcccaccaatgataca

SEQ ID NO: 784194 - DNA, 634 bp, Homo sapiens
aaaacaggtctatgtcccacatgaaaccatttttatcccccgtacactttcatttttttctcttttgctcttaatttgcagatcatctgactgcatacagaatgaattatagttaaacctttattagttattaaatgtttgctttttaattccagtaactttcctgaacatgggtactggtatgatagtggaattgatctgctgctctagcttactagagggcttccaccagttgagtttgaaaatatattcrtatgtcaagtgtagaagatattctgataccttaattagggtttcacatacactttttttttttccagaaaagctacttgctgaaaagggtaagggtactagagcactaacacctactagtatgaaagctaaggggcatgaccgtttgaaaaacagatgtttggtcaatgaaaaataatatatttcaccttagacagctctgctcaagtaatttttctaagagtatgggggattttagtctttcagaatttcccctaaaatatttgcttataaaatatcgtgtttttatgaacagtttgtaaatattttactcattaattgtaacaggcaaactattttgttctatatatttgctccataattatacatttataatcctgga

SEQ ID NO: 784195 - DNA, 609 bp, Homo sapiens
actaaagagcttttgcacagcaaaaggaagagtgagcagagttaacagacaacccacagagtgggagaaaatcttcataatctatacatctgacaaaggaataataaccagaatctacaattaactcaaacgaatcagaaaaaaaacaatcccatcaaaaagtgagctaaagacaaggacaatcctcaaaagaagatatgcaaatggccaaccacgtatgaaaaaatgcaggaggaagggccaagatggccgaataggaacagctccggtctacagctcccagcatgagcgacgcagaagacgggtgatttctgcatttccatctgaggtacygggttcatctcactagggagtgccagacagtgggcgcaggacagtaggtgcagcgcaccatgtgcgagctgaagcagggcgaggcattgcctcactcgggaagcgcaaggggtcagggagttccctttcctagtcaaagaaaggggtgacagacggtacctggaaaatcgggtcactcccaccccaatactgtgcttttctgacgggcttaaagaacggcacaccaggagattatatcccgcacatggcacggagggtcctaagcccatggagtct

SEQ ID NO: 784196 - DNA, 609 bp, Homo sapiens
actaaagagcttttgcacagcaaaaggaagagtgagcagagttaacagacaacccacagagtgggagaaaatcttcataatctatacatctgacaaaggaataataaccagaatctacaattaactcaaacgaatcagaaaaaaaacaatcccatcaaaaagtgagctaaagacaaggacaatcctcaaaagaagatatgcaaatggccaaccacgtatgaaaaaatgcaggaggaagggccaagatggccgaataggaacagctccggtctacagctcccagcatgagcgacgcagaagacgggtgatttctgcatttccatctgaggtaccgggttcatctcactagggagtgccagacagtgggcgcaggacagtaggtgcagcgcaccatgtgcgagctgaagcagggcgaggcattgcctcactcgggaagygcaaggggtcagggagttccctttcctagtcaaagaaaggggtgacagacggtacctggaaaatcgggtcactcccaccccaatactgtgcttttctgacgggcttaaagaacggcacaccaggagattatatcccgcacatggcacggagggtcctaagcccatggagtct

SEQ ID NO: 784197 - DNA, 591 bp, Homo sapiens
ttacagctcttaaagttggtgtgtctggagttgtttgctcctcctggtgggtttgtggtctcgctgacttcagcagtgaagccacagaccttcaaagtgagtgttacagctcacaaaggtagtgcagacccaaagagtgagcagcagcaagatttattgtgatgagtgaaagaacaaagcttccacagcgtggaaggggacacaagcaggttgccgttgctggctcaggtggccagtttttattcccttatttggccccacccacaccctgctgattggtccattttacagagcactgattggtccatcttacagagcgccgattggtgcatttacaatcctttagctagacccagagtgmtgattggtgtgattttacagagtgctgattggtgcatttacaatcctttagctagacccagagtgctgattggtgcatttacaatcctttagctagacacaaaagttctccaagtccccatccaacccagaagctcagctggtttcacctctcactatgatgttatgatagttatgacatctctaggtgataggaaattttcagcttcattattatcctatgggaccacc

SEQ ID NO: 784198 - DNA, 618 bp, Homo sapiens
ctttattccagttcccaataagttcctcttctccatctgagaccaactcagcctgaacttcattatccatatcactatcagcagtttggtcacaacaatttaacaagtctctgggaagttccaaactttccctcatcattctctcttcttctgagtcctccaaactgttccaacctctgcccattatccagctccaaaaccacttccacattttcaggtatctttatagcaatgccccactcctgggtaccaatttttttgtattagtccgttttcacattgctataaagaactacttgagactgggtaatttgtaaagaagacaggtttaattgactcaaagttccacaggctgtacaggaagcatggttggggaagcctcargaaacttaaaattatgttggaaggtgaagagaaagcaagcatgtcttacatggtgggaacatgagaaagagagtaaagagggaggcgctacacacttttaaagaactgcatctcattagaactcactatcacgagaacagcaagggggaggtccgttcctatgatccaataacctctcaccatgttcctcctccaacactggagattacaatctggacatgagatttgggtggg

SEQ ID NO: 784199 - DNA, 627 bp, Homo sapiens
tctgttgcccaggctggagtgcagtggcacgatctcagctcactgcaacctctgcctcccaggttcaagcaattctcctgcctcagccttccgagtagctgggattacaggcacccaccaccatgcccagctattttttttgtatttttagtagagcctggtttcgaactcctgacctcaagtgatctgcccacctcaacctcccaaagtgctaggattacaggcatgagccactctgcccggctgggagactttttgttatggcttcgatctcattacttgttattgctttcttcaggttttggatttctagggtctagtatctaggaattcatccgtttattctagattttccaatttattggcatatagttgctcwcagtagccactaacgattctttgaatttctgcagtattggttgcaatgtgtcctttttcacttctgattttatttatttgaaccatctctctttttttcttagtctggtaaaggtttgtcaattttgtttaactttttggaaaaccaactttttgtttcattgcccttttgtattattttttcatttcaatttgatttatttctgctctgatctttattatttcttttcttctactaattttgggttt

SEQ ID NO: 784200 - DNA, 629 bp, Homo sapiens
ctacaagtgccatttccattttgcactcgtctgacacttgtgtagcgtgtgtgtgtgtgtttcaacaactcatgtttcataagagtatcatataatctggacttcagagaacaagatcctctgaaacataaatcaccctaagcctaacaaactttaattaaattcacatgtctcttgtttccacaaggatayttaattatatcttagaacattaccagaaattaaacttgcattaaatgtccttgtattcaccatagcatcttgcatggtattgtgtgtagagaaatcaatcagtaaatagttggagaattaatgaaggaatgaaagaattaaacctatcctagcacccagtaaatttagattattgtcctaaactagttgaaataaatggacaactatgaatccggtctaacagtagttcccatttgctctggtagctgaagtaggaggtttgagatttacagtaatatgagttatgtgttcttcaagttttctttcttttttcctttctttcttttttagttttttcttttaaatgaacagatctcccaggactttgtgagggctgtattggtttccggggcactatatttgaaaaaaaaaaagtttgtaaacatttttgaatgtta

SEQ ID NO: 784201 - DNA, 622 bp, Homo sapiens
caacaggtttaggggaaaaataaaaaacaaagtggaattattccaaatttggtctttggaactctgggacaccactgttgtggtttaaatgtttgtctgctcccaaactcatgttgacttttaattgatgtggtgcctttaagagatgattaggtgatgacagaaccatcatgaatggattcatgcccttattgcagaagtgggttagttatcacaagactgaatttgtaatgaaagtgarttttgcctgatttcttctctctgtctcatgtttgcttcagccttctgtccttctgccatgggatgaccctcatcagatgttggtgccatgctcttggacttctcagcctccagaattgtgagaaatagatgtcttttctttataaatcactctgagtaacagaaaatagactaaaacaagcacctttctgagtgccccctcactaacaagggataatcataacagaagaaaaatggatgcaaggcagatctaggcagagagagggccaagtctccctcagcttttacctggcataaatgtatccagatattttcacatgctcccagtggaggatatagaaaatagctggatgtttacagccggcaggtctcccatggggcc

SEQ ID NO: 784202 - DNA, 625 bp, Homo sapiens
ccagttcagtccaattagctcttaccatctagaatttagtatctgaggctctgatcagtatgtgtacaacttaacataggtcgggtcactgcatcaaccagtgttctccagggaaacagaaccaatatggggagtgtgtgtgtgtgtrtgtgtgtgtgtgtgtgtgtgagacagaaagagagagagagattttaaagaattgacctgatagatgatggaagttgccaagtccaaaatctgcaggatgggccggcagtctggagacccaggcaagagccaatgctgcagttcagtccaaaggctatcagctgcatcattcatcttgctctgaggaggtcaggctcacattccatttaggccttcaactgattggaaaaggtgcactcacattagggaatacaatctgcttcactcaaagaccaccaatttgaatgttaatttcatccataacaacctcacagaaacagctaaaataatgtttgaccacataaatagggaaccatggcgcagccagctggactcataacgttaaccatcacagtagccctgggtcctaggcacccaaaaatttctctaggaatagttgctggctttgtctagatttagggaaatcctcaatcagagc

SEQ ID NO: 784203 - DNA, 625 bp, Homo sapiens
ccagttcagtccaattagctcttaccatctagaatttagtatctgaggctctgatcagtatgtgtacaacttaacataggtcgggtcactgcatcaaccagtgttctccagggaaacagaaccaatatggggagtgtgtgtgtgtgtgtgtgtgtgtgtgtgtgtgtgwgacagaaagagagagagagattttaaagaattgacctgatagatgatggaagttgccaagtccaaaatctgcaggatgggccggcagtctggagacccaggcaagagccaatgctgcagttcagtccaaaggctatcagctgcatcattcatcttgctctgaggaggtcaggctcacattccatttaggccttcaactgattggaaaaggtgcactcacattagggaatacaatctgcttcactcaaagaccaccaatttgaatgttaatttcatccataacaacctcacagaaacagctaaaataatgtttgaccacataaatagggaaccatggcgcagccagctggactcataacgttaaccatcacagtagccctgggtcctaggcacccaaaaatttctctaggaatagttgctggctttgtctagatttagggaaatcctcaatcagagc

SEQ ID NO: 784204 - DNA, 646 bp, Homo sapiens
cagaaaaagtatttaatctctgttaagtctcagttttcctgtctctaaaataagactaatatgatctatcttgaaagaataaggggattatattattattatatagtaagcgtagacacctgagacagttcttgcagcaaggcaattgctcagtagaccttagttttcttctttttcaactttctttcccatctttggaagttaaggcctgatatcgtattctatgcttcaatgttggttaaaattccatttattattgaaagtgagatctgtgtaactttgtgagattggaaccagttttactgatactgtttggaaattgcttataygccgtgattcaaggggtgctagaaaaattaccccatttcctgcctaatatgtattaattagaatcatcgttttgaatattttaaatcacaaatacattttgaggttttagcacattatccatttacaccttattgtgaattagtttgttcatgctatagattacttgagaacattaaaataatgtttactcataggctgggtgtggtgactcacgcctgtaatcccagcactttgggaggctgaggcaggcgatcacttgaggccaggagttcgagaccaacctggccaacataaggtctctactgaaaatacaaaa

SEQ ID NO: 784205 - DNA, 586 bp, Homo sapiens
ctatgcttatttaatgtgtacaatttgagtttgaatatatgcatacacctgtattaccatcactacaatcaagtaatagacatacccaacaccttccaaaacttctttgtgccatcttgtttttgtttttgattttttgttagtttgttttttgtggtaatgacacttaatataagatctacccttttaacattctttctacatttattaatttgaattcttctgtgaagatatgatattacttttctcctattttatttattcatttatataaattcataatatttattttattatttggattataaaacagctactgacatttactgttttgctcaagttgttccarctttggccatctagagctccttcacatttgttcgtgtgcctttttgatatttcttcattatttttgtgggggtagggaggtcattcatactttctggcatcatgagactttcctggctaacctcgtatattctcttccccagccctagaatcaaccacttttctaaggagctttggttcattttattggagaatggtgtatttatttctacatacatacatctatatttattttgta

SEQ ID NO: 784206 - DNA, 593 bp, Homo sapiens
aattatttgatggctaacagattagcataaaatttaaaactttttcctaaagaatttgaaacaaggaattaaaattctttgggaagtacacattttgagagctttgctagatttaattttttaaattgagtctatccacaatttaaatcagactaaattctagtaaatgtgtcctctttaaggggtgtgagttatacgtctgaaacatatttaactgtatttaaaagagtagcattatayagtgtcaaatcctcataagcatctagaattataggtaatgagcactaggacaaacaaaaataccaagggctctagtcctctattgcagtcaatgttaaaagtgtacaagtgtctcacacatcaaaattcatttcacaccctcaatcactcattcttcttgcaccttgtctttgaactattagaagctagtgaatttaaatcaaaacattattttaactataaaggctcaacgtctacaatatatcatattttagggaaggaagggaagaaaagggttaaggcagctagcttattactcaccatgcagattttagaacttagaaatcaaaagctagaaggaatttaccatctct

SEQ ID NO: 784207 - DNA, 372 bp, Homo sapiens
ctgcctcggcctcccaaagtgctgtgattacaggcatgagccaccgcgcccggccctacaatgccagttttaaaacaaatataagagcatttcccagcctcactaattatcagggaaatgcaaatcaaaaccgcaatgcaataccaccttactcctgcaagaatggcctttaattaaaaaaaaaaaaaagatgttggcatggatgtggtgaaaagrgaacactttcacactgctggtgggaatgcaaactagtacaaccactgtggaaaacagtgtggagattccttaaagaactaaaagtaggtctaccatttgatccagcaatccccctattgggtatccacccagaggaaaagaagtcattatacgaaa

SEQ ID NO: 784208 - DNA, 631 bp, Homo sapiens
catttatctccacctggttcctctaaaatttggagactacctgtaagtactcttaacttatggcagtatagttgtttgcatcagtgcaataagaatgcatttttctttgtcaacaggacacaattggataaactggttattttaccaaggctttggctgaaatggtgtgtttccctttaaggaatcaagcttgacatgcagagccaataaaagccccttggagaactggcctcataccttgtctatacagtccccgcacagggttcctaacctgtagtcaataaagaatgtcactttctaacaggtctggaagctcggagtttctcttgggacctcaagaagtgaggatcacccaactcacaggtatttgaggatacagacccattgctgggctcggctttaaaggtcttatctaagattccttgtggaacagagtttcatcaaagccaatccaaragacctatgtagaaataactattcttactgcacttcatgcaaataatcaagccaagtataagactaaagttcattcatgattagttttgaccaaaaatgagaactggagagaaaaattttgctccaaagcttatcatacatttgtcattaaatcctcatctcaattgtttttaag

SEQ ID NO: 784209 - DNA, 567 bp, Homo sapiens
tgatgtttcctatttcctgttttgttatttatgctctaatctttatttatttccttcctttgggtaactttgtgtttagtttgctcttttcttagtcccttgagttgtaaagttaggttgttgatttgtgatctttcttttttaaatgtaggcatttaccactataaacctccctcttggtactatttttgctgcatcccttaagttgtggcatgttgtgttttcatttttatttatctcaaggtattttctaatttyccttgggaggtattctttgattcattggttgttcaagtgtgtgttgcttaatttccatatatttatataatttccagttttccttctgctattaatttctagtttcatttcattgtggttagaaaaaatatttggttgaaaaaaaatttggtattaaatttctttatacttgttttgtggcctaatacgcaatctatcctaaaaaatgttatatatgtttctgagaagactgtgtattctgctgttgttggttagagcatttggtatatgtctgtcacatcccattggtctttagcgttggtcaagtca

SEQ ID NO: 784210 - DNA, 649 bp, Homo sapiens
ctaaagtaatgcaaatagcaccaaaggatgtgaaaacagttttaagtaacactaaacatgtagagtttttatataacaagaaaatgtatggatttcgaatgtgacatattttatttattagaatttaagaaacatggtgaagttgtcayggtgtgaattctgtaaaagaaataggatttcagaagtgcttgagagagttgtttggccaaactgaaactccagggagggtctgacaggagctattgaacggcaacatcatattcatctttacatccttagacacaccatgacacttgctgaaataaatgggagatcaaggccaagctcaaaactatattttaagaactatattccttagaaaatagctggtgttcacgaatttcatagtatgactttaataatcagtttagaggaaatgttagaaaattaaaatgaactccctccctaagtaatttgatttgaaaaattctttttagaaagtctttgctcttattttaatgatggtgagcaaggttttgcttcaataagaattctgagttaaaaacacatctcttgttcctttatccacttgaaagatttatcaaataaagttattcacaaaatggctatttagtacaaataagatttatgacaagtttgagactattat

SEQ ID NO: 784211 - DNA, 618 bp, Homo sapiens
tgttctttctggtcttcctcacggatcctgaaggggggttctctgcagagcgaccaccccatcttcctgggagagctggttcaagatttttctgctgtggaccagctgtcttctttcctgaggaggcccctctcattttacttctctgcatgttgcttctagttggttttttgaagttctcttcttmtgcagattgctgtccacgaggttgagaaccctgctttctggaactcattcaaccctgtttttattccaaccactgtaatatataaaatattttacttggttgttttctatggcaacctttaactatgtttcataaaggcccatcagagaataacacattctaactcccttaaaatctggatttcaaatcctatttcaggaccctttataagtgattttttatttttttacctcctttccctctctctgatcctcactaccagccactactctcatctcacccaaatactcatcacaactacccataaattactctgttgatgccactcacaagataggaaagcaattttcaagaaagaaggaattaaatgaaaaactataaaagacagtggagttgaaatttaagacttttgaacaggagaaatgacaata

SEQ ID NO: 784212 - DNA, 618 bp, Homo sapiens
ctccccacctttccttatagccccttgttggctttttcctttactattttattaaatccatcatttctactcccaatgctgctaagagcttcatattctcatttgccaccagcctgtaggagagacttctaactggatcctcagcctcaagactcaaaaccccttcctcccctcccactatccatagctagaatagccaggcatatacacacaaacatacacgcacacaccacagcccctccattgccttctgctgcttaaaggataatgtctaactctttaatctggcattcctaatcctccctgcctctccacatttgattatcacaactttccaaactaatatgatagtcctggatgtcctaaaggatatattaaggatattattccattaaatactctccaagatcaacaaatgtatttggtagagaaatatgtaactcattaatacyatatgaaggctctgacaagtcctgcaataaagaaacagtaaagaaacagcctagcatttcccagggcaatctggcccaggaacccttgtgtagcagcatgtgtagtagccgctttctttgattctctgaatgtcctttcttgcctgcactccagccatctgctctg

SEQ ID NO: 784213 - DNA, 621 bp, Homo sapiens
gaccaactttgctttttacttcagcgctataaaactgtagctttccagaaatttctgcggatgaatcagtctggatagccaaattctccatattgccacagatttagttttgaaacttcaacattgttcattatggatggcaatcttaaagtctcaaagccaaacccagattcctttccaatatacagattttctccttctccaccatgggttctgctaagacatatttcatgccaaccccaaatttgtgctagaatctggtttcaactcaaataataaatgaaaccaagattagaagtgagcccactaacctaatggagcacaatgtttgcctagctactactcctaaatctataggattggggaaaggtgcctctctccttctcctcccaatttctgactcrcaatttgagttttatacacattttccagtcctgttctacatgtccatgttaagaaggcacaaccaggccgccggacatttgacacatccatgaagcaggtgagccccagagaggtgaagggccttgcatgggccacaaggctatttaatggaagaatccaggcccctgtcctcgcccctttcactgcacgcttccctgctgcaggccctccattggc

SEQ ID NO: 784214 - DNA, 540 bp, Homo sapiens
aatcttggtttctaatattattctctaatgaaaacaatcgtggctctttggagaaatagctgattctgagattgggacaaggaatacacaagatgagcctggagcatcatttcattccagaaggtagtgagccttagaaaagtgatgagggcttatcaaagtagtatagaattcaactgaaaaagctcaaatggaagctgaaaaaaattgagcaacaaaataaaacagcattraattagaacccaaagtataaaataaatgttcatgagtccatgctaatatcaatgactgactcactatattaataaatgagggagaagaggcaaatatcccatgcagaaaaacctcaaattaattatttagatactccacccttaaaagaggggcataattcatcacttcttaagtataggttgtatgtagtgtcttccttagaaaaggtacagtgtggtcaacattagaagtcatgtataatgtttgaaaatggcaccttaccttggtaatctcaaaagcccatgacatcagtttaacaatgagaat

SEQ ID NO: 784215 - DNA, 702 bp, Homo sapiens
aaaactggaagaaaaaagaccacttagtttacgatgcttctgcaaatataactgtgctcctgctaagtcagggggctttggagcaaagctgatggtgtcccctgcattacattctgcattgggtctctgaggcgccctcgtgtgatggtgcagactagtctattctgctggatgggcaagctctcagctcttggccttacctgtttgaatgctctccggaatagcagaaaccgcctgtgtgcactgtctctgatggaaaacatctcattttcttgctacataacatgggaaaagaagttgtgccaatttttagataggagcagatgcaaactccctctcagttttcctgctgatgccacagggtctcccaaagcctgagagcccagggctgaatcctgcattccccaaggtaaccaataccaaactcccaccttgtgaaaggggctrcctcctttaattctcgcagcaatcctgccaggcaggagtgatcatccccattttacagataacaaactgaagcccagggaggtggaggactttgcagagggtcacccagcagattggaagcagacctagacttgaacccagagctgccagtatccagagcgtgtgctactcacactgggttgcagttgtgacacgatgagaacaaagttgttggccagagtagagaatgacttcagagtcctgacttcaactgtt

SEQ ID NO: 784216 - DNA, 662 bp, Homo sapiens
gcttcccacagtttctggggaacaacccccttcacttggcagggcccaaagtggaattcttggccctgggcccctgatacctggctccagagaagcagggtaaaacccaggcaagggagcacaaccatctgcatttgagaggctgtcgccagcaaaggagggcagaagggtctgctgaaagaaagggaggcagcctgtgaggccggccctctgacccagagttacatgccctgggaaaatgctccgagggtctccccgggccaatctcgagcactctccaatgggcaagttgagactattgcaaaccggcagccttgctarggtgcagtgggggtgaagcaggggtctttctgcccctcaaacttaaggccgctcgtcttgccatctgtccacctgctcttccccaccttgcccgtccacacccacacgccctgcacctcctccttctccatcgcagttctctctagcctacaacctgcgagtcagaatttgacccagaagagtggagaaatgggaggttctaatgtgccacgtctggggagcccaaacccaggaaaacaaagagctgaactagacatgtgcttatccaagttctgccctgaagccactaggcacacataggctggcaggtctttttctcctccccaggagacggctgtccc

SEQ ID NO: 784217 - DNA, 627 bp, Homo sapiens; identical to SEQ ID NO: 784192

SEQ ID NO: 784218 - DNA, 644 bp, Homo sapiens; identical to SEQ ID NO: 784193

SEQ ID NO: 784219 - DNA, 626 bp, Homo sapiens
gtggttaatgagacttcagaaactttgtttgattagtttattgtatcctcttaccacacatagttcttagaaaggatttttgctggctggaacatttattttcaattggtttaaattactataaacagctaaaagttttaagtagtaagagtcaaattcatttctttttccagttcgatagttactatataattgggacttttgacctttttttattatttgccgactactagattgaagatgtaaaacaatactcactttattttaggtactaattgtatattttaaacttgcttgatcactttatcttccatgtattccacaccaaatccytatgttctcaggctatttacttcaattatataatagctcaagaactctagaacaaggcaatatcttttcaaaaagtgttaatagaatccccagacattctaaatttcatgtttacaaaacaaatctcgtgtccaaacagcatcactttttaaattttcaaacacaaaagaagaggagagtaagagctgcaaaaaactcaatataaactgaataaataaaacacaagaattactttgtgtaattgtttaaaaatctctttaactcgcttttgaccaggatttataaattcaaga

SEQ ID NO: 784220 - DNA, 628 bp, Homo sapiens
gagctaggacctgaaaaggggcctcacggtgccctatcctgctgtggttgagctgatatccatgtgggatatgatgaggtttctcttcaaatagcctgatcaatcctttattctttaattcatagtacctccccacccctttttcacttttctcttttttcttcctttctgtctttgtcacatgcccagacacgccacagtaccaggtgttatcagtaccagctcacattcctttccttatttggcaagaagacttgctctctagctcactgcagacaccccttcccctttcgcctctcttccttacataccctccttatcygaaaaaaagttcaaatgtttagccaaccagggttaatttagattgtactgcctgaccatggccaatggggaaagggtacaggggcaggacttgcttcaggaataaaggctcttgttcaagtgtgctctcatggtgactggccaaggagaagcacccctctgtgcagaagtaaaattgctttgctaagaatccttgtttgagtgttcaatttccttaggattttgagcattattcccaacatccaagatgcaagacaaagtcctcctcattcttccctctcctctcctcaagtggagggaagaggcc

SEQ ID NO: 784221 - DNA, 624 bp, Homo sapiens
tggtttctctagagctaatcaaagcctgcaaactgtcaattaggtgtttctgccccaaacatagaccctgactttaatctttgccttgtacagtagcaccatatataagtccattcagggtgctattaaaaaaaaatagtaccggaaactgggtggcttctgaaaaacagaaatttatttctcacagttctgaaggttgggaagtccaagatcaaggcaccagtagattcggtatctggtgaaggcctgttttcagatagatggcaacttcttgttctgtcctcacatggtagaagaggcatggcagctctctggggcttctcttttataagggcaataatcccattcacggggccctactgtcatgacctaatcacctcccaaatactgtcaccttgagggagcaagatttcagcatatgaatttgggggggacacaggtattcacaccatggcatcccytaacaacattgtccctactgggcaaaacaaacacacacacatccatgacactttcaacagagttggttagttccataaacaaagaagtgttctcttcatcttttcagaatatttcatttgttccaatattcaaaagtataaaggcaaaatatgatcaagatga

SEQ ID NO: 784222 - DNA, 630 bp, Homo sapiens
atgaatagccaatactcagagggcccacattttattttattttattttattttatttttttgatacggagcctcgctgtgtcgcccaggctggagttcagtggcgcaatcttggctcactgtgacctctgcctcccgggttcaagcaattcttctacctcaaccttccgagtagctgggattacagatgcaygcgaccatgcccagctaatttttgcatttttagtagagacggggtttcaccatgctggccaggctggtgtcgaactcctgacctcgtgatccacttgcctcggcctcccaaagtgctgggattacaggcgtgagccaccgcacccagctagagggcccacattttaatagttaaatggtcacaacagagggtgataattataatgtaggagtatgtgtgaggtacagagttaatagagaggtaaatgatcaagatgcattagagaaaacttcaggaaagatgtttgcattcaagatttgaaggatgagtcagaattttctaggcaaatgaagtggagaaggtattatagagtgcaggaacttgtgcaacagacatggtgtcacagagcatggttattataagtattgtatttgagttgcatgaaacataggaacaaaa

SEQ ID NO: 784223 - DNA, 600 bp, Homo sapiens
tagtagattatttgaaggcatcttgtagatggctatgatatatttttgtcatttttcagataaggaaagtaaatatgctaaacattaagaaaaatggtggctgggcccagtggctcacacctgtaatcccagcactttgagaggccgaggcaggtggatygcttgagcccaaaagtttgagtccagcctgggcaatacggggaaaccttgtctttataaaaaatacaaaaattggccaggcgcggtggctcacgcctgtaatcccagcactttgggaggccgaggcaggcggatcatgaggtcaggagatcaagaccatcctggctaacacggtgaaaccccgtctctactaaaaatacaaaaaattagctgtgcgtggtggcgggcgcctgtagtcccagctactagggaggctgaggcaggagaatggcatgaacccaggaggcggagcttgcagtgagctgagatctcaccactgcactccagcctgggcgacagagcgagaccgtctcaaaagacaaaaacaaatacaaaaacaaaaacaaaaccccaaaattaggtgggcatggtggcgcatgcctgtagtcccagctactgata

SEQ ID NO: 784224 - DNA, 600 bp, Homo sapiens
tagtagattatttgaaggcatcttgtagatggctatgatatatttttgtcatttttcagataaggaaagtaaatatgctaaacattaagaaaaatggtggctgggcccagtggctcacacctgtaatcccagcactttgagaggccgaggcaggtggattgcttgagcccaaaagtttgagtccagcctgggcaatacggggaaaccttgtctttataaaaaatacaaaaattggccaggcrcggtggctcacgcctgtaatcccagcactttgggaggccgaggcaggcggatcatgaggtcaggagatcaagaccatcctggctaacacggtgaaaccccgtctctactaaaaatacaaaaaattagctgtgcgtggtggcgggcgcctgtagtcccagctactagggaggctgaggcaggagaatggcatgaacccaggaggcggagcttgcagtgagctgagatctcaccactgcactccagcctgggcgacagagcgagaccgtctcaaaagacaaaaacaaatacaaaaacaaaaacaaaaccccaaaattaggtgggcatggtggcgcatgcctgtagtcccagctactgata

SEQ ID NO: 784225 - DNA, 600 bp, Homo sapiens
tagtagattatttgaaggcatcttgtagatggctatgatatatttttgtcatttttcagataaggaaagtaaatatgctaaacattaagaaaaatggtggctgggcccagtggctcacacctgtaatcccagcactttgagaggccgaggcaggtggattgcttgagcccaaaagtttgagtccagcctgggcaatacggggaaaccttgtctttataaaaaatacaaaaattggccaggcgcggtggctcacgcctgtaatcccagcactttgggaggccgaggcaggcggatcatgaggtcaggagatcaagaccatcctggctaacacggtgaaaccccgtctctactaaaaatacaaaaaattagctgtgcgtggtggcgggcgcctgtaktcccagctactagggaggctgaggcaggagaatggcatgaacccaggaggcggagcttgcagtgagctgagatctcaccactgcactccagcctgggcgacagagcgagaccgtctcaaaagacaaaaacaaatacaaaaacaaaaacaaaaccccaaaattaggtgggcatggtggcgcatgcctgtagtcccagctactgata

SEQ ID NO: 784226 - DNA, 581 bp, Homo sapiens
agactaaatgggaaggttttaactgattcatgtagggaactgaagcacagcatgtgatgtggtgtgcaatactggataacaggcaaatccaattaagggatctttatcctgttaaagacttgtctacaaacttaaaaaaaatccaggggccagccacagaagagcccactcagtcatcgtcagtggtaggtatctctcaratcctaataggtgaacatgtttcctctgtggcattgtagtgaggagtgctagattttgaaggcagacagacctgggttcaaagttcagctttgctacttattagctgtatgacttttgacaaattatcttcttttagcttcaatatcctaatcagtaaaacaaaagtactgccagtactacctcatacggctgctgtgaggactgagatcaagtttgcaaagtacttagcatggtggctggtggtgctcaacaaacaatagttattagtgcttcctttttcttctcctttccttctctccctcttttctttttccagttccctctttttgccttttgcctcctcttccttgtttcttttttccctctgcctaccacacagg

SEQ ID NO: 784227 - DNA, 594 bp, Homo sapiens
agaaaaaagaatgaaaatgaatgatctaagcctccaagaaatatgggactatgtgaaaagaccaaacttaagtttgattagtgtacctgaaagtgatggagagaatggaaccaagttggaaatcacacttcaggatattatccagaagaatttccccaaccaagcaagaaaggcaaacattccagttcaggaaatacagagaacaccacaaatacactcctggagaaaagcaaccccaagacacataattgtcagattcaccaaggttgaaatgatgaaaaaaaaaatgttaagggcagccagagaggaaggtcgggttacccacaaagggaagcccatsggactaacaatggatctctctgcagaaatcctacatgccagaatagagtagggggcaacattcaacattcttaaagaaaagaattttttaacccagaatttcatatccagccaaactaagcttcataagtgaaggagaaataaaatattttacagataagcaaatgctgaaatgttttgtcaccaccaggcctgccttacaagatatcctaaaggaagcactaaatgtaaagtccattgacactatgaagaaac

SEQ ID NO: 784228 - DNA, 775 bp, Homo sapiens
gtgtggtgttatttctgaggcctctattctgttccattagtctatatatctattttggtaccagtaccatgctgtttttattactgtagccttgtagtatagcttgaagtcagatagcatcatgcctccagctttgttctttttgcttaggattgtcttggctatgtgggctcttttttggttcaatatgaaatttaaagtcttttttttccaattctgtgaagaaagtcaattgcagattgatggagatagcgttgaatctataaattaccttgggcagtatggccattttcacgatgttgattcttcctatccatgagtatggaatgtttttctatttgtctgtgtcctctcttatttccttgagcagtggtttgtagttctccttgaagaggtccttcacatttcttgtatattgtattcctaagtattttattatctttgtagcaattgtgaatgggaattcactcctgacttggctctctgtttgtctattattcgtctataggaatgcctgtaatttttgcatgttgattttgtatcctgaggctttgctgaagttgtttatcagcttaaggatatttcgggctcagatgatggggtttcctaaatatacaakcatgtcatctgcaaacagagacaatttgacttcctcttttcctgtttgaataccctttatttctttctcttgccagattgccctggtcagaacttccaatactatgttgaataggagcagtgagagaggggatccttatcttgtgctggtttctaa

SEQ ID NO: 784229 - DNA, 533 bp, Homo sapiens
acatcctgaatgctttgctgcttagaaattttaagttccacacatctctagagcaggggcatgatgtcaccagtctctttgctaaagcatagcaagagtgacctttactccagtttccaataagtttctcatccccatctgagtcyacctcactctgggcttcactgtcaatatcatcatcagcattttggtctaaaccattcaacaggtctctaggaagttccaaacttttcctcattttttctgtcttcttttgagccccccaaacagttccaacctctgcccaataccgagttccaaagctgcttccacattttcaggtatatttacagcaattctccacttctctggtaccaattttccgtattagtctattctcacactgctgtaaaggactacctgaggctgagtaactgattaataaaagaggtttaattgagtcacatttccacaaactgtataggaggcatggctggggaagcctcaggaagcttacaatcatggcagaaggtgaagaggaagcaaatatgtct

SEQ ID NO: 784230 - DNA, 632 bp, Homo sapiens
cggcacaagacaaggatactctctctagccactcctattcaacataatattagaagtcctggccagaacaatcaggcaaaaggaaaagataaaatacattcaaatagaaagagaagaagtaaaaatgtccctgttttcaaatgacttgattctatatctagaaaaccttatagtcgtggcccaaaagctcctgaagctaatgaacaacttcagcaaaatttcaaaatataaaattaatatagaaaaattactagcatttctgtaagttaacaatagctaagtggagagccaaatcagaaacaacatcccattcacaattgccagtaaaagaatgaaatacttaacgaatacagctaatcagggargtgaaagatctttacaaggagaactacaaaacattgttcaaggaaatcagagatgacccaaacaaatagaaacacatcccatgctcatggatgggtagaatcaacattgtaaaaatgaccatacttcataaagcaatttataaattcaatcctaatcttatcaaactacaaattacattttttaaagaaccagaaaaacttattttaaaatttatatggaactaaaaaggagcctgaatagccaagacaatcctatgcaaaaagaga

SEQ ID NO: 784231 - DNA, 611 bp, Homo sapiens
atttaggctaaattgtgggaactaagaacataaagtacattgatttctttattacggctagtagatatttaagaatgttagcacaggtcgtttaataaattttgcttctaggagacgttactatttattcccatttagatgggtaggaaagtttctttggagagaaacctctactttttacacctgcaagagctcaggttgtaagtggctgtatttctttttcaaaggtcacagctcttgttgggcggtctctcctcagctcctccatttccaggatctagtaattgctccctcacattttaccttttttaggcctagtggtgggttatgtctttctattgtccccagagccaggggccacctgcatcacagtattcattagtttcccttaaccctacccacaactttgaatattgtttcttattgcctctcatagtttacccattttagcatgcygtgtgtttgttttcttgctgatctctgatagataagcatccagagatgatgatatgtctgctattaattaaggatttgttcgtcactccatatgagttaataaaagtccaaaatatgacttaaaattaacaaattttgtatgaacttgtggttgt

SEQ ID NO: 784232 - DNA, 611 bp, Homo sapiens
atttaggctaaattgtgggaactaagaacataaagtacattgatttctttattacggctagtagatatttaagaatgttagcacaggtcgtttaataaattttgcttctaggagacgttactatttattcccatttagatgggtaggaaagtttctttggagagaaacctctactttttacacctgcaagagctcaggttgtaagtggctgtatttctttttcaaaggtcacagctcttgttgggcggtctctcctcagctcctccatttccaggatctagtaattgctccctcacattttaccttttttaggcctagtggtgggttatgtctttctattgtccccagagccaggggccacctgcatcacagtattcattagtttcccttaaccctacccacaactttgaatattgtttcttattgcctctcatagtttacccattttagcatgccgtgtgtttsttttcttgctgatctctgatagataagcatccagagatgatgatatgtctgctattaattaaggatttgttcgtcactccatatgagttaataaaagtccaaaatatgacttaaaattaacaaattttgtatgaacttgtggttgt

SEQ ID NO: 784233 - DNA, 599 bp, Homo sapiens
actcagcaattgtcatatttttctccacttttccctaagtcaataggcaaccatgaagttgacaatgttgctgataacattgtcatactcaacatcatttcccacaaagcttaaacctctacagaaactcagcagtccctacaacacatccttgaagaatgagaggggtgtcaataatttcagctgctcaaatggaaggctctgacatcaaggaatattaagtggcacattgaagggaattctactattaagtaatgaaggtgaggaaaacaatttctcaatccacggttatttctttgttatactaagaacmgtgcccaatacttatggaacaaaataagcctatcatttggacgtctcctatcagcctgaagcctgatgtcatataaaccaataatctgtgattgaatttttcagctttcagtgttttatttttagcataatatttggtattgccatacgtgacttattattctgttcaatttaatcaaattagagaataaacaaaacgacaaacataatttctcttaatgtgcgtgtgtgtttttcttttttgagacgaagtttcattcttgttgcccaggctcgattcgagtgcg

SEQ ID NO: 784234 - DNA, 599 bp, Homo sapiens
actcagcaattgtcatatttttctccacttttccctaagtcaataggcaaccatgaagttgacaatgttgctgataacattgtcatactcaacatcatttcccacaaagcttaaacctctacagaaactcagcagtccctacaacacatccttgaagaatgagaggggtgtcaataatttcagctgctcaaatggaaggctctgacatcaaggaatattaagtggcacattgaagggaattctactattaagtaatgaaggtgaggaaaacaatttctcaatccacggttatttctttgttatactaagaaccgtgcccaatacttatggaacaaaataagcctatcatttggacgtctcctatcagcctgaagcctgatgtcatataaaccaataatctgtgattgaatttttcagctttcagtgttttatttttagcataatatttggtattgccatacrtgacttattattctgttcaatttaatcaaattagagaataaacaaaacgacaaacataatttctcttaatgtgcgtgtgtgtttttcttttttgagacgaagtttcattcttgttgcccaggctcgattcgagtgcg

SEQ ID NO: 784235 - DNA, 571 bp, Homo sapiens
tacctaatggaataaatgtccacagctgaacctctaagaagtagactgatgcttgcatcttcctcacctggctactggggcagagccagaggatggcatgtttggaatcgccaatgcagtgaggaagggcagctcttgtccaaaagcaaacagcatttctctgggcctctcacctagtgagatcctgagcctgtgtttctgaaatytgctagtaagaggaatgagctttggtggaggatgtgaatttctcctggccattcccttttgttgaatatgagttcattctggtaggaatgatacaaacatggaactaggaaattaggaaagagttttctgccacctgccaagctacttaatggaagttacctggtgaagagaccacctaggctccactagccaaacatgctcagatgggagacagcattttaattcttgtttgctaaggaacaactcgctgagcctcttttacagtaaaaccagatctctggatgacttatgcctaaaagcaataggatggatggaactttgaggccatgttcctgggtctacagaggtccagctatggggcaga

SEQ ID NO: 784236 - DNA, 595 bp, Homo sapiens
tgcctgtaatcccagctacttgggaggctgaggcatgagaatcatgttgaacctgggaagtggaggttgcagtgagctgacagcatgcctctgcactccagcctggatgacagagcgagactctgtctcaaaaaaagaaaagaagactgaacaaatagctctcatgaacaaagatgcaaaatccttaacaaaatattaacaaatgaaacccaagaacatataaaaagaaattgtggtggttttcacaaatagccacaaatactttgatactgctccctttaaactatgaatcctaactgtcctcttgattgtgggctgaacttagtgggttacctctaatgaaaagaatgcagtggaactggcagtgttaggatcccaagggtaggtcacaaaaggcattgtggctttctctttgctccttctctattttccttattatctctggggaaagccagytaatgtgtaatcggtccactcacacagccctgcaccctatggagaggcagacatggcaatgaactgagcctcctgccaacacccagcaaggaactgaagcctcctgccaagagccatgtgagtgaaccaccctgaaatt

SEQ ID NO: 784237 - DNA, 475 bp, Homo sapiens
aaaaatatcaagacagaagtttataaaatgtgctaggaaaatcgaaggaagagggtgggggtgggaaaacttcagagaagcagcgacaacttgtgctggacctgaaggatgaataagagctgccagaggggacgggcgcggtggctcacatctgtaatctcagcattatgggaggctgaggtgggaggaatgcttgagcccagcaggttgagactgcagtgagccacgactgagctactgtactccatcctggccaaaagagagagccctgtgtcataaataaatraataaataaataaatttttaaaaaaatgtttgccagaggaagaacgtggtggtattcaatccatgaagtacaggaggcttgatgcccatcattttgagggaattctaaaattttaagtagtgaaaagtggcagggaataccgtgggatagggaggagaaacagaaaggagagcagtgaatagtggttaa

SEQ ID NO: 784238 - DNA, 447 bp, Homo sapiens
ctcaccaccccaccaacctaagtctccattgtctatcattccacactctacttccatgtgtacacattattcaacacccacttagaagtgagaacatgtggtatttgtctttctgtgtctgaattctttcacttaagaaaatagcctccaggccaggcgtggtggctcacgcctgtaatcccaacactttgggaggcccaggcgggcggatcacgaggtcagcagatcaagaccatcctggctaacatggtgaaaccccgtctctaccaaaaataccaaaaaaattagccaggcgtgttggcgggagcctstagtcccagctactccgggggctgagccaggagaatggcgtgaacccgggaggcggggcttgcagtgagccgagatcgcgcccctgcactccagcctgggcggcagagcgagactccgtctcaaaaaaaaaaaaaa

SEQ ID NO: 784239 - DNA, 554 bp, Homo sapiens
gaggagattgagaccatcctggctaacatggtgaaaccccgtctctactaaaatacaaaatagttagctgggcgtggtggcaggtgcctgtagtcccagctactcgggaggctgaggcaggagaatggtgtgaacccaggaggcrgagcttgcagtgagccgagatcatgccactgcactccagcctgggtgacagaacgagactccatctcaaaaaaaaaaaaaaagaaaaaagaaaaagaaaaagaaaaggcagaaaaatcatccagaggaatgagagtagcatttgtggaggcatggagtagtgaaatcccatagtttgttctggaactggctggctgttccagctggaccacattcagatggctgactggttatcaaggcaatgtaccactgagactgagagcagtttgtttgacccacacaacctgagtttgagtcttggctttaccatttcaattgtgtgaccttgggcaagtcagtttacatcacctactctatgtgttttcatgtgtaatatgtggataataaaaggaccaaggtatgggggaagg

SEQ ID NO: 784240 - DNA, 558 bp, Homo sapiens
aaaggaaccagacacaaaagaatacatgctttgtgattctagttgtatgagagtctaggaaatgcaaacgaggcaataggagcagaaagcagctcagtaatgttatgggggtcaggtgcagggggttggcctacagaggaggacaagaaacttccagggatggcagaattgtacactttaagtggctgcagtttattttatgtaaattatacctcaataaaattcatttttcaaaaagcacctagaagcatgcccaacacatagcaaatggtcaataaatggtggacttcataaaaaatttstgtatgtgtgtgtgtgtgtgtgtgtgtgtgtgtgtgtgtatgtgtgtatgacccagtaagctcatagaatgatgttcaacatcattagtcattaggaaatgaagattaaaactacatgagatcatgtagtactagtgcagtagtactgcactagagtggcttaagtttaaaagttgacaataccaagtcttctcaaggatgtgtagcaaccaggctctaatatatggttgatagaaatgtacgatggtacagctac

SEQ ID NO: 784241 - DNA, 558 bp, Homo sapiens
aaaggaaccagacacaaaagaatacatgctttgtgattctagttgtatgagagtctaggaaatgcaaacgaggcaataggagcagaaagcagctcagtaatgttatgggggtcaggtgcagggggttggcctacagaggaggacaagaaacttccagggatggcagaattgtacactttaagtggctgcagtttattttatgtaaattatacctcaataaaattcatttttcaaaaagcacctagaagcatgcccaacacatagcaaatggtcaataaatggtggacttcataaaaaatttgtgtatgtgtgtgtgtgtgtgtgtgtgtgtgtgtgtgtgtrtgtgtgtatgacccagtaagctcatagaatgatgttcaacatcattagtcattaggaaatgaagattaaaactacatgagatcatgtagtactagtgcagtagtactgcactagagtggcttaagtttaaaagttgacaataccaagtcttctcaaggatgtgtagcaaccaggctctaatatatggttgatagaaatgtacgatggtacagctac

SEQ ID NO: 784242 - DNA, 607 bp, Homo sapiens
aaaattgttttgtggctcttttgccgttcctttattcaattcttccaatcttgctgtcttcctttgtgatttgattatttttgtagtgatgcgctttgattcttttctctttatcttttgtgatttatctttattgttaccatgaagcttacataaaacatcttatagttattgcagtatattttaatctgataacagcttaccattcattacatacaaaaactctccattttaacttctcttccccccaaactttgtgttattaatgtcataatttatatcttttatatatccttattaaattattgtatatatagttatttttaatacttttgtcttttaactgttacactggaactaaaagtgatttatacaccactagtacaatattagaatactctcaatttgactatattcttacctttaaattgagttttatacttktacatgctttcatgttagtattcttttgtttctacttgaagaactccctttagtatttcttataatacaaatctagtgatgattaactctcataccttttgtctgtcagggaaagtccttatctctccttaatttctgaaggacagtcttgcaggttataata

SEQ ID NO: 784243 - DNA, 602 bp, Homo sapiens
cctccttgtgggagccagatgtcagaaccaacctctaggcaaggttttgccatttctcttctactttcaaagagaattctgtgtgccccgcatcccgttcatcatgctgcagtagtacagaattgtaaacattaccatgtaagctgaaaatgtgcaatatcatctaaataattaataaaaaaatgacgatggttttgtaaactttaacattttttctcaaatctttaaaaactctcttagtattggttataaagcatagtaaagtggaaaatagtgaaactaatattcagtcagtacatttaacagaacatttgaaatattgrcgtggagaaaagggaaccctagtacccttttggcggaaatgtaaatgaatacagccattatggaaaacagtatgaaggttcctcaaaaaactaaaattagagttactatatgatccagcagctccacttctgggtatacatccaaagactttgaaattggtatgttgaagggatatgcacattcccatgcctgttgcagcactattcatgatagccaagatacggcagcaaccaaagcgtccatcgacagatgaatggctaaagagaaggtggtgtata

SEQ ID NO: 784244 - DNA, 597 bp, Homo sapiens
atagcttttctgtcagtagaggtttacgtttcactgacctttcctctgagtgagatctgggtctcccaaggacttgaggtcttctgagccttctgaaggctctggctgttctcttccctggtgaggatattggttggagtggggtcagcattctaggtgaaactgaaacagcaatgaactgggaatctgcagactaaattttggccattgcgttttcattgatcagttggatgaaaacatccatcctctcatctcaaaatggggatatgaactacattactgtgttatcatgaagagtaaatgagataatatttgcaatcatgcctaatatttatagtaccgggtgtrtgatcaatgctcaatcaatggtcacccccctttgaatccttggattttgtatatcaaatgcacagactgactagatgatctttaaggctcctactagcaccaaaatggaatgattttatctgttaagagtgatcttttaaaatctgtctttatgtagatgaaaagcttcatgtagatgagaaaagataaaacgtttttaaaaagtgtctttcatcctcagcaaagtaacacaggaacagaaaaccaaac

SEQ ID NO: 784245 - DNA, 622 bp, Homo sapiens
cccatctgctctgtttctgctatttttgcaaagaaagggtccttggcattactgtgctcagattcgcctatccttgcacccacacctgtctctatagttcacacagggtaggttggtttcctctgtgctgggcagacctgatttccctcttctccatcaaactaggcatgttttaaatgggaaatggaaaggaggctgcggcagcagcctggcagtggccccagggtaggttttccagaayatgatgctgttaggacgagatcactggggctggggtgccagagaccccattcaggtgcaaagaagcaagtgtatggttgagggattttctatccagcaccaaataggaatggaatggagtgttctggaaagaggcaagatttgtgctgaaatcctggggtcatggtcttagaaagtcttagaaagctaagtgggttatatggctgggggcagatccctgaacctccctgggctatggattctttctacaaagtgctgatgtccctccctcctggttgtggtcatagaaattacatggaagcgtgcactgctgtgctcaggtcatgatcaagaacacaggtgctggtgactttcatgatctgttgatgtggatccagtggct

SEQ ID NO: 784246 - DNA, 607 bp, Homo sapiens
ttcccctttaatatcagatgactataacttaatctccggtttgtgtgttattctctttacttcccaaaaagagggtgtggtcagggcaattaaggagagtaactaagagggacattttaaattctggaatgagttacctctgcmccttcgcttttctgtggctttcaggttgatcagaaatatgttaactctgggacctctaagctaataaaaaattatacatcaattactactcttactaattgaaatagtagactatgataaaccctgaaatattagcaatcacatacttaaaaatctgcattaatttgaattaaaaatttaaattaatacttctatagaactaaaaattttttcagaagttatgttgtaaaatagaagcatagaaaaattactacatttgattttgaaagagcaaaaacatgtttttaaaataagtaaaaacattcaattttttgcattttaatttgggctaaagagtcagtgaaagaaaaatgaacatcttatttcttccaaactgtttcagttggtaaaatacaaaatggtgcttagtgtggtagctaaaatgaaaacagattcaatgggtcaaaattataacttgtatcga

SEQ ID NO: 784247 - DNA, 607 bp, Homo sapiens
ttcccctttaatatcagatgactataacttaatctccggtttgtgtgttattctctttacttcccaaaaagagggtgtggtcagggcaattaaggagagtaactaagagggacattttaaattctggaatgagttacctctgcaccttcgcttttctgtggctttcaggttgatcagaaatatgttaactctgggacctctaagctaataaaaaattatacatcaattactactcttactaattgaaatagtagactatgataaaccctgaaatattagcaatcacatacttaaaaatctgcattaatttgaattaaaawtttaaattaatacttctatagaactaaaaattttttcagaagttatgttgtaaaatagaagcatagaaaaattactacatttgattttgaaagagcaaaaacatgtttttaaaataagtaaaaacattcaattttttgcattttaatttgggctaaagagtcagtgaaagaaaaatgaacatcttatttcttccaaactgtttcagttggtaaaatacaaaatggtgcttagtgtggtagctaaaatgaaaacagattcaatgggtcaaaattataacttgtatcga

SEQ ID NO: 784248 - DNA, 612 bp, Homo sapiens
gggctaaagagtcagtgaaagaaaaatgaacatcttatttcttccaaactgtttcagttggtaaaatacaaaatggtgcttagtgtggtagctaaaatgaaaacagattcaatgggtcaaaattataacttgtatcgataatttgcaatatgagcagtttagaaagatcaaggcaatattaaggtagctagtttcagactgtagatttgttcttaraaagaggatctgactcgtaaatagacacaagagggatgccaggaacgtgcttttgctggaatgctaagatacatgcgtaactaggggatttagagaaggaagacattcttatttctgttcctttcttttgccactgtttacaaataacatggaggtgtgacgtctgtgtgtcttgtcgatgcgactacaggaaagagatttcgttcataaattccctctccaggagccatgctgtttatgtcagagcctgattcttatccagtctattgttgctgcttattggaaattgacataaagaataacccaaacatagacatttgtctggaatcctcttaatatcataaattgcatctgtttaccatcctctgtcagtttccactggaaatttcaacaccc

SEQ ID NO: 784249 - DNA, 502 bp, Homo sapiens
ttgttaacttggggttggaaatggtgctccagaagtagaagcagctgagggcatgtggtttctaagatcagcatccactggacaggatgaaaataccgagccgaccacatggatgcctgggacatcaggctgcccacacataaaaactaacgatcgaaaagacctgtcgtttggttagaatggaagtttgatcagtgtaactctggttaaaatctcagaaaagcaaacactgggccttcttgggtggaggtggagatgctatcagtctgttttctttctcctgaygggcagctcaacttccctcctctcctatcttgtcttgatttgagtgactctgctctggagatctccccatcatgatcactttcctagaatttcaagaggaatttctgccacttcaggagagcatcgttgtctgtttattttgataagtctgtcactaggacaatagaaaagatgccaatgtctgagatttccgtcttacaagggcactagctcttcc

SEQ ID NO: 784250 - DNA, 634 bp, Homo sapiens
ttatattttttatttctagaaataacactttttaatttttaaaaggagtaaccaatgggatagaaatattactttgaaaaatatgctagatcacttaaacttttctattctctgtaaacattttcaaatgtggctttaaatctttaaatctagcaaacagattgttctataatgtgtctactaattctagaatgtgacaatcttggmatttgttttcttttctttcactcttcatttttattttcagttttctgctggttcttgctcacagttccttgtttccgtgggtacttggaattatttgacgttgtgtttctcattttatttgaaaattattttttagaagtattttaaggctatgacaatgttatccttctttagtcaaaatgagtattatttctttcatctactcattgttactaccaatgctgatactactctaaattaaaattaactctgtgtgtgtgtgtgtgtgtgtgtgtgtgtgtgtgttttctttttttctaaagaggcaccaaggaattgcaaatttgttggcaaatccatctaagttccaccttatttcttcttcacttttgttctgatggtacaatcctttaacgcctaactgaagttgatgattcctcagccttag

SEQ ID NO: 784251 - DNA, 601 bp, Homo sapiens
tattcttttccatttctggcctcattcctccttgccagccagtcctccctctattcacatgtcatgtggatcctttattgatccacatggacagttctttattggacagttcttgttagttgcatgatcatcatcgatgacaatagttctaccaggccagtaaggttataggattgcagtcttgccatgctccacaaacatcgaagtgccattctgttgcatgtacaatagccaaagtttgccacgattctttttgaccacagatgaattccagggaggtccttgttgagtagaaaatgagtggaggctcactatgggtaacctctcayccaaaattgtcagcagcagtgtgccccatcaccaggagacagttcagagccctgaactggggacacagtagcaactttaacacccaaatcctacatcatccttcagaattagaatctggcagatgcctaaaggagtaatgccctatagatttaggatggttcatgagaaagcagactagctctttctggatttgggacagaaggtacaaagactcaatgaggaagagaaaaagtattgcttggattcctaaagcatgcattattttctaccc

SEQ ID NO: 784252 - DNA, 622 bp, Homo sapiens
actgttgcagccgctgcagctgctgccacagccagtattgccggggctccaacccagtacccacctggccgtgggggtcctcccccacctatgggccgaggagcaccccctccaggtgaggagcccataaggagaccagtgctaattgatagaagatgccttagctggattaatgatgagatataaccttgactgaagctgatgatgagtttgtataattaagcaggattactctgagatccagcgtggctgactgatgagactaggtggacaagagccattgggagccctgggtgttaggctcaaatgtcagttttctgggagctgctgagagggtggaatggtccatctatctcagaacttggtggaaagctttgtagtttttttgctaccttttcaagatagacayttgagctatattcttggggcttttctcttgcaggcatgatgggcccacctcctggtatgagacctcctatgggtcccccaatggggatcccccctggaagagggactccaatgggcatgccccctccgggaatgcggcctcctccccctgggatgcgaggtaagtgcctgcagtggtgactttggcttctttccctagagcctagtgggatag

SEQ ID NO: 784253 - DNA, 574 bp, Homo sapiens
tgcatctggcataaagatagacaatggatagatgagagtacagaaataaacccttacataaatggtcaattgattttctgcagtggtaccaaaaccatctattgggaaaagagtagtcttttcagatggtgctgggacaactggataaccacatgtaaaagaatgaagttggaactctacctcatatgccttcatttatcactcattaactcaaaattggtaaacaatctrtaagagctagatctagaagaaaatgagtaagtcctcatcaccttggatttggcaatggattattgcattggacattgaaaacaagcaacagaagaaaaaatatgtaaatgggacttcatcaaaattaaaaacttgtacatccaagaatggtgaagaatgaaaaaaaaacttatggaaggggagaatatttttgcaaacgatatgatagtctgatatctgtagtttgctatttgaactataaaaaattcttaataaaaaagataacctttttcaaaaatgagaggaattgaacagatatttctccaaagaagatacacaaatggccaaaaagcacatgaaaact

SEQ ID NO: 784254 - DNA, 574 bp, Homo sapiens
tgcatctggcataaagatagacaatggatagatgagagtacagaaataaacccttacataaatggtcaattgattttctgcagtggtaccaaaaccatctattgggaaaagagtagtcttttcagatggtgctgggacaactggataaccacatgtaaaagaatgaagttggaactctacctcatatgccttcatttatcactcattaactcaaaattggtaaacaatctgtaagagctagatctagaagaaaatgagtaagtcctcatcaccttggatttggcaatggattattgcattggacattgaaaacaagcaacagaagaaaaaatatgtaaatgggacttcatcaaaattaaaaacttgtacrtccaagaatggtgaagaatgaaaaaaaaacttatggaaggggagaatatttttgcaaacgatatgatagtctgatatctgtagtttgctatttgaactataaaaaattcttaataaaaaagataacctttttcaaaaatgagaggaattgaacagatatttctccaaagaagatacacaaatggccaaaaagcacatgaaaact

SEQ ID NO: 784255 - DNA, 610 bp, Homo sapiens
caccgaactgcccttctctcattccagaaagacattggggaaatgtcccaggcaaagaaaagaaatgtcctttatgtggttgtgcacatgggctctggagctagactgcctgaattcactgtctgctttgccattaccagcttattaatctatgagaagctactcaacatctcagggactcagcttccttctctgtaaaatagaaataacaatactatctatctaattggcacatgataagctctcactaaatattgttgttattagacaatattaactccctgcctcccatgcctatgtttgatgcaaaccaattttacaaatagcaatagccaacttagactgccactgctttctaaggtctattcaatggccatcttcattcagcactgtgatggtcagttataatgtgtcaatttgaccgrtccatggggtgcccaggcatttcatcaaacattattctggacacttctatgagggtttcttggatgagattaacatttaaattggtagactttgagtaaagcagattgccctccctgatgtgggtgggcctaatccaatcaactgaaggcctgaatgggacaataggctgactttcttctgtgta

SEQ ID NO: 784256 - DNA, 629 bp, Homo sapiens
tctgccatgtttcatcagaggctcacatagaatttactctgcacagtcccacagtcccttctacccactaaaaaaatgacctcagcttactggtatccaagcctatataacaaattctaacagaggggctgaatttcagattcttttggtattgggtatttctgttcacattttttagcataaggcaagtgctttttgccttggagaatttcattatttaataatcagcttccctcaaaattctctttctactataacctggaaagaactcaagaactttaattgtataccacattctaaaaatcttccttgcaagcatagatgttgtatacctyctgctcaggaccacccctttttattattgtaaatttaaataacttttttgttttagaatagcattagatttatagaaaagttcaaagatagtacagaaagttcctggatgcccctcttcagtttctctgattgttatcaactccattactgggtacattgttgttacaactagcaacaaatatcagtactttactattaactaaatccatatgttattcagatttcagtagtttttccctcttgtcctttctctgttccaggatcctacccatgatacgagattacatctcatc

SEQ ID NO: 784257 - DNA, 629 bp, Homo sapiens
tctgccatgtttcatcagaggctcacatagaatttactctgcacagtcccacagtcccttctacccactaaaaaaatgacctcagcttactggtatccaagcctatataacaaattctaacagaggggctgaatttcagattcttttggtattgggtatttctgttcacattttttagcataaggcaagtgctttttgccttggagaatttcattatttaataatcagcttccctcaaaattctctttctactataacctggaaagaactcaagaactttaattgtataccacattctaaaaatcttccttgcaagcatagatgttgtataccttctgctcaggaccacccctttttattattgtaaatttaaataacttttttgttttagaatagcattagatttatagaaaagttyaaagatagtacagaaagttcctggatgcccctcttcagtttctctgattgttatcaactccattactgggtacattgttgttacaactagcaacaaatatcagtactttactattaactaaatccatatgttattcagatttcagtagtttttccctcttgtcctttctctgttccaggatcctacccatgatacgagattacatctcatc

SEQ ID NO: 784258 - DNA, 458 bp, Homo sapiens
aatctgtaccagatgagttttaataggaaaagtgaatttcccccccccccccagagaacccaatgccccacctcaagcagaagtcacctgggcacaagtggagattctgctgtgggctcagctgcggttcagaggcagcctggctgctggaggagatgaggctgggggtccgaagagggaaccatgcccaactctgcctccaagccatgccaaaccattctggtttacccagcarttctagaaaaataatgagtacaagatgtgagctggactagaaatgtttctttggtgcagagtgaaatctgacttagcgggacaatgttggttttttatcctacgtggatgttttggcttggtattaggccgtggtggctgtgtggaaatctcagggaagctatggtgagggcctcattgctggccctgcagagccagccctgaccttcccaaagaagtctgtt

SEQ ID NO: 784259 - DNA, 615 bp, Homo sapiens
ataaagcctctcctaatatacagtcatttaataaagagaatatacttgcaaattttaaaacaaaaaataataaccccagaataacatgaagtcctttaaattcaataagtttaatataaaaaactctctatattacatattttcctaatttaactctggatttaaaaaaataaactattttaagaacaacatgattcattaaaatagaatatagataacttttctgaaagggggggtgaaggtcttaaggtgagtgatggtcrtaacatgatgaaacttatatttagacagaacaatctactgcccagagagggtgatctggaaatacgatggagaaaagatgatgtcaaagttgagatgtctccaaagagccatagacaagatgaatgtgtgtgttgaaggaaaaaaaaaatgtgttttactgcctaaagaatcagcagctctaaggctattagtgttgtcttgaagatgatagaagaagtgctttttttctttcagaagatatcagattaaaaaaaaaaattactagctgctgtactaccactaccttctgttcccaggggacacttcctggctcactgcatcgctccagccttgcagtatcctaagctccaa

SEQ ID NO: 784260 - DNA, 623 bp, Homo sapiens
tcttgcatatgtgaaatctttgcctttgtgtccccacccaaatctcatcgtgtagctcccatgattcccatgtgttgtgggagtggctgagtgggagatgattgaatcataggggtgggtatttttctgtgctgttcttacagtggtaaatgggtctcatgagatctcatggttttgaaaatgggagtttccccacacaagctctttttttgcctgctgccatccgtgtaagacatgacttgttcctccttrccttctgccatgattgtgaggcctcctcagccacatggaactgtgagtccaattaaacctctttcttttgtaaactgctcagccttgggtatgcctttatcagcagcatgaaaatggactaatatagtaaattgttaccagtagagtggggcactactgtagatacctgaaaatgtggaaacgactctggaacttggtaacaggcagggattagaacagtttggggggctcacaagaagacagaaaaatgtgagaagtttggaactgcctagaaacttcttgaatggctttgcccaaaatgctaatagtaatatggacaataaagtccaggctgaggtggcctcagatggaaatgaggaacttgttgggaa

SEQ ID NO: 784261 - DNA, 587 bp, Homo sapiens
cccaggacccaggagctaactgaaagagctctcaatagccaaagctggaaaaagataagctggaacataatacaggacatagtgttgtattacaacccaaaatataaaataaatgaccatgagtccayactgatataaataaatgaatgattgaataagtaaataaattggggaaaatagacaaatttgtacagaaaaaaaattatgtatgtagttactctctgtctttagggagaagtataactaccagtccttaagcattagctgtgcatagtgactttcttctgaagagtttagagagaaataaagagtaactttgtaatggaaatgaagcagcatcattgtctagggtaaacacccagggttcattgtctcataccaaaggaattgaggatgcggacacaagaagtgggtttaggagcgaaggattaatagaaaaaagaaagcgaaaagagagcagctttttctgctgctaagcgacaggggcgccccaatgggacttccgtctagcagtggaatgcaccgggttttatagacaggcttgaggaggcggtgtctgatttacataggatccaaagattggttgg

SEQ ID NO: 784262 - DNA, 620 bp, Homo sapiens
gcgtgtgcgacagtgcatgtgtgtatatgggcattaatgtgtgcgaatgtgtgacagtgtatgagcatgtacatgtgagtattgccacagagaacagctttggggagcagccaactttctcaaaatttctgaaattacctctaaacctctttcctaatgaagtggctccaaagtgcctgagaacaaggaaaggaaacgagttggratttctcgcggtctcctgtcatccacgggtgctatgcctctgcttctggcacagacagtcagaagccaggacaggctgttcctgcataattcactcatttgtgcctcaggataattttgaagcagcttgttgctgaaggataaatgactctacctccttaaattagacaaaatgaggttttgtactattttctgtatttgttaaagtagcaactttactgctgtaaagtcccttgaggaatttgttgatctaaaagacagttaataatgtcttaaaatttagatatgcagtaacagcaaaagaatcagcagaaacaaaaggaaggaactaagcaccatccatgatggtagaatgacatatgaagcgataacccatttaagatagaacctccaggactcataatatgcacactcac

SEQ ID NO: 784263 - DNA, 610 bp, Homo sapiens
ctatcccactgagattttaatttatatgaaaagtatgcaatctcttaactgcttttttccaccagtctttattatatttgatggtttgcatttttaaattactcaactagagcccctaaattaatgcagtggccccaaatgcatctagccaggagaagcagtcagcccatgaacaacaaaatggaattgagaccaaggtaccaatgactgcttcaaaaaagaaccagtgggaggcagttagtaggaacacaacagattgcaaacgtggcctcaattctcyaccctccctgttatcatatccttagacaatgtgacctttcttcttctccagtcaaaaagtagagtttatttccccagcctttaaatacacactggtattttgatttgctttggttagtaaaatgcagctgaagtaacaatccatcaggtcagcttaggcctcagacgttgtgcgtgcttatactcatttgcttggaatttcactgagccacaaaatgaacaaacctgggctagcttacaggaggatgagagatacatggaccagagcagagatgccccaactgagatcatcctggtgatctgaaaggagactcataagagcaccttatcg

SEQ ID NO: 784264 - DNA, 610 bp, Homo sapiens
ctatcccactgagattttaatttatatgaaaagtatgcaatctcttaactgcttttttccaccagtctttattatatttgatggtttgcatttttaaattactcaactagagcccctaaattaatgcagtggccccaaatgcatctagccaggagaagcagtcagcccatgaacaacaaaatggaattgagaccaaggtaccaatgactgcttcaaaaaagaaccagtgggaggcagttagtaggaacacaacagattgcaaacgtggcctcaattctctaccctcyctgttatcatatccttagacaatgtgacctttcttcttctccagtcaaaaagtagagtttatttccccagcctttaaatacacactggtattttgatttgctttggttagtaaaatgcagctgaagtaacaatccatcaggtcagcttaggcctcagacgttgtgcgtgcttatactcatttgcttggaatttcactgagccacaaaatgaacaaacctgggctagcttacaggaggatgagagatacatggaccagagcagagatgccccaactgagatcatcctggtgatctgaaaggagactcataagagcaccttatcg

SEQ ID NO: 784265 - DNA, 512 bp, Homo sapiens
ggcgaagaccaggttgacataaggaagctaattttcaggagataattaaaatcatcattggagggagtacagggtagaatgtctctgcattaaatcaaggtggtaacttgaagggcaaggttgagagactttcaaaatatagaagaaaggaaaaaacattgaatgacttaaagagtacacatcagtcattagtcttctgtttgtattaccttacatagacaacttgtgaatacaagtattgtgtcatatgtattatgtgatatatatgtatatacatatatgcataatattagatgtatattctctgactacctttcaaggaagacatgaatactactctatgaggtaatayacaaagttattaaaatatattgtttggaattactactattagtgattttaatttttcattttgtttttatatgtgtaattttctatcatgagtataaattctagatgcaaaataataaatgattaaaatcagtgtaattttgtgcatattgcacatctgc

SEQ ID NO: 784266 - DNA, 490 bp, Homo sapiens
atcgcaacctctgcctcctggatccaagtgattctcctgcttcagcttcctgagtagctgggattacaggtacctgccaccatgcctggctaatttttgtgtttttagtagagatggagtttcgccatgttgaccargctggtcttcaactactggcctcaagtgatccacctgtcttggcctcccaaagtgctgggattacaggtgtgagccaccgtacccagcctaacctttcctaaccaagaagacttagacccccaggggagaagtgctcccccaaaaggggcacaataacagttaattagagggaagttgagactgcttcctggcctccttggcctcctcatgtccctgagtggacccacaaagaagggagttactgtgctggctagggtgactgatcctgaataccaaggagtgactgggttgctactacgtaatatgggtaagtggagtatgtctggaatgtagggcattccctggggcaccc

SEQ ID NO: 784267 - DNA, 642 bp, Homo sapiens
tacatgggtctaatcttcctttcttctttagacagctgttgtgacagtaaagtgagacccttgtagcaaaagcacttttcggactccatgatgttaggaaactgcaaaacaccttcttctgagtccagagactggaaaatgaactcttgtgtggtgagaatgaaaagatccctttcttttatttatttagcacacatgaaacatgtatatgtattcaytatacgccagggactcttctaagtacttgacaaatattcacatatttacattctcctaatcacacgatgataaatatacaactgttgtccctgttttccagatgagaaaactgtggcacagaaaagttaagtaacttgcctaaagccacatagctagtaagtagcagagccaggattcaaacctaggcgctatggctatagagcccatgctcttcaccattacatcatgttaacttctttgcttgggatgtttggtagagcaaagataacttgagaagtacaacagactgatagtgaatcttagtcctgccatttagctgtgtggccttgggaaggttaattaaattctctgagcccttactcccttatctatcaaacgagaatacaaatgtccatatcagacaagttttgcaaaggttaaatt

SEQ ID NO: 784268 - DNA, 642 bp, Homo sapiens
tacatgggtctaatcttcctttcttctttagacagctgttgtgacagtaaagtgagacccttgtagcaaaagcacttttcggactccatgatgttaggaaactgcaaaacaccttcttctgagtccagagactggaaaatgaactcttgtgtggtgagaatgaaaagatccctttcttttatttatttagcacacatgaaacatgtatatgtattcattatacgccagggactcttctaagtacttgacaaatattcacatatttacattctcctaatcacacratgataaatatacaactgttgtccctgttttccagatgagaaaactgtggcacagaaaagttaagtaacttgcctaaagccacatagctagtaagtagcagagccaggattcaaacctaggcgctatggctatagagcccatgctcttcaccattacatcatgttaacttctttgcttgggatgtttggtagagcaaagataacttgagaagtacaacagactgatagtgaatcttagtcctgccatttagctgtgtggccttgggaaggttaattaaattctctgagcccttactcccttatctatcaaacgagaatacaaatgtccatatcagacaagttttgcaaaggttaaatt

SEQ ID NO: 784269 - DNA, 617 bp, Homo sapiens
ctctttttatcttttcttttacttttttttcttttttcgttttggctgctttgtctgtaaaactgcccaaagacttaagtccatcagcaagcccagcacagaaatttgactttataaaatgttccttcagaagaagtaaatatttcagaactgtgtacaatctttgtagctttgctcctgatctgttcttctggaagaggagatagtagtattcctcctaaggtttttctaactataaacagagaattatcatagtgatgtaaggagaytacaacattaaattcatattttgataaattggtaaaacatcagtcatccttcaagttagccagccctggggtttctgttgaattctgttggttcttccaggctccccagaggtgagatcatggccagagggagatgggtcactgctgacattctgaagggacatctcagagctatgctgggtaaaggaaaactggtcccatctgtccagcctaactactgctgatagcaccaagacccagggccttatcctctctcaggacccagattcatccttcctatctcctcccctcccacagagcgcagccaccaccctcattaagctagcataagggaaacatattcatttt

SEQ ID NO: 784270 - DNA, 636 bp, Homo sapiens
caaatagcacagagtcccagaacggtggacttaggatttccttttgagttaaaggatttacatctccaatggactggttctctgggaatcaaactcaggccacacaatgaaagtgcagaaccttaactacgagactacaaggtggagtagcagaacgatgatttagcttatttgctctggagggctgtttccatttaaactgcagttccctatttttctttattgcctctttgtgaattaagatgaaaacaataggaatatctcttccattttctctttctagaacttccttcattattctcatttccaaaaatcagtctggtaaaagctgtacaattacttatcatagatttagagaagactatgaaaattatttttgagaaataatagcacttttctcagaatgctytgtaaatatttgaaaaagtcatgagaaagcatgattccaggactgagatcaggctcaggaaattaagtgatgcttctagttttcattggaaatgaaatgttttccacttttcatattatcttattgacatttaaatcatcttgttgagatgtgagaatatagacgctagagccggactgctgggatttgcatcgcaactcctccacttattggctggtgaccttcag

SEQ ID NO: 784271 - DNA, 589 bp, Homo sapiens
atgcttctagttttcattggaaatgaaatgttttccacttttcatattatcttattgacatttaaatcatcttgttgagatgtgagaatatagacgctagagccggactgctgggatttgcatcgcaactcctccacttattggctggtgaccttcagagagttacttaacctctgtttctcagtctccttctctgtaagatggggatactcatagaaacacatgggactgttataagaattaaataagttaagtttcataaagcacttagaataccatctggcacagagtatgmtctatctaatatttgttaaataattacataatactatctgtccctaaaaatatattgaaaaaaactccttcatacaaactaatctcaaaatttcatttattttctgttcttagagtgaaagtaagatagaatcagacttcaagtgaagaccctatatgctttcaacataaaataattaaaatatttgattatcagttgtcttactgtttcatttgcctgattaaaattgggacagagagagcttattcttttgagtttgtttatcacctgtctacttgcagacaagtgtcacag

SEQ ID NO: 784272 - DNA, 616 bp, Homo sapiens
gccatctgtgcttccccttcccacccctcacattgttaatactttttttttttttttagcagaccaggtgaagtcagaactttgttttagaaagaatgatgtcattgtataattgaatgtatacattcatgaagctactaggggtaacarcttgtcactataaaaatatgcctgatataaatttttcttttccttatgctcccttggattctaacctcatgctaataataactgctaccagttttgtaagcatttggtctgtgccaggcacaatgctaagtggtttaggttcatcacttcttttttaggccttttaagaaactctttaggtagatgtaatagtgtaaatattcccacctcatagttaagggcactggaacctaaagaggttaaataatccccaaatgccacgaggctagtactagtgttgggtgtctatctcacctgattaaactattctttagcctaagaacatatgctgacctttctcacattcactcctttgtttatgatgttctctctgctcagactgttcctccacctctgcccattgaaaatcagcagaaccttcaaaacccaatggaaagttctctcttctctgtaaacttgtattggc

SEQ ID NO: 784273 - DNA, 604 bp, Homo sapiens
caatgactaatgagattgaacatctttttatgtgcttatttgccatcatttttcttctttgggggaaatgtctgtttaggtcttttgtccataatttcatacttctattggaattttttttcttattactgagttttgagagttctttatatgttctgggtataagtcttttaacagatatgtgacttgtgaatactttatcacagcctgtggttttccttttcattccattaactatcttctgaaggcactgtgacagaaaattttaatttcaataaagttcaatttatcaattttctctgtcacagattgtacttaggtattgtagctaacaagtttgtgccaatacctattttttctagaagttttgtaattttaggtttagcatttaggtctatgatctattttggggcaaattttgtatataacgtgaggtatggattgatsttggggtttttttgcatatggatatctaattattccagtattattttctgattttttgaaaagactattctatttacacagaaatgcctttgcaattttgtcaaaaactagtttcccacatatatgtgtgtgtgtgtgtgtgtgtgtgtgtgtgtgt

SEQ ID NO: 784274 - DNA, 623 bp, Homo sapiens
acatacatgtgttacttgtactcagctgaacactgaagggcatcttctgtagatgtttaaggagttctctccatgtgcagttctctcctctttaggaatttgtcctgcaaattctggctgccttgatctcttcagactctcagcactgtctcctcaacttaggggggtcttctgggcttcacctggtttccatattcttatgcgggagttgggaaaccctctcaatgcaataaattgtgggaaattgcagggctcacttgtttgtttcctgtttctcaggaaacatttttttcttgctgttcctcattgtataatattaagtgttttgaatattttgctttatatattttgaaaacctattttacatattttatatgttttggttgtttcaagcaggacagtaaattyttcccctgttattccatagaggtctaaatcaaagtttaggcacaattggtttgaatggctcagtcatttaattgctgtgagaccttagatacatttctttagtacttgaaactttaaatttttatcattaaaactaggaaaatatcagagctttcttaatagaaataaataacatttaagttgtgtccagcatggtgttgagtatatagttggta

SEQ ID NO: 784275 - DNA, 591 bp, Homo sapiens
aaccacagtaatcctcaagagaaatacaaatgtttaagctttgtcgcagttctgcagataagaaacgccattttgctagattttcaggcagaatagcagcaaaaccagaacacggtaaaacaactgtaaaaaggaggttaatatgaacaaggctgaaatgttcattttggagaaagccaaggatcacaggttcacacaagtcccctaagaacagttagtttcctacacgtggtgtctttgatacaayctgttcttttcattacctataaatcttggaaatctcattccgacccctcaactccatacctacacacaactctaaagtgggctgtgctcatctgcaactggagaacagctaattccacagagaaaacacaaaaacctcctcccttagcaatgattgcatcatagatgttaattctttctggaaaggaaaagtgctagatgcttaaatcagtaaatagcctgcccaggacaagggaagattttaatgagctaaaattcaaggaaaattatcatctcacttgttcctattttcctcctcccaaatgggagagaccctggccaaagcttggcttaaaactctatctc

SEQ ID NO: 784276 - DNA, 587 bp, Homo sapiens
ctccattccgatgtcagcaccaaagccagcttcggtcactgtggggaagcaagtggaatatgtgctattatcttctaaaaacaaaggtaggttttggcaatcaccactatgattcgagctcaaaggacagcttacattccttttgtttaccaacacaaaggtgaactgatttccccattgtcatagaaatgttcttcactttctgccctaaagagactgcgccctcctctgcttcccaccgccaggcctgagggattccttgtggtggccaggccaagacttttcttcccatatcataactcacagygaagcttttttttttggagatggtgtcttgccctgtcgcacaggctggagtacagcggcatgatctcggctcactgcaacctctgcctcccgggcacaagcgattctcctgactcagcctcctgagtagctacaggtgtttgccaccacacctggctaattttttatttttgtatttttagtagagatggggtttcaccatgttggccagactggtctcaaactcctgaccttgtgatccacccgcctcagcctcacaaagtgctgggattacaggcgtt

SEQ ID NO: 784277 - DNA, 681 bp, Homo sapiens
tccatgtgtgcaacaaacatatatcaaatatacaacatattgagttcaccattacgtctggacacgaacttgaatttatggactgccagaggtttcacagaagaactagtccttgcaactagctcagctcaaaataggttaagaaatatgagcgcacggggcrtatctggctaacttaatcatcaaaagaatttcttgtaaataagaaagaaaaataaaactgtagctttcattcaagtaaaggctacactttgcttcctcacaacaaatcaaaaacaaaaatagaagctttgtagaggaacaagcaaggtgtatgctggacagtacctcattctgaagcgctgttggtgttaactgccaaacagtgctaaaagaaatagaaagtagaatcttcaggctgcctttttctgccctatataaacatgtttattcaatggcagctgtctgcagataaactcaaaaaaagtcacagcaacacatgaattctgaacttgaattaaaggggagaaagtgaggattgtaatgactttttcagtgactaccaggagacaacaccaggataaatcattcaattaactataagagaaattcggcattattactgcagcttaaaaatagaactttgtttagaatatattaattttgaggatccaactcatcttaagtcaatgaaatttcact

SEQ ID NO: 784278 - DNA, 586 bp, Homo sapiens
atgttaatttagaggaactaagtcacagttcaagagatttaccaataaaaatgaaaatatcttataaaatacaaagcaggacacggactattattgtgctctatttctagctttagcactaggatggaaaatctgtagcattcttcccttgaaatagtcttagttttattcttttatgtttaaagaactctttatttctcctcctaggagcaaataagactcaaggtctaaggttgcctccctctgcccttggatgaatgaaaatcattgatactggacaattttaaaaacatgtaccttycctaagtcaatcaacggggcatatggcatgaataatttcataatttattgagaagtcctaattttaaaattgtattaaattaatactttctgggagaaaattgcaagcagttttgtgagaattttaaaatctgataagattatgtggttcaaaagatctataaagaattaaaagatggaaattaaattaatagatgtcatagaaaaaagctactaaatgttgcaaaatttgttaaattattaatataaggaagaacaaaatataggcatttttttctttcaattg

SEQ ID NO: 784279 - DNA, 598 bp, Homo sapiens
tcactccacaacttaatttccaagtagcaactcagaaaataaacatttaaattactttgcaaacagcaaggtccaggttatttcatgtaatcattatactaccacaacacacttaactatgagaatatattttatttggacaggactaaattataaatataatggataaatatatatgtaatataaattataaatataatgagtattgaacagaacatatagcgatcatggagctatcatttcttctctaggaaaaaaacattaagaaatagttttaaatgctgtgtgaatgygcttacttttaaacctaaattggaacaccatttagtccttaattattaaattaataaaacagcagatattctgcttctaaatgcaattaccttctagaggtcataattagtagtataagagttaaactctaagaatatgagaaaaacaaaaccagtattctaaaatgatgtatagttgatacttttgaagtccgtgaactcacagatttatatttgtcctagttatgtaaggctagacatcactcagcttccaaatattatcacagaatatttactttaaatttgttttaaatctgccatgaaca

SEQ ID NO: 784280 - DNA, 598 bp, Homo sapiens
tcactccacaacttaatttccaagtagcaactcagaaaataaacatttaaattactttgcaaacagcaaggtccaggttatttcatgtaatcattatactaccacaacacacttaactatgagaatatattttatttggacaggactaaattataaatataatggataaatatatatgtaatataaattataaatataatgagtattgaacagaacatatagcgatcatggagctatcatttcttctctaggaaaaaaacattaagaaatagttttaaatgctgtgtgaatgtgcttacttttaaacctaaattggaacaccatttagtccttaattattaaattaataaaacagcagatattytgcttctaaatgcaattaccttctagaggtcataattagtagtataagagttaaactctaagaatatgagaaaaacaaaaccagtattctaaaatgatgtatagttgatacttttgaagtccgtgaactcacagatttatatttgtcctagttatgtaaggctagacatcactcagcttccaaatattatcacagaatatttactttaaatttgttttaaatctgccatgaaca

SEQ ID NO: 784281 - DNA, 466 bp, Homo sapiens
aggcatacctgaggagttcttagtctcccaagcccagctctccctggaaggttggaagtccaggccctcacactggatctctccactgctatactttttaactcccatcgagcagagagaagaacaaacttctgaaaccttctgagagcccaggctggygacaagttgggtcagtacacctcaagtctctacacacatgcctgcacatgtggctcgggtatggtttgagagtagtacaagcaccaaaggctggctatcacaaaaccccccaccccaagcccacctaaataaacataaaacccatctcaaagcactgtctgtgaaaaacaaaatgccatttcaagacaagttctctagctatctcccacttcaacacccatattcatcctcacagaaattctgaagctgctgttttaggcacctgagaggaagctcagaaaataaaggtgatttagattgccacctt

SEQ ID NO: 784282 - DNA, 618 bp, Homo sapiens
aaggatgaaatagacttaggattatgatatatttaaggtggactggtccctttggcataatgaaatgctccttttcacttctagtagtcctttttgccttaatgctttatttgaaattagtgtatctacaccagctttctttttccatcctttcattttcaacattttgatgtccttatatttaaagtatgccttttttaagctacacatggtggtggtagttgtttttcatgaagtctgaggatcttagacttttrctaggtttatttaatctttttgtatttaatttaattacttctatatttgggtttatatcatcttatcatctgttatctattgacccatccatttttcatacttatttattttggattaaccaaatatttttattaatttatagttctcttattaacttgctagatatgcattcattccctgttatttcagttgttacactggagattataacttgtatccttgattataacctaaccagaacattacacttcataataatcctagaacaacagaatattttaactccatgtaagaccccctagcttttgtgtttttattgtcttacatttcaattccatatatttaacttaaacttcacta

SEQ ID NO: 784283 - DNA, 533 bp, Homo sapiens
tgtttattatattatattctaaaacaccacagatttttttctctaaatatttgatgctcagaaaaatatcagtactatatagtactttctatatgttattcaaaaccgtccccatacaagaccactcataatttgcacatgtaaaataactgattgcattgaatcactgtgacttttacatatatagtgggtagtactggctgtctaccagcatcctttcccatcttcctatgtactttcttgattgacttcacaaatgagcatattccattcccccagcctcagttactagttgaaataygaccttaatggtctaatcagggtgaattcagaactcttgctgagaactgctggagccatatggccaccatgagggaagtcaactttgagatgctctgtcacccagtttaagaaagaaaaggacgaggagcagagggagcaggatagcagtattgtagacaggggctggggagagaagagagaagggagggtagtgagaaagggaaaggtgtatcaaaattaggaagttttgc

SEQ ID NO: 784284 - DNA, 580 bp, Homo sapiens
gagagactatgagtcccatgaggctagagatctgatttaaacatgaaaacctcaaccacagtagaacactgtagaaaattattttcaggagaaaaaaaatgttactcaagtaaaatattcaaatttgaatttattttgaaatagggtctcactctctcgcccaggctgaagtgcagtggtgcaaacacggctcactgcaacctcgatcttccagactcaagcaatcccacctcagactaccaagtagctgtgaccacttgtgcacatcaccgacgccttcctttgttccttttcttttcgtttttttcttccctttccttcccttccttcccctttcttccytttctttttttttttttttttttttttcagaaatgaggtcttcttatgttgcccaggctggtctcaaactcctgggctcaagtgatcccctagcctcagcctcccaaactgctaggattacaggtgtgagtccccaagcccagactgaaaataaaacgtttaaaggcttaaaaaatttaaaagggatatgtgattaaactattctaaggaaaataatattacttttaacattcacagc

SEQ ID NO: 784285 - DNA, 580 bp, Homo sapiens
gagagactatgagtcccatgaggctagagatctgatttaaacatgaaaacctcaaccacagtagaacactgtagaaaattattttcaggagaaaaaaaatgttactcaagtaaaatattcaaatttgaatttattttgaaatagggtctcactctctcgcccaggctgaagtgcagtggtgcaaacacggctcactgcaacctcgatcttccagactcaagcaatcccacctcagactaccaagtagctgtgaccacttgtgcacatcaccgacgccttcctttgttccttttcttttcgtttttttcttccctttccttcccttccttcccctttcttccctttytttttttttttttttttttttttcagaaatgaggtcttcttatgttgcccaggctggtctcaaactcctgggctcaagtgatcccctagcctcagcctcccaaactgctaggattacaggtgtgagtccccaagcccagactgaaaataaaacgtttaaaggcttaaaaaatttaaaagggatatgtgattaaactattctaaggaaaataatattacttttaacattcacagc

SEQ ID NO: 784286 - DNA, 620 bp, Homo sapiens
atgttccaaattgatggtattttaatgtagttttaacaataagatatttgtggtaataagagagctgctaagttatactctgttaaaatgattgcacagactttggctgcccaaacattagacatatgttttagtgaatatagcctttaaagattttaacacaatccaaccaggaaaactgttaagttgttattctaggagaactgatacagataggcaaaccataaagcttccatattcctgaaagtacaacatcgacatttgaaaagcaaaacatttatcatctatctrtattttttattttatttcttcctcaaaatctatagcaagattgttttcttacagacaactgaaccttacctacaccaagtacagcaactattctgcctgctgataaggttaaaaaaaagcaatattttggataggcaatttatagcccttttaatattttctatccgaatataaagctaataaaaagcaaaagaaacaccaaagctggtctgtatcagttccttctgaaatcaagagaacctcatatatgtaatgcatacatataagtacaactaatggtaaaatcatagcacgtatacttcattaatcaagaacatattatttataca

SEQ ID NO: 784287 - DNA, 551 bp, Homo sapiens
cataactacaggctatttcactatttggagtacaacatgtcctggtcaccccttttcatttatatatcatacacatataaagtaaaacaaaatttaatttgcatctagcagctatctgtacttttatgtgcagcaaatgattttttttttaatggtaaaattactcaattgatcctccaggatggaggagtaaactgcttcctaaatatcagtcaggataactgcagacatgaatgtgtttttcaagcattctggaacataaaagttaatgtggctcctcccaaaatgctgtaaataaattcagagaagaacttattcaggtggcattatctagcccaaggaacatttagcaatgcttaaagacatttttggtcrccacaactggggatgaggattgggtgggaggaacttattagcatctagtaggtagaaatcaggaatgctgctaaacatcctacaatgcacagaacagccccacaataaacaaactataaattcatgttaacatggttaagaagttccagcctatggttgtcaatcatttttaaaac

SEQ ID NO: 784288 - DNA, 615 bp, Homo sapiens
gccttgcctgccgtggaaggctcaacccctcaaaccagggatgtcttgccttgcctgctccggaagcctcaacccctcaaaccagggtgtcttgacttgcctatcctgggaggttgacatgtttcctcccctttccccctctgaaggtcccttgcacacttcccactcatgttgtcctctctggctgctcccccaagggagaattaggcccttcttagtgttggcgtgctggtataaatcccacagcaggatccgccctaagccataygaggtagctgtggaactgcagagaggacgcactcactccatccagcagtaggacttgtcaccatccacacaacaccacaagcagggttgtctgtgatcattcacgcacacacacattcagccctccagactttgaccaccaaggaagtactttactggctcccgtggtttcttcttcattggtctgtgcacagtcattgctgtggtatgtgaggatcctttacctcaggttgccagccggtttggtttctttctgtgttgctgagagctcgggttattccttgcactgggcgggtcctgatttctcacccctgaggacgccacaagggggcggggtgcacctcctca

SEQ ID NO: 784289 - DNA, 483 bp, Homo sapiens
ggcagggcagtaactgagatggataaagtgagagacactgttaaatgcagatgttaagagcttggactatagagtcacactgatttgctttgccctttactagctatggactttgaccaatttacataacctctctgtgtttaatttcttacctgtggcagaaagttatataacagcttctattttttttctttgaaacaatagatcagaagtttgaggaaaacaaaaaatatatgtaatagcctyaaagaaatatttatttctttgaaataaatgttattttcaaggaaaataacaatcctgttattttctttgaaataacaggattggaagtttgaggaaaataaaaaaaaacagatctgaaagaactattgtagagaactagagagccaacggactatgaaacataaaaggattcagtcagcagacattgcagattcagttgaaattaatactgtaaatgtatcatgatgctggctgagc

SEQ ID NO: 784290 - DNA, 610 bp, Homo sapiens
aaaggatggcaaaagatatctcatacaaagagtaagcccaagaaagctgctgtagctctattaatataagagaagcacacttcaaggcaaggcatattagtagagatagtgataaatgggtcagtcattaaaagacacaattctttctatgtttttaataaaacagcttcaaaatatatggaaaacaatggcagaaataaatggtaaaatatacacattcaccataatagctggatattttaactcacctctcttcataattgaaaaataatgacccrtaaataattaagtcaatttgtggccaggcacagtgtctcacacctgtaatcccagcactttgggaggtcagaagttcaagaccagcctggccaacgtggtggaaccctgtctccactaaacaacaacaacaacaacaacaacaaattagttgggtatggtggcccagctaccctggaggctgagcctggagaatcacttgaacctggaaagcggaggttgtagtgagctgagatcacaccactgcactccagcctgggtgacagagcaagactctgtctcagaaagaaagaaaaaaaaaattaagtcaatttgtaacagaaaagcaaagggg

SEQ ID NO: 784291 - DNA, 614 bp, Homo sapiens
ccattaaaaacaataattggattgtttgtctttttcttactggttcatggagattcttcatgtattctgattatgagtatgagccttttcccagttgtgatgttactaatagcttttccccctctgtgacctctctttcccctgtcttagcagagcctttgggtgaacggaagttttaaattttggtgtagtcaaatatcttcgtgtttttctttgtgataaatgcttttggtaccttattgcagagatcttctgttctctgaaataatgaagacttatttctttttcttttcttttctttttttttttttttgagatggagtctcactctgtcgcctaggttagagtgcaatggcatgatctcggctcactgcaacctctgcctcctgggtttaagtgattctcctgcctcagcctcctgagtagcttggattacaggtagctgccatcatgcccagctaayttttgtatttttgtagagacagggtttcaccatgttggccaggctgatcttaaactcctgacctcaagtgatccacctgcctcggcctcccagagtgctgggattataggcatgagccaccttgcctggccctgtttctatattgtcttcc

SEQ ID NO: 784292 - DNA, 585 bp, Homo sapiens
acaactaaaactcacacaaacacaatggtatgaactattttacctgccattatcttaattttaattgctctttcatcattatgtatattatatataatagatgaaattataacccctcccttaccatcgaaactataggacaccaatgatactgcagctatgaatacacagattatggagacctaaagtttgattcgtccgtaattcctacaacagacttaaaaccaggagaactgtggctacttgaagttgataatcaagtaatcctccccatagaaatatcaattcgcatcaattgcatcagaagatgttctatattcatgagcygtgtatcattaggcctaaagccagatgcaatcccaggacttttaaaccaagcaacgttgacatctacatggccaggtctttactacaatcaatccccagaaatctgcagatctaatcacagcttcatgcccattgttcttgaactggtacctctaaaatgctttgaaaattgagcaacgtctatattataatatcactatagagctaactagcattaaccttttaagttagagactgaaagttatgattcttccactg

SEQ ID NO: 784293 - DNA, 551 bp, Homo sapiens
gagttcaagaccagcccggccaatatggtgaaaccctgtctctactaaaaatacaaaaattagctgggcatggtggcgcgcacctgtaatcccagctacttggaaggctgaggcagaagaatcacttgaacccaggaggcggaggttgcagtgagccgagattgtaccactgcactccagcctgggcgacacagcaagactccatttcaaaaaaaaaaaaaaatcaacttcccttctgttttcctagtgaactctccctatcttggcaactctactcaaaagttccaacctctgtaaagtcatccttagtgcccctcacatacatacatgtgcgcaaasacagatacaccaagtttgctattttcttctattataccacctgccacactggcagggttgggtctccgtggtatgctctcaaatcatgtctgttgaatggataaaatatatcgatattttccacaaaatatagttactaaatagacctctggtgatagaaacaagtcaatactacttctgtttcctctaaatgtaacacacacatatattct

SEQ ID NO: 784294 - DNA, 634 bp, Homo sapiens
agatacaacctaattcacatatatcttctatctttatcttttctacctcaaggatacagttttttaattgaaaattttaactcaaaaattattttgcaaacggatatttgaaatgtggggagtaaaagataagctacaaacaaaagaacaaatatcttagacattaaactcttcaatttacattctggaccagtggtctgcaaaattagrtgtgtgtatcccagaagcacgggaggtgtaagatcatccactggggcactggaagaaattttaaaacatctccatatttatgggctaaaaaacatataataagctttacttagagttaacatatgcatacatggtttaatagccagacatttatataatgtataaatatgtatttacttgaggaagcgttcatgctttaaaaatgtttttcttggggtatacattttttaagggtttgaagggtcctgctttacccccagatttcacaaagtaggatacatatgcgctcaagagtatacagtatgccagaaaaatgcaaagaaactggataaacctggtatatcttcctggcatctctatttcactcactctagggtaagtgacattcattcttccctataatcaggtgctttggaagacacct

SEQ ID NO: 784295 - DNA, 614 bp, Homo sapiens
atctattaatatttgctttatatatttatgtgctctgatgttgggtgtatgtgtatttaaaattgttatggcttcttgatgaattgacccctctttatcattatataactaccttgtttgtccctttttacagttttttacttaaagtttattttatctgatgtaagtgtagctacccctgttgtcttttggtctccatttgcacagaatgactttttccatcccttcactttcagtcttgtctatttttgaagctgaagtgagtctgttggaggcacacttattgggctgttgtatttcttaaaaattttcagcytctgtatatcttttggttggagcacttaacccatttacatacatgataataattgacaggtaaggacttactattgccattttgttgttttctcattgttttgtatttcctttgttcctttcatcctctcttgcgttcttcttttgtgattagttgattttctcttctagtttgctttgattctttactttttatcttttgtgtatctactatagattttcgctttgtgattaccatgaagtttgcataaaacataattataacaggctattttaagctgataaaaacttcagttcaa

SEQ ID NO: 784296 - DNA, 614 bp, Homo sapiens
atctattaatatttgctttatatatttatgtgctctgatgttgggtgtatgtgtatttaaaattgttatggcttcttgatgaattgacccctctttatcattatataactaccttgtttgtccctttttacagttttttacttaaagtttattttatctgatgtaagtgtagctacccctgttgtcttttggtctccatttgcacagaatgactttttccatcccttcactttcagtcttgtctatttttgaagctgaagtgagtctgttggaggcacacttattgggctgttgtatttcttaaaaattttcagcctctgtatatcttttggttggagcacttaayccatttacatacatgataataattgacaggtaaggacttactattgccattttgttgttttctcattgttttgtatttcctttgttcctttcatcctctcttgcgttcttcttttgtgattagttgattttctcttctagtttgctttgattctttactttttatcttttgtgtatctactatagattttcgctttgtgattaccatgaagtttgcataaaacataattataacaggctattttaagctgataaaaacttcagttcaa

SEQ ID NO: 784297 - DNA, 585 bp, Homo sapiens
gttaaatttgatttgctcatattctgttgagaatttgagtctttgtttatgaagaatattagcctgttttattatgcttttataattcttatgtctagttttagtatcagggtagttctggccttataagataagttggaagtggagtttccatcttactgagctagaaaagacagggagggagcagtcttggttcaaattccacagacttgacttttcttaccaaattaaaaaatgtttcttgcagtttcttcttcatttactgtattcttttacaaccattttcagggctttaaatggttgttyttaatttttttcaccagtttcagtggggaatatgtcccatggagctcttcatgctgaagttgatcccctgtccattttttttcccatttttgaaagatctattttgctgagtatggaattctgggtagttttttctttcagcacattaaaaatatccctcaattgtcctctgacttgcagagtttctaatgagaaacgtgatgtaattctttttttcctctgtatgtaaaatgtacatattttctggctgccttaaagattgttctctgtttgattttt

SEQ ID NO: 784298 - DNA, 611 bp, Homo sapiens
tgccgttttttaagctcattggaaaagtgcagtattggggtgggagtgatctgattttccaggtgccgtctgtcacccctttctttgactaggaaagggaactccctgagcccttgcacttcccgagtgaggcagtgcctcgctcttcttcggctcatgcacggtgcactgcacccactgtcctgcacccactgtctggcactccctagtgagatgaacccagtacctcagatggaaatgcagaaatcacccatcttctgtttcactcacgctgggagctgtagaccagagctgttyctatttggccatcttggctcggtccccgcccttttacttaatcaacacatcactccaacaattctcccatctctcctttattacatttagcaatatataaaaataataaaacttcaaaagcaaatcagatatgtcttgggaatgcaaaactggttcaataaaaaatgtaacccaccatatgaaacagattgaagaaaaaagcccatattattgtatcaattgatgcagagaatcaactggaaaagttcaacactcattcgtgactttaaataaaacactcaacaaataggaatagaaaaggatttactcaactt

SEQ ID NO: 784299 - DNA, 550 bp, Homo sapiens
tggcaggttatgggaagaacatgacattgatcctgactttaagggcctgagaattaataaggggaggtaagacatgagtgcaaagctcaccaggtcagagtaaagaatggagaggttctaataatgcggctgaagcacatggtgaatgatgagaaaggacgaaagggatttagaagtccttgaagggagttaatatttgcatttgtgattatttgagaggagtgctttagacatgaagaaaaacactgcagcagtaaattttaggaaatgtttggaaaataagaaaataatctcataaggttgaaagggcaggtgggaagagactytgagtgacatgtcaaaggttgcttttaaaaacatgtcagaggctcctgaatgtcatgacaaagaatttaaaaatgtttttgtaggcaacaagtagccagagaagatttctgagcagaaaattgtacagccagacatatgctttaggaaagctaacatactaataacaagtagaatggattgggagccagaaagtctggaggcaaaaacaaacaaacaaaaacaa

SEQ ID NO: 784300 - DNA, 614 bp, Homo sapiens
gagctcactttgccagattgctgcagactttttggctgctctattcctagaagtccagtggctccctgccccttgtgaaacctcacagtttgaatctgcttagccacgggtctttccccacttgcctgttgccacagcgaaagaaagacacctgtaactccatctgcactgatactgagttctttggctttgggcagagctctcaaccaacttggctgttaagcaaagttgctccaagtggcaggttgcttccctgcagggtccactagactttgctctggtcactgggctggtcacagtcttagtccctgacccaggtcgtcttgttctctgttcctaagaggacccagtgagatcatgtccctatctcagtacaatctcctcctcagaaattcagagtcaacattctgaagatgactaattsacaccatctggcatcatgagctatcatatcaccatccaagatgaatttccagaataaatgactaaggagagcccccctgccaaccgccaccacctcacacaccttcaaactatgtttttactttagtattgcttgtatagtgcaatgagaatccactgttatgatataagcattccatgatgtatcctga

SEQ ID NO: 784301 - DNA, 654 bp, Homo sapiens
gaaactaacaatcatggcagaaggggaagcaaacacgtctttcttcacatgatggcaggaaggagaagtgcagagcaaaagggggaaaagtcccttataaaaccttcagatcttgtgagaactcactcactatcacaagaacagcagcatggaagtaactgcctctatgattcaattacctcccactgggtccctcccatgacacatggggattatcggagctacagttcaagatgagattkgggtggggacacaactaaacatatcacagaccacatcccccttgagggcaataaaagtttaattcatatttgtgatactaaaagaaacagcaaactggggaataactgggtatcttgaaatgtaataccctcaatgacagatatactcttcattcgagtcaccgaattcacaaacatttagaatttacggaggaaacgcacttttctcatacacagtattattaataacaaaaatttggtaatatgttaaatatgctaaagttaatttaaataataattcacagagactcattaaaagaagataatagcttgtgctaaagaacgatattaagtagtagatattttttctaagatttgtaaaatcttggactctgtaaagtcacacaaactgtgaaatacagttcattaaaag

SEQ ID NO: 784302 - DNA, 654 bp, Homo sapiens
gaaactaacaatcatggcagaaggggaagcaaacacgtctttcttcacatgatggcaggaaggagaagtgcagagcaaaagggggaaaagtcccttataaaaccttcagatcttgtgagaactcactcactatcacaagaacagcagcatggaagtaactgcctctatgattcaattacctcccactgggtccctcccatgacacatggggattatcggagctacagttcaagatgagatttgggtggggacacaactaaacatatcacagaccacatcccccttgagggcaataaaagtttaattcatatttgtgatactaaaagaaacagcaaactggggaataactgggtatcttgaaatgtaataccctcaatgacagatatactcttcattmgagtcaccgaattcacaaacatttagaatttacggaggaaacgcacttttctcatacacagtattattaataacaaaaatttggtaatatgttaaatatgctaaagttaatttaaataataattcacagagactcattaaaagaagataatagcttgtgctaaagaacgatattaagtagtagatattttttctaagatttgtaaaatcttggactctgtaaagtcacacaaactgtgaaatacagttcattaaaag

SEQ ID NO: 784303 - DNA, 563 bp, Homo sapiens
aaacaagccttacaccaagtaactaattagccagttacataaacaactcatcagttaactaaccaactaattaatgatatggatctcttttgactgaattgactcaagttttctcccaattaataactagtcaattgatgagtaaaataaccacattttataaagttggcctctttgtttagtttgtttatgcatgaagcgtgcatgmctgtgtgtgtatgtgtgcatgtgcacagtgatagtgtatggcaaagtaatcacttcttttccttatcctgaaatgtcctgcatgtttatatatcaggcataaggttggactgactgtaaatggatgatctggcttaatctcactacaacactgtaagtgggattaaccccactcaaagatgataacctgtggtttaaagatcagtaacttgtcaaagataacatgagccctggtaggtgagagagacatatctcagtctaggctgtctcagccccaaagcccatcctcttagctaggatctctgaactatcacttattccacaccctcttcaatgatttttgcatatccatgaga

SEQ ID NO: 784304 - DNA, 627 bp, Homo sapiens
cagcatctctcttcatggagttgaggtgccccaccctcctggcacacggatgtggttgtgaactggaacgctctctgaacctggtcattttgagtttgtaatgcaggtctcgttatgtagacatgattgattaaatcgttggccattgatgattgactcaatctctagcccctttcccctccctggagggggaggttgggagctaaaagttccatgcttttaatcaaggcttggtctttctggcaactattccccatcctgaagctatctagggacccaccaagagtcayctcatttgagcaaaagatgctcctgtcacccttattatgcaggaaattacaaggaacttaagaaatatgtgtcaggagccaggacaaagaccaactgcctttctatggtaccccagtagtgcagagagtggaaggcaagctcacagccagctccctcaagtccatgttgacatttgggatgctaggtgcagaaggaaagagagcagttgcagtctatcggagacctgagaatgataattcttcaagtggataaggaaggaatagaatatggactgtattccattaagaatcttgacttttactttttcaagacaccattctttcgcttcttctagcc

SEQ ID NO: 784305 - DNA, 613 bp, Homo sapiens
atcagggagtatagagagtaggaatgagtcagggttcctcaagcctatgctgacacaccctcctgtgtcccctgagcactcactgccccatgcactctacagacatttttactgcatgtgagtgaaatcccccattcaagggttgcctctgggcacaggaatgtgcttggttctcatgtggggcagcaaagacatccctagaatgtgcacttaatcaagggtaatgggagttagtggacctctggcccagcttcctcactcctggggtggggcagcactgtggacagggaagtcccagagggactaagcttcagtagcccacagatgcctgaacatgtgtcatttatggccttcctcctctgtctcaccccattccccattgttaytctctggggtcacccccaaaataagctgctgcactcacagtcttgctccacactgcactcgcagcctgtcacagctccagcatactctgaccttggcagtgggatattttgctccctgtctccctttgcttgataaaatgtcctgtattttttcatatgagaatagtaataggatgaatttaataaagagttgttgataatatctgattttcttacttgttacccaa

SEQ ID NO: 784306 - DNA, 585 bp, Homo sapiens
taaagtgagatttcttttaaaggacagcaaggaaatgaggtggcacttgtaggggaatatagggctaagacagggttttctcaagataagagaaatcaccagatgtttgcatgatgttgggagtgatccagtagaaagaaaaaagtaaaaatattctaccaataaccataacaaatgaccaaacatattgttgctaaggcaatgatatcttgactgatgcagggaaaaaagtaacctcaacaggtcaagtcccragtgtgagcctgtcaccagcatgcagtgggaagtacagtttctggaactctgagcctaattctgcctccaagttgttgttggtggtggatgagtcattttgcattgtcatctccctttccttacctgtgcaaagaagggttgaaatcagactcccccactcgcacacctcatgataacttcctgagggctgccacaggccgtcagcttctctctctttgtgtgcaagccagacccttagtaatgcaagtccctcatcctactctaactgcatgagccaagctcagatcccctgcaggaaaagaattcaaggccttctttgctcagacagga

SEQ ID NO: 784307 - DNA, 633 bp, Homo sapiens
gaaacgacactgaggtcaggaacttaaccagacaggcactgaagaagcagacagaggaagggagctcgtgaaggaggagagaggtgggaggagagccaggagtcagataacttcgaatgctacagagacaccagtgaaggcagaaytgagatggggccatgaggtttggtaacaaggagattgctgatgatctgtgtgcaaataactacggcaaggcaacagagtcttgttcttccaatatgtcccttggtccataagcgctgagaggaagtgacaatctgtgagtagaaaccaagtgaaaggagtgttagtgcactcttctttagaagagagcaaggcagagcctgtgagagaaaaatgtctttgtctcttgtctctctttgtctggctcaaggtaatgtaattgcctcagacttcccagggaagcaagtggctcccacgttcctaagcaaaggccaagccatagaacaagggcagaggccgccactgggaatgtttgtgttgttaattttttgtagttgaatcatatcgggaaaattgtttccaagttgctcaaacatggatagagaagctaatgttttgctggaggttggcatttttccctgatgacatcacatgccttgtgtcaccagt

SEQ ID NO: 784308 - DNA, 633 bp, Homo sapiens
gacaaataaatccatgaacttgaacatacagcaatataaattacccactctgaaaatagactgaaaacaaaaaactgaactgagacattcagaaaaatacaacaacaaataatgcagatgcagaaaaagaagagaaaggatattgggctggaaaaatgaataaataaaaggatrcctgaaaacttcccattttgacaataaggcataaacttatatttaagaagctgagtgaactccaaagaggataaaaacattggaatttataccaatatacattaaaataaaactactttaaaaaaagaaaaaaataccttgaaagcaactagacaaaaactatgcttttccttgaggggatcaacaattcaaatgatggtaagtttttcatctataaccatgtggcacagttttcaagtgttcaaagaactgtcaactccaaatttgatatccagtgacacgatcttttacaagtaaaggggtaaatatagacattctcagagaaagggaaaccaagagaatttgtctccagtagacctatgcctaaagataactaaaggaattcttcaaattaaaataaaacagataaaagaaagagcttgagacttcaggatcctgaaaaaatagaacgatataatg

SEQ ID NO: 784309 - DNA, 533 bp, Homo sapiens
aaaaaaaaaaaaaaaaaaaagaatgaggtaacttcttaatagttttcatatttttagactataaaaagtcaaatcaagaataatttttggtatgtaatggttcccaaaattgttgaacaaattttacttcaaaataattttsttctgatgggactttgagaatgggtatttctgggtcttggtatattcactcaccaccaaaaggcagcaataaaactggataaaattataaaaataatctctagaaattggccaaagagcatactgttgggaaatatttattccagaaagtccacataaatctcagtaaaaaagagtggatgcttttatccacctttgtctcacagctcagttctgtggctcagaagttgaaccctgggtaggcaagcagtctgtgtggactggaaactctgctgctccactggaggggagtgactttatagcgtggaaaattccctgcccaaggatcctattgaatataaagaggttacagtgggaagcaagtagagaagattagtatgtgtagaggatat

SEQ ID NO: 784310 - DNA, 533 bp, Homo sapiens
aaaaaaaaaaaaaaaaaaaagaatgaggtaacttcttaatagttttcatatttttagactataaaaagtcaaatcaagaataatttttggtatgtaatggttcccaaaattgttgaacaaattttacttcaaaataattttgttcygatgggactttgagaatgggtatttctgggtcttggtatattcactcaccaccaaaaggcagcaataaaactggataaaattataaaaataatctctagaaattggccaaagagcatactgttgggaaatatttattccagaaagtccacataaatctcagtaaaaaagagtggatgcttttatccacctttgtctcacagctcagttctgtggctcagaagttgaaccctgggtaggcaagcagtctgtgtggactggaaactctgctgctccactggaggggagtgactttatagcgtggaaaattccctgcccaaggatcctattgaatataaagaggttacagtgggaagcaagtagagaagattagtatgtgtagaggatat

SEQ ID NO: 784311 - DNA, 454 bp, Homo sapiens
taaatgggcaaaaactggaagcattccctttgaaaactgacacacgacagggatgtcctctctcaccactcctattcaacatagttttggaagttctggccggggatttccgtcaagagaaagaaataaagggtattcaattaggaaaagaggaagtcaaattgtctctgtttgcagatgacatgattgtrtatttagaaaaccccatcgtctcagcccaaaatctccttaggctggtaagcaacttcagcaaagtctcaggatacaaagtcaatgtgcaaaaatcacaagctttcctacacaccaataacagacaagcagaaagtcaaatcatgagtgaactctcactcacaattgctacaaggagaataaaatacctaggaatccaacttacaagggatgtgaaggacggacctcttcatggagaactatgatccactgctcaacgaaataa

SEQ ID NO: 784312 - DNA, 570 bp, Homo sapiens
ttgatttatacactaatattcatgatttcctaccttcttaagttggaacttaggttagtgttttgagatatttcttcttttctaatataccatttaatgacatctcacaattctatggggcatagaattttggtggggatcaaatggataaatcttttattttctgtgtattaatggagacattcattgttattcatctggttaatcttctgcggtggagggttcaatatgtcttcagtcacatatttggtgctttgccagcaacaagtgaaatttggggtttaggtgactcctgtcactctcagggcctctctacagggtacccagaattctctcatgctgattagaagctacaagacaccaaggcagaagctgctatttttttaaagcttacatccgtaactggcatagagatacttataccrtatcctattggtcagaaaagtcatgggttagcacaagttcaagatgatggggaaataggtcacttaatcagaggattttcaaattatttgtggacatctttaatctgcaaaacatagtaactatgatacattacatactaatatt

SEQ ID NO: 784313 - DNA, 522 bp, Homo sapiens
tctattaggttatccaacagttatatgttggcatataactgtttatagcggtctcttctgtttttttgtatttctgtgctatcagttacaatgtttcctgtttcatttctaattttatttgttccttctctcttttttagttcagctaaaggtttgtcaatcttgtttatattttcaaaagccaacttctagttttgtggatcctctattatttttccagtctgttttatttayttctgttctgtaccttactatttttttctttccagtagctttgggttaatttttttcttcattttctagtttcctgagatacaaagttacttgctttattaggatcttcatggagtcattcatatctctagacatccctttatactgcttttgttgcataccatatgttttttagtatgttgcttttccatttttgtttttctcaagatatttttaaatttccctttgaatttcttcattgccccattggttgttcaggatcatgttgtttaatttccatgtatttgt

SEQ ID NO: 784314 - DNA, 522 bp, Homo sapiens
tctattaggttatccaacagttatatgttggcatataactgtttatagcggtctcttctgtttttttgtatttctgtgctatcagttacaatgtttcctgtttcatttctaattttatttgttccttctctcttttttagttcagctaaaggtttgtcaatcttgtttatattttcaaaagccaacttctagttttgtggatcctctattatttttccagtctgttttatttacttctgttctgtaccttactatttttttctttccagtagctttgggttaatttttttcttcattttctagtttcctgagatacaaagttacttgctttattaggatcttcatggagtcattcatatctctaracatccctttatactgcttttgttgcataccatatgttttttagtatgttgcttttccatttttgtttttctcaagatatttttaaatttccctttgaatttcttcattgccccattggttgttcaggatcatgttgtttaatttccatgtatttgt

SEQ ID NO: 784315 - DNA, 645 bp, Homo sapiens
gaacctattgaatcaggacaaggtgatggttctgctcctgtggcaatctaggtctcagaatctggtatgcaggcagggtgtaaagagcagattgcattttcaagagaaaggttaagcttgaatgttttggacaggaggtgattagatgcatttttaaaaagtccttgaatttacctgatgatttttatgtccttgtgatggttgtagcccattccaggatacgaataaatttagcaacacaaagaagttcatttaaaaatctttccctcagatgctccacttcctcttccttctagctttctcttcttcactaatttgcaacccgcgaggctgcccttttgatcactggcagtctaagaatagtgataagtggcttttgaaaatgttttaaaacttttataggagagtggtggaaagatggaggtttctagaaaacccttaatagaagagacccatttyatttatttatttttggttttaaagcattattttattttgaatgaattttagactttaagaaattgcaaaaacactagaaagtgttcctttaatcccttaccctgcttccacttatgttgaatctctctcatcattttaattatcaagaataggaaattgacattggtacaatattattaactaagc

SEQ ID NO: 784316 - DNA, 630 bp, Homo sapiens
cacatacatttgaacattatataatgattgaataataaaattattctgctattttacaataaaaattaatgttgcagagagtattcttacacatatatcttggcagaggtaagccagagcctgttcttgtatccatcctgtggccaacctatcaatgtagacacctttaatgagattttgccagcaatggaagccttcaggaaaaatgtccctagctccttactacttcctatcaaggacacgggacaattggcacaacatcctggaatagctgaaacggagattttattctccgctctcctctgttgtctttgtcttttyacaacttcttaatgacagtgctggtgacaagagtgtaactatgtcactgttctcctgctgtccttgcctgtgtgggtcttctcacaaacccgactttcctccagcggcttcactgaaaaacagaagggggctgcgggggtgggggagggtggcggggaggggaggaggaaataacttgaatagggcggaagcttctcacaggccaggagagggtaaggaagggagtcaaggacagaattttcttcagcaaacagtaaaaggggaaatccggggacgctaagagtttttaaaccctttgctccatcacat

SEQ ID NO: 784317 - DNA, 577 bp, Homo sapiens
tcattggagattgttgtggtgaagaatttcttttatgatgaaggagaaataaactcccatcagctttaattcaggcaggtttattgaaaaggtgaagaagcatcttgcagaagcaaagcatggttgaggcttgtgggctctgtctggacaaatgagcagccgacagtggctggtgctgcccctgactctagggccgtgtggtctgtggttgtctgtgagcatctcttctattctcttgcatcgtccctcagcctggcagtctctgtgtactcttcaacacataattgagygaggctgtaccagccccaatgccatgtagcactttatgtcaaattagaaaggcatgaaataaactggccctttataatacaactgttggaacaacagttgaaaataacaatatcttgactcctggttgagtgctttatgctgagctttcttttctgaatatgagcacagacttggggatattagtgtcacctagcgttattagctagtattctccttttgtttccccataacatcccctcctccttcccacagatccactttccactcatttccatcctgtcttacg

SEQ ID NO: 784318 - DNA, 483 bp, Homo sapiens
ccagaaaattcccatgtggcccttccttcccttatcatgcctaataaccattaatttgatttctattactctagatcaattttacctgctctagaactttatataaatactcatgttatgtactcctttgtatctggtttcttttgctcagcataatagctgtgagattcatctatgttayttcatatatcagtaacttttttttggccaagagtatttcattgtatgaatatatcacaatttggttatcactttacctgttgaagaacatttgggtaatttgcaaattagagtaattataaatgaagctgtcacaaacattgaagtacagccctttcatggacagacagatgttttcatttctcttcttgtgtgtaaatacctaggaagctgaattgctggctcatagggttgatgtatgttaccttttcaagaaactgccaaatggttttctggaggggttgccccatttcatattcacac

SEQ ID NO: 784319 - DNA, 612 bp, Homo sapiens
tggcacatgtatgcctatgtaacaaacctgcacagtctgcacatgtatcccagaacttagagtataattaaaaaaaaaaaagaaagaaagaaaagaaaaaaaagaaagtcaatgattccgtcctctctgatgatgacacaattgcctctctgcctatgcagagacttggccaagaaaggagatttgctaagcccttggaggracatgccggccacctttcccctcctttttctcctggaacttatgtgcaggctctgcagctcagcacactgaaaatgttatatgatttggttgtcttttaaactagttttattactttggccaaagttccttaaccactttgtgcgtcggtttccttgtccacataagaggaacaatgatgcacctaccaaatagagttctagtgagaagtagaaatagtttctgtaaagcgtcgatcacagtgcctggcactagtagtcacacaataagggttgttgctattcaatttatgtgcttaatacttgatttatttcgcaaacatttgcgaagctcttgctatggccaggcaaattgctcgagttacacaggcagagtggacaaacctctgccctcaatgcatttaggctctag

SEQ ID NO: 784320 - DNA, 612 bp, Homo sapiens
tggcacatgtatgcctatgtaacaaacctgcacagtctgcacatgtatcccagaacttagagtataattaaaaaaaaaaaagaaagaaagaaaagaaaaaaaagaaagtcaatgattccgtcctctctgatgatgacacaattgcctctctgcctatgcagagacttggccaagaaaggagatttgctaagcccttggaggaacatgccggccacctttcscctcctttttctcctggaacttatgtgcaggctctgcagctcagcacactgaaaatgttatatgatttggttgtcttttaaactagttttattactttggccaaagttccttaaccactttgtgcgtcggtttccttgtccacataagaggaacaatgatgcacctaccaaatagagttctagtgagaagtagaaatagtttctgtaaagcgtcgatcacagtgcctggcactagtagtcacacaataagggttgttgctattcaatttatgtgcttaatacttgatttatttcgcaaacatttgcgaagctcttgctatggccaggcaaattgctcgagttacacaggcagagtggacaaacctctgccctcaatgcatttaggctctag

SEQ ID NO: 784321 - DNA, 537 bp, Homo sapiens
ttaggaaataatcagatttatatcattttcaccataacatatatagtgccgatgttcaattcaccagtagaaactgataccacatttaaacacacattgatgaaaaataaaataaaagtgaaacaagtcagcaataatcaattatgtaaataagatgtttaaatcactattgtttaattatcacatatactttgatgtactctattttaataatatttcaaattcaactttttaataacttaaactgtttattaaacttgccattgattcttgattttaaagattagaaataaaacaaatctcccttatatgacaaatggtatctatgtaaaactggagcaaacagtatgtaggtatgaaacrttagaaacattcccataaatttagtaagaaaagacagaaatatttacacaaagaaacagaaaaagatgtcttttacaataggtaatattgacattgttctggaactgtttgtaaatacaaaaaggtttcattttaaaatactaattataatatttatatgtacaaggaaataat

SEQ ID NO: 784322 - DNA, 506 bp, Homo sapiens
tcttgtgatataaatcctgtacaaatttggatatgttacattccactggatccagcttgtggtttctcactgatgctccattctcagaaaatactgtgtaaccctctctactcccagacatactgtgaaacccactatgagtttgtgtcaatcagagctaaattacttacacttaatgagtgcccccaggggatgagagaaaattatgaatggtttggaggctcatttccttctctctcttttttttttttttttttttttttttttttkggtagtatagcaaggatctggcccagcttgagccaatctggggagaaacaaggtctttggctgacatcagcattcttgtcattcaaagtctttccaagtgcacttactttgcagaccttggctgtaagtatgcctagtccctggtattgctcctgagattccttgaaacattttttattaattaaattatgcacttctatattcatcctaagctaacttaaatatttgtaacaaga

SEQ ID NO: 784323 - DNA, 566 bp, Homo sapiens
tttttccagtctgttttatttatttctgttctgtaccttactatttttttctttccagtagctttgggttaatttttttcttcattttctagtttcctgagatacaaagttacttgctttattaggatcttcatggagtcattcatatctctaaacatccctttatactgcttttgttgcataccatatgttttttagwatgttgcttttccatttttgtttttctcaagatatttttaaatttccctttgaatttcttcattgccccattggttgttccggatcatgttgtttaatttccatgtatttgtgaatttcctaacatttcttctgctattgttttctagtttcatatgacaatgttaaaaaaatttatgtaatttcaatctttttaaaattttttaagacttgttttgtggccccacatatgatctatattggagattataccttgtgtgcttgagaagaatgtttattctactgttgtcaaatggaatgttctatataggtctgataggtccatttggtctaatatagagttcaagtccaatgtttttattgatttc

SEQ ID NO: 784324 - DNA, 566 bp, Homo sapiens
tttttccagtctgttttatttatttctgttctgtaccttactatttttttctttccagtagctttgggttaatttttttcttcattttctagtttcctgagatacaaagttacttgctttattaggatcttcatggagtcattcatatctctaaacatccctttatactgcttttgttgcataccatatgttttttagaatgttgcttttccatttttgtttttctcaagatatttttaaatttccctttgaatttcttcattgccccattggttgttcmggatcatgttgtttaatttccatgtatttgtgaatttcctaacatttcttctgctattgttttctagtttcatatgacaatgttaaaaaaatttatgtaatttcaatctttttaaaattttttaagacttgttttgtggccccacatatgatctatattggagattataccttgtgtgcttgagaagaatgtttattctactgttgtcaaatggaatgttctatataggtctgataggtccatttggtctaatatagagttcaagtccaatgtttttattgatttc

SEQ ID NO: 784325 - DNA, 566 bp, Homo sapiens
tttttccagtctgttttatttatttctgttctgtaccttactatttttttctttccagtagctttgggttaatttttttcttcattttctagtttcctgagatacaaagttacttgctttattaggatcttcatggagtcattcatatctctaaacatccctttatactgcttttgttgcataccatatgttttttagaatgttgcttttccatttttgtttttctcaagatatttttaaatttccctttgaatttcttcattgccccattggttgttccggatcatgttgtttaatttccatgtatttgtgaatttcctaacatttcttctgctattgttttctartttcatatgacaatgttaaaaaaatttatgtaatttcaatctttttaaaattttttaagacttgttttgtggccccacatatgatctatattggagattataccttgtgtgcttgagaagaatgtttattctactgttgtcaaatggaatgttctatataggtctgataggtccatttggtctaatatagagttcaagtccaatgtttttattgatttc

SEQ ID NO: 784326 - DNA, 654 bp, Homo sapiens
ctccggaggactggagattgggtttattttggaacgctgctggactatatgaattacttctcagagggttgggtatttaatacctagtagaagtttgtgtaagagttgatgatgtattttgccaactttccaaccctgtaaataaattacacgtgcyggcagaggttgccaggatccactgtgtcagttggagcttaatttttatcctaaaccaccgaatacttttgtcctagcaagcagagaaagttacggagttttttgcttgtcactgggcccatcccaagacgacggtttaaagagcctgagaataggcctccgcggagtcactgattttgacaccgttttcggtggttaagtagcttcagcagtctcaagtccaaccctcaaggcagagaatgataatataattttaagcatatcgtaaaaatgaaactcaatcacttccactccccaaacctgtctcactccccatctctctggagaaaacggctgtaattgtgtgtttaatctcaagactgcctttgcattttatcttatttgagtgcaaagcccaggtaatatcgtggcatttccagcgcgaaacaaaatagggtttctaatttggagacactattaaatatttcatgcttcaaccaaactcaattcttttttcct

SEQ ID NO: 784327 - DNA, 436 bp, Homo sapiens
agagaatcactggtcttttctaacctaccattttccagagggagtgagcccccagggagtggctgggtcataacaacagcaatggtggagggaggactccctcctccacccctcccttttggtcttctgcagctgtttatggacgttctccttgtgcaggcgttgttcccatcctgagttccaatccgactctggctcacaccacatgcctcctrggagtgcccatcacacgccggccaaggcgtgtgtgaggtcctccctgaagggtggtggacagaggttcaagctaaaacacaggtctatcagcccagccgaggaggccctggagaggctgctggggggtcagacagcacaggttcccctcaccccccgccccaggccagtcctgcacctcgctgagccttggtgctctgtaactgtctcatgagtgaaggca

SEQ ID NO: 784328 - DNA, 625 bp, Homo sapiens
ttaatatacaataaagatgtggaatcattttacaagtttaatttaataataattaatggtaggatgaatttgactaacattttaaaattaacaaaggaatttcacattattttattagttcattagaaatactgaataattatgctgtgactgttccatttttctatttcccattttacatggacagaaatcaaaaggtagcatagtttaatgaactatcaatgatgtttacctggagtcaatactagaatcttgactttctaaaaataattttatattctatctgtttttacacacacacacataggtatacagtaataagaagttacttttgacaaactttatggaataagtacaccagttagagtaaaattaaaatacatatgcaattttttcagtattttttaaaaacaagatatatgtatatcttaactagctaaataaaacaaataaagggtaaattttayatggtttgtaaaatcatgtgagaatatcaatagaatatttaataggttaaatatgttagaacatgtgaaaatagtttaaatgtgtaatcagtaattgtttattttgtagagctaaaagaaaagaaagaagaaaataaaaataaaagaaaggtagcttc

SEQ ID NO: 784329 - DNA, 586 bp, Homo sapiens
gcagatgcagaagatttcatggcagactgggtctgtgagttttgtgttctgggaattctgaaagcttattttggaggctgtttcttctggcattgtaacaattgtgtgcatcacaacatctaattggcttaaattcatttctggtttaactatctagctctgttgctctaccatctctaatttttaattataattctttttttttttttttttttgagatggagtctggctctttcaccccaggccagactgcagtggtgctatctcggctcactgcacgctccrcctcccagtttcacgccattctcctgcctcagcctcctgagtagctgggactacaggtgcccaccaccacgcccagctaattttttgtatttttagtagagacggagtttcaccgtgttggccaggatggtctcgatcttttgacctcgtgatctgcccgcctcggcctcccaaagtgctgggattacaggcgtgagccactgcgcccggcctattaattcttcaagttgtaatctgcagaatattctagtctccttttcagcattctagggaacatttgttttgtatttcaaaccatgca

SEQ ID NO: 784330 - DNA, 596 bp, Homo sapiens
ctcttctagctttcccatcagctcataaatgcagccaagtctccctcatcagaaagcacacacacagataaagtaaaacaaaaaacttgctgctcctctctatctctctgtctcacagacatacacccacacacacacccacgcacgcacaaacacacccacaaataagagccaaatgataaactggggaaagatccttggcacacaaagaccagacaaggggtaaaaccttactgatgagctcaaaccaatcaataagcaacacacaaagaacctggcttctcgtactctgacccaggagtttcatttctaggaaatacgaagaaatatctagctgggtccagatacagccattctagaagttcatacgcactgattaccaggttmattccttcccaggaaagatgtggccatgtataaatgtatgcagaaattcaatgtaacattatcaaaaagagccaaatatatttttaaaaagtcaagagatccaataactcaacatgacatagcaaaatgcaagcattgaaaaatataaaaaatgtctgcgatgaggaatgctcgtgaaattatactaatggaaaaatattttatataga

SEQ ID NO: 784331 - DNA, 596 bp, Homo sapiens
ctcttctagctttcccatcagctcataaatgcagccaagtctccctcatcagaaagcacacacacagataaagtaaaacaaaaaacttgctgctcctctctatctctctgtctcacagacatacacccacacacacacccacgcacgcacaaacacacccacaaataagagccaaatgataaactggggaaagatccttggcacacaaagaccagacaaggggtaaaaccttactgatgagctcaaaccaatcaataagcaacacacaaagaacctggcttctcgtactctgacccaggagtttcatttctaggaaatacgaagaaatatctagctgggtccagatacagccattctagaagttcatacgcactgattaccaggttaattccttcccaggaaagatstggccatgtataaatgtatgcagaaattcaatgtaacattatcaaaaagagccaaatatatttttaaaaagtcaagagatccaataactcaacatgacatagcaaaatgcaagcattgaaaaatataaaaaatgtctgcgatgaggaatgctcgtgaaattatactaatggaaaaatattttatataga

SEQ ID NO: 784332 - DNA, 595 bp, Homo sapiens
taattcattcaaacaatattcaggaagcacctgctaggtgccaggcctggcactaggctctgggatctggacaagggtccttccctccaggagcttccaatctggagggaagcatgcggtgagccaatgaaaatgcagggtgatcaacaggagtttgtgagcacgcctagcaggtccccaaagaaggaggcagctggggagagtgagaggaggtgcacttcagaactcagatggctggcttggtggtggaggccgyccacctgccaccaccttccgggacctgcatccccagctgaactgcatccttggaggtctgaacccagtggccccgtggccaggtgggcttgggagttgctagctggggctgatgtggtagttcacaacctcctggtgttccacacaaaccacctggagattctgccaatcctgctccacactggggtcccagggcccatcacacgaactggaaattaatggacccattaacctagcagctagagggcttcaattagtacaaggaaacaaaacatattttgtagatggctgtccattttggagtttatcctctaatactgagctgtcctagcagacaaga

SEQ ID NO: 784333 - DNA, 586 bp, Homo sapiens
aagtgagacttcgactcaaaaacaaaaagatttccagtttctctattgttccttgtgtaagagcacacacttactataaatcctgccctaaggtcaaacaatcttaatgttatcatacttcaagtggcctgctcgtccctctgactcaccctttcccaggctatgtaagccctgggtctgggagtgagagtgtggcgatccacctcttgtctcgctgctttacacacagacatggcttctgttcataaggccctattaaacgtkttttcctgagaagccagatttgtcagcctcttttttcagcctcttagcttccttagacttttggggcaggtttgtctagacctgtccaccacccaccaggggacattcacggagcctaatcttgagtcccaggagttgagcgaggagaggcagcaaataaagagctaatggccgggcatggtcacagctcacgcctgtaataccagcactttgggaggctgaggcgggcagattgtctgaggtcaggagttcgagaccagcctggccaacatggtgaaaccccatctctactaaaaataaaaaaattagccagcctggtagc

SEQ ID NO: 784334 - DNA, 612 bp, Homo sapiens
aatcttgagtcccaggagttgagcgaggagaggcagcaaataaagagctaatggccgggcatggtcacagctcacgcctgtaataccagcactttgggaggctgaggcgggcagattgtctgaggtcaggagttcgagaccagcctggccaacatggtgaaaccccatctctactaaaaataaaaaaattagccagcctggtagcaggcgtctgtaatcccagctacttgggaggctggggcaggagaatcgctggaagctgggaggcagakgttgcagtgggccgagatcacaccactgcactccagcctgggcgacagggggagacacagtctcaaaaaataaaaaataaaaaaccaaaattggccagtgtagtggcacatgcctgtaatcccagctactcaggaggttgaggcaggagaatcgcttgaaccctaggcaacaagagctaaactgcctctcaaaagaaaaaaaaaagctgctgggggtggtggctcatgcctgtaatatcagcactttgggaggctgaggcgggcggatcacaaggtcaggagttcgagaccagtctggccaatatggtgaaaccccatctctactaaaaatacaaaaatt

SEQ ID NO: 784335 - DNA, 612 bp, Homo sapiens
aatcttgagtcccaggagttgagcgaggagaggcagcaaataaagagctaatggccgggcatggtcacagctcacgcctgtaataccagcactttgggaggctgaggcgggcagattgtctgaggtcaggagttcgagaccagcctggccaacatggtgaaaccccatctctactaaaaataaaaaaattagccagcctggtagcaggcgtctgtaatcccagctacttgggaggctggggcaggagaatcgctggaagctgggaggcagatgttgcagtgggccgagatcacaccactgcactccagcctgggcgacagggggagacacrgtctcaaaaaataaaaaataaaaaaccaaaattggccagtgtagtggcacatgcctgtaatcccagctactcaggaggttgaggcaggagaatcgcttgaaccctaggcaacaagagctaaactgcctctcaaaagaaaaaaaaaagctgctgggggtggtggctcatgcctgtaatatcagcactttgggaggctgaggcgggcggatcacaaggtcaggagttcgagaccagtctggccaatatggtgaaaccccatctctactaaaaatacaaaaatt

SEQ ID NO: 784336 - DNA, 411 bp, Homo sapiens
taattttggtgagacagacattcagtgtctacgttactatgcgggtgcagctcacgctgagccgtgcagcaggctggggttcctcattttccctggagtgcatctggttcccaggccacttgtgccccagtttcttcctggggctgtgacttcacctctgcactctccttccgctrtgtaagccgcctctccacgtgttcagacacattggaacagtttcctcccagagcctcctgaccatcccctgtggcctggtgcctggcctctgtcatctggcacccactctctcctatcagttggctcctgctgcctggaccccatcttcctctatgtggctgcccctcgttttgctcatgcccaccctccaagacttcttttttttttaaatatatataatggggacggggtgcg

SEQ ID NO: 784337 - DNA, 574 bp, Homo sapiens
cggcacccaggcagtgcacccacagttcagaccgatctcagccccctcgggcttccctcttctctggtcaccctgtcttccaacccactggctcagggctaccccttgccgtggagagccccacgcaacagccaccaggtctcatagagaaaacactgcttgaaccgggagggtgaagctaaaaggggtcagaaagcccaagaccctctgaagggaccctgggggaggcagggagggcagrcagccggatgccagtggccatagacttgtaagtctaagtggggagccttagctggtcggggtggggtggctgcaggtgaggctggggtctgtcttcctgctgggaaaagcagaagagcaagagtcagtggccggggaagttggcgggctcgctgggcagagctcagccgggccagcaggcaccgtggtccccttggctgaatagcataggcagctcctaggagcaacaggccaaggtgcgtgagctgccggctggctacgttccttctgctggggccaaggacactgccttcagtcacacgctagcaggtatgtcagtaccaggagggaggca

SEQ ID NO: 784338 - DNA, 522 bp, Homo sapiens
ggatcacagtgtcaggagtttgagatgagcctggccaacatggtgaaaccccatctctactaaaaatagaaaaattagccgggcatggtggcgggcacctgtaatcccagctatttgggaggctgaggtaggagaattgcttgaacctgggaggcggaggttgcaatgagctgagatcacgccattgcactccagcctgggcaaaaagagcaaaactctgtctcaaaaaaaataaaaaataaaagaagataaattagccyggtgtagcggtacacacctgtggttccaactacttaggaggctgaggcaggaggatcgctttagcccaggaggctgaggccgcagtgggccatgattgctccactgcactccagcctgggcaagagcaagaccatgcctcaaaaacaaaaacaaacaaagaaaaagagacaaggaggagggagattacatcttgattttccctacactttaattgaaattcagcatttccttccatggtgaatgttgctgggaacaaacctc

SEQ ID NO: 784339 - DNA, 522 bp, Homo sapiens
tggcagtcccccagctctaatgaccctgtcccatgggtgtgaccacagggactgttgctgtgccaggtcaggttggctgcaggcacttacatgcgcttcccactcaatccttcagctacagtgaaagagagtgcccgtaagaacggccgcaggtctcctgggctagaaacacccccagaaagcagcttacctcaccagaagcgtttcacatttggaaattaagataaggaacacagaactgattgtttccttccttccttccttccctccctccttcctctttttttttttttttttttttgatacaaggcctggctctatcacccaggctggagtgcagtggyacgatctcagatcactgtaacctctgcctcctgggctcaggtcatcctcccaccttagcctccagagtagctgggactacaggtgtgcaccaccatgcctggctaatttttgtattttttgtagagacacggttttgccatgttgcccaggctggtctggaactcctgagctcaagcg

SEQ ID NO: 784340 - DNA, 628 bp, Homo sapiens
gggctgtgactccgtctgtgtgcgtgtgtcttgtgtgttgccctccccattcttcagtctcagaccccattgctgctgtgtcttcatcacttttgaaccttatcagcgcttagcccaaggccttgcatggcagcagacatcgtgggctggcctggtttctgggcctggctttcagtgtgtgtgtgtgtacaygcgtgcatgtgtgtgtatgtgttgggggtgttggctgaggtggcagcatcaagcatcactgatgacccctccttccctgcacagtggcagacagccaccaagggcagcctcgaggcttggacctgttgctgctcctccgtcctccgggagcatgagtatgtgcctgcgtgtgtgtgtgtgtgtgtgtgtgtgtgtgtgtgtgtgtgtctctgtgtgtggcatgtcctattttgtttaaagaatgagctccagggctgcttgcacattctagcattttcgaatgagacatgcaaaatacattggatccctcagaaaggcccagaagttttcagctcagcccttgtatagactcctgtgggtattccaagggagatccatctagaacctcttatcttttttttttcttggtgttttttttttttttttgagacggagt

SEQ ID NO: 784341 - DNA, 587 bp, Homo sapiens
aatataaaatgtgccttcttaaccatttttaagtgtacaattcagtcttgagtacatttacattcttgtgtgccaacctccagatctcttttcgaaagataaactctatacccattaaataatgcctccccatttctcctctccccagcccctggcaaccaccattctcctttctttctctttaaatttgactactctaagtacctcttataagtggaatcatgcagcatttgttattttgcgtctagattatttcacttagcacagcgtcctcaaggttcattcgtattttggcatgtgtcagaatttccttcctttttaaggctggatagtattccaytgtgtgtgtagaccacattttgtctatccattcagccatcgaaggacacttgggttgtttccaccttttggctactgtgaataatagtgctgtgaacatgggtatacaaatatgactttgagactctgccttcagttcttttgggtgtatgcccagaagtggaatgactggatgatatgctaattgtatggttaatcttttgaagaaccaccatactgtctaccatagcagctgcaccatttcacct

SEQ ID NO: 784342 - DNA, 638 bp, Homo sapiens
aaaaaaaaaaaaaagattgttctccaagatattttctaaaattcctggacaatgatgacattaatgatttgcaggagtaacctgggaatttcaatgaaagtgagatccaagagtttggaacattcctcttccacccccaacccaccaccctcaacccaagttccaatcaaaaagtctgggtggtggtgtgctggtacatgtttaacaaccggctctttgtggaagaagtcctgattcacagtgcttgccaatttccatggtgtaactactcccaccatggccaatcaagctaccctcttgacaaaactgaatgaagagttgggggcracgtgtaccctcagttctcctcagctggcatgagctggctcctgcacactcccgagtctcaaaaagatgggactgcaataccggtgtaaattagtagcagaaacccaattaaccatatagcctattggaaggaattctctgcaaactaaaagacaggtgatcatggaaaaaaaaaaggaaacagaaaaacaaagagccaagtccccagtgcctgtatgggcactgtccaggaagcgggtgtcctgctccaggcctcaagctgcccctcacagaggaaccagccctcacgtcaggccggctgcatcagactg

SEQ ID NO: 784343 - DNA, 468 bp, Homo sapiens
ctcacatcttctttccacccttaagaacagaagcggcacggagcagagaccagcctaggacccgagccctgggcacagggcctgccgcatcgggcatggatgacgggtgtgggattccaccccccgtaaggcccgccccagctctctgtcacctcccccaagacccaggctctaactcagagatctctgaaaataggacaatgattccttgtgttgtggcctctgtwcattccactctctgcctctaatactcttcggtctttctgttctgtttggtcagctgcgggtccctcttcaagcagcaactcacaggtccatctcttcggggtgccctccaggcctcccagggaggggactgcattgctgggtcccttctcagggaccctcattccatcctcaccaccctggcctcatccctcatctctccctgctgtggcagaacacttctgcctcccttctctccgacag

SEQ ID NO: 784344 - DNA, 575 bp, Homo sapiens
aatcaaatgagatacacacgtaagaacatgggtggcaaagacacatcagggttggtgaaaaagcaagaaaatgaatgagatagataacatcacatcacgaacgtaaattaaaaacaggggcgtgcaaatggcaatacccatttcccaggaacagaaagacttaaacacttgagcatgggtcatctataggtggggggtagggaggtggaagggaatgaatgagtgagtgagtgaattaatgaattcactaaagagaaatatttacatcattgtggcgggtgcccgtccacacattgttgcaggcttgatgtgccgtagggagagcttccagaaggtggagcrtgcagggagtaccctttgcctccctgaagggtgctgtaggcctgtcagggcctgggatggggagggcttggagaagcagagagtttggaaggatcggaattgagaggatgaggcagaatatgtcattgtcttggcaaattggattggcaaagccaaagagaaagaaaacacaggaggctcccaagactgaccgctcacgtgtctggagtgcttcagatgagccaggggcacct

SEQ ID NO: 784345 - DNA, 575 bp, Homo sapiens
aatcaaatgagatacacacgtaagaacatgggtggcaaagacacatcagggttggtgaaaaagcaagaaaatgaatgagatagataacatcacatcacgaacgtaaattaaaaacaggggcgtgcaaatggcaatacccatttcccaggaacagaaagacttaaacacttgagcatgggtcatctataggtggggggtagggaggtggaagggaatgaatgagtgagtgagtgaattaatgaattcactaaagagaaatatttacatcattgtggcgggtgcccgtccacacattgttgcaggcttgatgtgccgtagggagagcttccagaaggtggagcatgcagggagtaccctttgyctccctgaagggtgctgtaggcctgtcagggcctgggatggggagggcttggagaagcagagagtttggaaggatcggaattgagaggatgaggcagaatatgtcattgtcttggcaaattggattggcaaagccaaagagaaagaaaacacaggaggctcccaagactgaccgctcacgtgtctggagtgcttcagatgagccaggggcacct

SEQ ID NO: 784346 - DNA, 640 bp, Homo sapiens
aattagtaaataacataagataaacgtgaatataatcagtaacattcttttccaatcaaggagtgacatgtagtgttacttgccacctcagttcagtgtgtgcccttactaaggaaccccactgggggtatgttaaccccttccagccaagcagttacgttattagaggctgggaagggggtgtccrcccaggtaatagggtggaagaaaagcagatttagaagatgggcccaatagagtgtagcaggtactggttgcaggcagagtgagggaattaaacaaggttaataaagcatagtaaggaataaattatctggagtgaatggtgtttgtgtccagagcaggattcgttcagcctcctgagttgtcttcttcagcatcccccaggtaatgtctggggcttgtgtcgtctgaggaagctgcatcatccagggctgtgggtcctgcagggacatttccttcatttctggtaccaggttgggtcctagccacaccatgttaaggtttgatgcgttgtgctggaatccaaagaggacctgaggtgatgtgaacacaaccatatcctcttccccatgttggcaactcatttggaccacaccatacattactgtttacatctttccataaaactgtgggtttt

SEQ ID NO: 784347 - DNA, 488 bp, Homo sapiens
gtatggcctggtttttcctaggttataattgtagaacaaagattattataatattggaataaagaataaagctactaatgattaataacattcatatgtaatcatatccataatctatttctagtataactattcttattctatatattttctttattatactggaacagcttgtaccctcggtctcttgctttggctggcacctgggtggcttgccacccacagaaaggtgaaaaccaacttaaagacattttaaaaacaatacakgatatggattaaaaattctccagaaaaatagatatcataaagaaaaaacactcacaacttctggaaatgaaagacacacttagagaaataccaaatacactggaaagtttcaacaatagactagaacaagtagaaaaaagaacttcagagcttaaagacaaggctttcaaattaacccaatgagacaaagacaaagacaaaatgaattttaaaaaaatgaa

SEQ ID NO: 784348 - DNA, 641 bp, Homo sapiens
tcattcttctggtcatgtgtgtggatgatagagttgacttccttgagtaagacttagggtgggatgctacttgtcttagtttcttcaaagtcctgagatcagtgggtgtgctgccttgactaagatggtgggatgctgcttatcttagcttcttcaagrtccccgggtcagcaggtaggacagaaaaagaggaaaattatgtattaacgggggtggagggaccaagtcctgtccctactctgtctcaatattagtacaagtgcaaggccctctttgcattaagccttctgttaagatcctaaggagccctaatggggcagagagaagataaatttggctgggattccagaatgggtcaagtaaattgctgaagtgagcagggagagacatattttgggaaatcttagaactttaggggatagtgaaagaggggaggtattgaactttcttctttcctctctccccttaccgctgaattacagaggatgggaaaaaagttggttataaaaaatcttgagctgctttacaaccagcctgccagagtaatcattttaaaatgtaaagtcttaaactcccctttttaaaaccctttaatgcatttccatttcacccaaacattgatcattattttggattgaatt

SEQ ID NO: 784349 - DNA, 602 bp, Homo sapiens
tttatacctaatttattaaacatttttatcattaagggatgtttgaattttatcaaaagatttttcttcatctattgagaggatcatacggttttagttcttttttctactgatgtgatgtacaatgtttattgacttgtatatgttgaaccatccttgcttcctaggataaatcccacttgatcatggtgtgatacctttttgatgtactgttagattaggtttgctagtatttttttgagggcttgttcatctatgtttrtcaggaatattggactgtagtttgcatttttaagtttgtgttcttgtctggttttgatatcaggtttatgctggccttgtaggatgagttaggaagagtttcttctgcttcattttatagaatagtttgagaactggtgttaattcttctttaaagtttcagtagaattcagtggttaagccatctggtcctggacttttttgttggaagacttattattactggttcaatctcgttacttgttattggtgtgttcaggttttctatttcttcttggttcaatcttgctaggttgtatgtgtccaggaatttatctatttcctctaagttttcaaatatg

SEQ ID NO: 784350 - DNA, 637 bp, Homo sapiens
gttgtacatagtagtctctagggatcctttatatttctgttgtatctgttgtgacatctttttttgcttttgattttattttggtattcccttttttcatagtctagcaaattgtttattttatttatctttttaaaaaactgacttcttgttttgttaatcttttgtaagttttttagtttcagttttgtttatttttgttttgatatttattatttttttattctgctaattttaggttaggtttgttcttgcatttttagttccttgagatgcatcaagtggtttatttgaaatagttctaattttttatgtaggcattttttgctataaatttgcctcttaatactgcttttgctgtatctcataggtttgggkatactgtgttctatttttatttatttcaaataatttttaaatttcattctttattgcatccttcacccattggtcattcaggagcatgttgtttaatttccatgtattcatataattttgaattttcatcttgttattagttcctagttttattacattgtaatcagataaaatatttgatatgattttaagtttttaatttttctttgagacttgttttgtatcctaacatatggtcaatcctgaagaatggagtgtt

SEQ ID NO: 784351 - DNA, 637 bp, Homo sapiens
gttgtacatagtagtctctagggatcctttatatttctgttgtatctgttgtgacatctttttttgcttttgattttattttggtattcccttttttcatagtctagcaaattgtttattttatttatctttttaaaaaactgacttcttgttttgttaatcttttgtaagttttttagtttcagttttgtttatttttgttttgatatttattatttttttattctgctaattttaggttaggtttgttcttgcatttttagttccttgagatgcatcaagtggtttatttgaaatagttctaattttttatgtaggcattttttgctataaatttgcctcttaatactgcttttgctgtatctcataggtttggggatactgtgttctatttttatttatttcaaataatttttaaatttcattctttattgcatccttcacccattggtcattcaggagcatgttgtttaatttccatgtattcatatarttttgaattttcatcttgttattagttcctagttttattacattgtaatcagataaaatatttgatatgattttaagtttttaatttttctttgagacttgttttgtatcctaacatatggtcaatcctgaagaatggagtgtt

SEQ ID NO: 784352 - DNA, 518 bp, Homo sapiens
gcttggcttgcctgtcagtgtgtcttccttcccagggttgtttctcaggtctgggatgcaggtgcaaggctacctgaccagcctggggagtgtctttttggggaagctcacagggatgcttttgcagctcaggatrtaggcgcacagttgcatggctgacatggggttatgcctgtcaggggcagccaacagggctgtttctcaggcccaagatgggggcacatagcttcttgactggcttaggggcatgttagttgcttggtggctgagggaactctcctgctcaggagagggcacacagcagtttggctggctcaagagtgggttttccctgggtggaatggccaggctgtttctctggctggtagtataacagcagaaggttggtttccctgatgtggaggaccagactcacagccaatcttgggcccatgctccatgtggctggagttgtggtgtccagcaaccattgtagcattggtggaatgaagatggatccccactgctggagaggctac

SEQ ID NO: 784353 - DNA, 518 bp, Homo sapiens
gcttggcttgcctgtcagtgtgtcttccttcccagggttgtttctcaggtctgggatgcaggtgcaaggctacctgaccagcctggggagtgtctttttggggaagctcacagggatgcttttgcagctcaggatataggcgcacagttgcatggctgacatggggttatgcctgtcaggggcagccaacagggctgtttctcaggcccaagatgggggcacatagcttcttgactggcttaggggcatgttagytgcttggtggctgagggaactctcctgctcaggagagggcacacagcagtttggctggctcaagagtgggttttccctgggtggaatggccaggctgtttctctggctggtagtataacagcagaaggttggtttccctgatgtggaggaccagactcacagccaatcttgggcccatgctccatgtggctggagttgtggtgtccagcaaccattgtagcattggtggaatgaagatggatccccactgctggagaggctac

SEQ ID NO: 784354 - DNA, 518 bp, Homo sapiens
gcttggcttgcctgtcagtgtgtcttccttcccagggttgtttctcaggtctgggatgcaggtgcaaggctacctgaccagcctggggagtgtctttttggggaagctcacagggatgcttttgcagctcaggatataggcgcacagttgcatggctgacatggggttatgcctgtcaggggcagccaacagggctgtttctcaggcccaagatgggggcacatagcttcttgactggcttaggggcatgttagttgcttggtggctgagggaactctcctgctcaggagagggcacacagcagtttggctggctcaagagtgggtttkccctgggtggaatggccaggctgtttctctggctggtagtataacagcagaaggttggtttccctgatgtggaggaccagactcacagccaatcttgggcccatgctccatgtggctggagttgtggtgtccagcaaccattgtagcattggtggaatgaagatggatccccactgctggagaggctac

SEQ ID NO: 784355 - DNA, 585 bp, Homo sapiens
tgccctttccatacgtttcatatagatggaatcatataatacgtaatcatttgcctctagtttttttcacttaatgtagtgtttttgagattcatctatgtcctaccatgtatcagtactttttccttttgattgccragtagtattccactgtgtggacatatatatttagtttgctcattcatctattgatggacatttgtattgttcccagtttttggctattataaataatgttgctatacatatgcatgaattggtctttgtgtggatataaattttcagttctctaggatatatacctaggaatggaattactggattgtatggtaatttatatttaactttatttatttatttaaaaatttatttaagaactttaaaaaaaattttaaaaattaacagttttaaaattgtacctatttatgggatgcatagtgatgttgcaatacatataatgtatcgtgatcagatcagggtaattagcgtatctattataaacatttatcacttctttatattgaggacattcaatatcctccttctagctatttgaaactatatagcattgttaaatatagacat

SEQ ID NO: 784356 - DNA, 607 bp, Homo sapiens
tgcaatgaggcagtgaaagcctgaaattagccgcaagaagggtaaaaagtgcagtaattcagtagaggctgagagtaactgagtcatcacaaagccaggagcacgggagagcacagagcatgccggctttggagacacaggtcccagagccattacagcatccacagggctcctgttggataagttgcatctcctttgatcaggggtgtgaggcaacttctatttccttccttacctttgtattcttacaataaactcgaatacctcmggtaacacaagcacatacctgtgcctcctaccaagaaaataaatacctcgatgacgtcgggttgtattatataattgtggggaagaacagaagggaaaaaggagagacattagctcactttttggggaaaatccttgctttgctgaggtgggtaaaacatttaaaagttaatctgttaaaggaactggaattctctgggcacatgccaacccgcagctgagacgtggtctggaattgtgtgactaagtaaaatggttcataggaaaaggtttgcctctgtgtcaacaggcagatgattcgtaattcatcaagatttagccaagacaataagagaaatat

SEQ ID NO: 784357 - DNA, 498 bp, Homo sapiens
gaaaagttctcttctgttgatactctagaactaagagctaaatgatagctgaagaagatagctaaatgataactcttagttctaaaacatcaacaggggagaactttagcatgaatgccaaccatgcaccagatattctgtgtgctgaatagaatccaktcaactcactgcactcctgtgaggcaggcagtgatatcctcattttccaataaacagaggcttggaaagactaactttccagagttgcacagctgggaattcaggttttcaaccaacatctacttgaaccctcaccttacctcttgctgctgtgctgtggaaatgctgctggagaaatggaagcccgaaaaggacagaaggagccttgacaccataaattagttacttgctgcaaaaaccagagtctcttgtcctccaggctggagtgcaatgacacgatcttggctcattgcaacctccacctcccgggttcaagcgaatctcctgcctcagcctccc

SEQ ID NO: 784358 - DNA, 509 bp, Homo sapiens
tcttgcacatgtatgcctctctcagtaaagattcctgaatcaaaagacgtgtgcttttgtcattttttaaaatttttatttattcatttatttttgagacagggtctcgctctgtcacccaggctggattgcagtggcacgatcatggctcactgtagcttgacttccygggctgaagtgatcctcctgtctcagcctcctgagtagctgggaccacaggtgtgtgcccccatgcctggctaatatttaaattttatttttagtagagacagggtcttcctatgttgcccaggctggtctcaaacgtctgggctcaagcaatcctcccgcctcagcctcccaaaatactggaatcccagtattataggctgtgcttttgtacttttaataggtattgacaaaatgagactgtattgatgttcttgtttgcagacttcatacttaagtgcccctttccctacaccttccccaattctattcaaataaaaatcaacatctttaatctgtgc

SEQ ID NO: 784359 - DNA, 509 bp, Homo sapiens
tcttgcacatgtatgcctctctcagtaaagattcctgaatcaaaagacgtgtgcttttgtcattttttaaaatttttatttattcatttatttttgagacagggtctcgctctgtcacccaggctggattgcagtggcacgatcatggctcactgtagcttgacttcccgggctgaagtgatcctcctgtctcagcctcctgagtagctgggaccacaggtgtgtgcccccatgcctggctaatatttaaattttatttttagtagagacagggtcttcctatgttgcccaggctggtctcaaacgtctgggctcaagcaatcctccygcctcagcctcccaaaatactggaatcccagtattataggctgtgcttttgtacttttaataggtattgacaaaatgagactgtattgatgttcttgtttgcagacttcatacttaagtgcccctttccctacaccttccccaattctattcaaataaaaatcaacatctttaatctgtgc

SEQ ID NO: 784360 - DNA, 600 bp, Homo sapiens
tgtaattcattctgagactcttcctccttccttctctcctccctcagagcaggcagccctgcatcatggtctcatgctctccttgccactttggctacctccctttgtccctcacaggcattttccctgacacacactcttgattacctaatcctgtctaggtatctgcttttcagagtgagtcctaaacaaacctactcacctatagttttggtttgaatagttcaggaaatgttgaaaaaagggagaagaagaggaagaagatgggagaaaagaacatgctttttttttccttaatagttattactatcaagtcaagatgattaaattccgttagaaacattaaaaagattaaggttgctttttaaatgaaakgacaatattcatcatattcttaaaagtttattctttgtaactattatgcaattatgataaaaatgttagatgtcaacttaaagcatgctagggaataattggcttttcaaaatttgtttataatagttacaaataaaattttggaagacttgtccagacttctactacctttgtggtccttaactaaatgtgaaatattaatcatatccttttttcagatcctaa

SEQ ID NO: 784361 - DNA, 583 bp, Homo sapiens
accttggtgttctcacttgcggtgtgcccactgcacgagctttctgctattctactgcacattcacagctcacttggaagaaactttagtaagattcttggaatctttctcacagcaggaagagtcctaagagaccgagctactccttttacaataattgagacacagaccrctggcaaatgaaatttgccccaaatttggaagaccatctcataggcatgacaacaaaagactcatgtgtttgttttaacttggtgtggttttttttaattatgggggtagttttatttattttcaaatatgtagtagctacttgcattactttttaataaaccacatgttcatggtctatgtttatttttctatgagaagatctattttccttattgtgttttaaaaattctttcaatatattatagaatatctctattcccaccatatgtgtttatacattttaaaaatttctgttttcttactgtatgcatgattttccctgtaaaactttttatttgcttgtagttaatgatattaatttacttcagaaaatcattcacgtgtaaatattctacaaaacttgtctcat

SEQ ID NO: 784362 - DNA, 573 bp, Homo sapiens
gaagcgagtcagggctcaaggctcctcctgctctgttcactcctgggtccccttgagtgtctggttcctgccggttttcccaggagaccccaggccagctgcaggaggccggggttggaccttccatccagctgagtccactcacctccaagagctctgatcagggccctctgggtgctgctgtccacacaaggccggctctgtctctgcctccctgccccactcrgggagggttgggtcatggtagggaggccctggggtgctcagagcgtctgggcagcaggagtacatcgcttccaagaaggatcagtttcccaacgctgaggccaacactgtctggagccctgaggagggccccaggtggcagataccaggacgggtgcagcctctgccaccctcacctccccaaagcatccggtctcaggcacagggaattgtagccgagggccagggtcccaggaggatcaaaggtgggaccttccagggtggtctcctgtgaccgtcactgctttcaaaccaccaggggcagcgcgtctgcccccacagcctgtgccaccaggagagaccaggcca

SEQ ID NO: 784363 - DNA, 614 bp, Homo sapiens
atggtgtccctcttccttccctccaagtgctgaactcacttgggttttccactggacttcagtgtcactgtgttttagaatgaactaaacattcccaataaagtcctacttgtgctgaattaacatttctttattaaacaaaatatgctgcctagaatcagtagtttgagtcttctttgattactgtcttttattcatcgtcacgtgttctgtcactagtcttaggcacttaaaacaaatttctgttttgattatcctggggtcattgtaattaagcccatatttctccttccctttcatctttcctttcctgacctgcacaccaattacattactcttcctcattcttgtgctgacaatattactctccattgtttagaggatcaagtctaaactccccagtttgactttcaaggtccctctttctcaaactttccctagtctttccaaagaaagttattcttcccttctgacstaaatttaggatgtgtccccatttttatctgcatagtagccccaatgtgatgtaaaattttaccaaatactttgtctttcttttctttctttctttttttttttttttgagatggagtttcgctctttcgcccaggctg

SEQ ID NO: 784364 - DNA, 610 bp, Homo sapiens
aaactttattttcttccaagtagattctgaaattttgttgaaataaacatagatttaaatctatttcttgctgctttgttttctggtcaccatgaccataaagctatgtgagtctgttgaaacatattgcagattttgttttgttttgttttgttttsttttcttttcttttcttttctttccttttcttttcttttgttttctatctcccagaaataagtccatcttaagtgcccagggatggaatatggttaaagcagtagcttggtttagctactcagaagtgactgttcttacctgtcttaatcacttttccagtataaaatggccacggcaagtcctttatctaatttccaggcaattacttggtatttgcctttaatatcttcgggctccactatcctccctttatgaaaccttcatatatcaacccagctgccagtggtcctttcttcagatgtctaaaagcctctcatgacacttatttactacatgtccaatttatgtccccagttttttcttaaatacattgttattttcccgaagtcaatgtccttctctcccccaccccctctctctctttcccatatatatatgtatatatggtaga

SEQ ID NO: 784365 - DNA, 654 bp, Homo sapiens
gtctgtcttagaacgttccatatgtacttgagaagaatgtatattctgttgttgaaagtgttctataggtgtctgtgaggtctaattgattttatagtattgttcaagctttctgtttccttgctgatcatctgccctgttgtcctaytttttattattattattattatcattattattatttttcgagacagagtttcactcttgttgcctaggctggagtgcagtgacacgatttcagctcactgcaacctctgcctcccaggttcaagtgattctcatgcttcagcctcccatgtagctgagattacaggcttgcacctggctaagttttgtatttttagtagagacggggtttcaccatgttggccaggatggtctcgatctcttgacctcatgatccgcccaccttggcctcccaaagagctggtattacaggtgtgagccaccgtgtccagcccctatttattattaaaaatgagatattgcagtcttcaactattattgttgaattgtctatttctccctctctttctgtcagatttgtttaatgtactttggtgctctgttattaaattaactgcatatgtatttataatttcatatcttcctgatagattgacccttttatcattataaaatgtccttctttac

SEQ ID NO: 784366 - DNA, 610 bp, Homo sapiens
agttttttattgggttaatggctttcttcttgatttctgggagctttttatatattagggtaattggccatttctgactgtttcaggtatttcccccagtttgttgttttctttttactttaacatgggctttgccctatagatctttaaaaatttagctgaatttattgttttctagacttctgggttttgtcatacttagaaaggctttccctattacaggattataaatttaaaagccttccatggtttctctctctctttttttttttttttttgagacggagtctcagtccagtccaggctggagtgcagtggcgcaatctcagctcactgaaacctccacctcttgggttcaagcgattcttgtgtctcagcctgagtagccaggattacaggcacgtaccaccacgcctggctaatttttgtatttttagtagagagggggtttcgccrtgttggccaggctggtctcgaactcctgacctcaagtgatctgcctgccttggcctcccaaagtgctggaattacaggcgtgagccactgtgccttcccatggtttcttatacttattttaacaatgttatttttgctttaaccatttcaaata

SEQ ID NO: 784367 - DNA, 391 bp, Homo sapiens
ctcaagcgatccacctgcctcggcctcccaaagttgctgggattacgggcatgagccaccgtgcctggccgtactttgagttccttacatcctccatacagcatccagaatgatcttttaaaatgtaaatcatatcctgacagactcagcttaaaacttcygatggtttcccgttagcctcaaaataaatccaaagtccttactgtggcccaaaaggccctacatgtggcccctgcctacttctccaacttcattttctgttactatagtccttgttctagccacactggcttccttctgttcctagaacaggtccaggcttaattttgccttggagacactgtatttgccgtttcctctatactacatcttcataaggctggcttctttc

SEQ ID NO: 784368 - DNA, 647 bp, Homo sapiens
ctttattaaagttgtaaataaataaagactattaatacatttcaaataaattagtagtgttttccaaaatcatcacaataagataccaataataagcagctggttaaaagcataaaaccagaatgccagggttcaaaccttggctctaccatttattgactgtgtgcctttagtcaaattaatgaacttctctagacctcagcttcctcacctgcaagatggaatgatgataataatagtagatagttcatggggctgttacaaggattaaagaatagatataggtaagtatgtaggaaactatatgtgctcaaaaaattattagtaactttatatgcataaattttttaattcactctctatakataacaatgatcaattaaaagcatacttccatgttttctgtttcaacttttaacagtcatacaaatatataatgataaataattcttttagaatgactgttaaaaataaaatttaaaacttcagtctgttttcttacctgtctaaatgcttatttctccagctatatgtttttaaagtaatgattacactagtgatattcatgaagtataaatgcagttcaactaggtgaaaatctttttgaatacatttattacatttaatatatgtaagccacttacttg

SEQ ID NO: 784369 - DNA, 600 bp, Homo sapiens
cagataacaagattaagaacttaggtcaagttggaattcgtttaccaaagtggttaatgggttactcaatagaactgagaacttcacaggaagttttcaatgaaggaagcctgggaaaagagaaaattacagtgcatggctgctgactaaaatcctgagaagaagattgcagtggggaatgtggaacaaccatagggcagcatgagttsctgaggactagaactaaggaagctgaaagcagtcacacagagaaacagtgatttgagttagcaataatttcacctctgtatattatagaactgtgtcagccgggcgcagtggctcacgcctgtaatcccagcactttgggaggctgaggtgggtggatcacagtacaagagatcaagaccatcctggccaacatggtgaaaccccatctctactaaaaatacaaaaattagctgggtgtggtggcatgcgcctgtagtcccagctactcaggaggctgaggcaggagaatcacttgaacccaggaggtggagattgcagtgagctgagatcatgccactgcactccagcctggcgacggagcaagactccatctcaaaaataaaataaaat

SEQ ID NO: 784370 - DNA, 600 bp, Homo sapiens
cagataacaagattaagaacttaggtcaagttggaattcgtttaccaaagtggttaatgggttactcaatagaactgagaacttcacaggaagttttcaatgaaggaagcctgggaaaagagaaaattacagtgcatggctgctgactaaaatcctgagaagaagattgcagtggggaatgtggaacaaccatagggcagcatgagttgctgaggactagaactaaggaagctgaaagcagtcacacagagaaacagtgatttgagttagcaataatttcasctctgtatattatagaactgtgtcagccgggcgcagtggctcacgcctgtaatcccagcactttgggaggctgaggtgggtggatcacagtacaagagatcaagaccatcctggccaacatggtgaaaccccatctctactaaaaatacaaaaattagctgggtgtggtggcatgcgcctgtagtcccagctactcaggaggctgaggcaggagaatcacttgaacccaggaggtggagattgcagtgagctgagatcatgccactgcactccagcctggcgacggagcaagactccatctcaaaaataaaataaaat

SEQ ID NO: 784371 - DNA, 548 bp, Homo sapiens
tgggtcacagcctccatgtcacagctaccgaaactgtcccttacagagactctgaacacgtccttctgacaggtaggaatagagagaggagggctgcgtggtaaagtcaccggccgacaacaaagttacagggctccaagttaaagtcagtctctcagctcatttctggccctggagcttctcctgaaggtgctgtacggaatgctctagaagaagtttggaatgggggtggggcatgtcaggcaacccagagaaatgttctcccagcccaggtaataaacgtacccctttccccaaagtaccgttaaagatgtttaaaaaaaaatcttaaaraaaaaaaaaaaaaaccctttaagctgacctcctgccaaagtacacatcaattatacagcttcagtcaggcggatgctcgaggaaaggggatcatgttacacccagctgggcactttgtagttagcacaaatgtaatataaagcgcagcagagttcatcaagtgtctgtctggattttcagttttcattagtgctataattaaaaccacattttca

SEQ ID NO: 784372 - DNA, 516 bp, Homo sapiens
tcgaggaaaggggatcatgttacacccagctgggcactttgtagttagcacaaatgtaatataaagcgcagcagagttcatcaagtgtctgtctggattttcagttttcattagtgctataattaaaaccacattttcagctctattacctgtaacaagaaaggaatgagaaatgagcttgtcaaggtcaggcttttccagctatttatactgaggatctgcaggccacaagttgttgsatttggtgtaaaccagagcgaccggccaaatgtcgcactccaatccatcctgtgtggcttgaaaggcacgctcatgaggtcatttcctttgagtggccactgggtcgcagatgtccacacggcaccaaggaccgggaaagatgggtgatcaggtaaatccaccctgggccatggaggggttttctctcccattatgatcaaattggtttcacctcctacaacagcccccaaaggcagttctcagacactcgtgttgagggcagaaatcctaaagtct

SEQ ID NO: 784373 - DNA, 596 bp, Homo sapiens
aaaatgtggcacgtatacaccatggaatactatgcagccataacaaatgatgtcctttgcaggacatggatgaagctggaaaccatcattctcagcaaacacaagaacagaaagccaaacaccgcatgttctcactcataggtgsgtgtagaacaatgagaacacatggacacaggaaggggaacatcacacactggggcctgtccggtggtgggggactaggggaggaataacattaggagaaatacctaatgtagatgacgggttgatgggtgcagcaaaccaccatggcacatgtatacctacgtaacaaacctgcatgttctgcacatgtatcccataacttaaagtataataaatttttaaaaaattttttaaaaatcaactaaatttctaacataataaatgaaaaaaaaaagatttagacctaaagaacaaaaatgttataaagagcttggtgcagtgactctcatgcctgtaatactagaggtttgggaggctgaggtgggaggatcacttgaggccagaagttcaagaccagcttaagcaacataacaggatttcatctttacaaaaaataaataaataaataaata

SEQ ID NO: 784374 - DNA, 519 bp, Homo sapiens
tgcttccttcaggagctcttgtaaggcaggcctggtggggacaaaatccctcagcatgtgcttgtctgtaaaggattttatttctccttcacttaggaagcttagtttggctggatatgaaattctgggttgaaaattattttctttaagaatgttgaatattggcccccactctcttctggcttgtagggtttctgcagagagatrtgctgttaatctgatgggcttccttttgtgggtaacccagcctttctctctggctgctctttacatttttttccttcatttcaatcttggtgaatctgatgattatgtgtgttggggttgctcttctcgtggagtatctttgtggtgttctctatatttcctgaatttgaatgttggcctgtctttctaggttggataagttctcctggataatatcctgaagtgtgttttccaacttggttccattctccccgtcactttcaggtacaccagtcaaacataggtttggttgattcacattgtcccatattt

SEQ ID NO: 784375 - DNA, 461 bp, Homo sapiens
tgccaggcatggtggctcatgcctgtaatcccagcactttgggaggcggaggcgggcagatcaactgaggtcgggagttcaagaccagcctgacaaacatggtgaaaccccgtctctactaaaaatacaaaattagctgggcgtggtgacacatgcttgtaatcccagctacttgagaggctgaggcaggagaatcacttgaacstgggaggcagaggttgcagtgagctgagatcgtgccattgcactccggcctggtgacagagcaagactccatctcaaaaaaaaaaaaaaaaaaaaagagggggggttattttaaagcagtattcattgcaaaaaaaaattttttgcaagaacagcaattgacttattttgaaattcagtaaaaggcattttgacttgtaatatgaggtttaattctagaccccttttgattcagacatatcaataggcacttcaga

SEQ ID NO: 784376 - DNA, 554 bp, Homo sapiens
aaatggataaaagcaaagtgccatcataaagcaaattaactaatttattgagtagctttagtttgagtagcaaactgggtctgagggtaatttcagatgagcatttccaagaatgttttcaacaatggcagcatgattggtataaawgcataatcccttaaggtgatactttaaaaagtaaaactcacttgatgcaagttctgagttttgcttttactcttttgtcttatcttttaaatttcccttctctctagtcttccccatatgtacttcacagtggtttgtagtaaacacatttagtattttgtttctattttcctcagcaagtcaatacttgctattcaaattaccaataaaaattctgagagcctgcaatgatcacagcattatgctaatttctataggaaagagttagtcctgactcgaccaattttcataaatttgcatgttagacatcatagtaccaccagtgagtccacacaggtactttaagctgatagcctcttcaacaccaagcaataagcaactgataatttctatgtatgtcctagtgg

SEQ ID NO: 784377 - DNA, 616 bp, Homo sapiens
caggtgctatgaggcatctcccctccgcatttctccctctttgcttttgaaaggttaggggagagggagggagagggagagagaaggagagagagacagagagagagagagagagacagagaaagagagagagaaagtgagtgccacagrtaactacagtttcacaaaatgttaataattgctttgtacagaaggttccatagtggaaactattagcaaaacactggattaaaaacaacttacttcctgtaggactttcagagcctctaacaggctaacatgcactttaagtatctaagtaaagaacccagtatatagctttttctacccttatttggccatggttttatttttgtttttgttttctcagaacacctcaagaaaccgatgctccatagaattcattttaagtagagaaattcatattatgtagaataaaaactgccatttgttaaacaaattcatgaatatttcaacaccaggacattcttacttattttgacccacatagaacttaaaacaattcccaatatacatttgtgtgtacattcatatcacttatatttgtggatcttagtaaataattaatctcatgatttgtgtccaaattgcagca

SEQ ID NO: 784378 - DNA, 616 bp, Homo sapiens
caggtgctatgaggcatctcccctccgcatttctccctctttgcttttgaaaggttaggggagagggagggagagggagagagaaggagagagagacagagagagagagagagagacagagaaagagagagagaaagtgagtgccacaggtaactacagtttcacaaaatgttaataattgctttgtacagaaggttccatagtggaaactattagcaaaacactggattaaaaacaacttacttcctgtaggactttcagagcctctaacwggctaacatgcactttaagtatctaagtaaagaacccagtatatagctttttctacccttatttggccatggttttatttttgtttttgttttctcagaacacctcaagaaaccgatgctccatagaattcattttaagtagagaaattcatattatgtagaataaaaactgccatttgttaaacaaattcatgaatatttcaacaccaggacattcttacttattttgacccacatagaacttaaaacaattcccaatatacatttgtgtgtacattcatatcacttatatttgtggatcttagtaaataattaatctcatgatttgtgtccaaattgcagca

SEQ ID NO: 784379 - DNA, 616 bp, Homo sapiens
caggtgctatgaggcatctcccctccgcatttctccctctttgcttttgaaaggttaggggagagggagggagagggagagagaaggagagagagacagagagagagagagagagacagagaaagagagagagaaagtgagtgccacaggtaactacagtttcacaaaatgttaataattgctttgtacagaaggttccatagtggaaactattagcaaaacactggattaaaaacaacttacttcctgtaggactttcagagcctctaacaggctaacatgcactttaagtatctaagtaaagracccagtatatagctttttctacccttatttggccatggttttatttttgtttttgttttctcagaacacctcaagaaaccgatgctccatagaattcattttaagtagagaaattcatattatgtagaataaaaactgccatttgttaaacaaattcatgaatatttcaacaccaggacattcttacttattttgacccacatagaacttaaaacaattcccaatatacatttgtgtgtacattcatatcacttatatttgtggatcttagtaaataattaatctcatgatttgtgtccaaattgcagca

SEQ ID NO: 784380 - DNA, 630 bp, Homo sapiens
tgaccagatgagatttcacaatgctttgtactcacagttattaaagtgctaagtggaagcaaactgaatcttcaattacagataaaggaaagcaaatgtgcataaagggcattttttaaattccacttttcaattttttggaagattcatccccaataattccaaatggcctcccagaggtttatgggaacagacaaaggctcaagacagttccctaaatycagttgcacagatctttgggttagccaaccttctgaaatatttctgaaaactgtcatttcttcctttgaattgtactaggctaaattaaactgaagaagagagatgtagatcccgtaagtgtatccatgcctcagaatgtgtccctgaatcttattatggaaaacaagagctacaaaaacaggtttgtttaactcttgcattcactagctgaaagaataaaccgcaaacaagctactgtgttaatcttcagattagccctctagtctgtcgatgtaatactgattagtaaacaatgtccataattaaactgttgtcagagacacaaatgccccacgagcctgagctaatgaggcagtattcaactcctttacaaaggccagcctaatacaatttcaggaatgttaatgc

SEQ ID NO: 784381 - DNA, 648 bp, Homo sapiens
attgtttctttcccaccatccttctccccagactcaagctttatccaagcctgaggtttaatcttaactacaaatagtctttggtcaccaaattcacaaaattatccagtccttttgaaaacacagccgcagagcttgacttactgacctctcatgacaatgaattccacagacttcatggatggcttttcagcctttaaaattcggtcaagtaaataaataacttaccagccctaacttcstgcacactccatttcttccaacttctgtgaggatgacctctggcaaaactcaaggagaaaaaggagcaacccagtcataccccctttcacacaaatatcagaaacaagtcaccacaacgcgtcccagacagcatgctggaaaacccatccccagctccatggagtcccttggctggtcctctccctccttcagaaagcagaactgtcctaaggcagctctcggaagctggtggcgaagggcctcgatttctagctgatcgggagctagagatattatttaagtgttaaataacaatgtaaaatactctgattttatcccactccagacattttcagccacccagaaggatgggccacttatttcctaactcccaaagaataaactgttctgttattgttaatcatg

SEQ ID NO: 784382 - DNA, 599 bp, Homo sapiens
cttctaaagcgttagttaatattgatagctaccatttattgagagttcatatttcccaggcacagagctaaacacttgacaagctttatattatttctttcagtcctcacaagagtcctatgaagtaggcaccatttaacagatgaggtaagtgggtcctaaagagcttaatgaccttcccccacagtcacatggatgtaattggaaatgctggaatttgaacagaggtatctgacttcagaaccagcacgtgaackgctaacctgagataaatacatctgcaactttcctactaacccaatattttccatttcgaccaagcgacaacagcctgtcttccatgacatcttctcccagtcttctctatccaaaccttcatatggctttagcaatgcctgttttattcagagatatgcttatgttgcccatctccaattagcttattattttttaaacacttctccctttttcttgcatttctgtgaattaagtctggagaaaacctgactgaattagcagaatggatcacaaagtgaatcagtagggacacagtaacagctccactgatgccatatgcctacctcctgtgtcttgtgtac

SEQ ID NO: 784383 - DNA, 599 bp, Homo sapiens
cttctaaagcgttagttaatattgatagctaccatttattgagagttcatatttcccaggcacagagctaaacacttgacaagctttatattatttctttcagtcctcacaagagtcctatgaagtaggcaccatttaacagatgaggtaagtgggtcctaaagagcttaatgaccttcccccacagtcacatggatgtaattggaaatgctggaatttgaacagaggtatctgacttcagaaccagcacgtgaactgctaacctgagataaatacatctgcaactttcctactaacccaatattttccatttcgaccaagygacaacagcctgtcttccatgacatcttctcccagtcttctctatccaaaccttcatatggctttagcaatgcctgttttattcagagatatgcttatgttgcccatctccaattagcttattattttttaaacacttctccctttttcttgcatttctgtgaattaagtctggagaaaacctgactgaattagcagaatggatcacaaagtgaatcagtagggacacagtaacagctccactgatgccatatgcctacctcctgtgtcttgtgtac

SEQ ID NO: 784384 - DNA, 599 bp, Homo sapiens
cttctaaagcgttagttaatattgatagctaccatttattgagagttcatatttcccaggcacagagctaaacacttgacaagctttatattatttctttcagtcctcacaagagtcctatgaagtaggcaccatttaacagatgaggtaagtgggtcctaaagagcttaatgaccttcccccacagtcacatggatgtaattggaaatgctggaatttgaacagaggtatctgacttcagaaccagcacgtgaactgctaacctgagataaatacatctgcaactttcctactaacccaatattttccatttcgaccaagcgacaacagcctgtcttccatgacatcttctcccagtcttctctatccaaaccttcatatggctttagcaatgcytgttttattcagagatatgcttatgttgcccatctccaattagcttattattttttaaacacttctccctttttcttgcatttctgtgaattaagtctggagaaaacctgactgaattagcagaatggatcacaaagtgaatcagtagggacacagtaacagctccactgatgccatatgcctacctcctgtgtcttgtgtac

SEQ ID NO: 784385 - DNA, 706 bp, Homo sapiens
gtgtgtgtgatctggttttagctataagtctagggctggactgcccaagctcaagaaagcattctactcaagaatgcacagacctgcaggggtcagcaggagtcctcattaggaaacccatagtccagaggcagctactacaaatgtttctaatccatatctcaatcaaacttaaggcttgcaaattgacacattcaatgccagaaataggctgttgtgtttttttaaacaataatagtagcctgtttactagaataatgaatgtttgaaataggttctcattggtaaaatttcaagtacatagcatgtatagaataacaacaaatatagaccatccccacccttacatgaatgaagtttgagattccaggtccagcccacacataagagggagggattataaaaatgtatgggcaccaggagatgggcatgattgggggrcatctcaaagtctgactgccttctgtttccaactgtggatcctggaggattctggtttcctgggccagttataagagtaaacaaatcctgcctctggaatcttggcatttgcctcgaataaccttttacataaaatagtggtcagagcaccctccacagaacgtcactcaatcctgaactccttggtcagttcccccttttccagagtgttcctctctttctcttccagtataaataagccaaacttgtgtcctggatgctcaat

SEQ ID NO: 784386 - DNA, 642 bp, Homo sapiens
acacacttgacctgagatgttagtgttaatgaggcttacaacactctccttcacaggaaacatatttgaattttaactgtagcctctggtgaaaacacctccctgggaagctgtttggaagatgctatggaatgcagaactttgatgcagaaggggaccttaaagattagagagtccarttgccttccttctatagcagagtagaaaatggaatctcaaggacctatatgacaactgacctacccaagctcacgtagtgagatttgcagggatctttacaaccaatctctctctctctctttctctgtctctctctctcaaataaataaataaaagggcaggctttttgtcaccctcaaaatgggtctagaggtggcagcattagaagcagaagcggagaaggattatcagtaccatagccagggcttaatgctgactatgtatgtttgttggttgttctcgacacctagggtctttcagcctattctggtagttccaaagcctgcgttacccaactgtcctggctcttctctccacttcacccagccctgttccctcaggctgatcaccccagcccctcagcagtgcccacaacaactcttactctaaagatgactgtcctctgaggatgacatccagggc

SEQ ID NO: 784387 - DNA, 669 bp, Homo sapiens
ctggtagttccaaagcctgcgttacccaactgtcctggctcttctctccacttcacccagccctgttccctcaggctgatcaccccagcccctcagcagtgcccacaacaactcttactctaaagatgactgtcctctgaggatgacatccagggctgagagtcagacccaagcaccaagagccggggtgtccaatcctctggacagactccgcaagaccctctgaactagactgcccttggaaggcrggcttcactccttgacttcatgtccaagaaaatgtcattggtatttgatatttgagcaaaacaaagatatccatgttacatgaaccgattaggcaacttcctcattagagggaagcaagtctctgagagatcccaggcagagggcttccagttccatccaagtgtgttagctcaccaccactcaacaccggtgtaaagaacccagttctgaagtcactccctaaaaccaaggcttcttagtccttctcatcagggccaagggaagggcagctatctttacagacaagagtcccatctttggaagctggtttcagaaggtacacatttcttaatattgtactattcgttggatttgacttgtgtggcataatgtttcctgagccttaaaaaaggaagcgaaatccaagtttaatggggacag

SEQ ID NO: 784388 - DNA, 669 bp, Homo sapiens
ctggtagttccaaagcctgcgttacccaactgtcctggctcttctctccacttcacccagccctgttccctcaggctgatcaccccagcccctcagcagtgcccacaacaactcttactctaaagatgactgtcctctgaggatgacatccagggctgagagtcagacccaagcaccaagagccggggtgtccaatcctctggacagactccgcaagaccctctgaactagactgcccttggaaggcgggcttcactccttgacttcatgtccaagaaaatgtcattggtatttgatatttgagcaaaacaaagatatccatgttacatgaaccgattaggcaacttcctcattagagggaagcaagtctctgagagatcccaggcagagggcttccagttccatccaagtgtgttagctcaccaccactcaacacyggtgtaaagaacccagttctgaagtcactccctaaaaccaaggcttcttagtccttctcatcagggccaagggaagggcagctatctttacagacaagagtcccatctttggaagctggtttcagaaggtacacatttcttaatattgtactattcgttggatttgacttgtgtggcataatgtttcctgagccttaaaaaaggaagcgaaatccaagtttaatggggacag

SEQ ID NO: 784389 - DNA, 617 bp, Homo sapiens
ggctcttctctccacttcacccagccctgttccctcaggctgatcaccccagcccctcagcagtgcccacaacaactcttactctaaagatgactgtcctctgaggatgacatccagggctgagagtcagacccaagcaccaagagccggggtgtccaatcctctggacagactccgcaagaccctctgaactagactgcccttggaaggcgggcttcactccttgacttcatgtccaagaaaatgtcattggtatttgatatttgagcaaaacaaagatatccatgttacatgaaccgattaggcaacttcctcattagagggaagcaagtctctgagagatcccaggcagagggcttccagttccatccaagtgtgttagctcaccaccactcaacaccrgtgtaaagaacccagttctgaagtcactccctaaaaccaaggcttcttagtccttctcatcagggccaagggaagggcagctatctttacagacaagagtcccatctttggaagctggtttcagaaggtacacatttcttaatattgtactattcgttggatttgacttgtgtggcataatgtttcctgagccttaaaaaaggaagcgaaatcca

SEQ ID NO: 784390 - DNA, 625 bp, Homo sapiens
acaaacacaagaatgtttgctctccatccacactaagctttgtcagtggattgagtcttatgagaccatctttctgtttaggtttgtttgggaaaacatgtgatttttaaattatatgtaatatagtatctactacctagctcttgataactgtgcycatttataggcatggcagactagagtatagatgaaggagggaagagaatttcctgagtctggttttaaaagaaaaggtaccatgttgtaatcttaggagcagatttacacatagccttttccaggagtaaagaaatgattttcttataaagaaatcattaaatgtgcaacaggtttttttctttttacctccagaggttaaacaaattggtagcatgaaatagtgtctgctttaaatttctttaagcttcttttgtaaatattaatatccacagggatataactattgaaaaggttaccccagggacagagacatgcaagggaggagaaatttctcaacaaagggcctcagaaaataaactttctgacctgaagggaattgtccccaaaaagcccgtgggaactaaagtgactgtttacttatgtttatgatatttaagcaagtgttatactgagcagtggttgtgtt

SEQ ID NO: 784391 - DNA, 599 bp, Homo sapiens
gtgaacggaagtaacccgtcaggcctgtagagggtggctggtcccgttgctatgggagcagcaagtctctacgcgcccctcaccgcgacttaaggctacactgaagaagttgcggcactccctcctgtcttcccagctcggtgactgcccgagctgtcactcccgagtgtcagctgacactgacgctctgaatgcatgtccagggtcggctgccccttgggcagacgtctcacttttgttctgttacattgcttggtaccgtttgcgcctgtgtctaggaggttcatgtctctgaaaacaaggacgatatcttttgttgcttttgtattctcaaggcctaacacgtctaacagaagacggcgaaattagagatgaggaagattaaggagattcaaagtgggagccaatacagaagcaaagatgacatcctctgatttggacagaattgtcctsctacagagaggccagagagtataacataataccaagagttaccatttacttaaagcttactggttcttgggcactgtgtgtgaattgtctcagttaataaggtctgaaataggtcctcttatccccattttacagattgggaaaca

SEQ ID NO: 784392 - DNA, 539 bp, Homo sapiens
ttatagaagaaaagttcttctaaaaatcctacttaactcccagagtcgagctcaaatacctcctcttcccaaatttctttctgactactcttattttttttcggagatacttcttagaagtctgattacttttgtttacattgatctttccattttctctgtttatctttctctacccagcttttgagtctagatgctcttttcattctcttctttcgctctaggcaatctcactcatgcccataacttcaagaactactcatctgagctctaaacacatacatacagctccacrgctctactgaggtttcctaaaggcatttcaaactcagtttgtcaaaaacaaaactgctgatcttccttgacaaactgattcttctccattattctggctctcaaggagagatagcacaatctcttcaatctttcccaagatcatgggtcatccttggcaactcactcattatcagtccatctagtccgttaatgggtctgattggttttactttctaaagagctcgtaaatccatctacttttg

SEQ ID NO: 784393 - DNA, 638 bp, Homo sapiens
ttctaatgaatcctgtcagatatttcctggaattgccatacaagaaattttcagaaatcacaataaatataagaggtttataagagcagagagttaataaaagaacagtattacatccaaaagtttaatcttttcctatggaaattttccattccaactacagctgtttgtcagtgttccttccccaccacacacacacacagataccaaaatcctcagatgcccaagtctctgatataaaatggtttattatttgcatataacctacagtcatcctctctctttactttaaatcatctctagattagttacagtagttcatacaatgcctacacatcacttgacacagggaaaacttgggttttttttttttgtaaccgtgaaatttttttttacaaatatatttgatctgcagttggttgaattcatgaatttggaacccatggatatggagggccarctatattttactgagcaaaggaattttttcctttaggtgctgctataaattttatagtttcttaggcttgaattcgtaaagccgtaaaggcagcatttggtcagaaaacgactgtgtcatggaagatgagtctgacttgcaggtgccacttgggcttagctcccagcccatccagatg

SEQ ID NO: 784394 - DNA, 633 bp, Homo sapiens
tactatgtgtatgtgtatgagtgtggtgttttggggggtgggttgaggagctgtatttacttacagtgcatatatttcctttagaactttttagctttattgccttttctactttattggtctgtaaatgtgatagttggtggccagtagattttagattttaggcaattacttgtatttgtgcatgctcaagtacgcacataaagagttttaaatgctgctgctcagattttasaaactgagaaagctgtaagagcaaacatttctcatgcacacagcacaattcccattctgttaattggattgacattaggtgcttaatattttccaaagctggtcaactaggtttaagaaactacctttggtgattgtgtatgaattttgcactagacaatacaggtataatcttatcaaacttacctttaaaatcactttaataaaccaatgttttgctggatgtgaagtgtctttaaattatctggcacttctgaataactagccctgctatgctaaatgacaaggatgttactgggcatcacctatcatctatctctctctctctctctctctctcacacacacacacacacacacacacacacacacacacacacactctcacaccccagatctg

SEQ ID NO: 784395 - DNA, 525 bp, Homo sapiens
atcatatgaaatttaaattttggtgtccatgtataaagttttattagaacacatccacgcacatttgtttccatagtctacggatgctttgacactatacaaagttacgtacttgcaacaaaagccatatggcctgcaaaacctaaaacatttactatctggatcattacagaaagttttctgatccctggtctatgatattctaaattccgacacattttcttaggatagatttccatttgcaaattcagtgtaagacataaacacckgcaatagttgtgttttttttttctttttacttcctagattttattgcattctcaacttgtttcatattaccttaaaaaataaagtgcacttaaagattgtttcacatccacagtttgtttaaggatttaaatttagttcactattactgcctggctttgattgatttagagggttagtcaattacagactaaataattagttcaatcaaaaccatcagaaaaattgacacaaactcacttccatgcaccagtaaac

SEQ ID NO: 784396 - DNA, 618 bp, Homo sapiens
ggaactaactatggctgtcagttgagccgaataatttgatattatccatctggacatcaaagtgtgtctgccaaaattaattatttcagttttagaaaaaataatatttagcagcttttcctgatatactttggccagtgggttgaactgcttgtcagagccacttctgtgatcatataggaaggcatgtcatcaacacatgagaggtacttgtcrcactgtggctaggtcatctaaagacaaccaacttattcagttataaaattaaaaggagggcacttgggatccagccctgttttatgccatttaagatagacatttcatctctcaaaaagaaggcctttcctatccacgttaatttgttccatattgccagcagtaatggctccaagagagaattataagtctggaatctatgttgagatcatacacttaggcctctttatagattcaatgaccaatgatggatcaataattccatgaaaagtcttaaagtgctcctaactgattgagagactgcattttatccacagacatgtatgctgcatgctgatttcttacctctctcccaactgtccacaacctgtttcctaatctgtcctcaggcctcttctttat

SEQ ID NO: 784397 - DNA, 618 bp, Homo sapiens
ggaactaactatggctgtcagttgagccgaataatttgatattatccatctggacatcaaagtgtgtctgccaaaattaattatttcagttttagaaaaaataatatttagcagcttttcctgatatactttggccagtgggttgaactgcttgtcagagccacttctgtgatcatataggaaggcatgtcatcaacacatgagaggtacttgtcgcactgtggctaggtcatctaaagacaaccaacttattcagttataaaattaaaaggagggcacttgggatycagccctgttttatgccatttaagatagacatttcatctctcaaaaagaaggcctttcctatccacgttaatttgttccatattgccagcagtaatggctccaagagagaattataagtctggaatctatgttgagatcatacacttaggcctctttatagattcaatgaccaatgatggatcaataattccatgaaaagtcttaaagtgctcctaactgattgagagactgcattttatccacagacatgtatgctgcatgctgatttcttacctctctcccaactgtccacaacctgtttcctaatctgtcctcaggcctcttctttat

SEQ ID NO: 784398 - DNA, 618 bp, Homo sapiens
ggaactaactatggctgtcagttgagccgaataatttgatattatccatctggacatcaaagtgtgtctgccaaaattaattatttcagttttagaaaaaataatatttagcagcttttcctgatatactttggccagtgggttgaactgcttgtcagagccacttctgtgatcatataggaaggcatgtcatcaacacatgagaggtacttgtcgcactgtggctaggtcatctaaagacaaccaacttattcagttataaaattaaaaggagggcacttgggatccagccctgttttatgccatttaagatagacatttcatctctcaaaaagaaggcctttcctatccacgttaatttgttccatattgccagcagtaatggctccawgagagaattataagtctggaatctatgttgagatcatacacttaggcctctttatagattcaatgaccaatgatggatcaataattccatgaaaagtcttaaagtgctcctaactgattgagagactgcattttatccacagacatgtatgctgcatgctgatttcttacctctctcccaactgtccacaacctgtttcctaatctgtcctcaggcctcttctttat

SEQ ID NO: 784399 - DNA, 550 bp, Homo sapiens
agcgctggcctggtcccaaaacgagtcgaggaagagcaagtttagacctgttacaagactttgtcatcaagaaggtgaatgagtggattagatttaataaccttgttgatgattaataaccgaaatctgctttaataatttaaatttgaccaagcacttttatgcatattgttatacttaaaatatacactaattatgtaagtcagaaaattatgatgaccttcttatatgtgtgggtatttatctttatgaatgaagaatttgagttgtggaaaggtaatgtgactcatttgaatccccatagcaaccagcagcagagacagagggaaaatgattgtctttragtacaaattcccatcctgtcattcactgacttttcaaatacactttgaaactttgctttactttaaatcaggggttgacaaacattttctgtaaaagccggataatagtataatctctgtatgaattactcagctctgccatcatagtgcaaaagcagccacagacaatatctaaatgaataagtatggctgtgttcaataaaact

SEQ ID NO: 784400 - DNA, 573 bp, Homo sapiens
tcttgctttctaactgaaactttgtcaccctttgactaaaatctcttcacccctgtcacccccatcccctagcccagtctctggcaactgccattctaatctcttctctgagttcaatttattaaaattttacatataaatgagatcacgcagtatttgtctttctgtgcctggcttatttcacttaatataatgtcttccaggttcatccatgttgtcacaaatgacaggatttctttyttttttaagactgaatagcatttcattatgtgtgtgtgtgtaagtgtgtgtatgtgtatgaatgtgtttatcccacattttctatatccattgatcagtttggttttttccatatcttgattattatgaataatgcaatgaaaatggtagtgcagacatctttttgacatactgattttacttccttaggatatatatccagaagtggtattgctggatcatgtggtagttctgcttttaatttttttaggaaacttcatattgttttccatatttatattaatttacattcccaacaacagtgtacaagggttcccttttctccatatcctt

SEQ ID NO: 784401 - DNA, 597 bp, Homo sapiens
aaatctctttaagtggtaatagactgcttaaatcaagttgataacagcttattgtctatttataacatatgtagaagtcaaacgtatgacaacaaaatattgcaacggccaggaactatgtggtttttattctatgtgaggtggtataatatcatttaaagtttttttttttgaaaagaggattaaagaaaaaattagacatgtgataagataaaatatatggttttgggttttttttatttgtttgtatttttagatacggggtcttactctgttgctcaggctacartgctatggcacaatcatggctcactgtagccttgacctcctgggtgcaagcaggtctcctgcctcagtctccaagtagctgagaatacaggagcatgccagcatacccagcaattttttttttttttttggagagatgggatctcgctatgttgcgcaggctagtctcaaactcctggcctcaagcagttctcccaccttggcctcccacagtgctgggattacaggcatgagtcgccatgcctagcttataactctttaaaaacataacaaaaagctataatgagtaggccaacagaggaaatgaat

SEQ ID NO: 784402 - DNA, 583 bp, Homo sapiens
aatagaagagtgagtctacatagattttaccattatcctttaaaaataaataaaacaaacctaaataaaaactaaaaagcaccacacaagtggttttacctaagtttcaaagagtagtctttgaccactgtggtgtaacttggaagtcataagttaaaaatactgataaaaattatggccccagttcctggcatctyttcattagtgccttattccttttggggttagtctgttcacttatagggtcctttattaaactgccaatagtcttggatgttagtcaaccttattaatataatgtcagagcttaaagggcctttcttatgtgtattttttttaatttcctgtacccctatgaaaattgcttttttactaattatgtacaaaataggacaaatgcagtggctcatacctataatcccagcactttggaaggctgaagcaggatgattgcttaagcccaggagtttgaggccagtctgggaaacacagtgagaccccatctccacaaaaaataaaaaaacttagctgggttcagtggcacgtgcatgtgatcccagctacatagtaggctgtggtgata

SEQ ID NO: 784403 - DNA, 647 bp, Homo sapiens
cagagaatgtgctgcaatacataaaatgtcagctatcgtgcttcttcaaaaatgatcaccaacgagggaggaggctaagtgcaataaagaaaaagaaggcatctcaaacggcaagtcctaaaaaagcatgcacttaaaataatagtaaaagttatgatttaaaaatataagtcaaagtatcacttactcttgcttcattctgctgaagtttttcctccatacttaaagctgtgggggagtctaagagggcaatctacaatataaaccataaaagaaatcagcaattaataaacagcaataatctaggtttttccctgaatatagtaaattatccaaaatttcacagaaactattaaaggtaaaaagcaatgtcctacaccctgccaaaaagtgttgaatatcaccaagtctttactccacrggatacatctctcataatattcaaaaccatggcatcccagtaaacctacatttgcaatacaaatcagcaaagcaaaagatgtaacatattgacattttaccaaaatcaaacacagtctaaatccctagatcttaaggattcgcctcttttaatatgtacagagtccaacattcaaaagggaccatgcctaagtcttgcttaaccgcaggcttctgagatttgctct

SEQ ID NO: 784404 - DNA, 658 bp, Homo sapiens
ggggtggggaaggagaacacaggaatggagaaaaaactggggattcctcctcttaaaggatcacttcaaaaaaatcattagcaataaaacataggggacttgtaaaagccaagcctacaggtacacagggcagggggattgagtagtcactttgtaaaccacttcaaacaccaggcagtcagcacaatattgtagccacgcaaaagggaaaccgatatgaagggtctcaagaatccattgatgtcaaggctggatttatcacaacactaacttcccagttccaagagaatcactgcagtttgagataaatttagccaggatgaaaatcacactgaggcagcattctaacaaagagaccagaaaaacccaagaagagagcttcctatgtgaatggagcarattctgaagtgctggcagtgcagtccagagcctgcatgtggaacacacttgggtatcaaatgtatcagacaaagcctaaccacgaaacagaaactgtttcagtatttaaatccaagggactttaatacaaagaattggttacttagctgaaggaacagctggaaagccattaggaacagtaaggccacccacaaactggcaacagcagagaccagcatcaccctaggcaggaggggcaaaggcatgagggagtatttcc

SEQ ID NO: 784405 - DNA, 658 bp, Homo sapiens
ggggtggggaaggagaacacaggaatggagaaaaaactggggattcctcctcttaaaggatcacttcaaaaaaatcattagcaataaaacataggggacttgtaaaagccaagcctacaggtacacagggcagggggattgagtagtcactttgtaaaccacttcaaacaccaggcagtcagcacaatattgtagccacgcaaaagggaaaccgatatgaagggtctcaagaatccattgatgtcaaggctggatttatcacaacactaacttcccagttccaagagaatcactgcagtttgagataaatttagccaggatgaaaatcacactgaggcagcattctaacaaagagaccagaaaaacccaagaagagagcttcctatgtgaatggagcagattctgaagtgctggcagtgcagtccaragcctgcatgtggaacacacttgggtatcaaatgtatcagacaaagcctaaccacgaaacagaaactgtttcagtatttaaatccaagggactttaatacaaagaattggttacttagctgaaggaacagctggaaagccattaggaacagtaaggccacccacaaactggcaacagcagagaccagcatcaccctaggcaggaggggcaaaggcatgagggagtatttcc

SEQ ID NO: 784406 - DNA, 521 bp, Homo sapiens
actattctgagggtctaccacattcctcagtttctcaaagagttccatcaccccaaaagataggaatccctgctctgactcttaatactcaaaatatgctccagagaccagcaacatcagtggctccagggaagcttgacagaaatgaaggttctcagkccccacctaaaacctacagaataggaacctgcattttaacaactgtaaatgattctgatgaacgttaaaatttaaaaagcactgctctgatgctgtacttaatatgacatagtaatagatgggtcttaggtttacccttatgaaataaactacttcttacactggaaaactcactaacctttgttctttgacttttaaattttatttttaaaatcacatgacagaatatgaatggatataccataagtcagctaatactgtctccattctatgctcttaagttgtaagtggcttctgaccaagagcaataactgctgacataatctgatgagagatgtcatgtgaatgtcatgacactcagg

SEQ ID NO: 784407 - DNA, 529 bp, Homo sapiens
ttactatctacacagcagaacttagaactcagtgactagtagactttgtctattcattatttagttatgtaagattcttctccacattcatagcaacagtggtccacctgcagcaaccgctaccaagacgctggctacagygggggaggtgcagctgggctgcatgctccacagagccagcaggagccaggagcagacaggagcagacaggagcagacaggagcccaaagcaggaaggagtcctgcactgtcgcagcccagccaggtgtgcgcacacttagggaagcactgacatgccagtccacagccacttcagccccctccagacttttagcactgatgagcatgggagggaggctgaggtggggctgagggcagctcagcgccggcctgcaggcaccccttggcatgaacagcctgggcaccatgaacagcagcaggagacaggcaggctcctgggtagaaagaaggaggtgggtcctgggtgaagccccagcttcaaactgaggaggacatgaagcctgcggac

SEQ ID NO: 784408 - DNA, 529 bp, Homo sapiens
ttactatctacacagcagaacttagaactcagtgactagtagactttgtctattcattatttagttatgtaagattcttctccacattcatagcaacagtggtccacctgcagcaaccgctaccaagacgctggctacagcgggggaggtgcagctgggctgcatgctccacagagccagcaggagccaggagcagacaggagcagacaggagcagacaggagcccaaagcaggaaggagtcctgcactgtcgcagcccagccaggtgtgcrcacacttagggaagcactgacatgccagtccacagccacttcagccccctccagacttttagcactgatgagcatgggagggaggctgaggtggggctgagggcagctcagcgccggcctgcaggcaccccttggcatgaacagcctgggcaccatgaacagcagcaggagacaggcaggctcctgggtagaaagaaggaggtgggtcctgggtgaagccccagcttcaaactgaggaggacatgaagcctgcggac

SEQ ID NO: 784409 - DNA, 530 bp, Homo sapiens
tgagtatccaagagcttaggatctggtgatttccagggaaatttaaggaactttcaagagcaattctgacttcaatggaccttctccccacccactgacttcagcctcctgcccaccatgagagggggtttgtacagccactcctcaggatatatgccaataaaccaacctcatggctcataactcaaacagggaatatgagcacacagctcaggaaactgccactgagttggggtgggttttatgcgcattactggaacaatgactgactgatrtaaaacgctaacagcagaaatacgggaaaggatacagatacaaacccatcaactaacaatcaatttctaaagaatgtcttcataaaaacatttgagtagctctcctcttcaccttagtcttcaggcactgtcttccaataagagtttaaggcagcccttaaaatatcaaacacgagcagaaaatgactacaggtttaaagcacaaatactagcagaaaagtctaaaacaggcttataagatcgagaaagggaaaa

SEQ ID NO: 784410 - DNA, 535 bp, Homo sapiens
tataattcgttaacccctgtgcttgctttgtaattaacattgattaacacaaacaagtacaaaataggccatcagcactttccagaagtgctgattacaattacattggtaattcaatacggtatagaagatggcaggatagtaacttgcactctgtttacataaggagacaaatgctaccatgcaaaactaagccaagaaacaaaatactttcctcatccaactcactgattaaacccttaccctgttaactcaccctatgactgtgtaaacctccagtaagattaytgaaggcacagctccaagtaacttgcttaattgcattcctgggacaaaagagggaagcgcttcaaagctgacagacagatggtagagtgtccagtcacagcaaagcaggccccgaggctcatgacagacaactccagggctgagatctcatttgtagctctgggataaagtccagggtttgatggcagcaggctgaagtgtaaagatgctcaacaatgcgcaccccagagacactgaatctgaaaaa

SEQ ID NO: 784411 - DNA, 659 bp, Homo sapiens
agggctgttggatccacttctaagatgactcactgctggctggctgttaatgctgggttgaggccctggggccttggtttgtctccacattggcctctccattaggcctggacttcctcacaaaatggtggatgagttctaagggtaaacatcgcragagagaaaaccagacaagagagcaaaacttgccttttgtgacctagcctcagaaatcacatagtgtctattaattgaagcagtcccaaagtcccacctgggttcaaggggaggagatactgactacactgtccttgatgggagggtggtaagattctggaagagagatgggaccagaaatgttgttgcagccattttggggaagtgcaatctaccacaacgcatatgtatgtactcctaggcaatatgctatttaattttgcatgttttacgctttatagaaacatccatactgaatatgtttttctacaactttgttccctcaacatttatgagtcgcttatatttttggagttcatttatttttagaattgtataatatttcattgcaattatttgctacaatttagttctctgttattttggtgaatgtttgtgctctttctatatgtttccaaccctttttttctatatatttatgctttttgctattttgtacagct

SEQ ID NO: 784412 - DNA, 615 bp, Homo sapiens
cttatacaacataactgcacaattaaactgtatctgttggtctatatatgagtccaaagaaaataattacagatttctaagggctgtaaaatatagtaccataaacacattatgtatagattttcacatctttgcagccacaatagtgcatctataagtagaggttttttaaaaaaatatatatatatatagattacttctatctgccatttcgactagttatccagagagcttgaaggaaagttgaggatggtattctagtaatgttactrtaatatggagcaccctggcacatggtaggcactaactaaatacttgttgtatgaatgaaacaaaattaaataacttgtaggagttttctaaagaatagtattttgttttattgtagaaataacacaaggttctggatccttgtatgagtggcattctgagactcctgggtgactgaataaaaatgtttacatataagctctagaaacgaaagtgtttttatacattttcttactgcatatagtctgttttagacaataaaaattgaagttgtgtgttattctcccagcaagtcagcagttactctctgagacagaaaatagattttacggagccctcatttat

SEQ ID NO: 784413 - DNA, 644 bp, Homo sapiens
gggtatcacgtgtactaatccaagttggtttttaaaatgttttcatctgttcgtgttacacctctgctcagaaacattcagtgatgaattatgacataggattgggtctgtatcctttcatttagccattaataatccatacccaaactagttcacctgcctttcatcatatagcccaacaaattccaacacacttagctactcagtcttgtcagaacacgtacataccagtccctgcataatttgactttgcatatccatrgttcttgtttgtttggtgaaattttacccatacaaattcaagctaaattgtcattctttgttaaatcttccttacctctcttaggtacaattggtcactttgtcttcagagcgtctatagtgttttgttcagcacatgttatgctttaatattttagttactttttgtggagcttccttaagactgcaggctctgcactgcaggaaccagatgttctttgtttccctaacatgtaacacagtgcctggtgcatagtgatcactgtaaattttattcagttgagtgtatgaacaaatacagaatgatcactaagtaggccaaactggcagcctttgtgatgacctaggaaaccaaataggtatgtagtagaatttatgtgtct

SEQ ID NO: 784414 - DNA, 638 bp, Homo sapiens
gtaggttacaaaatataaactgatggatgtagaaggtcccagataaggaggaaattgatatgaaaccgctcctgacctctggtcttttagaatctgtattggtcataggcaacaaaaaggtgggagtgtctcatcctttaaggcagcttccactttgtcaataccttccttaggtcctaggtatgagtagagctgtaaaagagagcacacagaagctaggtcttcaaacatgaacaccttcagttgtcccctgtctaccttcatgcttttatctctgcccccttccctcttgcctcagaaggacaggcatttttctaccattcttaggctgatcatttcacccgactctcagaacatctttgcatcttaactttctcatctgtaaaatkgggataattcacacttcttagaattgggggataattaaatggtaagggttaaataaactttctggcataaagcaggtgttcaaaaaatgttaggtgattctcttttcctcttgacccccttctcctccagaggaaacttgctccattggttcttggggaaacacctcttccctgcatctcttcctatctctctggacaccctttcctggtctcttggaaggactcattatttgcctgtccttcaaatgt

SEQ ID NO: 784415 - DNA, 659 bp, Homo sapiens
gaagcattatagcaaatttttgaacctgaggagggaatttggggaacccccaatttatagctggtcagtcaggaatacaggagacctgagacttgtgattggcatctgaagtgggggtcagttttatggggctgatcccttaacctgtagggtttgtgctaattccaggtagttagtatcagaattgagttaaatggtaagatcctaattggtgtctgcagagaactaaagaagtacaagtacttagtttggaaaacctacacattttggtgtcagaagtattaagagcatcgaaaactagtttttcttttggtattcttaccaatttccacagaaattgargtcctgatggactctggatacttgagtagcatctttaactgtgtttgtgtgagtgagttctgagtttagagtttactgttaaataaatctggctcctaagcaaattaatgcaggaacagaaaaccaaataccacatgttctcatttataaatggagctaaacattgagtacacatggacacaaaggagggaacaacagaccctgggacctacttgagggtggaggataggaggagggtgagaatcagaaaactgtctatcaggtatgatgcccattacctgggtgatgaaataatctgtacaccaaacccccatgac

SEQ ID NO: 784416 - DNA, 559 bp, Homo sapiens
atattttaagaatgtcacctttgcttcactgctccctgttttcattttctgtgttgcaaaacatataaatactgtgcctcctgtacccatctggggacgccttctcagtgttccctgagtttgtttccaagctatagttcttaaacttgggtcagaataaaattaactttgatttctttaagtctatagtgccagttattttaaccttttgggaccacagatggcatagttggcaggattctagcagaattcatggacacccaggactcattctctgggactcagtacttagtaccagaatgaacctattgtgtttgaactgactctggaggagccactgggtmtacagggtgagtggcatggaatctggacctctctctttttctggtagaggtctatttcacttttttctgagatatttccagaatcagtaaaaggagtagtaaatcctgggtttgctaaattcttcctatgcttgttattattattctaaattgctaggaaggaagaaaggaaacaggtcaactaagcattgctgcaggttagagtggcggtttct

SEQ ID NO: 784417 - DNA, 559 bp, Homo sapiens
atattttaagaatgtcacctttgcttcactgctccctgttttcattttctgtgttgcaaaacatataaatactgtgcctcctgtacccatctggggacgccttctcagtgttccctgagtttgtttccaagctatagttcttaaacttgggtcagaataaaattaactttgatttctttaagtctatagtgccagttattttaaccttttgggaccacagatggcatagttggcaggattctagcagaattcatggacacccaggactcattctctgggactcagtacttagtaccagaatgaacctattgtgtttgaactgactctggaggagccactgggtatacagggtgagtggcatggaatctggacctctctctttttctggtagaggtctatttcactttwttctgagatatttccagaatcagtaaaaggagtagtaaatcctgggtttgctaaattcttcctatgcttgttattattattctaaattgctaggaaggaagaaaggaaacaggtcaactaagcattgctgcaggttagagtggcggtttct

SEQ ID NO: 784418 - DNA, 538 bp, Homo sapiens
tgtaatttggtctcaaagggcttcaccgtcaacagaagaacacttcaattgcaatagatcctgcaggggatgctcataaaggttggtcaccccacatttgaagcacctcactgcttcaacaggtgagcatctcctgagacggagaagattaactctggggtaagagcctgagaagtgaagttcataagcagcacacttttgaccctgaacacgattagttggttgcagacaaaggagaaggagggagtctctttatgtgcacaattggaaggagcyggctcaaaaacaaaaagagtggaatagttttttccaggggtatttagaagcttctaaaagagggaatgataaaattgcttccattcagaaggtgggccacaagattttggaaactgtttctctactgcaaaaattgtctgaagtttccactgtctctcactcctcctctgaccattccttcttctgatcctccagaacccttttattctttgctttcaaaactgctggcctagatattcctttactcccacttccataaccc

SEQ ID NO: 784419 - DNA, 625 bp, Homo sapiens
agtgaatttcctttcacagggctctgaagatgttttgtatggttcactaaacttagcatggggatttcagaattagaaaatggagataaattagaaagggctcatgaacagaaagatagataaaggactgtggagtttaccccttaggaaacataattgagtgaaaaatatggtttgactcaccactaatataagatacagcctctaagaatgtgataaatttgagtaacccagatccatggtatttaatgagtgtgtgttacaagcactaggcagtggataggcttttcatcccgtgggcacagcagtcctagctagacagtattgctggttgtacatatgccyttaggcttctgtgaaggcaaccagagattttaaggctagaccagagatgtctgagcctcagacaggagacagtctcttgaatagtgcaggggctgtttagaggcatcccagttagtgtagactcctagcaatgctcagagtacaacaaaccctccgcatcagcttattgacagcgaaagtgagaagccagagcaatgtctccaagagtgttgtgtttcccaatgtcagaagttgtcaagctgatatttattacattgtgaagactagagagctgtgtttt

SEQ ID NO: 784420 - DNA, 653 bp, Homo sapiens
agtttgtttttattgtcatgattgttctggacttttcacggtggttatattttattctgaatttttagtcaatagccattttccaagaaaacttaactaaaataattaaagaataaataatatttgggtgagtggatattctgggttcttttagactgaaaaaatgctgttttatattcagttagtagtctttggacctggatgtgtcttcttttgacatctgcttcactgcagtactgctactgagatgagtggtgcatcattaaccttcattgttaagcttctgtcataaggcgggttgagctgtgtcttccaacagatttagacaaaatcattaaacattaattatatgaatcttgtacccagataagacatcttaaggtacatgtcttgagtgttcaagtagctttacttgagttactgggaaaaaaagaatagagacacgtctgtaatttattcttccaatatatgcttagattgaaagtggctgtgtrgaagaaaaagttgagatagtctctgaattatatttttaaaagtcaaataatcaaattagcttacagaagctttattaacaattttacttcaacaataccggataatattttcccttcctcttggaataattttaaacacacctttcatttagaaatttc

SEQ ID NO: 784421 - DNA, 610 bp, Homo sapiens
aagttctttggattgagcgatatagaaattccaaggtccctttcagctagaaaattcaatgattctgaattcaatctccaagtaattcattttcatatttttttaacattcaataatgtcagaatgaatgatgcaaggaggacaaaattgaattgcagaatcatratttatattagccaaattatacaaggacattataaataaccttatctaagacagataaaagttttattttttaatgacttgtgtgtcaatatttgtaaatgctattaaataactttaaaaatgcctagtgacatcgagtaattattattttctagcttcagggcaatttgtgattagattagattagcattttttgatcagtaaacagcctctaagtatagttgacataaccttggcagccagtggaacaaatatttaaagaaaaacaattctaacagttttctattttgttcctgttagtactggtgctatctgatttagtgagacctaaagaaatgcctacagaaatgtaacctatgagaagccctttcccttatttatcaatcatgcttacaaaaaaaagatactgataaccacaataataattaacatttacagtgcagtt

SEQ ID NO: 784422 - DNA, 637 bp, Homo sapiens
aatctccaagtaattcattttcatatttttttaacattcaataatgtcagaatgaatgatgcaaggaggacaaaattgaattgcagaatcataatttatattagccaaattatacaaggacattataaataaccttatctaagacagataaaagttttattttttaatgacttgtgtgtcaatatttgtaaatgctattaaataactttaaaaatgcctagtgacatcgagtaattattattttctagcttcagggcaatttgtgattagattagattagcattttttgatcagtaaacagcctctaagtatagttgacrtaaccttggcagccagtggaacaaatatttaaagaaaaacaattctaacagttttctattttgttcctgttagtactggtgctatctgatttagtgagacctaaagaaatgcctacagaaatgtaacctatgagaagccctttcccttatttatcaatcatgcttacaaaaaaaagatactgataaccacaataataattaacatttacagtgcagttactatatggcagtcagctttctaggtgctttacatatttatttattttaatcctcttggcaagcctataaaatgctgctattattaccttattttacag

SEQ ID NO: 784423 - DNA, 594 bp, Homo sapiens
tgctcttaaatgcaggtttctgataactttggagattgtgacatcagaataaaggaaaaacgttcaggactcttgaaaagctaaaatatttgttaatattaagcaggacaggaattaacttcatgaactgaactaacaggagactgaaatgatctttttgactttttgcttaaaatgttactaatcttttattttgcttttcagagtaaaggaaacttttcttttgagctattaacagcttttaacaattaagtaaagtatactccacaaaatttgaagcatatttgtttctctctacytgattcttccaaatatctgaaactatttgtgagtattcttaatttatggcaatatagttatttgcataagtgcaataagaatctgttttattttgtaacagaacacaatttttaaaaaactggttattttaccaaggctttgattggaatgctatgctctctcttagggaatcaaacttgacttctggcaccaataaagcccttggaaaactggcctcatattttgtgtacacagtccctgtacagggtttctgatctgtggtaagtaaagaatgtcactttcttacaagccagg

SEQ ID NO: 784424 - DNA, 596 bp, Homo sapiens
gcaaggcaatggtgaaggctttagcctgagccatgagttatggtttgagtcccatctgtgccattaacttgctttgaccttggccaagtcacttcctctgtctgggccccaagttccccacttgtataatgaaggggttggactagatgacctttgagagttcaattagcttgatgttttcttggttctatgagcatgttacagtcactcagggcacactcacccaaaccscaagggcaggatggtactgtgtctttgtacatgtgacacctgcatccttgctgatgcttgcatccatgtccaaaagaatgctctgggtccacttaaacatccaataaagacaatgaaaatttccaagtgattttcctactagttcttcccatcctccactaaggacagcaatgctctgttagcctagggtcagccagcccaagcttggaggtaggaacttggagggaggaactggtcctgataggctttatcttaaaatgacaggtctctactatacactttggtttaagcaagatgctactgatcttgagtctagggatacagggttggtggcagaactgtgtctctgttactcctttctgaaa

SEQ ID NO: 784425 - DNA, 570 bp, Homo sapiens
ttgttttgttttgttttgtttttgagatgcactttcgctcttattgcccaggctggagtgcagtggcgcaatctcggctcactgcaacctctgcctcccgggttcaagcaattctcctgcctcagcctcccaagtagctgggattacagatgcccgccaccacacctgtctaattttttgtatttagtagagatggggtttcaccatgttggtcagctggtctccaactcctgatctcaggtggtccrccttcatcagcctcccaaagtgctgggattagaggcgcataccactgccactaagttttaggtgagtttgttacttagcgaagtataactggaatagccactagccctgtggctttgaattggacctttaactcctttgactcaaatgtgagacaatgacgtccactaacagggtatatatgtgacaatgcacatcgaagctgctggcatgcagtaggtgctcagcaaatcatggtttcttactcttccagaaggcccttcacatgtctcttggcctccccttaggggaatattggtctggactgccaagtcaaaaggaaag

SEQ ID NO: 784426 - DNA, 484 bp, Homo sapiens
gctgctgtgcccatgattcagtcactgtgcccctgagagggacccactggctattactgacatgtcaaaagcagggccaggagctgtgggttatccaaaaacacaaatttatgaaaatagccctccctattgagaaacattggctcaactaggcagagaaaagctctgcatcagtgccacctggtgagaactaaatgggagaaagatagctcatgtagctgctgtaaatgtattacycaggaatggcttggagattatttacaagatgctgagagatgcactgatcctatttcagcagcaccatggagaccagcagactggcttgggcccacggtttgggtctttgcttttcactcactttggccagaggaccaaaagtggtcatcgcctggattcttcctcaaagccctgaaaacagcagtgtgtcagtgtgtcagtggatttgctttggaggtctctatgagacagaagggtagagaggagg

SEQ ID NO: 784427 - DNA, 484 bp, Homo sapiens
gctgctgtgcccatgattcagtcactgtgcccctgagagggacccactggctattactgacatgtcaaaagcagggccaggagctgtgggttatccaaaaacacaaatttatgaaaatagccctccctattgagaaacattggctcaactaggcagagaaaagctctgcatcagtgccacctggtgagaactaaatgggagaaagatagctcatgtagctgctgtaaatgtattacccaggaayggcttggagattatttacaagatgctgagagatgcactgatcctatttcagcagcaccatggagaccagcagactggcttgggcccacggtttgggtctttgcttttcactcactttggccagaggaccaaaagtggtcatcgcctggattcttcctcaaagccctgaaaacagcagtgtgtcagtgtgtcagtggatttgctttggaggtctctatgagacagaagggtagagaggagg

SEQ ID NO: 784428 - DNA, 484 bp, Homo sapiens
gctgctgtgcccatgattcagtcactgtgcccctgagagggacccactggctattactgacatgtcaaaagcagggccaggagctgtgggttatccaaaaacacaaatttatgaaaatagccctccctattgagaaacattggctcaactaggcagagaaaagctctgcatcagtgccacctggtgagaactaaatgggagaaagatagctcatgtagctgctgtaaatgtattacccaggaatggcttggagattatttacaagatgctgagagatgcactgatcctatwtcagcagcaccatggagaccagcagactggcttgggcccacggtttgggtctttgcttttcactcactttggccagaggaccaaaagtggtcatcgcctggattcttcctcaaagccctgaaaacagcagtgtgtcagtgtgtcagtggatttgctttggaggtctctatgagacagaagggtagagaggagg

SEQ ID NO: 784429 - DNA, 730 bp, Homo sapiens
cccataccattttttttagatcatcaggtaagccttcagcagaggggcagtggcatgaacatttgaaaaagaaggagcagaactcatctctgtgtatgccgttggtatccacctcaccaggagtagggttgagaacaggagcttgggttctcagttgggccccaacctcacctcagtctcaggtgctcaccttgcagatgcccaccatccccacctggcagtgccatttatatttccaaagcaatctctgattagggtgagtccagggctcctgcaggctggagctcccttgctttcctcttacacagtggtcaggaataaagtgctcttccctcctgaaaagatgaggcccgtgtcggtggctttcatcccagctacttgtagaactcataaattagagcagcaattggctaactttttctgtaaaaagccagatagtaagtattttaggcttttcgagtcatagggtctctgttgcaatgcgtcaactctgccatagacaatttgtaacttaatagatrtggctgtgttccaatacattattatttataaaaataagtggcacgctgggtgtggctctccaactgtagtttgctaaaggctgaattagagcttgggacctgagaataattatattggctgtaattgtttattgagtgcatgttaaaatccagtttctgggtcccgtatccagaggttcagattcagtggctctgcggtgggatccatg

SEQ ID NO: 784430 - DNA, 566 bp, Homo sapiens
gctgcctgtgtctcagggagctatgacttttacaggtaagacggctcacttcttcaggttcagccagcatcctggaggatgctcctcagagacagcacatttattttgttcttgtctgtttggggttataaaggcataagccatgatgtattggattaaaaagtagttaacaatttttgcgtttcaagagacctggattttagtcatattcctagtttcagatctgttacttttccggtggcataggtaaagaaaaattggccaacatcttcctttttgttagagtgtataccatgtgattgtctttgktttttgtgacgagggcattttgtctttctggttctgtcaagcaggacatgagctgtcttagcacgtttcccctccgaaggcacccacagtctgtttggacatatggtacctctctgaggatcttttagcttgcacttgttccacaaccccaaagcagcattacttatctctggggaactggatgccaagctgtctgggtgtcccttgaggccctgctgggggtgattagtgatggctgattgctctccaaggccact

SEQ ID NO: 784431 - DNA, 609 bp, Homo sapiens
ggtgttaattattgtagcactcttgaaaattgtttggttattcttgtatgtttatgtttttcatattaactttaaaattgttttttccagttacttactaaaagactcatattgattttgattgaagcggcattaaacttattcttttagtttacggtagaattggcatgttaactatagtgattgtgactgtctactgmatctcttagtttattcctgtcatcttttaggtctcaagatagagttctatagctttctttatgtgggtcctgcacatttcttaagtccattcctgggcttcctgtattttgtgctgctattgtgagtgtaatttttcttttccattatgttttctaatatataattgatactatactaatgaatgaattcattagtttattctacaagtatgaatagagaagctatttatttattttgcatacttattttataacctgtgcctttattgaattttcttatcagtcttaatagtttttggcattactagacatataccaaagattgaattaactttgggccttcatttataaaagtaattgtggtggtcttaaaacatttatgaaaatctttaatactgcttttataaaa

SEQ ID NO: 784432 - DNA, 679 bp, Homo sapiens
gtggtggtcttaaaacatttatgaaaatctttaatactgcttttataaaaagaacaagtctatgtcctcttctcttgaatcactgctgacctcagtgaatcctttgtaacctgtagaatctaacaagtgatgagatgtaacttcaaaggtcaggtgggaaaaggttacttaggtttcaccaggatctcttgggacactcactgtgggtgaagatatgggctatgtaattagtctgactactctgggctgtctgtgctgaagaggccacatgaaggcactttaattgacagctccactgagtctcccagccaacagccagcatcaacagcagccatacatgtgagtcgtcctggacatccagcccagtcaaggcttaaagatgtctgtagtcctgacatctgtaaccacatgaaagacccttctcaagagctgccaractgaaccctttcagaattcctgacccacaaaattatgaaaaaataaaatatacttgctttgggataattggtcacacagcaacggtaactgtaacaatgatctcttagctattgattaatattgctagctgcattggcatcatccaaaaatactaaattacagcaaggatgtagacatccatgactttactagaaatacacttagattttctctgttatttaatatgcttgctgctgatatc

SEQ ID NO: 784433 - DNA, 525 bp, Homo sapiens
taattttggtggtttacttcctatgaccctttctcctccacatccaagagtcctgctcactaaggaaccatgaactacattaattaccctgagctccaggcttttatactgatacttttctgtccaacacttcaaggccaccagacactcattctcygaacattccaattaaggatcagagtccacatctcaccacccagagcagttctcagatatagaaggaagccccataatgatcaagcccctaaaactcttcccaatagattttctttcatcctgagcccttgcacttcccttgtatctgccccagtggaccacccctgagctcttagataggtgggatgctaggtttggaggctaccattgtgagtgttgatgcctccttttagagacctaacattcatgagtggatttcagttggtgaatgccctttgatgaccttttcccatctcttctggaggtgggcaggtgggatgcaaaagactggcttgatctctacaagacatctctatagtcagtgccatg

SEQ ID NO: 784434 - DNA, 656 bp, Homo sapiens
tttcctggttttggtattagggcgatcctggcttcatagaataatttagggaggattctctccttctctgttttggaatagtttcagtaggattggtaccaattctcttctttgaatgtctgattgaattcagctgtgagtccatgtgaatctgtgattttttatcgttggcagttttttaaaaattaccatttcaatctttctgctttttattggtctgttcacagtttctatttcttcctgatttattctaggagggttgtatatttccaggaatctgtcttctctargttttctagtttgtgcctgtgaatgtgttcatattagccttgaatgatattttatatttctgtaatatcagtggcattttcttccattttgtttctaattgaggttatttggatcctctcttttcttggttaatctcactaatggtctatcaattttatgtatcgtttcaaagaatcagcttcatgtttcatttatcttttgtatttttttgtttcaatttcatttacttctgctctctttgttatttcttttcttctgctgggtttgggtttggtttgttcttgtttctctagttccttgaggtgtgactttacattttgtatttgtgctctttcagactttttgatataggcatttaatgctat

SEQ ID NO: 784435 - DNA, 516 bp, Homo sapiens
atacaaaattcttgcctggaaattattttgtttgaggaggctaaagataagaccccagtcttttctggcttataggctgctgttaatctgataggttttcctttataggttacctgatgcttttgcctcacagctcttaagattctttcctttgtcctgactttagayaacctgatgactatgtgcctgggcgataatctttctgtgataaatttcccaggtggtctttgagcttcttgtatttggttgtgtagatctctagcgaggccagggaagttttccttgattattccctcaaatatgttttccaaacttttagatttttgttcttcctcaagaatgccaatcattcttaggtcatttaacataatcccaaatttcttggaggctttgtttatttattaaagttcttttttctttgtctttgtctgactgggttaattcgaaaggcttgttgtttgagctatgaagttctttcttctacttgttggatcctattgttgaaactttccagtg

SEQ ID NO: 784436 - DNA, 516 bp, Homo sapiens
atacaaaattcttgcctggaaattattttgtttgaggaggctaaagataagaccccagtcttttctggcttataggctgctgttaatctgataggttttcctttataggttacctgatgcttttgcctcacagctcttaagattctttcctttgtcctgactttagataacctgatgactatgtgcctgggcgataatctttctgtgataaatttcccaggtggtctttgagcttcttgtatttggttgtgtagatctctagcgaggccagggaagttttccttgattattccctcaaatatgttttccaaacttttagatttttgttcttcctcaagaatgccaatyattcttaggtcatttaacataatcccaaatttcttggaggctttgtttatttattaaagttcttttttctttgtctttgtctgactgggttaattcgaaaggcttgttgtttgagctatgaagttctttcttctacttgttggatcctattgttgaaactttccagtg

SEQ ID NO: 784437 - DNA, 648 bp, Homo sapiens
ggaagttttctcctgtctcttgtcttttatgaacccacttcctctctgttttcctaccaatttctagtcctctgcttttcagcctctttcttcatgtctgtgtttgtctggatgcaggagcacacactcagatccctgctatcctgactttgtgtacttttcttgagtgacctgacccaaaattagaacttcacccaccatgagcctccttccagtttatgtcactaacctaatgtagcatgacactcatccatttatttcactgccttcaaatcaactgtatgttttcccctagaagtttaaattcagtatgtctcaaacagaaaattttaccttctctcaatcacttaattatcacctttgcagkcacggatgccacaattctccacgttgcgtggttattctcgacttcttcatatccctacttctggcatgtgatttagtgattcctgtggcctctcatgtcattactgccatcaaatccatctgctgtcctcctcaccccatgttcctgccctggcctacgccttcattacttcccaccagaggcttaaaagtgctactggtcttgccttgagtcccgcctcctccagcccatccttcctacaggtgccccatccaaacacaaatctgaccgtgttactctcc

SEQ ID NO: 784438 - DNA, 648 bp, Homo sapiens
ggaagttttctcctgtctcttgtcttttatgaacccacttcctctctgttttcctaccaatttctagtcctctgcttttcagcctctttcttcatgtctgtgtttgtctggatgcaggagcacacactcagatccctgctatcctgactttgtgtacttttcttgagtgacctgacccaaaattagaacttcacccaccatgagcctccttccagtttatgtcactaacctaatgtagcatgacactcatccatttatttcactgccttcaaatcaactgtatgttttcccctagaagtttaaattcagtatgtctcaaacagaaaattttaccttctctcaatcacttaattatcacctttgcaggcacggatgccacaattctccacgttgcgtggttattctcgacttcttcatatccctacttctggcaygtgatttagtgattcctgtggcctctcatgtcattactgccatcaaatccatctgctgtcctcctcaccccatgttcctgccctggcctacgccttcattacttcccaccagaggcttaaaagtgctactggtcttgccttgagtcccgcctcctccagcccatccttcctacaggtgccccatccaaacacaaatctgaccgtgttactctcc

SEQ ID NO: 784439 - DNA, 585 bp, Homo sapiens
cactttattttcttaaataaagtggagtgaccttctagtatactatgtaatttacttaatttactagagttagtatttactgttcttctcccagctaagaggtatgcacagattttcatctgtttgttcggtattccaaagacctagatcagtgcctggaacacaataaatgttggatgacgaaggaaaatgattacatcatatcccataggtatgtgttgctataatttagtcactcttgataaggaactaaacaacaacaacaaaagatcccaacaaagaacaaagcacatcatgtagaatagaatgaggaaatcatacaaagcaggaccagatgcctcaactctaacatgtattaagactagamcttttaaaatgtaataaacaccaccttctctgtgagtgctgtccggtgttggtggtaccactggaatactggaaataaataacaataacagaattaaatgcaaaatatctgaaaaaataattagggtcaagcctcatgatttaggaaaagtcattcttttttgtgggggagaaagtctcactctatcacccaggctagagctcaatgtcgcgatctca

SEQ ID NO: 784440 - DNA, 507 bp, Homo sapiens
aaaacaaacattttatctaaattcatatagaacaaagggaggcatcttttactggcacctgttggtagcaagcgttagggagccttgttcttttggactagtgactgagagaaatgaaagcttgagataaagatgtgggtagatcctgagaagagacagaaaagaccagaggctgggrgccacaattgagagaagtgcccattccccaggaagcaacaaacggtggtgcttttactaagtgaaaacaatcagagcaaaataaaataaaagatgggagggaaaggaagataaaagaagaaaatggaaatcagaaaggaatgaactgtggtattgagggatacttggggtgacagttggtaagaaggcgcaattaattgaaatttagaccaggctgatataactggatcatacattcctgtgcctgtatccagaggatagtgcattcgagaaagtactaatagggaaatggaaccagacctgtataaaccttcgggcttcgactataat

SEQ ID NO: 784441 - DNA, 562 bp, Homo sapiens
ggagtagtagactgatttcatattgatagtctgggtcaatcaccccagccaacactaactccattcttagcctgttggcttagagataagagaagcccaaagtggccaggtggcaatcttaacttccagttggggggaatcactsttgtgtctcctggtggcagcattcctccctctggaactaagacctctaggccagcagaacgtaatgtcaggggaacaggaagcaaaaattttactagcaggtcaccaggggtgatgaagagtggtgctacttccacttttcccccttgattcctggacctgtgaatcctggctatggtggaaacataccatatattggatgttgattcatagcatacacaatcttctggaaaactttgccccagtcttgccaagtattgtcacctagttggcattgtaattgtgacttcaaaagaccatttcaccattctatcaatccagttgcttcaggataatagggaacatggtaagaccagtgaattccatgagcatgagcccactgctgcacttctttagctgtaaagtgagagccctggtc

SEQ ID NO: 784442 - DNA, 562 bp, Homo sapiens
ggagtagtagactgatttcatattgatagtctgggtcaatcaccccagccaacactaactccattcttagcctgttggcttagagataagagaagcccaaagtggccaggtggcaatcttaacttccagttggggggaatcactgttgtgtctcctggtggcagcattcctccctctggaactaagacctctaggccagcagaacgtaatgtcaggggaacaggaagcaaaaattttactagcaggtcaccaggggtgatgaagagtggtgctacttccacttttcccccttgattcctggacctgtgaatcctggctatggtggaaacataccatatattggatgytgattcatagcatacacaatcttctggaaaactttgccccagtcttgccaagtattgtcacctagttggcattgtaattgtgacttcaaaagaccatttcaccattctatcaatccagttgcttcaggataatagggaacatggtaagaccagtgaattccatgagcatgagcccactgctgcacttctttagctgtaaagtgagagccctggtc

SEQ ID NO: 784443 - DNA, 568 bp, Homo sapiens
tgaggctatggatggtagtcttggcagaagcattgcatgtaggataggcaaacccatatgcagagtaagtgtctattctggtgaggacaaattgctgccctttccatgatggaagaggtccaacataatcaacctgccaccaagtagctggctggtcaccccaggggaattgtgccatatcgagagcaycattctctctctgctgctggcaaattgggcactcagcagtggccgtagccaggtcagctttggtgagtggaagtccatgttgctgagcccatgtgtaacctccattcctgccaccatggccactttgttcatgagcccgttggggaataataggggtggctgatgaaaaaggctaagtgatatctgtagaactagtcatcctatccacttgataatataaatgttcctctgttgaagtcacccttcagtgagcattcacatgagattcaaatatcttcacagtttttgactactcagagaggtccatccacatgcctcttccccaaatttcattatcaccaatttaccaatcatgctgctttcaagtccctgaccatcc

SEQ ID NO: 784444 - DNA, 499 bp, Homo sapiens
taccagtcaggaagccactgtggtgattctaccagctgctgagtacatctatgccaattatgcattctggcactggggaaatgaccacaggatgaatccagggacacaatggacccactgtaagtcagacttgagttaaaactycattaattacctgaccttcataagcccttactttaactggaggactacagtgatgttttgggtcctctggaatcaacgtcggctcagtccagtagcccctgaaaagtatggtcattcccctttctccaatgcagttaccccggtgaaaggccagaggtctccttggggaaggatgggagaaagattaacagcataaattgttagtagtgtagcaaggtccttccttaaggggacccagcctccccttcattcaaggggttctgggtctgcaaacttgtttgagtctggaaattgattggggggctgtgattctctacttttacagttcaaattagtcttttgtccactcaatctg

SEQ ID NO: 784445 - DNA, 593 bp, Homo sapiens
agtgacttcatgttgtagcttgaaatgggccatggtggaagtatttactccctggaaataagcaaatgttacaaatcagagtccccccaacccatcctcctcccaagagctggttattaaacatctactagtataccactgtgcttatctgtccctgtttcctctctcaggtagtcactgtaatgccagtaatgatagtgccttatatttggatagtgggttccagtttttaaagtgtcaccacataaaggatstcatttgactctcccagcagccctaagagatagacaaggactttgttattcgcctcatatattagtttcctattgcgactgtaacaaattgccacatttttagtggcttaaatggacacaaacatatatcatcttagagttctgggaataagtctgaaatgggtctcaaggggctaaaaccaaggtactggcagggctgtactccttctggaggccctagggaagaatcagttccttgccttttccaggttacagaggccactgcattcctaaactcatgtttccatcaactttccatcctcaaagccagcaacagcatcattttgacttctgtttcca

SEQ ID NO: 784446 - DNA, 601 bp, Homo sapiens
tgctaatgacacatcctccaattttcttcccagagtccctcagatacctcagagtgggaatacaattacctaaagtctctcagaattagattttcttttcttttcttttgttttttcagacagagtcttgctctgtcacccaggctgtagtgcagtagcatgatctcggctcactgcaacctctgcctcccgggttcaagtgattctcttgcctaggcctcccgagtagctgagactacaggtgtgcaccaccatgcccagttaatttttatattttcagtagagacggagtttcaccatgttggccaggccgatctcaaactcctgacctcaagtgatgagcccgcctcagtctcccaagtgctagaattacaggtgtgggctactgyacccagctcagagctagattttctacgtattggttgagatataactaagggcttaccaagacacatggacacatttccttccacccactctttagccactcagcagtccgacccctttcttttctgggactgagcgtccaacctcacgactcatcacactttctattctgtctcccaggtcatcaccacctcccttcctcagatgaaataat

SEQ ID NO: 784447 - DNA, 625 bp, Homo sapiens
tatatattttttgtcaagctgcattaactctggttcttctctactctttgcgtcttcttagcgggaccttttttttcttctgtgagacagagtctctctctgtcacccaggctggagtgcagtggcaccatcttggctcactgcaagctccacccttagcgggatgtgttttctagtgaatttacttggctaactctctgagtgagtgtgactataagttaggtgaaagtatatttaagataaccaatgtcattgaaacaaaactagcaaacagtttttttgaactcataatcttatgaactcatattacttttcataatatgaaagatttgtttttacattttaatcttttttatttaattaaaatctgttcaaaacctttagagcagtagaggaccaagtttattccatactgtttcaatattgactcaaacttaaaattatagaatatatattgttaaagcaaaaaatttactgtttcckctaaaagaaagattcaagggggtgtggggagaggaatctgcagtgtttctctaggacctcaaggatctcaagttctcccggatgtgggaatccaggaatccatattgagctcttctcttcttttgttagaaaatttcccagc

SEQ ID NO: 784448 - DNA, 681 bp, Homo sapiens
aggaagagagaggatccaaataagctcaattagaaacgaaacaggagctattataatcaataccacagaaatacaaaagatattggaagctactatgaacatctttacacacataaactagaaaacttaaaggagatggataaattcctggaaatatacaaccctcctaggttaagccagaaagaattagaaactctaaacagaccaatagcaagcagcgagattgaaatgataataaaaaaaattgccaacaaaaaaagtccaggaccacacagattcacagctaaattgtatcagacattcaaagaaaaattgataccaatcctactgaaactattccacaagacagagaaagagggaatcctccctaaatcattttatgaagccagtatcaccctaataccaaaaccaggaaaggacataacaaaaaagaaaactacagcccaatatccctgataaatatagatgcaaaaatccttaacaaaatactagctaagtgaatccaacagcatatcaraaagataatcaactatgatcaggtgggtttcataccagggatgcagggatggtttaacattcacaagtcaataaatgtgatacaccacatgaatagaattaaaaacaaaaatcacatgagcatctcaatagatgcagaaaaagcatttgacaaaacctagcatc

SEQ ID NO: 784449 - DNA, 544 bp, Homo sapiens
gcaaaaatttgtgatgagcaaaatgttagataaaggcattgttgcttttctttttctgtgtattgtaacacaccatcacttagtggagaaacagctctcactttcctcctccccagatacaaccatttatgttgaattaaacttctagttctcctatacctgtgagcatcccccaggccccttggtatggagaaagcagtttatttgtcttagtaagattataaaagtggcaataaaatgtgaatgtaatgaacaaaatgcacattttgtggaccaactygttgttttagatctatttttgaaaactcattaggtatgtgcatgaggcaaaataattcaagtgcagttggatattaaatgaaaaagtgtcaggtccccttttctgccatattctcttctgtgtcttcattagtggaaaccattttgaccagttcttataattctaatgatttgctgatggctctaattcttggtttatcaacttcaagcagaatgtcttgacatcttggtatgaaagttaaagaatatgaatcatttgttctct

SEQ ID NO: 784450 - DNA, 629 bp, Homo sapiens
ggtgactgcatcatgcagagccatctgtaaaccaggcccttgtcttctcttcctctgtcagcttatcatagggaactccccatgaggccatcagtgcaggctgggggagagaaggcagggtggcaggagtggggaccatgggcatttgagctacttcctcatgtaaagtacttgttccctcaggacttgcttgagcctgatcatgtatataccacttccatttgatgatggaatgctgctgtgcacaacccactttatggctagatgggtcaaaaagcatctagttcatgataggcaatttaggtagcttggtgatttgatgacctgtagtcaaacatacagtttctaccaaagcacagtaacaggccaagagttgtctctcacaaggagagtagttatctgcaggagatgcagggccttgctccaaattcctagaggcctcccctgtgattgacctataggggcctgccaarggctccaaacaacatccctatctgccattgacacttcaagcaccattggatctgccaggtcatatggcccaagtggcagagcagcttgccaagcattctggacctgttgcagagccttctcttctggatcccactcaaaactggaagcctttcagg

SEQ ID NO: 784451 - DNA, 606 bp, Homo sapiens
acatgcgacattttagcttccacctcaaagtctaattctcagggaaaatgacctacaacatcagatgtctaatgatgttgaacaacttttcatgtgcttattgctaatatattttttgtgaagtgtcatcaaagtcttgtctttttttgaaaatgtcttgtttctcttttttagtacggtttcattgcagtttttaaaagatattctggaagcaattcctttgttatgtccatacgtattgtgaataatttcctttcttaactgtgagtagmtgttttaagttttaatgttcaatttatcagttttttattttatgattactttttgtgtgtgtgtgtcctctctaaaaaatctttgcccacctcaatgtggcgaagattttaccttaacattttttcataaaaaatgtatagtttttgtatgttgagcattggggtttgaggtacattgttttttattcatgttgcggcaccatttgttgaaatggcattctttttaaaattaaattgtcacaggactttgttgaaaatcaattgacttttcatgcataagtctattaatgaactctcttctgctccactgaactatttgtctcatcatattttc

SEQ ID NO: 784452 - DNA, 580 bp, Homo sapiens
ctgacctaatcttctacaaaacccctggtctccactctcccacagtcatgccttggggcccttgcactggatggaacaccttttccccagagtggctaactccctcagcttcttcattcattgctcaaatatcaccttttcaacaaggcttaaactgacagtgctgttgaaactgcagaccctccacggcactcctgatccccattctgagcctgtctgctctgggtttgctttttccatcgcacttagcacctactgccttggcrgggatctctagaaaacatagctcaaagggatgaattccagggaagcagaaaggagggaatagaggagtaaggagggaaaaacgaagagcaaatataaaggagttgtttccaaatgaccaccgctctgtaacaagctactggctgggtctcacaagacatcttcagaaagggactaatctgtctccactgtctgcctaggggaaggagagaaaacaacgtatcttcaatatcttactcccattggtcaaagttggccctgtgggtgttggttttctcatacttccaggtgatgagaacaagggttgtactcgatc

SEQ ID NO: 784453 - DNA, 613 bp, Homo sapiens
aattgggaatactaggatggatatgctatgtactactagcagacctgctagatgattattttccacttgaacatagttacacattatttacagaaacaataaagaatgtgctggtgaaatagccagcaaagaagtgaaggctcccctctgtaggccatggatgatagtaaaagaagccattagaggacttagcttgctgacagcaatgaagataataggrccctgaaatagaggccaggtggcagcatttctgttaatgtctctctaatcatttaagtttttctctattagaatcctcaggaaaagctcataagagcaatgttccatgagttgtgtgttgacagtttttgttgcttttacttaaaagtcagttttgctgaatataaaagcttttgtttatattttctttcctaggctatcttaaatgatattcctttttttattccatcataaaatttttctgtgaaaaagtctgatgttaccataattttcttttctttataaatcacaggatctttttgtctggatcccaaaaggattttctctttttctttaaagttcaatttttgtatacaaagtctatatttgtatatgtcttggtattggttatatt

SEQ ID NO: 784454 - DNA, 660 bp, Homo sapiens
acaggtgcacgccaccacacccggctaatttttgtatttttagtagagacacggtttcactatgttggccaggctggtctcaagctcctgacctcatgatctgcccaacttggcctcccaaagtgctgggattacaggtgtgagccaccaggcccggctggcctttttcaataaatggccatgtattcaatctgaaaggccttctagaaaatgcaaagaataatgtggggaccaccctcagcaggagtcttctccatgcctcatggacctttccttggcaacttcggtaaaggcgaaatcacagtgcagagcctcatttgaatctgaaaccagctgctttgtggggaaaaatggtgataaatttcttgacagccatgctatttgtcagccsataacatatttttcacagataaacttgagccaagtaaccaacagtagaactgcattctacaaatatttattattgcttctggatgaattttttgttgttgttttttttaattttgcttttttttttttttttttaaagaaagcatctgcaaggagcctattttggaggttggcttgagttgttttcatggctgagatccagggaggttcatagtaagggttgctcaagctgtagatagtagttttgtgggttatttgttgccactttta

SEQ ID NO: 784455 - DNA, 690 bp, Homo sapiens
taccattaccacaaaggtctttactaatagattatggacacatgtctttgtagtaaaacaagcatgggaacaagataccaaatttagaaaaattattatctctggggaggaggggaattggaagatgcactcagaarttttcgattgaaccttaaatattttatcttttgtgcgagctggtaggtacacaggagtttgttgtattattatttatacttttggtttacctataatatatcaaaataaaatagtttaatactacatttaatgtctatggataacccaaaacaacagacaaccctgagcatatctgcttggatctggaacatgccattttttaactgttttttatcaaagttatacaagcacatagtcaactagatcaaagtttatgaagtcaaatggtagtccccagcctccctgcccctgcatttctttctccccacagcaaccccttgcatttcctcttgctgattctttgggttccttgggtatttacttcctacctcttaaaatatttgctacatttttttccagttttaggaattatcaactaagttttcacagtaaaaggtgaagtttggctcttcccttgcccccatcccctgcccactctgccacatacattcttcccatcccttcaacctctcagtatacgtagatcacaactttgattagaacaatatttgg

SEQ ID NO: 784456 - DNA, 690 bp, Homo sapiens
taccattaccacaaaggtctttactaatagattatggacacatgtctttgtagtaaaacaagcatgggaacaagataccaaatttagaaaaattattatctctggggaggaggggaattggaagatgcactcagaagttttckattgaaccttaaatattttatcttttgtgcgagctggtaggtacacaggagtttgttgtattattatttatacttttggtttacctataatatatcaaaataaaatagtttaatactacatttaatgtctatggataacccaaaacaacagacaaccctgagcatatctgcttggatctggaacatgccattttttaactgttttttatcaaagttatacaagcacatagtcaactagatcaaagtttatgaagtcaaatggtagtccccagcctccctgcccctgcatttctttctccccacagcaaccccttgcatttcctcttgctgattctttgggttccttgggtatttacttcctacctcttaaaatatttgctacatttttttccagttttaggaattatcaactaagttttcacagtaaaaggtgaagtttggctcttcccttgcccccatcccctgcccactctgccacatacattcttcccatcccttcaacctctcagtatacgtagatcacaactttgattagaacaatatttgg

SEQ ID NO: 784457 - DNA, 701 bp, Homo sapiens
attagaacaatatttgggatgatgactattatgcaactcacagctgagttttatggtaagctctaattaattccttccctgcagaactttttgctttctctagatttaataattatcttttcccccattttcttcttttcctaactatgattaattcaacaaactcagtgccaattgtttacattttctctcaacatattcagatactccaggtaatctgtcaactatatcttctagaagacgcctctcctgaagttttctcacctgctactatctgactttttgtttgtttgtttatttttttctctgccaggtgcacagctctcatcacaggatctcccttcaccatcatcctgagaattctcacttctctcctgtattgggtctcttacttcctggatcctttgtcttcctcttgtttgattttctatctcacttaatggaacacattctgtggtaggttcctgagaaaaggtaaggcaagttgagaccttcaatatctgaraattggtttactctgcactgacccttgattgatagtttggcttggtatagatttccaggtataagttgcttacattgaaaaattttaaagcattactccattttttctcatttccagtattgctattgagaaatccaaagcctttttgcttcttgatcttttgtatatgaacagtttggttttctctgaaaatgca

SEQ ID NO: 784458 - DNA, 633 bp, Homo sapiens
atgataatctaaattctactccagtacagtaaaatttaaattttactccagttaaaacccaaattaatgcctcccacccaagtctccagttaacatctcatttttctgccttacaattctgctatagttcatctgatggaatatatttacatgttaaaatagaaatgaaagaaattccataggttctctttaaaaaaaaaaaagttttgttttaactcattaatgttttccatcttatttcttgctttccactggaaatttttgccctgagcaattttgacaaacaaagttggacagagcttactagcttatattattttttaataaaattaaaacagacaactttgtaggaattgcagatttagaaaattattatgacaattataatttactaaaytgacatatttcatctacaggtatattgaagaaacagaatatttgataaattataattgcttttattctctttcatgcagaatgtaatttataaaatttctaagattaatacaagtttataatccttttactagcaactatcttcttaaacagcacaaagttatttagatcagatttcataatctttcaattcctctatatagagggaattataaaaaatattgctgtgaagcaggt

SEQ ID NO: 784459 - DNA, 521 bp, Homo sapiens
accaaaaatacacaatagagaaagggtagtcttttaaaaaatggctctgggaaaaccagatacctgcatgcaaaaaaaaatgagattggacccttaccttacactatacacaaaaattaaccgaaaatagattaaataattaaatgtaacacctgaaacagttaaaatcctagaataaaacataggtggaaaaccttttgggaattggtcttggcaataatttattggatatgacaccaaaagcatagacaacaaaagcaaaaatagataactggtactaacatgtgtctgcacagcaaacaacaakgacaacaactaaaacctacaagaacagagcaaaaaggcaacctacaacatagaataaaacatgtgcaaaccaggtatctgatagttaatatccaaaatatataaggaatttcttcaacttaatagcaaaaaatcaactaacctaattttttaaatgggcaaaggatttcagtagacatttctcgaaagaacacataaaaatggtatatattata

SEQ ID NO: 784460 - DNA, 621 bp, Homo sapiens
attatacactccattaatttgtctttatgaatataattaaattttgaatttgtacctttgacattaaaatttttaagttaagtactataaacaatttatagaacttcaagtaaaattatcatcttgtgacttttcaaaaattacttttatataaccttgttttcacatattaatgtgagtcactattttcactttttcttatygtagttttaggtttactaatttatttgctcaactttcctgcttgcatctcatttcttccttttgaattcaatttctttctccctgaatcatagttttcagggatgctgtgtgagcagtagcctcactaagtctttattgaatagaatatgtttggtttactcttaatcttaattaacaatttaactgagtgcaggggtctaggttgacagctaatttatctttgcagctttaacattttgaatttgttattcttttatcttctggactgtattattatttttgctgttggttatttgcaaccagttaatttgtaactagtatgtcctttattagggctgtttttcatttttgtactctacatttcagtaaaattttataagatggttttattttttactttttctctatatatttcct

SEQ ID NO: 784461 - DNA, 547 bp, Homo sapiens
cagatcagagcctgtatttgggatccttaaagaaaagaaattccaaccaaaaatttcatatctcaccaacctaagcttcataagcaaagaagaaataaatttcttttttagacaagcaaatgctaaggaaatttgttaactcyagacctgccttactagaggtccttaagggagtgctaaatatggaaacgaaagatcgttaccaaccaccacaaaaacacatttaagtatatagcccacagacacatcaagcaaatatacaaccaagtttacacaacaaccagctcacaacataacaggatcaaatcctcacatatcaatattaaccttgaatgtaaatgggcgaaatgccctatttaaaagacccagagtggtaagttggataaagaagcaaaactcagctgaatgctatcttcaagagacccaactcacatgtaaaaatattcataggctctaagtaaagtaatggagatttattaagaaaatggaaaacaaaagagagcaagggttgtcattcttatttcacacaaaacagactttaaaccaa

SEQ ID NO: 784462 - DNA, 523 bp, Homo sapiens
gaatgctacattttctagggtttgacattttcagtgatcaagaattactatattttgtaaatgaaaataccactactaaaaactgaatgctgtaagtagaatgatgtcttttgtttccaaagtctatatactagtgtaatgcaaaaataattttaaaaatgagatattttgtggcaaagttatctgagggtaaatgtttcagctgccagcactggcagcaagtattcttggggcaaatgggaaaagagttaaaattcacatggaactaaaaaaaagagcytaaatagtcaatgcaatcctaagtaaaaagaacaaacctggaggcatcattctacctgacttcaaactatgctacagggctccagtggccaaaacagcatagtactggtacaaaaacagaaacatagaccagtgaaatggaatggagatcctagaaataaagcagcacacctacaactgtctgattttaaacaagactgacaaaaacatgcaatggggaaatgactccctattcaataaatgg

SEQ ID NO: 784463 - DNA, 523 bp, Homo sapiens
gaatgctacattttctagggtttgacattttcagtgatcaagaattactatattttgtaaatgaaaataccactactaaaaactgaatgctgtaagtagaatgatgtcttttgtttccaaagtctatatactagtgtaatgcaaaaataattttaaaaatgagatattttgtggcaaagttatctgagggtaaatgtttcagctgccagcactggcagcaagtattcttggggcaaatgggaaaagagttaaaattcacatggaactaaaaaaaagagcctaaatagtcaatgcaatcytaagtaaaaagaacaaacctggaggcatcattctacctgacttcaaactatgctacagggctccagtggccaaaacagcatagtactggtacaaaaacagaaacatagaccagtgaaatggaatggagatcctagaaataaagcagcacacctacaactgtctgattttaaacaagactgacaaaaacatgcaatggggaaatgactccctattcaataaatgg

SEQ ID NO: 784464 - DNA, 543 bp, Homo sapiens
atcattatgacttaaaaatatatgataaacattaaaattttaaaatatgttatttttgttatgttggtcaaattgtcccatatctgagcaatgggagcctattcacataggctcctaattttctttttttttttggcaatcatgtatttttatatttttctatatttcttatatgacaatatgtttcaaggatcatcttgtacattttctgttccagacccgaagtcagtcttttttctgagatctaactccttttttttccctctctttttgaaaataccatttagggatcacaatctgtgtacaagtggtgctttctactactgagttagtcattttttaaaacatatacaaagctcataaaaagtgtttaatytgttaacacaaactgttaggagttacaatataaactttgaagctatatcgaataagtgtaccaagtatataacttaaatatcctaagtctttgaacgtatgtgattttgtaaaaatttaccaaaaatctttgacaacaggaaacaaatattttggaattcaccgact

SEQ ID NO: 784465 - DNA, 666 bp, Homo sapiens
cacatttactcaggtatttaacaaagtatatgaaattggtattggcagaaaatacaggctatatgattaccatgtctaacacaaaagttatttaatgtgggagcaagaactttacatggggaatcaggagaccaataactaaagatggaactttcgacaagtcatttaattttactgaatatcaggtacctcttttgaaaaatgttgggactgaacaaacattaagtratttttcaaagtccatatcagatctatgattctgagtttcttttttttcagatggagtctcactctgtcgcccaggctggagtgcagtggcacgatcttggctcactgcaacctcctgggttcaagcaattatcatgcctcagcttcccaagtagctggggttacaggcgtgcaccaccacacccagctaattttcttttatttttagtagagacggagttttgccacgttggccaggctggtcttgaactcctggcctcaggtgatccacccacctcggcctcccaaagtgctgggattacaggtgtgagacaccatgcttggcctgattctgagtttctgcagaagaaaagtatatttccttctgtggaaggaaagtatacaagctgagaccataccatcattcatcagccctatttcccttagataaaatgtgtc

SEQ ID NO: 784466 - DNA, 666 bp, Homo sapiens
cacatttactcaggtatttaacaaagtatatgaaattggtattggcagaaaatacaggctatatgattaccatgtctaacacaaaagttatttaatgtgggagcaagaactttacatggggaatcaggagaccaataactaaagatggaactttcgacaagtcatttaattttactgaatatcaggtacctcttttgaaaaatgttgggactgaacaaacattaagtaatttttcaaagtccatatcagatctatgattctgagtttcttttttttcagatggagtctcactctgtcgcccaggctggagtgcagtggcacgatcttggctcactgcaacctcctgggttcaagcaattatcatgcctcagcytcccaagtagctggggttacaggcgtgcaccaccacacccagctaattttcttttatttttagtagagacggagttttgccacgttggccaggctggtcttgaactcctggcctcaggtgatccacccacctcggcctcccaaagtgctgggattacaggtgtgagacaccatgcttggcctgattctgagtttctgcagaagaaaagtatatttccttctgtggaaggaaagtatacaagctgagaccataccatcattcatcagccctatttcccttagataaaatgtgtc

SEQ ID NO: 784467 - DNA, 479 bp, Homo sapiens
aaataattaaaaagaatcaagcagaaattctagagttgaaaattgcaggccaggcgctgtggctcatgcctgtaatcctagcactttgggaggctgaggtgggcggatcacgaggtcaggagatcgagaccctcttggctaacacggtgaaaccccgtctctactaaaaatacaaaaaattagccgggcgtggtggcacacacctgtagtcccagctactcaggaggctgagacaggagaattgcttgaacctgggaggtggaggttgcagtgagccaagattgcacctctrcactatagcctgggtgacagagtgagagtctatctcaaaaaaaataaataaataaaaagaagaatgcaattaacatgctgaagaaagcctcttaaaagtaatctcttaaaagtagaattgatcaagcagaagaaagaattagtgagtttgaagacaagctatttgaaaatacagagtcagagaagaa

SEQ ID NO: 784468 - DNA, 620 bp, Homo sapiens
gtttttaatccctgatttgctggagctgattgtttccatcttttgcctagagaattgtcagtcttaaggaaggagaatggagaactgaagaaatttctagccattctaaaggtgaatgaaatagattttccttattattattttcyctcttacttttctcatctatctagctgactgtatagaatagtgtttcctaatctttttctcatcatggcacacacagaaattgatatttgtataacaagcacactatagtaaatggatgaggtctcagcagaccttgggggactgaaaggatcaatatatagcacacttgtaacccattcctgaacatcagtgagtcatgacctaccagttggaaagctctcttatagaagagacagctgttgcaacttaaacatttctcttcaagaaactcaaagatacctcaggacccttcctctgcatcacactctacttcctaaatagtttttcttcctaagaatgttctgtgtatttatataattttcctattgatcctactcctgtaattattctagcacattgtagtgtgtcattttcctttctctcaccagagactccgtatttccccacatatgttagtctatgggattccgtat

SEQ ID NO: 784469 - DNA, 620 bp, Homo sapiens
gtttttaatccctgatttgctggagctgattgtttccatcttttgcctagagaattgtcagtcttaaggaaggagaatggagaactgaagaaatttctagccattctaaaggtgaatgaaatagattttccttattattattttctctcttacttttctcatctatctagctgactgtatagaatagtgtttcctaatctttttctcatcatggcacacacagaaattgatatttgtataacaagcacactatagtaaatggatgaggtctcagcagaccttgggggactgaaaggatcaatatatagcacacttgtaacccattcctgaacatcagtgagtcatgacctaccagttggraagctctcttatagaagagacagctgttgcaacttaaacatttctcttcaagaaactcaaagatacctcaggacccttcctctgcatcacactctacttcctaaatagtttttcttcctaagaatgttctgtgtatttatataattttcctattgatcctactcctgtaattattctagcacattgtagtgtgtcattttcctttctctcaccagagactccgtatttccccacatatgttagtctatgggattccgtat

SEQ ID NO: 784470 - DNA, 660 bp, Homo sapiens
tgtggtggtattgtggtggacctttagtggacaccctgccaaacaactgaagtggcacttgtgctttagtccaattggctatccctttcaccctgccatttcatcaaccagagaaaggaaaaataagacatcgtaaagtgagagaagccccttataggtctttcaactctcacgtctatttagacacaattaaagtcccatgaggaataccagatcaatttaaagcccaaaatcaaatagctgcaggatttgagtcaatattttggtgagtgacaaaaatgtagattggataaactayatctattacaaccaacagcgatttattaactacactagagatgctgttaaaggaatagctgaacaattaggggcaatcagctagatggcttaggaaaataggatagccttagacacgatattagcagaaagaggattttgcatcatgattaaaactcaatgttataccttcatcccaaacagcaccgcccctaataaaagtataacaaaagcactgcaaggtctcactgctctatccaatgagtcagacagcaactcaggggtaaatgacccctttacaggatggctaaaaaaaaagtagttcggtaaatggaaaggaataatagcctcaattcttcccttgcagccataataggtgtactt

SEQ ID NO: 784471 - DNA, 577 bp, Homo sapiens
catttcatcaaccagagaaaggaaaaataagacatcgtaaagtgagagaagccccttataggtctttcaactctcacgtctatttagacacaattaaagtcccatgaggaataccagatcaatttaaagcccaaaatcaaatagctgcaggatttgagtcaatattttggtgagtgacaaaaatgtagattggataaactatatctattacarccaacagcgatttattaactacactagagatgctgttaaaggaatagctgaacaattaggggcaatcagctagatggcttaggaaaataggatagccttagacacgatattagcagaaagaggattttgcatcatgattaaaactcaatgttataccttcatcccaaacagcaccgcccctaataaaagtataacaaaagcactgcaaggtctcactgctctatccaatgagtcagacagcaactcaggggtaaatgacccctttacaggatggctaaaaaaaaagtagttcggtaaatggaaaggaataatagcctcaattcttcccttgcagccataataggtgtacttattcttgtcgggt

SEQ ID NO: 784472 - DNA, 515 bp, Homo sapiens
atgaaaaataagagataagcacatttttcttatttaagagaagtgaaaagctgtcgctaatggaccaagaaaatgaggaagtagaaaagaacaggtgggagaaactggaaacataaaccacaaagtccatgtctgtactataatttgtattttatacrttcttcgtggaactcttccacagatttcctataggaccctttcccaaatgttgatcttttttcttgatactctaaattttaatactaagcagtgcctctttctaaataagcaattattagaaaaaaaaattaggccgggcgcggtggctcaagcctgtaatcccagcactttgggaggccgaggcaggtggatcacctgaggctaagagttcgagaccagcctgaccaacatggcaaaaccctgtctctacgaaaaatacaaaaatagccaggtgtggtggtggatgcctgtaatccaagctactcgagagtctgaggcaggagaatcacttgaacccaggaggcggaggttgcagc

SEQ ID NO: 784473 - DNA, 519 bp, Homo sapiens
tttacttacagaagatgatttaaagaaagaatgatgaattatttgctttctaatcaaaggctaatttgcccttgctcctttgagatacagtttttatcatgtcaaagagtattttaaaaaataggtagtaaaagtcactttggggatctaaaagtagtttatttgctgagggagttagtgatgtaaaattttattttgactaaataattttcttgatgaaagaatgcaggatgctaaggagaaatattttatttaactacacaaatccaaaacattcctcacatgtcttttcaattgtgttttaaaaaatgattggtttcacagggatgtagtgtttatagagcrttaggaaaggagagaattagggcgtaattcagacaattgaatgcatactttctggagctacagtcctgaacctcttacataattctatccagtgtgtgagattttcaaaagatattgagggcatggtagggaaaagataatgtgccattacctgtaactgctaagtttgtagtt

SEQ ID NO: 784474 - DNA, 625 bp, Homo sapiens
gacttagtagctcaaacatatatctaattggagttctcaaaaaaggaaaatgaagacatttttatatatgttctttgaaaaaagctccaagaatttccatgaattaaagatatgtatcactgagaacattttgcatgataatctgagacaaagataagttcacactagacatatttagagtgaaactaaagaataacaacaataaatcaaaaatattaaatgcttccagggaaacattgtctaatagmattttctgcactaacaaacatgttttgtcttcattgctagtgtcactaaccacatatggctgttgggtactcaacatatgactagtgctactacttagaaattgagatttatttataaaaaatattagtttattgcagtttaaaatgaactaaaccagaaggcaattaaaaagaatctttaacaggttgaggagaaataacttacaaatttatgtgtgtgtgtgtgtgtgtgtgtgtgtgtgtgtgtgtgtgtgttacatattttaatactcaactaaactaccatccaatattggaggtaaaacaagaaactttctagatatttgctgtagaaaacatattgcattcatattcatacatatactctttagatttat

SEQ ID NO: 784475 - DNA, 625 bp, Homo sapiens
gacttagtagctcaaacatatatctaattggagttctcaaaaaaggaaaatgaagacatttttatatatgttctttgaaaaaagctccaagaatttccatgaattaaagatatgtatcactgagaacattttgcatgataatctgagacaaagataagttcacactagacatatttagagtgaaactaaagaataacaacaataaatcaaaaatattaaatgcttccagggaaacattgtctaatagcattttctgcactaacaaacatgttttgtcttcattgctagtgtcactaaccacatatggctgttgggtactcaacatatgactagtgctactacttagaaattgagatttatttataaaaaatattagtttattgcagtttaaaatgaactaaaccagaaggcaattaaaaagaatctttaacaggytgaggagaaataacttacaaatttatgtgtgtgtgtgtgtgtgtgtgtgtgtgtgtgtgtgtgtgtgttacatattttaatactcaactaaactaccatccaatattggaggtaaaacaagaaactttctagatatttgctgtagaaaacatattgcattcatattcatacatatactctttagatttat

SEQ ID NO: 784476 - DNA, 541 bp, Homo sapiens
aatatataagaagaaactcaactcatagcaaaaaacaaataacccaattaaaaaatgggcaaagtacctgaataaacatttctcaaaagaagacacacaagtggccaaaaggtttatgaaaaaatgctcaacaccactaatcatcatggaagtacatactaaaaccatgatgagatatcaattcacatctgttgggatgtctatgatcataaagacattggagaacaagtattggagagggcatggaaaaaagagaayacttgtccactcttggtgggaatataatttattaaggtcattatgaagaacagtatggaggcatcccactggattaaaaatagaactatcatatgattcagcaaccccctgctgagtatatatatatatccataggaattgaaattagtattccagagaaatatctgtacacccatgttcattgcagcattattcaaaagagccaagatttggagtcaacctaagtgttcaacagtggaagaatggataaaggtgatgtagtacatacatacaatgaaatact

SEQ ID NO: 784477 - DNA, 640 bp, Homo sapiens
ggaccacaatgcttcaaaaaccaccaactaccctaactcatcttacataaaatagataacccaaatagtcttgtaactattaaagaaattgaatttctagctaaaatctacccaaaaatataatccacaaagctcgatgttttcattggcaaattccaccaaacatttaaaaaagaaataacactaactctagaggatctcttccagacaatagaagggggtgcattttgtctcagtttttggagctcatattaccctgataccaaaaaaccaaagacaataccaaaaaagaaggagcaggaaaagraaagaaggaagaaagacaaaagaaagctaaagaccaatagccctcatgagcatagatgcaaaatattcaaagaatattgcaaattaaatccaggcaaatgtagaaagaataatacaccataaacaagggaagcatattctggaaatgcaaggatggtttgatatttaaaaatcaatggatgcgatccatcacatcagcagtctaagaaagaaaaaccacacattggcatcagttgatatagaaaagcctttgatgaaactcaacaaatgatcacgtctttttttaaaaccccggcaatctaggtatagggaaattcttaagtctactaaagag

SEQ ID NO: 784478 - DNA, 561 bp, Homo sapiens
gaaatggaccacaatgcttcaaaaaccaccaactaccctaactcatcttacataaaatagataacccaaatagtcttgtaactattaaagaaattgaatttctagctaaaatctacccaaaaatataatccacaaagctcgatgttttcattggcaaattccaccaaacatttaaaaaagaaataacactaactctagaggatctcttccagacaatagaagggggtgcattttgtctcagtttttggagctcatattaccctgataccaaaaaaccaaagacaataccaaaaaagaaggagcaggaaaagaaaagaaggaagaaagacaaaagaaagctaaagaccaatagccctcatgagcatagaygcaaaatattcaaagaatattgcaaattaaatccaggcaaatgtagaaagaataatacaccataaacaagggaagcatattctggaaatgcaaggatggtttgatatttaaaaatcaatggatgcgatccatcacatcagcagtctaagaaagaaaaaccacacattggcatcagttgatatagaaaagcct

SEQ ID NO: 784479 - DNA, 561 bp, Homo sapiens
gaaatggaccacaatgcttcaaaaaccaccaactaccctaactcatcttacataaaatagataacccaaatagtcttgtaactattaaagaaattgaatttctagctaaaatctacccaaaaatataatccacaaagctcgatgttttcattggcaaattccaccaaacatttaaaaaagaaataacactaactctagaggatctcttccagacaatagaagggggtgcattttgtctcagtttttggagctcatattaccctgataccaaaaaaccaaagacaataccaaaaaagaaggagcaggaaaagaaaagaaggaagaaagacaaaagaaagctaaagaccaatagccctcatgagcatagatrcaaaatattcaaagaatattgcaaattaaatccaggcaaatgtagaaagaataatacaccataaacaagggaagcatattctggaaatgcaaggatggtttgatatttaaaaatcaatggatgcgatccatcacatcagcagtctaagaaagaaaaaccacacattggcatcagttgatatagaaaagcct

SEQ ID NO: 784480 - DNA, 602 bp, Homo sapiens
ggctttttgaaagaattcaatgaagcataaaacaaatttaagtgctgaattttatggtttaagccagggcagatagtaaatattttaggctttgcagtttatatgatctctgctgcaactattcaactcttctgttgtaatgcaaaggcrgccaaagacaatatgtaaatatgtgagcatggctgtgttccaataaaactttatttataaaaataagcactgagtcagatttggcccacaggctatagttactgatccctgttttaagccatgatgtagcacccagtgaaagctagcataatcatgaacagatttataaacgatacagtgctttggttaagctttgatgaaaaaacagaactggaatatgcagcaagaacaatcataaaaaaggtgcaattaacaatttgtgtgagatattaaagagaccaggcccttaagagtttcaaatggagaattttggaaggggaaaatgcttgaagtagaactagtttgagtagggtggttttatggaaagctttgatagataaataagaagtttaggctaagacaatgcgaattaggcagacactgagagtttttcaactagaaaatgatggcat

SEQ ID NO: 784481 - DNA, 619 bp, Homo sapiens
gtaagctaagaacaggggaaaaaaaaatcctcaatctgataatggatatctctggcaaacttacagctaacattatacttatggggaaagactggatgctttccccttaagatcaagaacaaggtaagactatttgctctcaccacttttattcaacattatactgaaggtcytgacaactttaataaggcagcaaaataaacaaaaggcatctagatatcaaaagaagtaaaaccatctttgtcacagatgacacgattgcttatgtagaaatcctttaaaatctgcaaaacagccaattttagaaagaacacaggatcgaggtcaatattttaataatttctacatgacagaaacaaagaattagaaattaaaatttaaaagatattaattttttacaatactgtattagttctttattattgcataataaattaccttaaaatttgacagcttaaagcaataaacattgtattttttatctcacacagcttctgagagtcaggaatctgggagcagcttcactgggtggcctggcttagggtctcttgaggttgtagtccagatgtcagcgagggctgctgacatctgaaggcctgaccagggctggaggatccac

SEQ ID NO: 784482 - DNA, 619 bp, Homo sapiens
gtaagctaagaacaggggaaaaaaaaatcctcaatctgataatggatatctctggcaaacttacagctaacattatacttatggggaaagactggatgctttccccttaagatcaagaacaaggtaagactatttgctctcaccacttttattcaacattatactgaaggtcttgacaactttaataaggcagcaaaataaacaaaaggcatctagatatcaaaagaagtaaaaccrtctttgtcacagatgacacgattgcttatgtagaaatcctttaaaatctgcaaaacagccaattttagaaagaacacaggatcgaggtcaatattttaataatttctacatgacagaaacaaagaattagaaattaaaatttaaaagatattaattttttacaatactgtattagttctttattattgcataataaattaccttaaaatttgacagcttaaagcaataaacattgtattttttatctcacacagcttctgagagtcaggaatctgggagcagcttcactgggtggcctggcttagggtctcttgaggttgtagtccagatgtcagcgagggctgctgacatctgaaggcctgaccagggctggaggatccac

SEQ ID NO: 784483 - DNA, 572 bp, Homo sapiens
ttgtggaagggccaccaggagagcccagccaccgggacatgagaggaagtggtctgcattggtcccggagctcaactcagagagcactgttcgtggaatgagagccagcacctgttagtacagtgcctggcttgcttctatggagccctcactcacatcgtctgattttgattcttctataagtctgggaaataggcacagcagatgctgctataattgtttccccttaaagatatagaaaataacagccacaaactcaaagctgggtgctgtatgcactgctttatctgtgccatttcagtcctcacaatggctcaacacagggggactgttttcttccttatttgatcgataaaatgaggatcagagtctgagcaagttgcctgaggtcacacagctagcaagcarcagacctgtgaggtgcccaggcagcttggctccagagattcctctatgaaccactgtcccccaccaccttctgggctgaatgtctcacctagggggacatcattcatcactggaagtgctggaactcccatccagatctcctgcttccaaatcctatcttcttc

SEQ ID NO: 784484 - DNA, 588 bp, Homo sapiens
gaagtggagtgataccaagaaattgtctgttcaaatgttactaattcttgggaacttgcagagcaacatggcgcacgctgcctttattgctgcctggaagggagaaagacacttttttagtaacctgtgctggtgtcatcaaatgtggcctgagatcactgagggggatgttctccaaaatgtgcagagcataggtgagtttgccgcactgcctttgtgatccagatgcctgcgttagttcgcatgaaactgaaatggatacgatggcaatttctgggtgaagaatacatgaggaaagagacgcaattaragtgagcgatatgtttgtgtgttgttttggtttcaatcttgaatgcttggctttggcctttccccccatagatcctagaaggcacttgggcaattgtgtgaaaacagggagtccttggatcaaagactcagttccttactgactatttgtgggatgtttgggaagttacatcaccttcttgagcctcagtgtgtccttctgtaaaatgaagttgagaaagatataattattgataaggttaaagagataatgaatgtaaggcatagcctggtgcttag

SEQ ID NO: 784485 - DNA, 572 bp, Homo sapiens
aaacctcccttccctggccaacccccaaaccctctgctacttttactgcccttataattttgccttttcaagaattcagtacacatgaactcatacagaattttgccttttgagtcaggcctgttgcacttggcatgatgactttgagattttatctatgttgttatgtataagtagttttttttctgtttattgattaatagtgtcacactgctataaaagaattacccaagactgagtaatttagaaaggaaagaggtttaattgactcacagttcagcatggctggggggtcctcaggaaacttataatcatagtggaaggtgaaggagaagcaaggcaccttyttcacaaggcagcaggagggagaagggtcgcaggacgagctaccaaacacttataaaacagtcagatctcgtgagaactcactcaatatcatgagaacagcatgggggaaactgcctccatgatccaatcacctccacctggtatctcccttgacacatggggactatggggatcatggggattacaattcaaaatgagatttgggtggggacacagcaaaacca

SEQ ID NO: 784486 - DNA, 559 bp, Homo sapiens
caggggatccagagtatgttattgtctcactttgctgatttttctcatctcagtaaatgcagaggacagttgcagagccatgacaccctgttgacttgggaggtaagtctcatttcctctgagcttgggggcattcccattgaccacttaactgtctgcctttgtaaaatatgtatgggtggaggatgttgtctccaaaaccctaggattgcacggatggggaggcactgagctagtgggaataatattctggatgtgttggctgattcatcacttacacagagtcaaggaaacccccakgcctgggcggcaaatgatgtgtattaggagctaaagcaggacatgaccaggtactcatttccccttctgcctcccctaagaagcccactcttaagaattaaaccatgagcctgccgtaaagtaaacctagggaaactcaaaaatggagagtggattgcaaacatgatctcaggttaatgttccagggagttcagttagttatgacaaaaatgagagatgggaaaacgttagcctaagatttggagttcaaagcccaaca

SEQ ID NO: 784487 - DNA, 578 bp, Homo sapiens
actttgggaggttgaggcaggtggatcccttgaggtcaggagttcaagaacagcctggtcaacatggtgaaaccctgtctctactaaaatacaaaaattagccaggcatggtggtggccacctgtaatcccagctactmgggaggctgaggcaggagaatcacttgaacccaggaggtggaggtttcagtgagcatgacagcaccactatactcagcctgggcaacagagtgagactttgtctcaaaaaaaaatggatttcgtagggtcagcactatcagttattgctaatcctcatggcagcaatatagggaaggaggttttctatctccactttcctgatgaaggcactgaggctctcaaagggtaaatcgcttgctgatggttatcgagctggtatactccccaaaccctgagtgttttgccctatcagctgccattagctcaaaaacctctactgtgtctccattgcctgtttataccctaactgagaaacagggagaaataggggagttctcaaagcagcccaatgagacactacccagcatttatgtctcatgttggaagagaacatctgat

SEQ ID NO: 784488 - DNA, 646 bp, Homo sapiens
tcaggtgtcaaatttaaatccagaatttctttgttagttttctgctttgagggtctatctaacactgccagtgggatgttgaagtcccccattattaatgtgtggctgtctaaatcttttcataggtctagaagtacttgtatgaatctgggtgctccagtgttgggtgcaaatatacctaggataggtaagtcttgtggaattgaatccttcgtcattatgtaatgcccatctttgtccttattgctgttggtttaaagtctgttttatctgatacaagaatagcaacccctgctcttctatttactgtttgcatgataggtctttcttcatcactttacttcaggcctataggtgtcattacatgtgtgatgggcctcttgaagatagtagaaggttgggtcttgttttttgtttttttttaaataaaatattattttattttttaaataaaaaaawtaaaaagtggttcttgccactctgtgccttttaactgggtacatttagaccacttacattcaaggttaatattgatatgtgaggtttgatcctgtcatggtggtgtttgctgtttgctttgtagtcttgattgcgtatttgctttataggatctgtgaacctctgtatttatgtgttcttttatggt

SEQ ID NO: 784489 - DNA, 639 bp, Homo sapiens
tctgatgtgtttaatggcctgacgtagctaaagataagttgagtcaaagggggaaaattatttcctggtcatagtagatcattaaaataagttaacattttctataaacttggcatctgtgccagtatccatagaatggaagacagttgtagctccactcactctcctccttagtctttgctttattcaaagaagttatctttgttttttatccaaaaggtcttgtttcaggaatggatgagtgttttcacacatatacaccaagttgacaggcacatatggtattttactgaatttaaaaataagaactcagcaaggtcacacaccataatgaatgagctctgattttcatgtcgttctaggaaggttttaatttgaaccaaayttaaagacgtgtagaaagcatgtgtgctttcaataacctattgatttatgagcaagtcttattctcagggtctttcaacttggcagagttgaaaattctttagagggacctactgtctgggcatatggacagatgcttctcccagagagcctatgaaaggcttggaatagcctggagagtagaaaaaattgtgttcagtaggaagtgagacacagtctcacattgcttctcagccttttagcgaagatcaagtg

SEQ ID NO: 784490 - DNA, 531 bp, Homo sapiens
gaaaatttttatctggagatgatcaataataacagttttttcaattttattcactactaaatggataagggagtgtatgtcttcttcataactccatgcaaaaaccaatgtgtgtgaaatacagtaaaatgttgaacaacrtgggtttaaactgcaagaatccacttatacacagattttcttccacctctgccattcctgagatagcaagaccaacacttcctcttcctcctcctcctcagcctattcaacatgaagacgacagggatgaaaacatttatgatgatccatgtccccttaataaattgtaaatatattgtctctaccttatgattttcttaacaactttttcttttctctagcttagtttattgtaagactgtagtataaaataaatatacaaatatgtattaatcaactgttcatgttattggtaaggctttcagtcaacagtaggctattagtagttaagttttgggggagtcaaaagttaaacacagattactgactgcgcagggagtcggtacccct

SEQ ID NO: 784491 - DNA, 611 bp, Homo sapiens
ccttttctcaatctgttaaggggttctctgtcttcatctgagcaaatatagaccagtggttacaaatacggactttggattcagtcagatctaagttagactctcaactctaccattcaccagctccaggaccttgtggaaatttatttactcacatagcaaacattaatcgaaagctaccatgtgccaggcactttgactgacctccctaagtctcagtgttctgagaatgagaataacattccttgacagtagaggcattgtcaggacttttaatctgtcagaattaaatatgataatgtacgcaaaatgcctggcactcttccaggttcatagtaacaataaatgttagttatcactgtcattatcaccatcatcatcatcatcattatcattatcttgagtcgttgtrgagcctttagtgctgctaattaagttccccttcttaaaactctctcctcccttgacttcacagagatatcattgtactgtttttagtttattaatttttaaaattttgaaatttggtttataaattttttagttttagtttattaaactaacaaatagaactttttttcaaagagttagaggcatgatgcagagactcc

SEQ ID NO: 784492 - DNA, 384 bp, Homo sapiens
cagctaatttttgtgtttttggtacagacagggtttcaccatgttagccaggctggtcttgaactcctgacctcaggtgatccactcgcctcagcctcccaaagtgctgggattacaggcatgagccaccacgcccrgccagactttttattaaggctttgatctcattacttgttatttgtctgttaaggttttggatttcttcatgattcaatcttggtaggtagtctatatctaggaatttatccatttctactagattttccaatttattgacttatagttgctcatagtagcctgtaatgatcttttgaatttctccagtatctgttgtaatgtcacctttttcatttctaattttatccatcttctgttttttcttac

SEQ ID NO: 784493 - DNA, 384 bp, Homo sapiens
cagctaatttttgtgtttttggtacagacagggtttcaccatgttagccaggctggtcttgaactcctgacctcaggtgatccactcgcctcagcctcccaaagtgctgggattacaggcatgagccaccacgcccagccagactttttattaaggctttgatctcattacttgttatttgtctgttaaggttttggatttcttcatgrttcaatcttggtaggtagtctatatctaggaatttatccatttctactagattttccaatttattgacttatagttgctcatagtagcctgtaatgatcttttgaatttctccagtatctgttgtaatgtcacctttttcatttctaattttatccatcttctgttttttcttac

SEQ ID NO: 784494 - DNA, 641 bp, Homo sapiens
tccaattaggagattggtaagcaaaagatcttatggtgactgggttttcttttgcctgtctgtttagttatatatgtgttgtgtgtgtgatgcctataaaaagagctctaattaactggcttaaaggaagatagtgcttggatcaaaaaaatttttaaagggatgataaaagttgtggtgcctttcagttcatgtgactttaatctttgagaaataaaaacaacccttaaagaatattggtaaaaagcagatgtcattaaaatataaacaggtggactaaactatgcaggtcaggtgctaggtttgctaaatgttttaagtttataaactgctttttgggtttwaagaactatttgacttgcctgctccataaatggtaaggctagggacatgtagtactaaccgcatctttaattaagctggaaggagttaagccttggcagcacctagcacataatgaaaacaacttatcaggttttacattaaagtaaaaaatttcaaggagttaccattataacatataactcaaactactggaaataaatttacatgtgaggcatgtaagactaataagatgtgtttttagtaaaagattataaaaaaggcataaaaatgtaaattcttgcctagtgttaaagggt

SEQ ID NO: 784495 - DNA, 531 bp, Homo sapiens
actcttttttttttttttttaaattagaatgtctctttaaatgtgacctggaatacatggtgagatttttctaaggactgatgttaagggaaactcctctgaaattataaaaaagaaaaaaccagggatggtttatttatttttataacaggtaaagtattattaatttttttataacttaagtttacattcatattttctgaaaatgtcttggtttctactgataccaataaatatctcaacattctacctttaataataaacaaaactattccattaaaattgttctgaaatcacatagttaattcctgactaatcccctactctagtgagttttctaatctttcctttattgaggagtaaaagaaaaacaaacgrtttaagcctaatgatatgcatatctaaaagaatgtgaaccaaagacgtaggataagggcaaactgtataataacaatccttgtctaagtggggacacagacgaaagagctaaaatctggcaccagtaagttagctgccattattttttataat

SEQ ID NO: 784496 - DNA, 617 bp, Homo sapiens
acagagttaaatgactcctgagttaatgctattagtgatcaaaccaataaataaattgagcattctttactcttggtttaaggttctatgttctaacacatgctgcctgtgaagttattatatgtcaggaattcatattcacaaaatgagtatgatgtaccctcttgggagccacatattcttttttcagaattagtctctgttcaggaattttcaatattattattattattttcagttagtttgttttcaaataacttttggcagtggaacaattaaagagaggttcagagtcacagaggagctcattcctaccctcctaggagtgcatcaaagttstggtgtcagcttgcaaaaacaattagattaagggaaatatttattaatgtattgatactggcaatatttttagaaggtaaaagccctaatattcatatttgtcacataaatattccccattgcttttcttcttttttttcaccaaaatatcatttttagctttataagctctagttcagcagcccaccagaaatggtaaaatacttactggctctgagaatgttctccttgctgctgcacctggactggacctgtagaaagagcataaactcagtaat

SEQ ID NO: 784497 - DNA, 591 bp, Homo sapiens
agttaccagaatggtggttaccaggaactgggcagggagttgggagatgttggtcaaaggatacaaaatttcagctagacaggaggaataagttccagagatctattgtacaacatggtgactatacttaataacaatgtatcatattcttgaaaattgctaagagcagattgtaagtgttctcaccacaagtaaatacgtgtaataatgcatttgttaattagytcagtttaatcattccacagtgtggacatatttcaaaactatttattggatgtgataaataagtaaattttatttgtcaatgaaaaacctaaaaataataaaatgtcttttaaagataaagaaatgtaaaatcagtaatctaaacatccatcttaagataagaaaggagcaatttaagcctaaagcaagcagaagaaaagaagtaataaaaattagagacaaaaatcaatagaatcaaaaacagaaaaacaatagagaaaatcagtgtaaccaaaagcacgttctttgagtcaataaaaatgataaacctctagcaaagctaaccaagaaaaagatgagagaagatataaattactaatatcagaa

SEQ ID NO: 784498 - DNA, 638 bp, Homo sapiens
ctggttgtgggtcggggggcctctttccgattcttcctgaagaaccctgcacagaggagacgggggactgggaggggcctgggtctccgagtgtgggcacggggagctgaggtcttgcagctcctgggtctggggcgccggggttctgtgagagccccagcttcgtcacgtacgacttcctctcctctaattgagggaattgcagaagccccggagggcggctggttcagagaccgaaacaaaggcaggatcaggaccctggatcagaatggggtccacgcgtgagtctctgtaattaacgctctggtgtcycaaattacgagaaaatatataaaacatgtaattgcttctgtattttggacactcattaggagaataataaatgttattatttattaatatggtaatgaatcatctcgcttttaaaattaaacattaaaccgctaacaaattaaatgtaaattattaggccccgagttgatggaaagagttccccggggaggggccgctgggctccttctttgcagaaatgagtgcgtcgccctttaactaggcgcggaggctgcgagcggtgcggggtgacctgaggacacccgaagacacgggcgactcgcggggacatcctgccccctgccggc

SEQ ID NO: 784499 - DNA, 466 bp, Homo sapiens
aaagaaacacaaactaagcctagagcaagcagaagaaagacaataaagattaaagaagaaactaatgaaatggagatagaaaatcaatagaaaaaatatcaacaaaaccaaaagttagttctttgaaaagattaataaaattggcaaattcttactcgactagccaaagaagggataaatttcaaattactaaaatcagaaatgaaagagagtgcatgactgttagccttagtagaagtaaaagaactrtaaaggaatactacaaaaaactatatgccaataaattagacacattggataaaattgaaatttttctaaaaagatgcagactaacaaaatagactacagaagaaatagaaaatctgactagacctataacaagttaggagatttaattagtcatgaaaaaatgtcaccaacaaggaaaagccaagacttaggtgacttcactggtgaattccaccaa

SEQ ID NO: 784500 - DNA, 573 bp, Homo sapiens
ctgcctttaggcccagtcaaaaaaaattggactgggatattaacaaccaactttccctggtgctttcctgagtcaacctctgcagccggggctggctcagatgcctgccttggggccctctggggcagcgtgtggagtcagggccatctgtgatctcctcagcaggttccatcctgaccctggagagccagctgacttgtggaaacagcaggatgccattctgagccaagcccagtgggtaggtacacagggccaacccaggtcacccatcaagtgaccacagagcaatgacacccatctgccccatactgtcactcgcttagagaaagttccagaagaggggctccaagcatgtgtcccrtgataaagaggcggcctctgcgagggttaatttcagtgtcaacttggcggggccacagcgcccagatatttgaccagacatcactctgggtgtttctgtgaggggcttggggatgagactcacattggaatcagtgggccaggtaaagcagtttcccctccctaatatgggtgggcctcatccaatcagttgacagcctgaataggacaaag

SEQ ID NO: 784501 - DNA, 573 bp, Homo sapiens
ctgcctttaggcccagtcaaaaaaaattggactgggatattaacaaccaactttccctggtgctttcctgagtcaacctctgcagccggggctggctcagatgcctgccttggggccctctggggcagcgtgtggagtcagggccatctgtgatctcctcagcaggttccatcctgaccctggagagccagctgacttgtggaaacagcaggatgccattctgagccaagcccagtgggtaggtacacagggccaacccaggtcacccatcaagtgaccacagagcaatgacacccatctgccccatactgtcactcgcttagagaaagttccagaagaggggctccaagcatgtgtcccgtgataaagaggcggcctctgcgagggttaatttcagtgtcaacttggyggggccacagcgcccagatatttgaccagacatcactctgggtgtttctgtgaggggcttggggatgagactcacattggaatcagtgggccaggtaaagcagtttcccctccctaatatgggtgggcctcatccaatcagttgacagcctgaataggacaaag

SEQ ID NO: 784502 - DNA, 544 bp, Homo sapiens
atcctacattgtatttagttggcatatccccttagtcttctacaatctatgacagttcttcagtattcctctctttcatgacttgaagatgctttcatggcttgatggtctgtcagatattttgtagagtgtctctcagttgggtttggtttgatattttctcacgactattcatggtcaygctttatcaagaatactactggagttttgtacccttctaagtgcatcaaactaggcagttaccttatttattactggtgatgtgagccttggtaacttggtaaagagagtatctgtcctattccttcactgtacagttactatttttctttttgtaattagtaactcttgggaaagatactttgagactgtgcaaatgtcctgtttgttaaacttttgcccactaattttagtatttggtgtttaacttgcctccagcaattattgctgtggaatttcaatgatttttctattttcctcatttcttctacatttgttaataggaattcttctttaatgaggtgttgttccttttctcccattt

SEQ ID NO: 784503 - DNA, 544 bp, Homo sapiens
atcctacattgtatttagttggcatatccccttagtcttctacaatctatgacagttcttcagtattcctctctttcatgacttgaagatgctttcatggcttgatggtctgtcagatattttgtagagtgtctctcagttgggtttggtttgatattttctcacgactattcatggtcacgctttatcaagaatactactggagttttgtacccttctaagtgcatcaaactaggcagttaccttatttattactggtgatgtgagccttggtaacttggtaaagakagtatctgtcctattccttcactgtacagttactatttttctttttgtaattagtaactcttgggaaagatactttgagactgtgcaaatgtcctgtttgttaaacttttgcccactaattttagtatttggtgtttaacttgcctccagcaattattgctgtggaatttcaatgatttttctattttcctcatttcttctacatttgttaataggaattcttctttaatgaggtgttgttccttttctcccattt

SEQ ID NO: 784504 - DNA, 609 bp, Homo sapiens
tgctttcgaagacttcaatttttccataccttagatgacttactattgccccatagtcactgcgaatctgtttattgttttccagtctcttttctctgtgtgctgtgtctcagatcacttatagaactatgtcttcaagttcactagtctttgaaccagctgtcaagcttatccagtgaaatttgcattttagacatagctctaccagttccacatagtttctttttatatcttccatttattttctcactatggttatcttttcatttaagtacttgaacatagttataataattgtttttaacattgttgcccggcatttccgttgttcgtatcatcctttggtctgtttctattgacggccttattccctggctgtggttcacattttctggctttttggcacatggattttgatcagatgctgaatgttgtgaatgtttcawtgttgagtgtctgtaatttgccatcctcttttaaggagctttggggtttgtcctgcttggcagtttagttacttccagttcagttacacactttctaggctcgtttttagctttataggacaggtctagaggatcctttgttctagagatagtttgggcccac

SEQ ID NO: 784505 - DNA, 585 bp, Homo sapiens
ctatctggtgcctgctgctccctctacccttgctgctgccccgacctgccccataccccagcccccattggggtcgacggtttcccagagatactcagccttttggtgctcctctctcctcctggtataccccatgcattaagcattgatcctcccatcttgtgtgcccccaagacatctaccactgttaacactaaaatggccttgcctgtctcacccaatttggctccgaactcattgaggaccacctyacacactccccagcacctcacacagttactggtacagagcaggctcccggggatgtttgctgaaggtctttttttcccttctgagctgctaaaacaacaggcattaaacagtcacctgggccacattgttgctgtgaaatgtccttctctgcagatcgtaagccccgtgacgtgatggcagaaaccgcgccctccttttgtgccctaatacctgggccagtgctctgggcctattagatgccaataaatgtttcttgaataaatgaattaaagacaatactgatacagacatcctgagagaaagccgaaaaggtctaaaaatgaaggcattcca

SEQ ID NO: 784506 - DNA, 560 bp, Homo sapiens
ttgttatagaatgcatgttaagaattgacagcaaaataaggatagtaaagaataacagccttggcttaattttaaaaagagttaactccagtgccttcagtgatgaaaataattatcttcagtgactatacagaatgaaaaagacttttattgtcttttgggccattctttacattacctgccatcatgcctctttactcaaatcaataaatgtttaccaaatgctctgaaggaaataccacactctattagagccaattgtaactatttaatgtgaattcaagtggcaatgtgtttaatgtgatattctcaccttcttcttcttcttctttttttttttttttaccgtcaggtgaaattgggtgmggatgcccccaattccagtgtggtgcatgtctccagtacagaaggaggtgacaacagtggcaatggtacccaggagaagatagctgagggagccacatgccaccttcttgactttgccagccctgagcgcccactagtggtcaactttggctcagccacttgacctcctttcacgagccagctgccagccttcc

SEQ ID NO: 784507 - DNA, 560 bp, Homo sapiens
ttgttatagaatgcatgttaagaattgacagcaaaataaggatagtaaagaataacagccttggcttaattttaaaaagagttaactccagtgccttcagtgatgaaaataattatcttcagtgactatacagaatgaaaaagacttttattgtcttttgggccattctttacattacctgccatcatgcctctttactcaaatcaataaatgtttaccaaatgctctgaaggaaataccacactctattagagccaattgtaactatttaatgtgaattcaagtggcaatgtgtttaatgtgatattctcaccttcttcttcttcttctttttttttttttttaccgtcaggtgaaattgggtgaggatgmccccaattccagtgtggtgcatgtctccagtacagaaggaggtgacaacagtggcaatggtacccaggagaagatagctgagggagccacatgccaccttcttgactttgccagccctgagcgcccactagtggtcaactttggctcagccacttgacctcctttcacgagccagctgccagccttcc

SEQ ID NO: 784508 - DNA, 532 bp, Homo sapiens
acagccttggcttaattttaaaaagagttaactccagtgccttcagtgatgaaaataattatcttcagtgactatacagaatgaaaaagacttttattgtcttttgggccattctttacattacctgccatcatgcctctttactcaaatcaataaatgtttaccaaatgctctgaaggaaataccacactctattagagccaattgtaactatttaatgtgaattcaagtggcaatgtgtttaatgtgatattctcaccttcttcttcttcttctttttttttttttttaccgtcaggtgaaattgggtgaggatgcccccaattccagtgtggtgcatgtctccagtrcagaaggaggtgacaacagtggcaatggtacccaggagaagatagctgagggagccacatgccaccttcttgactttgccagccctgagcgcccactagtggtcaactttggctcagccacttgacctcctttcacgagccagctgccagccttccgcaaactggtggaagagttctcctca

SEQ ID NO: 784509 - DNA, 508 bp, Homo sapiens
aactgtcttccaaagtagctgtaccattttgcattcccactggcaatggatcagaattcctgatgttccacatcctcactaacacttggtgttgtcaatgttctggattttggacactctgataggtatgaggtggtatcttttttttttttaattatttcacagtccattccttgtctgtatttgttcttatattcggtttggtttaktcttcatgtctgaaatgatttttactttttttaaaaagataaaatttttattttagaacaatttgagatgtacagagaaattaagaagatagtacagagagttcttataagccccataccaattttcccctattattaatgtattatgttaatttatacacttactatagctaatgggccaataatgatatggtattattatcaactaaagtccataatctatattctaatgtgctttttctgttccagaatccattccaggataccatattacaattaatttgcatttccttgataac

SEQ ID NO: 784510 - DNA, 508 bp, Homo sapiens
aactgtcttccaaagtagctgtaccattttgcattcccactggcaatggatcagaattcctgatgttccacatcctcactaacacttggtgttgtcaatgttctggattttggacactctgataggtatgaggtggtatcttttttttttttaattatttcacagtccattccttgtctgtatttgttcttatattcggtttggtttagtcttcatgtctgaaatgatttttactttttttaaaaagataaaatttttattttagaacaatttgagatgtacakagaaattaagaagatagtacagagagttcttataagccccataccaattttcccctattattaatgtattatgttaatttatacacttactatagctaatgggccaataatgatatggtattattatcaactaaagtccataatctatattctaatgtgctttttctgttccagaatccattccaggataccatattacaattaatttgcatttccttgataac

SEQ ID NO: 784511 - DNA, 508 bp, Homo sapiens
aactgtcttccaaagtagctgtaccattttgcattcccactggcaatggatcagaattcctgatgttccacatcctcactaacacttggtgttgtcaatgttctggattttggacactctgataggtatgaggtggtatcttttttttttttaattatttcacagtccattccttgtctgtatttgttcttatattcggtttggtttagtcttcatgtctgaaatgatttttactttttttaaaaagataaaatttttattttagaacaatttgagatgtacagasaaattaagaagatagtacagagagttcttataagccccataccaattttcccctattattaatgtattatgttaatttatacacttactatagctaatgggccaataatgatatggtattattatcaactaaagtccataatctatattctaatgtgctttttctgttccagaatccattccaggataccatattacaattaatttgcatttccttgataac

SEQ ID NO: 784512 - DNA, 508 bp, Homo sapiens
aactgtcttccaaagtagctgtaccattttgcattcccactggcaatggatcagaattcctgatgttccacatcctcactaacacttggtgttgtcaatgttctggattttggacactctgataggtatgaggtggtatcttttttttttttaattatttcacagtccattccttgtctgtatttgttcttatattcggtttggtttagtcttcatgtctgaaatgatttttactttttttaaaaagataaaatttttattttagaacaatttgagatgtacagagaaattaagaagatagtacagagagttcttataasccccataccaattttcccctattattaatgtattatgttaatttatacacttactatagctaatgggccaataatgatatggtattattatcaactaaagtccataatctatattctaatgtgctttttctgttccagaatccattccaggataccatattacaattaatttgcatttccttgataac

SEQ ID NO: 784513 - DNA, 588 bp, Homo sapiens
gcctctcaaagcagataaatgaaaatcagtgaaaaaatgcttatcctgaaatgttaggtgggaaaaaaagcaggacaaaaaattgtattgtaactacactacagtttatatttctcaataaatcaagaaatgaagtcctgtatgccttaggaaaactggaaaggaattaaccaaaataacagtacttgtgttagggtaacaagattatttcccttcttctttatatttctctgtgtcttgaagtagttaaatgctttataattttwaaaaaaaaattataactccaaagactatgtagaaacatgtaaatacgtttgtaacataatgatatatttttaaaaaaagaacataaaataggctgtctgttacatttgtggctacatacatagctaaaaaaagaactgtctttttaacactccatgtatgaaaggaacaatgctacttccaatggacattcccgaattaaccctcagccttcatttcctccccacctgtttgccctcactatcccatcttcaccccatcctacccaagctatccatcttcagctgagattccacctttccctgctacctctctcccaacttc

SEQ ID NO: 784514 - DNA, 583 bp, Homo sapiens
aaactaaatatgatcactgggtataaattttattcaaagataagcagtctgaaaataccatatcagtctatacactttggaagggttagtaaaataaaatccatggaatctagtcttctgtactttaattagcagaaagggatcagaaaatctgggctttagtcgtctttttatggcaggaataagacacctaatctttctattcacctatttgaagttaccactgaaagatgctgaaagaaggggaaatgatctttttcccctctgggaaattagtatattttacctatctccttgggctaaaagtaacttggctgcttggaaagccaagaatctttaagcttttatagtcaagggccaatgttactttgtacaaacaccagcwctgtttacaaagagttgaccccaagaaatttaaacagtgttagtgtttaaaagcatctggcttctagccaaccaggtgataagaaatggcacctgagaaagaaaaagcatgctcttaatattccattttcagggaagttgttttgagtatttaactgccaagtcatcagccaccccatttggaatgctgacacagcct

SEQ ID NO: 784515 - DNA, 622 bp, Homo sapiens
ctaaaatttaaagtataataaaaaaaaattaaaaaaaaaaaaagaaatacttaaattccattatcaagttatcttttaaatttgtgatacaatagtaaatatgtctttgtactatctgattaaataaaaagatatagtggccggtttaataactactatwgtttcaaagtagtgatgagcataaatgacattttgagttatctgtgacaactataatgtgatatgaaattatctgtaatatttattggtgacaaagacacatatactgcattatggctactggctacactcataattagacaaaccactaaaattcagttagaagttactgaaaataaggatgcaatttttacccttagagttcatggacccctagagagatccctaagaaagtcatggaaatgcactgcgtagctcttctgtcgttggggtgcataggtaactgacagtcccaggcacccaccaccacccctggagccactaccacatttgtgcagtgtccacgcttcccctggactgctcccaggcaatgtctgagcacagcagggcacctgtgcagactcattcctgtgggacacaggagtcctcaagtgggccacttcggctccagaactcacaagca

SEQ ID NO: 784516 - DNA, 639 bp, Homo sapiens
catctgaggtcccatggcatgacattcaccttctaactgctggcttcaagtgaagcattttcccaatggcttttacctctgtgcgttgctctttcaactgggaaagcaaatgctgttagggcaacccaccctctagccctgcaggtgcagtgctgtggaagggggcagggacaaagagaccctcctgataggtccttaaacgctggagtagaacttctggctgctttcctcgcagttcaggccacaccagcctaaggaggaccacagtcctcaaagccctatccttacactactcaaattcatgccttcctctctctctacccattcgacctggtgatagtcagtggcaaaccaatcacccatgtgagtgactacattctcctataggaggaattgatcaagggggaacacaaggaaacaaagcacagacatgaagatctgtgacagttcccagagcaataggcctgaasgtaaggaagagctgagctgttgactcagtcttgccttatgttgaggtttgcctctttttttctgttttattgctcttggtttttttttttaattgtggtttaaaaaacacataacatttatgtaaaatttaccatcttcaccattctttagtgtgcaggtcaacaatgt

SEQ ID NO: 784517 - DNA, 630 bp, Homo sapiens
tatctctaaaacgttatccttatcccctgacaatccaccccccacccctttccaaagtttctctaccttgaaaccttccacacttcagctgatggcaactcaaacttagtcaaaccagaaaagatgcagtcattttttactcctmtctttcttacagataccatatccaatctatcagggtaccctattggctctaatttcaaatatatgcagactctgaccacctttctcttcttctagtgctacaactctggttcaagccaccatcatgtctcacctacgttatcacaataacatactaattaggtgttttcaccctgtcccagtacagcagtgagactgatctttgtgtaagataagtcacatcactcttctcccaaaactcttcaaatgctcatttcattcagaatacaagccaaaggattgacaatgacctctaaggccctcctttatctgcactcctggatcctcagtgacctcatctccaaccactttcccaattgttcactccacttcagccatacaggcctccctgctgtttctccagcatgctagttgtactctacctcagatctttgcgctagctattcccactgcccagaatgtgttcttctggatgtccatatggct

SEQ ID NO: 784518 - DNA, 592 bp, Homo sapiens
ctaattccatggttggtttccctggtaaccagattctttatgagcctacccaggagcccaccaagacttgcctcgctagaaaaaagatgttcctgtcacccaagaaactgcaagggatccaggagctcttcatcagatgctcttgtcactctggaaattactaagctctcgggaatcaggtcaaagaccaaatattaaacaaacgattctcttagtacccctatctacaaggatsctagaggcactgtctcaggtactcgagccagagactaaatgtatatttcttattattaatatgtcacagtttcacaggctgctagccaggaagccagagggacctccccagtgtaaaatttggattcagacaaggctgcagtctcagcttcttcactaacaatgcactgtggggcaatcgctttacctgtttgggtcttaatttcctcacctgtacatggcagtgtcctctgggcacagagacctactgcagctgtggcagtggaaatgggaggatggacatgggatccgctgaagacacagacctgggagcccctggcttctgactccatggagtgggtgaagggcacaccagtct

SEQ ID NO: 784519 - DNA, 656 bp, Homo sapiens
tcccctcattcttctgagccccaattcagtgattggtgcaatcacaggcttggctacagtgacccattcattgcaggcatggtgagtctctcaatccctctcatttccactagaatctaactgttgggatctatgacccagtcagcatagcaggcctgtggggagctctcaggttcaagcatatgccccccctaatctacaagaaattagctgcagaaaaccaaggaatagaacctggaaaaagagagggtttgctagagctgtccctttccctgtctctggaatgccaacaatagggaggctctttggtcttgtctctcaggagtgcccatgccattccaggaaaatgatggcccagctggtggtgtaaggcttggggggcagcgagtgggcatcgtggtgaaagcctcgggatcagggagctgcgtctgcaggcaggcctgctggccggaaacctgccaggaaaggaaggggctgtcycggggcggggccagggaggggtggagacagggccggctgtggtcagtgacaaatgctggctgcaatccagccagccctctgccctttctgagcccgagggactgccacctccactgtgtgcacactcagctacgggacacagtaagtaccgatgccgcaaagggaggtccccaggg

SEQ ID NO: 784520 - DNA, 566 bp, Homo sapiens
gagggcctgggcttcaacctcaccgagctgtctgagtccgatgtccataggggcttccagcacctcctgcacactctcaacctccccggccatgggctggaaacacgcgtgggcagtgctctgttcctgagccacaacctraagttccttgcaaaattcctgaatgacaccatggccgtctatgaggctaaactcttccacaccaacttctacgacactgtgggcacaatccagcttatcaacgaccacgtcaagaaggaaactcgagggaagattgtggatttggtcagtgagctcaagaaggacgtcttgatggtgctggtgaattacatttacttcaaaggtgagagtcagatcattggtatatgctaaatccacaccaccgcctccaacccactaatttgttgactggttaaatatatttttacaaaaatgtaagtaaaaacgttgtgtctgatagggttgagcaaccctcagggaatgcaatgtgagaatgttgtatgttgaagactctgtagtattgaggtttccattccttcctatctttagacatattttcttcataa

SEQ ID NO: 784521 - DNA, 602 bp, Homo sapiens
ggcccaaactgataaaccagcccggtcaggcagctggtattcgggagacgggcactgggctggattcagactcccctggctaagaacagagctggaatgaaaatggaccaacacgtttacagatatgacgatgatgccgatcggcacacggccaccaagccaaggacaatgttacccacctgccaagttctaccaaattctcctctccccattccaaaccacctcaaataaacctatttcccacaactggttatctgcacatttgagtcacctcccgacaatcaccttagcggccccaagcacgcagccagcacagtgtagctcagtgtccccttcagcatcrccacatgccaggcgactgttaccgtacatgtcccctcgagctattgcacctaaagctggactttattccaaatcttccagcccttactgccccgttctaagttcctccagaacactgtctttggtcgtttctggcctgtaagaccatgctccaatacaattcacaacgcaaaactcagagacaaagtccatcttattagaatggtttctctgtcccccaagcccacccaatgctaggacctccctcagctgctcagatc

SEQ ID NO: 784522 - DNA, 579 bp, Homo sapiens
tggtatgatcatagctcactgcagccttaaactcctgggctcaagggatccttccatctcagcctcacaagtagctgggagcacaggcaaactgcacagtgcccagacaatccttttatttatttattttttgtagagacagggtcttgtcatgttgatcgggttgtgttttttctactttaaaacraaaattatgttcagttaaacttccttaaaaaaatatagcgaagtttcttgaaattaatcttctcaaaattttgccaggtgcagtagctcacacctgtaatcccagcacttgaggccaaggctggcagattgcttgagcccagaacttcgagaccaaccttggcaatgtggccaaaccccatctctacaaaaaatacaaaaattagctgggcgtggtggcacatgcctgtagtcccagctactagagaggttgaggtgggacgatcgcttgatcacaccactgcacttcagtgctccagcctgggtgacagaggacagagtgcgaccctgtctttaaaaaaatatacacacacacacacacacacacacacacacacgatgaatagagggaaa

SEQ ID NO: 784523 - DNA, 579 bp, Homo sapiens
tggtatgatcatagctcactgcagccttaaactcctgggctcaagggatccttccatctcagcctcacaagtagctgggagcacaggcaaactgcacagtgcccagacaatccttttatttatttattttttgtagagacagggtcttgtcatgttgatcgggttgtgttttttctactttaaaacgaaaattatgttcagttaaacttccttaaaaaaatatagcgaagtttcttgaaattaatcttctcaaaattttgccaggtgcagtagctcacacctgtaatcccagcacttgaggccaaggckggcagattgcttgagcccagaacttcgagaccaaccttggcaatgtggccaaaccccatctctacaaaaaatacaaaaattagctgggcgtggtggcacatgcctgtagtcccagctactagagaggttgaggtgggacgatcgcttgatcacaccactgcacttcagtgctccagcctgggtgacagaggacagagtgcgaccctgtctttaaaaaaatatacacacacacacacacacacacacacacacacgatgaatagagggaaa

SEQ ID NO: 784524 - DNA, 677 bp, Homo sapiens
tgtaatagtatgtcccatcttatttagcagtttgcatgctcaaagaatagttaacctgcctgtatgcattcttagcatgcacaaatgtatatacatatatacacgaaaacataggcatatacatataaatatacaaatacatacagatgtatatataattgtaaaaaataaagcttttagtcctaaaaatcttggtatttgtatggctagataatttaaaactttctctttgaaacaagagtaatcatacatatttttaaagtagaactttaagatggaatacaggaataagtttttggtgctggaattatcagatatttaaaaattcataatttcatttattctgtttttaaaaatatctrtaataacattttgctttatatttcagaaatagaatgcttattaaaaagaaagacatcagtggattaaattacaaaataatcatttctgtctaaatgatctattttggtgtaagaggaggccaaagagagggattttaagtatgccataatcatattagtttttcctacttaacttcagaggtgttatgggagtagtttatatagtttagggtgacttcactcttatttctaatcattcaagtttttctaaagctggtttatatctcaaatgtgttgtaataattttaggaaaaagggaatatgttatacttgtat

SEQ ID NO: 784525 - DNA, 628 bp, Homo sapiens
atatatattgattataaaaacatagaaggtataagttttaacaggaaacttcaagtactatgagaaataatagcttttaaaattatgtgtttatataacattctctaaaatataaatttagaaatcccaataaacacattatttcagaggtatcatctaagatctgttttaggcaataaaatacttcaatayttcactgcaataatccttcctttttagctctatggtctatagaaaaaattgttaaaagaaatgtgacaagcttttaaaatgttattgaatttataactgtattttataataaagttttaatattatgtcctaatatgcaattagaagttttcacagagcctgaaagaaggcaaaacaataaatagcttttaattaaaattactgttcagaaactagcctaactattctagtatgtcagaacttattaaacaatagagaatacagaatacttcaagtatcaaaaatgaccaaagtagctattgttttcacagatacatgaaaaacatagtagtattataataaacacccatgaactaccacccaacctaggaactagaatggtaagtcaggccagacatggtggcccacgcctgtaatcccagcactttgggaggcc

SEQ ID NO: 784526 - DNA, 541 bp, Homo sapiens
agtattgatctcaatcaaaccaaacagccagctggcatgttttaagtaaaatcaaataaatatagtcttaaagtgtatgaaaaacaagaattttgaatgcaaaacgtaatttaatgatgaattcatgtgggcattaacaaacatgtaagttaaaacaaaattggcattctaaaacataagattctaaaagatttaattactattctacacaaatattactgaatgtatgaaattaaaactagaaacattcacattactaggaaattttaagaggagaaagaaatgtttcaaaacttttcataygaagatacacagaaaaaaacagccttattcatgtgttattctcatccaaataccttttcctctaatactttttttaaaactcagaaaactcaagtatttccttcaagaaactgacaaaaaggcaagagttacctgtacatgaggtaagtaagatctgtatgatgtgtgccatagtaaccagatggaaaatgtgaaggtctccagtgccaaggctgatccctgaaaaatcctgacactg

SEQ ID NO: 784527 - DNA, 593 bp, Homo sapiens
gccaccatgcctggctaattttttgtatttttagtagagacggggtttcactttgttagccaggatggtctcgatctcctgacttcgtgatccgcctgcctacggcctcccaaagtgctgagattacaggtgtgagccactgctcccagcccattacttgttattggtctattcaggttttctctttcttccttattcattcttttcttttctttttttttttttttttgagacggagtttcgctcttgttgcccaggctgaagtgtagtggcgcgatctygtctcgccgcaacctccgcctcccgtgctcaagcaattctcctgcctcagtctcccgagtagctgggattataggcatgcgccatcacaccaggctaatttttttgtatttttagtagagatggggtttctccatgttggtcaggctggtctcgaactcctgacctcaggaagcccaccttggcctcccaaagtgctgggattacaggcatgagccacggtgcccagccctgatttattcttagtagattgtatgtgtccaggaatttatccatttcctctagcttttctaatttgttagcatatagttctt

SEQ ID NO: 784528 - DNA, 598 bp, Homo sapiens
cacttttgttgcccaaagctggagtgcaatggcatgatctcggctcactgcaacctccacctcccaggttcaagcgattctcctgcttcagcctcccaagtagctaggattacaggcactacaggtgtgcaccaccacacccagctaatttttagtatttttagtagaaacagtgtttcaccatgttagccaggctggtctcgaactcctgacctcaggtgatcctcacaccttggcctcccaaagtgctgggattacagatgtgagctactgcacctagcctctttgaacttcatatttagatgtctagatctctagygagctcagggaagttttcctcaattatcatcacaaatatgtcttccaagaagatttctcttcttcgccaggaacaccaattattttaggtttggctgtttaacataatctcaaacttcttggaggctttgatcatttaaaagaaatgttttttctttgtctttgtctcattgggttactttgaaagccttttctttaagctctaaagttctttcttctacttgtttgattctattgtggaaactttccagtgcattttgtatttctctaagtgtgtctt

SEQ ID NO: 784529 - DNA, 648 bp, Homo sapiens
gggaggggtctacaatagcagccgttgagtggaggcccccacctagaggccaactggaagccagttcaaaaaatataaagctaatctgaatcgaactgtcattttcttaaaaataaagtacaacctcatacctccttcctctgtcacaaaacaaacaaacaaaaacaaaaaaggcctgctgtgtgcatcccttcccttccctccagtacaccacagcttgtttgcacataaatgataacatgatgggtaccgtaaggcagggacaggaaccaatacgatgggcatctgagaaamcagattgtgctggtgtttccacgttctaggtctatctaaataaatgcacaggttggagaaagggtttttagagcatgttagagggcaaatagccatgttgttctgcaggatatccatatgtatatatatatatatcgcaggaatacatatgaaggggggagctggcttacacactcagtatttaaacctttttttttttttttctggcccagtactggtgaacaggatcccatagctcttgggtcagtttgtgcctctctcttttctttcattatagaggactttcatctgatttgatttcatttatcacccatgggtagatcaataccaggttaacgactgcacctggttatt

SEQ ID NO: 784530 - DNA, 542 bp, Homo sapiens
ctattctgattggtgtaagatggtatctcattgtggttttgatttgcatttctctaatgttcagtgatgttgagctcttttcatatgtttgttggctgcatgtatgtcttcttttgagaagtgtctgttcatgtcctttgcctacattttaatgaagttgtttttatcttttaaatttgtataagttccttgtagatgctacatattwgacctttgtcagatggatagattgcaaacattttctcccattctgtaaattgtgtgttcactctattggtagtttcttttgctgtacagaagttctttagtttaactagatcccatttgtcaatttttgcatttgttgcaattgcttttggtgtcttcatcatgaaatctttgcccatgcctatgttctgaatggtattgcctagattttcttctatggtttttctagtttttgggctttacatttaagtccttaatccatcttgagttgatttttgcagatggtgtaaggaagggatccagtttcaattctctgcatatggctggccagttat

SEQ ID NO: 784531 - DNA, 607 bp, Homo sapiens
catagggaataatcataccttaaatagtcactgacaacatttaaaaaaatatatttttatttccatttatgtaatcaacttagggttgttattgacctgccactgaggcatttggtttttcttttcataggacctttttcatttatttcttcagaagcattatctaattaaaaacaaacatttaaattaacatggcctgtcaaggaagtacaaaccagtcwtgagttaagctataattacaatgacaacaatgtcaaaaagaaaaagcaaaaaccttttttaaaacctgtaattacttcattgtttataatttttaattggaatgcaagtaacagggaattcaaatttcataaaaccgtggtctgtatatcttgttatcaaaatgctatccaaataacacatggcaaaatgtaatttttttatgtaaatggggagacttatgagacaaagaagcaaataatctggccacaatgtgagtctttggcaaaccttggaaaggaactcccaagtgcatttcctaaaagagtactttgtgtgttcaaatgtactaactctatccagagtgaaagaatgcctaggaatgaataatctgcacaatctgatagaa

SEQ ID NO: 784532 - DNA, 607 bp, Homo sapiens
catagggaataatcataccttaaatagtcactgacaacatttaaaaaaatatatttttatttccatttatgtaatcaacttagggttgttattgacctgccactgaggcatttggtttttcttttcataggacctttttcatttatttcttcagaagcattatctaattaaaaacaaacatttaaattaacatggcctgtcaaggaagtacaaaccagtcttgagttaagctataattacaatgacaacaatgtcaaaaagaaaaagcaaaaaccttttttaaaacctgtaattacttcattgtttataatttttaattggaatgcaagtaacagggaattcaaatttcataaaaccgtggtctgtatatcttgttatcaaaatgctatccaaatarcacatggcaaaatgtaatttttttatgtaaatggggagacttatgagacaaagaagcaaataatctggccacaatgtgagtctttggcaaaccttggaaaggaactcccaagtgcatttcctaaaagagtactttgtgtgttcaaatgtactaactctatccagagtgaaagaatgcctaggaatgaataatctgcacaatctgatagaa

SEQ ID NO: 784533 - DNA, 567 bp, Homo sapiens
gcaaaactctgtctcaaaaaaaaaaaaaagttatcacaaattattgctcataacagtttagttaaaataaagaatgtatgtaaaactacagagtaatagcttgatagcaagacaaaatagtttaaaaaaaattctaggaaaaatatggctgactaaattatgatgaaagattttagatatcaaaaatrggctgggtgcagctggcgtatgcctataatcccagcactctgacaggccaaggtgggtggatcagttgagcccaggagttcaagaccactctgggcaacatggcaaaacccagtctctacaaaaaatacaaaaattagctggacatggtggtgtgtgcctgcagtcccagctacttgggaggctgaggtaggagaatcatctgattctgggaagtcgagggtgcaatgagccatgatcacaccactgcactcccgcctgggagatagagtgagaatctgtctcaaaaaaaaggcatcaaaaatggccaaaagaaaatcttaaacaaaccatgagttaacagattaaaaaggtgttcttgtttgttttttgagacagagt

SEQ ID NO: 784534 - DNA, 446 bp, Homo sapiens
ctgctcacaaagggtcctcacatgcctcagggccctctgctggggcacagtccacattaggtgacacacaaacagcctgagggtgcccagtcactgagcagccccagacgctgtgccgttaccggcaggcagggccctgcaggagaccttcgcctgcccggaccagagaggctgcaggggtgctgtggggagagggccagatggccgcaacacagctgggaatggctccagaggggagggtggagagtgcgctggcccmtgggaggactcagagaggagttgcgtgtgtttggcgcttgtggacatggtgtgtggcagtgtgagccaacaggccaacgggcagcaagcataggaggctttatggatccccctgaagaaccactgtgtggaggggaaatggccccctgtgaggaaagtcctagcagccggtggagcgcaaccagatg

SEQ ID NO: 784535 - DNA, 618 bp, Homo sapiens
agtggcattttttttttcaatcacaaagtattattgttatagcactttttatttatttgtaattggcaaataataattgtgtttatttatagggtacaatttgatgttttgatctatgtatacatttgtagagtcaatgaagctaagtgatatagttgggctgtgtccccaaccaaatctcatcttgarttttaactcccacaattatgatgtgtcatggggagggaccaagtgggaggtagttgaatcatgggggttgggtctttctccttctgttctcatgataatgaataagtctcatgagatctgatggttttataaagaggagttcccccacacaagctctctctctgtctgccaccatccatgtaagatgtaacttgctcctccttccttgtcttccatcataattgtgaggcctccccatctatgtggaactgtaagtccattaaacctcttttttttttttaagtttcccagtctcaggtatgtctttattagcagcatgaaaacagactaatacactaagtaagatacctttcacctcagtaacatcatttttttttatggtgagaatatcaaaaatctattattggccaggtgtggtggcccatgcct

SEQ ID NO: 784536 - DNA, 618 bp, Homo sapiens
agtggcattttttttttcaatcacaaagtattattgttatagcactttttatttatttgtaattggcaaataataattgtgtttatttatagggtacaatttgatgttttgatctatgtatacatttgtagagtcaatgaagctaagtgatatagttgggctgtgtccccaaccaaatctcatcttgagttttaactcccacaattatgatgtgtcrtggggagggaccaagtgggaggtagttgaatcatgggggttgggtctttctccttctgttctcatgataatgaataagtctcatgagatctgatggttttataaagaggagttcccccacacaagctctctctctgtctgccaccatccatgtaagatgtaacttgctcctccttccttgtcttccatcataattgtgaggcctccccatctatgtggaactgtaagtccattaaacctcttttttttttttaagtttcccagtctcaggtatgtctttattagcagcatgaaaacagactaatacactaagtaagatacctttcacctcagtaacatcatttttttttatggtgagaatatcaaaaatctattattggccaggtgtggtggcccatgcct

SEQ ID NO: 784537 - DNA, 618 bp, Homo sapiens
agtggcattttttttttcaatcacaaagtattattgttatagcactttttatttatttgtaattggcaaataataattgtgtttatttatagggtacaatttgatgttttgatctatgtatacatttgtagagtcaatgaagctaagtgatatagttgggctgtgtccccaaccaaatctcatcttgagttttaactcccacaattatgatgtgtcatggggagggaccaagtgggaggtagttgaatcatgggggttgggtctttctccttctgttctcatgataatgaataagtctcatgagatctgatggttttataaagaggagttcccccacacaagctctctctctgtctgccaccatccatgtaagatgtaacttgctcctccttccttgtyttccatcataattgtgaggcctccccatctatgtggaactgtaagtccattaaacctcttttttttttttaagtttcccagtctcaggtatgtctttattagcagcatgaaaacagactaatacactaagtaagatacctttcacctcagtaacatcatttttttttatggtgagaatatcaaaaatctattattggccaggtgtggtggcccatgcct

SEQ ID NO: 784538 - DNA, 624 bp, Homo sapiens
atttaagactgggaaaagtaatgtagttagccttaaggttaagggtaagacttctgggttcagattttgcctctgccatttaatagctctgcgaccttggacaagttatttaacttctctttacttcaattttctcatctgtaaattaaggatgtacacatgttttaaggaataagtaagttcttatttagaagtcactgtaggggagacagaacttttcttctatcctctgagggtttgataattgcgtctttgaaataaatggacaatagacatattagcaggacaaaagatcccaaatttattacgtgcatgggggcatcacagaaaaagaaaagtgaataccccaaaacccagtgagatatagaagcttatatgccttcttcataagggaaagtcaatgatttggaggaaagataarggggtcgttagaagaatgggtagcagcccgtctgcgagtggtgtagacatccattttcctcacctttaatccaagttaattcttcctggagaaaggaatcatgacaattgcattcattttgtagaatctgtctataggcagataagggaaattcagaaaaatctcctccatgcgtttgctgtttcctgactgccctcagtttg

SEQ ID NO: 784539 - DNA, 624 bp, Homo sapiens
atttaagactgggaaaagtaatgtagttagccttaaggttaagggtaagacttctgggttcagattttgcctctgccatttaatagctctgcgaccttggacaagttatttaacttctctttacttcaattttctcatctgtaaattaaggatgtacacatgttttaaggaataagtaagttcttatttagaagtcactgtaggggagacagaacttttcttctatcctctgagggtttgataattgcgtctttgaaataaatggacaatagacatattagcaggacaaaagatcccaaatttattacgtgcatgggggcatcacagaaaaagaaaagtgaataccccaaaacccagtgagatatagaagcttatatgccttcttcataagggaaagtcaatgatttggaggaaagataagggggtcgttagaagaatgggtrgcagcccgtctgcgagtggtgtagacatccattttcctcacctttaatccaagttaattcttcctggagaaaggaatcatgacaattgcattcattttgtagaatctgtctataggcagataagggaaattcagaaaaatctcctccatgcgtttgctgtttcctgactgccctcagtttg

SEQ ID NO: 784540 - DNA, 617 bp, Homo sapiens
taggttacttccaaatctttgctattgtgaatagtgctacaagaaacacgaaagtgcagatacatattcaaagaactgttttccgttctttcaagtatacacctagcaatgggatttcttgatcatatggtagttctatttttagttttttgaggaacctccaactgttctccatagtggttgtactaacttccattcctaccaagagtctgcaagggttcccttttctccacatcctcaccagcatttattgcctatcttttggctaaaagccattttaaatggggtgataatatctcattatagttttgactagcatttctctggtaataaatgatgctgaggaccttttcatatacctgtttgccatgtgtttgtcttctttagagaaatgtctattcagaaattttgcctatttttaaattgaattattatatttttgtagttgtttaaatgccatatatattctggttattaaactcttgtcagatggagaatttgtaaatatattcccccattctatgaattgtttcttcactttgtctcctttgctttgccagagctkcttaatttcatgtaatcccatttgtccatttgtgctttgcttgcctgtgatt

SEQ ID NO: 784541 - DNA, 593 bp, Homo sapiens
ataatggaaaacagctgcaaacatgttgctgcaaaggacatgatttcattcatttttatgaatggatagcatttcatggtgtacatgcaccacattttctttattcactcttccactgatgagcatctagcttgattccatattttgctatagtgaatagtgctgcagtgaacatgtaagtgcatctgtctttttggtagacctattcattttcctttgtgtatatacccagtgatgggattcttgagtccaatggtgggttccaggttctttgaaaaatctccaaactgctttcaaagtggctgacctaatctacattcccacctataggtttaygcaagtgttccctcttctccacagcctcactaatatgtgtttttttttaatttttaaaataatagtcattctgactggtgtgagatgatatttcattgtggtattcatttgcttttctctgagatttgtgatatagagcattttttcatgttttttggccacctgtatatcttcttttgagaaatatctgctgaattgttttgaccactttttaaaaacgttatttttctgcttgtcgaattgtgtaacttcttata

SEQ ID NO: 784542 - DNA, 478 bp, Homo sapiens
gtcttgggatggagtatgtgtccaggaacttatccatttttttctagaatttgtaatttatttacatagaggtgtttatagtattctctgatggtagttcgtatttctgtgggattgatggtgatatcccctttaacattttttattgcgtctatctaattcttctctcttttcttctttattagtctggctagcagtgtatctattttgctgatcttttcaaaawaccaactcttggattcattgacttttttgaagagattttcatgtttctatctctttcagttctgctctgatcttagttatttcttgccttctgctagcttttgaatttgtttgctcttgcttctctagttcttttaattgtgatgctagggtgttcattttagatcttaactgctttctcttgttggcatttagtgctttaaatttccctctatacactgctttaaatgtgtcccaggtattctggtatgtt

SEQ ID NO: 784543 - DNA, 601 bp, Homo sapiens
aaattgtaattccaggctggagtgcagtggcatgatcatacctcactgtaactttaaactcctgagtgcaagcaattctcccacttcagcctcatgagtagctgggaccacatgagtgcaccaccaaaccttgccaattaaaaaaaaaaacatatataragaggtggggactcactatggtgcttaagcaggtatcaaactagtggcctgaagtgattcacctgcctcagcctccccaagtgcttttactattcttgttgatgccttttcatgtaaactttattattggtttgccaatatgcaaaaaaacaactcattggaattctgattagaattgcattggatttatagatcaagttgaaaaaatggacatcttagcaatgttgagtgtttctgtcaataaacatgaactatgtctttatatcttaactgattttttatcagaggtttataggtttcctcatatagcccttggatttatctagctagatctataaataaacatttatttttatttgatgcttttttctaatatatgccttcagtggtgtgactatcattctgagcactgatgtccataattcctcaaactttataaaac

SEQ ID NO: 784544 - DNA, 552 bp, Homo sapiens
gacagtgcttgcttcccctttgccttctaccatgattataagttttttgaggtctccccagtcatacttcttttacagcctctagaaccgtgagccaattaaatcttttttccttcacaaattacccggtctcagatagttctttctagcgctgtgagaataaactaatacagaaaattgataccagagaagctaggcattgctataaagatacctgaaaatgtggaagcaaatctggaacaaaataacagatgttgtaacagtttggagggctcaaaagaagacaggaggattagggaaggyttgaaacttcctagagacttattgaatggttttcaccaaaatactgatatctgtatgaacaatgaaattaggctgaggtggtcttagatggagatgaggaacttattaggaattggagtaaaggttactcttggccaagctttagcaaagagactggcagcattaagcccctgctccagagacctgtggaacattgaactttagagagatgatttagggtatctggcagaagaaattttgtacagcaaa

SEQ ID NO: 784545 - DNA, 470 bp, Homo sapiens
gccaagaatggccaaaagctatgccttttgtataaagcagttagccaggttgtgaatgcaaaggaaaatttcttgaagggaattaaaagtactactccagtgaatgaatgaattataagaaagcaaaacagctttattgctgatgtagagaaatttaagtggtctggatagaagatcaaaccaaccacgatattccattaagctaatacttagttagagcaaggccctaactctcatcaattcaagaaagctgatataggtgaggatgctacagaagaaaagttgggagctagcaaartttagttcatgaggttaaaggagaaaaagttatttccataatatacaaagtacaagatgaagctgaaagtgctaatgtagaaaatgcagcaagttatccagaagtacctaagattattgatgaaggtggttagactaaacaacagattttcaatgtagacaaaactgccttc

SEQ ID NO: 784546 - DNA, 631 bp, Homo sapiens
aacttctagaaaggattcaccaatctaggtttcattaactacgtgtgtgattgatatgaggaggtcaaaatatctacattaataggagtttggaaaaatttgagaccaaatctcatgaatgactttaaagggtccataatttaagagaagtgggtagctgcagatgtggtctaaatagcaggagaaatagaattagaaatgaatccttgagatgtgatggaattactgtcrtctcatgaaaaaactggaacaaatgaggagttgcttcttatgaatgagcaaaaaaaaatgtttcttgagataaagtctactcctggtgaagatgttgtgatcattgttgaaataagaacaagggatttagaatattttataaacgtggttgataaagcagcaagaaggtttgagaggattgactccacttttgaaagaacttatactgtggctaaaatgcttttacacagtattgcatgctacagagaaatgacttgccaatttatgtgacaaacttaattattgtgttatttaagaagttaccacagccaccccaaccttcagccaccatctctctgatcagtcaggggcaatcaacaaaaaaacaagaccctccacagcaaaatgattatgacttact

SEQ ID NO: 784547 - DNA, 670 bp, Homo sapiens
ttcagttgtgtatgtctttatcttcatatgcccataggttctcaataaatgctgaatgaatgattgatccagaaaatagatggagtagtgagaagtagtgagaatatgacaacaaaggagagatgatatgtaccctctcagctattactttgagttacacttacagtgagtcctacaaaacaatgcaacatataatcaagatatatatgttaataaaatatatatgttaaaaatatatttttatatttattttataaatataatcaattataaaaatataatttaaaatatattttatgacttttcattcataatctttaccaaccaaaacatttaaataygtctccattcaaaaatatctgtgctatgcattattgtaggccctgggatttcactggagaatattacagttaaggtactcttataaaatttacattgtagtggtagtaatggattacataaaatagtaaacagataaccttagattgtgatacatgctaaacagaaacgataatgtgatagcaaggctgggcaggagcattgttaggaaagagctctccaaagagttggtatctgaactgaaacctaactgatgagaaggagccaaagagttggtatctgaacttaaacctaaatgatgagaagatacacctaaagagcatttaggcta

SEQ ID NO: 784548 - DNA, 564 bp, Homo sapiens
cattcagtatgcatttaatgtgtctttttgggttggtggtttatttctttttattgctgagtaatactccattgtatggatgcaccacagttgatttatcccttcatctattgaaagacatcttgattgcttccacgttttggttattatgaataaagctgctataaacatttgtgtgcaggcttttgtgtggatgtttgtgggaaaataccaaggtgtgcagttgctgcattgcatggtaagactgtgtttggctttgtaagaaactgccaaactgtcttccaaagtagctgtaccattttgcatttcaccagtaaggaatgagaaaaaaagtacattaaaagtaagttctakaaagcacaatattatagagaaaactggatccaaaaattatatacacaatataatctcagttgtctttaatttaaaaagaggcaaataaaagaactaaaaggaagtatgttaaatagtttctttagtttaggattatggttgtgtttattcctaccattctatattttttaattttatttttattaaaccatgagcaagtattgtttttat

SEQ ID NO: 784549 - DNA, 607 bp, Homo sapiens
catgtttttttttttttccaaattgaagggttgtggcaaccctgcatcaagcgagtctgtcgggtgccatttttccaacagcatatgctcactttgtgcctctgtcatatgttggtaattcttgcgtatttcaaacttttactgttatggtgacctgtgatcagtgatctttaatattaccattgtaattgttttagagtgccacgtactacacctatataaaatggtgaacttaactgatcaatgttgtttgtgttctgacagctccactgaccagctgttttccgtctctttcccactcttgagacacaatgatactgaaattaggccaattagtaactctataatggcctcaaagtgktcgagtgaaaggaatagttggatgtctctcactttaaatcaaaagctagaaatgattaagtttaattaggaaggtgtgttgaaagccaaaacaggctgaaagctaggcctcttgcaccaaatggttagccaaggtgtgaatgcaaaggtaaagttcttgaaggaaattaaacatgctacaccactgaacacaggaatgataagaaagcaaaacaggcttatttatgatatggagaaagtttgagtg

SEQ ID NO: 784550 - DNA, 472 bp, Homo sapiens
agcaaaaaacaaccccgttaaaaaacaggcaaaagacatgaacagacacttatcaaaagaagacatataagtggccaagaaacatatgaaaaaatgctccacattactaatcatcaaacaaatgcaaatcaaaaccacaatgagataccatctcacaccaggcagaatgggtattattaaaaagtcaaaaaaacagtaratgctggcaagactgcagggaaaagggaatgcttatactctgctggtgggaatgtaaattagttccagctactgtggaaagcagttgggagatttctcaaagaacttaaaatacgactaccattcaacccagctatcccattgctgggtatatatccaaaagaaaacaaattgttctaccgaaaagacacatgcacttttatatattgcagcacgattcacaatagcaaagacatggaatcagcctagatgcccgtcggtggtagactgggta

SEQ ID NO: 784551 - DNA, 585 bp, Homo sapiens; identical to SEQ ID NO: 752070

SEQ ID NO: 784552 - DNA, 661 bp, Homo sapiens
taaaaataaaaagctatatcaagaataaacactggggccaggcatagtgggtcaggcctgtaatcccagtactttgggaagccaaggcgggcagatcacttgaggtcaggagttccagaccagcctggtcaacatggtgaaactcttgtctctactacatagtcccagccattcaggaggctgaggtgggagaatcacttgaactcaggaggcagaggtcgcagtgagccatcgtgccattgcactccagcctgggcaacagagcaagactctgtctcaaaaaaaataataaatactgggcttttgccaarcgcagtggctcacgcctgcaatcccagcactttgggaggccgaggcgggcagatcagctgagctcaggagttcaagtccagcctggccaacacggtgaaaccctctctactaaaaatacaaaaattagccgggtgtggtggcatgcgcctgtaatcccagctactcggaaggctgaggcaggagaattgcagaggttgcagggagctgaggaggccccactgcactctagcctgagcaacagagtgagactctgtctcagaaaacaaaacaaaactgggctttttctaaagatccaaaattttcctcgaggaattaaattctgctcctaattctgtaactaattcagaag

SEQ ID NO: 784553 - DNA, 563 bp, Homo sapiens
tgttagtattatagcaagctaccggaggtcaggccgtaggatcaaaaactaccaatggtcattttctgatactttagaaactaatctcttaagtgaggtctaaaatgagtcataccaaactgcatttacagaaggactccrttatattttgaagttagagcaaggaatgaacactttcaacaaataaaggactaataaaagggtaacagaatgggtattatcttggtaaaactcacagtaaacgtcactctaaagctacaattaacctgattttgtagtaccatagtagtttgtcacatatttatgcctgtagtccatgaaacacccttaaatgctcattgctgaaaaatttccaccaatgtgacaccagcactgataaattggagttatctttagcttttcagagtataaaaagcagtttcctttaaaaaaaaaaaaaggtttttatgttgaagcaatttcactgttggctatttatcttcctcccccctacccaaatgaggcttgctaaaaaggaaaaaaaaaaaaacaccttatgtgtacttaagagtcaactcttgtat

SEQ ID NO: 784554 - DNA, 552 bp, Homo sapiens
tcctctgtcttattttgtcttttctgttttccaaagattcattcttagcttttttccctcttatttcattctactttttagtctactttattattttcatacttggttacttcagccttgtcgtttcagaggcctcttctccctctctggctctgctctctctagagccctgtcctgcttcttgtccccgctgatcactaaacatttctacttagatacctggtagacacttggagctcagagtgtctgaagtgaaacccctattcttcttcttcttttttttttttttgaggkggggtctcagaacctcttatcaagacggtttctgtacttcttctctaatgttctgggactctgcctttatatcaacacctagcacatggcagttactctgaaaatgtaatctgaaggaatggatgaattcttccaattacccaagctggaattctgagactcacctttgatttgatctctgtggtgacaagtcatgtcagttttgtgtctgatgtatctcttgtattccttccttcattcccactgcgattactttga

SEQ ID NO: 784555 - DNA, 614 bp, Homo sapiens
aattttctaaaaatcactgaaaaagtaatttttcagtggcacagttttcacttttttcctgatccataaaaccagcaaagtggatacattcagtgttctataactacatttaagatccatgatgttagcttttcctytataaatcaacttaactctcttttataatggtgacacttacaaagctaaaaccccaggaaaattaaagttgatgaaagaaataacagattccccggctctatatacctgggaaatagctggttaagcttcaccacaaaggatagatctaaattgtttctgaaatgtttaaatttcaaaccccgcatagtcaaggataataaaacagactcatctttttttgccctcttgttaaattctaagcttcacgggcatttgaatacatctaaaaaatttggtttgtgagccttagaatttaaccacttacaaaactcttgagctccctccacttctgaggacgtttcctgacacattcaacagcatcagcgtccaatcaggagggagctcaaagagtaatccagctaattctaaggacacaaaggttttctctaggtaaacagtttaggtaaattacaaagtggtaagtttttcttgaggat

SEQ ID NO: 784556 - DNA, 614 bp, Homo sapiens
aattttctaaaaatcactgaaaaagtaatttttcagtggcacagttttcacttttttcctgatccataaaaccagcaaagtggatacattcagtgttctataactacatttaagatccatgatgttagcttttcctctataaatcaacttaactctcttttataatggtgacacttacaaagctaaaaccccaggaaaattaaagttgatgaaakaaataacagattccccggctctatatacctgggaaatagctggttaagcttcaccacaaaggatagatctaaattgtttctgaaatgtttaaatttcaaaccccgcatagtcaaggataataaaacagactcatctttttttgccctcttgttaaattctaagcttcacgggcatttgaatacatctaaaaaatttggtttgtgagccttagaatttaaccacttacaaaactcttgagctccctccacttctgaggacgtttcctgacacattcaacagcatcagcgtccaatcaggagggagctcaaagagtaatccagctaattctaaggacacaaaggttttctctaggtaaacagtttaggtaaattacaaagtggtaagtttttcttgaggat

SEQ ID NO: 784557 - DNA, 584 bp, Homo sapiens
atggatccaacttcattcttttgcttgtgaatatctagttgtctcagaaccatttgttgaaaatattattttccccattgaattgtcttggcacccttatcaaaaatcaatggcccataatacatgcatttatttctagatttttgattctatttcattgatctaagtatttgttcttacaccagtaccacatggtcttgatttctaaagcttgtagtaagtttgaaatcagaaagtgttagtcctccaacttggttcttctttttcaagattatttgggctattctggatcccttaaaattttatatgaatgttagaatcatcttgtccatttctgcaaaagagtgagctagggttttgatagggattgcacagaatatgtagattaacrtggggattactgccatcataacaatattgtcttccaatccaccgacatgtcttcatatttatttaggttttctttaatttatttcagtgatcttttgcagtcttcagtggggtcaatccccaactgagcctttaaatgacttcactttagccctggttgccactttgaagccttttgagagaccctgagtgaa

SEQ ID NO: 784558 - DNA, 584 bp, Homo sapiens
atggatccaacttcattcttttgcttgtgaatatctagttgtctcagaaccatttgttgaaaatattattttccccattgaattgtcttggcacccttatcaaaaatcaatggcccataatacatgcatttatttctagatttttgattctatttcattgatctaagtatttgttcttacaccagtaccacatggtcttgatttctaaagcttgtagtaagtttgaaatcagaaagtgttagtcctccaacttggttcttctttttcaagattatttgggctattctggatcccttaaaattttatatgaatgttagaatcatcttgtccatttctgcaaaagagtgagctagggttttgatagggattgcacagaatatgtagattaacatggggattactgccatcataacaatattgtcttccaawccaccgacatgtcttcatatttatttaggttttctttaatttatttcagtgatcttttgcagtcttcagtggggtcaatccccaactgagcctttaaatgacttcactttagccctggttgccactttgaagccttttgagagaccctgagtgaa

SEQ ID NO: 784559 - DNA, 598 bp, Homo sapiens
tggatggaataggggcttaatatatatttgttgttaaatgaataaatgaaagaatgaatgttaaaaggcttctaaatgaatctgatatactttatatcccaaggccggtaataacaataataatatagtcatagaaagagattaaagttaaaaagtcttaatgtgccttttttgattatgaagttctgttttcacatgtaccaaagaagacatctcataaggcaaaaatgaacttagaaatgaataaacaaggccgggtgcagtggctcacacctgtaaccccagcactttgggaggccaaggtaggcggaaygtttgaggtcaggagttggagaccagcctggccaacatcgtgaaaccccatctctactaaaaatacaaaaaaattagccaggcgtggtggcgcacgcctgtaatcacagctactcaggctaaagcaggaaaattgcttgaccaaggtggaggctgcagtgagccgagatcacatcactgctctccagcctgggctatagagtaagactctgtctcaaaaaaaaaaaaaaattcgagaaatgaataaacagcatggttcttcactagtaaactacagcactgacta

SEQ ID NO: 784560 - DNA, 560 bp, Homo sapiens
gcattcaggctcacactagacactccagctcttccactgtgtccgtttaagtatcacttatgaggagaaaatgcacacaaaattctcagttcgcctaaaataaataaatgtctactatcattcctaaatccacaaggcagaattctyttagaaccatgatgccaagaacttccaccgcaagtgaaattgtcttcgcaatctctgtctctaggagactgaaaggctgcagagacgcttgaggatcctgcagggaggctagggcggcagacggagggggcggaggttaggggagagtcccacagaggaactgcattagaaggaaagattttgataacgtctaagggagaggcggttagctacagggggaaaaaaacagacctatttccatattatgtacgttgtaaagaaaacgcaaagtgatgagggtaaggaaacgttgccaaaaacaaacaaacaaaaacaaaaaaaaattaaccctctgcggccggagggttaagagaagtcgacaaaaggagaagggggaggcgaataaaggccccaaagaccaggaattgaaaaaa

SEQ ID NO: 784561 - DNA, 644 bp, Homo sapiens
ggttgatttcatattttggcattgtgaagagtggtgcaataaacatttgtgtgcagatgactctttgatatacctgagttcctttcctttggataaatgtccagaaatgctttgcccacattttaatcaggttttttttttagctattgagttacttgagttccttatatattttggatattaaccctttatcagttgtgtggtttgcaaatatttattttctttcattctgcaggatgtttcttcactctattgattgttttctaggctgtacagaagcattttagtcttatgcagtcccatttgtctayctgtgcttttgttgactatgcttttgatgtcttatccaaaacaatcattacccagagcagtgttaagatgttttctcatatgttctcttctagtagtttttaagtcttattttctttgtctttaatatattttatatttaatatattttagttcttgtatatgatgtgagataagggtccaattttattttatgcatataaatatccagttttctaaacagcatttattgaaagagactgatcttttccaattacacaatatccttgacatctttgtcaaagatttattagaccataatgtttgcacttacttctgggctttctatgtcatcc

SEQ ID NO: 784562 - DNA, 662 bp, Homo sapiens
acctaacatttaaagaactaatattaatcgtactcaaactattctgaaaaatagaagaggaaagactacttccaaactcattctatgaggccagtattaccccgttaccaaaaccagacaacaccacatcaaaaaaaagaaaactatatgccaatatcactgataaatattgatgcaaaaatcctcaacaaaatactaggaaagcaaaattgacaaaacattaaaaaggtcattcattacagccaagtagagtttgccaaggaatgcaaggatagttcaacatatgtagatcaattaatgtgatacattatatcaacacaatgaaggacaaaaaccatatgatcatttcaactgatgctgaaaaagcatttgataaaattcaacatcccttcaagattaaaaaaaaaccctcaaawaaattggaaatagaaggaacatacctcaacaaaataaaagccatatgtaacaaacccatagctagaatcatactcaatggggaaaaactgaaagcctttcctctaagatcaagaacatgacaaggatgcccactttcacaactttttttcaacgtagtactggaagtcctacctagagcaatcagaaaagaaagaaatgaaggggatccaaattgcaaatcaagagttcaaatgatccttgcgtgc

SEQ ID NO: 784563 - DNA, 635 bp, Homo sapiens
aaacttagatatatgcaaaggaataaagagcaccagaaatactaaacatgtcggcaaataaaaagaacacttttagtgaactaaartctgatttttcccttatttgcttactttactttctgtgatctgagggagaaaaaggacccagcccatgtggcttcacattgggaaaaagtggcacccactgtttcctaagatttagagctagaaggggctggaaagagctgatcctgtccctgaatttttagaaccaaattcctgtatcacagttgaaatgattgtcaaaagtaagaacataatgtttgttcactgggggaaaagtctgttggggatacccaaaggaatacgggaatttgaagatgtgaattctatttttggaaagcttaatgcaacagagtctgatataatggcaagtgacagctgcttctggggctaagtccccacgactacccctttcttctggaaaatatatctagactaaagtttatgactaaatttagggcctatgtgttctgatttttccccagataataaggctatgagatcgactgaattgaattgagttacagaaattagattttcatgcccttcctcattgttattgttgtttatacagcttacatattttctagagc

SEQ ID NO: 784564 - DNA, 601 bp, Homo sapiens
cttccactctccataaaacagcccaaccttgcacggagccacctccaggaaagatggcagaaatgctaatcaatggtaagagatagtctgacgataaacttaaagacttctccaagcaggaataacttgtaagaagcattccaaaaaggcactgtgctctagtggaaaacgtttggttctgattcaaagaaacctagcatgtgctacttattagctctgtgaacttgggcaagttatttgacctctctgagcttctatttcatcatctgtaaaatgctaatggtaaaatgacartgacaatgcttactagcatagttaatacaataactaagaagtattaatataaaggattctgcttatagtaagagattcataaatagtaacaatacatatttttttattttccaaacacagtaccttgcacaaaatttaagttaataaatatttgtggaaagaaggaagggagaaagaaaaagggagacgaaaaagattccagtttagcacagtataaatcctgatagaggctttcctctttttcactaataaattctctgattataacatagatctattgaggaaattgtttgaataccatggacta

SEQ ID NO: 784565 - DNA, 522 bp, Homo sapiens
ccagccagaaggaggagggccatggggccaaggaagaggaatgccagcttcatgctgctcttccggagagggaaaggacagagtttaacagatctggctgccttcaatggcacagccaaccatgcatttgtcactatcaaagggaccttgctcctagcatttcagggaaaatgagcccagaaattgtaaatgcccacaaactccaacacaggcatccagagattcctgtaactggtgccagtgtggatkccatggccctctctagatgcccatcctccaagtgcattctcaggcttttccttattgtaacttaactgctgcagttgacttgtgtgttaaagaagtttgtcccagtggtctttccaaaataaacataaaatatgagtaacaccaaaactaatccataatccaacagaatacatgaatacatataaattatttttattcaggtccagggtatttgggtgccatgttacatactttgctcaaaactatattttcagtgtcatgatggggaatgat

SEQ ID NO: 784566 - DNA, 680 bp, Homo sapiens
tttgacatgtttttaagtaaagatgagagagggagatagaagtttttataatcttgagaagagggaggattgtggcagacaggaggcaggactagattgcagttcctactcagacagagcatcatgtggagtcttgcgtcataaacttttactctagaactactgcaggaatatatcaggaaagctgagagaacccacaggccctctgaaggaagtgtattgctcctgcaggacccaagagacaccccaaatactgtgagtgtccaaactgtggaaatgggaaagggggatcgtccacccccaaacacayaccctcactggggaatccgaaggcctagattatgggagaagattctgaccttacctagagctgagtcaatttagagagcccagtgaaatacatgggtagaggaagcagcgggaaaagcccggtgagctctctggatcctctaggaagcaatttctgccttgcctcacaggagtacttggggagggctgccagaggcactgggaaaaggccacagggagaaggaaacctccacctgaactttgtagcaattccaaccaaacgagaagtctcctggccagaactcgggggtgggcttgaatccagggtacagactccacaggcagggaaggacgagagccctacctgcttttgcgctgggaggcgggtagcc

SEQ ID NO: 784567 - DNA, 565 bp, Homo sapiens
cacctgaccctccccatactaccacagctgatactctcttgaaagcaccaccttctggcaggaggccaaccagcacaaaaatagtgcatcaaacaaccaaaactaaagaccctcacagagtccatttcatccctctgccacctccacaagagcaggtgctcatatccacagctgagagacccacagatggttcacatcacagggctctgtgcagacaacccacagtaccaatccagagcctagcagacatgctagtggctcaatccagaagagagatagcaatcactacagcttggctctcaggaagacacatccctaggaaaactgggagaatmctacatcaagggaacaccctgtaggacgaaagaatctgaacaacagccttcagccctagaccttccctctgacagagtctacccaaatgagaaggaaccagaaaaccaactctggtaacatgacaaaacaaggttctttaacacccccaaaaaatcatgctagctcaccagcaatggatccataccaagaaaaaaatctctgatttatctgaaaaagaattcagaaggtc

SEQ ID NO: 784568 - DNA, 600 bp, Homo sapiens
aggctcaggcagaagaatcgcttgaacctgagagggagtggctgcagtgagccaagatttcaccattgcactccagcctgggcaacaagtgaaactccgtctcaaaaataaataattaattaattaatttaaaaaattaaaaagttaaaaaaatcaactgagcctcctgttttacattcccctygagtcctgttttatattttcctagcaaggggttatttgtacagtatctggctccccttccaaactataagctccctgaaggcaaggataattctgttttcttcacccatggatgccctagcacccagctttgcccctggtccatagtagattctcaatacataattattaagtgtaaagaaaagaagtatgttttattgtaccacttccttaaactgaaggacattgtaagaaatggcttctgaagtatatagccatagttactcaagatcacatttagaaccttgttcactacattattgtaagtcttctctttacaaaaacccatagaaaagaatttttcacagtctcaattctagaaatagtgtttttcctgagagaggaacacaagcctaagcttcaacaagctctctgcag

SEQ ID NO: 784569 - DNA, 600 bp, Homo sapiens
aggctcaggcagaagaatcgcttgaacctgagagggagtggctgcagtgagccaagatttcaccattgcactccagcctgggcaacaagtgaaactccgtctcaaaaataaataattaattaattaatttaaaaaattaaaaagttaaaaaaatcaactgagcctcctgttttacattccccttgagtcctgttttatattttcctagcaaggggttatttgtacagtatctggctccccttccaaactataagctccctgaaggcaaggataattctgttttcttcacccatggatgccctagcacccagctttgcccctggtccatagtagattctcaatacataattattaagtgtaaagaaaagaagtatgttttattgtaccacttccttaaactgaaggacattgtaagaaatggcttctgaagtatatagccatagttactcaagatcacrtttagaaccttgttcactacattattgtaagtcttctctttacaaaaacccatagaaaagaatttttcacagtctcaattctagaaatagtgtttttcctgagagaggaacacaagcctaagcttcaacaagctctctgcag

SEQ ID NO: 784570 - DNA, 635 bp, Homo sapiens
gttttacagtctttttatcttttggtctggcttccccagggtcactcctgcatagctaaatgtcagaggaggctgtgctagttaaacacctcgagcctctcggagggcttctatgcaccgcgggtggatctgagtgtaggctaagcagctcactcaatggccagtctcatgtttgtctaggcttttccgtcccatggggcgctctcaagtctcagccatggcccttctatgcctctctgtttcaggaggtcagcattaaatttctgctgaccaccacctgtcctatctggaattgcaatctcaggctagcaaaacrgagttttctccgtttgtttccttccaagctcaccacttttagttgacatcatgggttctgcaccacctaacctccaccattgttcaccacctcaggcaacaaagctgctggttttcataccagctcagggctagaaaagccaggaggtttgaggggtgacagaagccccaggtaggaaggccacagactccaggttcccacccaaagctctagaagcttttcaaaaataacccaatttcttctctgcctttggtcaatttctagagaccccaaatggttggttttgacaactttagttttatacttgtttcttgcaagg

SEQ ID NO: 784571 - DNA, 635 bp, Homo sapiens
gttttacagtctttttatcttttggtctggcttccccagggtcactcctgcatagctaaatgtcagaggaggctgtgctagttaaacacctcgagcctctcggagggcttctatgcaccgcgggtggatctgagtgtaggctaagcagctcactcaatggccagtctcatgtttgtctaggcttttccgtcccatggggcgctctcaagtctcagccatggcccttctatgcctctctgtttcaggaggtcagcattaaatttctgctgaccaccacctgtcctatctggaattgcaatctcaggctagcaaaacggagttttctccrtttgtttccttccaagctcaccacttttagttgacatcatgggttctgcaccacctaacctccaccattgttcaccacctcaggcaacaaagctgctggttttcataccagctcagggctagaaaagccaggaggtttgaggggtgacagaagccccaggtaggaaggccacagactccaggttcccacccaaagctctagaagcttttcaaaaataacccaatttcttctctgcctttggtcaatttctagagaccccaaatggttggttttgacaactttagttttatacttgtttcttgcaagg

SEQ ID NO: 784572 - DNA, 700 bp, Homo sapiens
tataatctcagttttgctttaaaaagggtatataatgtatacacacagacataaaagtataaaaaggcacacaaaaagattatctctgggcatgtggggctctgtgtgatttgtgtgattttcctaaacatgaaaaatataacctttttacaactaaaaaaaaaaaaacaagaaaaaagttttcttgagagaaataaaaatctaaaatatataaacagggaccgggtcactcaagagtgctaataaacccagttaattcttcatactgaccttggtctctactctgctacttcctttactctcttcctgctaacatccacatcctgttcaacttaagatcatttgatgaaaaatacaaccacataaatagttattttggagttgaacagagccaattaaaatcagtcagaatttcaaactatactcctaaaatggtaasaggcagtgatctagggtgatggtcaaaacacagacagtttgaatgccagatctaaagagtcacagactcaaatgtgaaacccccacacacactctgagtgcctaccttgggcaggttatttaatctctttaccttcagtttcttcatccataaaatacagataatgaattttgcaaggatgagctaacatacaaaaaatacttactgagtctgatatttaagaagtgttcagttaaagttaatgcaaaaaaatgaaaaaat

SEQ ID NO: 784573 - DNA, 573 bp, Homo sapiens
tacttagtctttcttttacttaatgtagtagtttgatcaattcacaaatattggccccacgcttatgctacaaatctcttcctttgtcttctgcaaccagttctctctgtttgcatcctgttcatctgctggcattccttcaggctccttacgcygacatagtctgtcctgtattgaacagtgtcctccaagaggaatgttgaagtcctcagccctggtagctgtgatgtgatctcacatgggaattgggtcttagtagatgtaatcgaattaagatgaggttattagggtggatcctaatctgaccggtggtcttacaagaaaaggaaagcaccatgtaaagattcacacagagacaagatagccatgtgacaacggagagagaagttggagtgatgcatcttcaaatccaggaacgctaaggattgatggcaaataccagaagctagaagaggaagaggcaaggaaggattctcctctacagattttagagagaacatggccctgacaactgctcgatttcagacttctagcctccagaactacgagataataaatttttgttttattaag

SEQ ID NO: 784574 - DNA, 639 bp, Homo sapiens
tgatttttgcacaatgattttgtatcctgagactttgctgaagttgtttatcagcttaaggagtttgcgactgagactacggggttttctagatgtaggatcatgttgcttatgacagtttattggatggaaatctcatatgtcatagtattatataacctggagacacattgcttattgtgattaaattttctctggagawaagaaatatagcgaattagaaaatgttattccctgctcattggaaagggactagtcctcagtcatagggacacttgtgaactactgaagaaaaatgaggatggagaattacttgttttttgaggtatgctctatctgaggtcagcttggctttgcctgatcactttcagtttgagggtgtggattaattgtctcagtctaggctctatgaggagaacccacattttcatgcttttttatccttctctaggtttcaactttcttgctaagtttggcctcatctgggccttcctttagaagcccagtgtgctatccattgcacgacacagcctgggccttcctttctaatcctggtgatctgagctctgaaatgaaacttttgcaagcccaccgcttggattgtatatggtgagaacagccctttccaagactcagcca

SEQ ID NO: 784575 - DNA, 563 bp, Homo sapiens
aagccagggtttcctagggaaactcccagtcagaactgtgatgctttttccactacaatggctcaattgtagagtgggttggaaataggcagacttctgattcttcacagcatgttgatagagaataggcttcaggtaaaagaaattaccaatcatttttcattatccaaggtatcactcacccactccaaggaacacgactgcggcagctgtgaggatgccaagcatcaggccccaaaccatctggcagatcagaaggggcattttctggcttggggaagctgacattcagtaaattgttagtgctggctcccacagtgatcagcctggcttcaggcaatggcaagttatggtgggcaaaatgaagccttgatatacaggttgcacaatcttaagagatttttgkttttttttgtttttgtttttttgcatggcattttctttcccaaaaggatgacttgagaagcttttgtatacattgtcttgttacattggtgggtgacaattttctatgggtctctcatgtttctgcatgtcttgtgagcaaagacactgcctacaga

SEQ ID NO: 784576 - DNA, 606 bp, Homo sapiens
ttttatgaaaactagtgattttgtgggtcagaaatctgtgcaggactctgctggcggttctgctccatgtggcactgattgggtcacctagtggcattcagtgggcagctgcttagttctggaggtccatgatttccctcatggtctggcatctcgacggggcagctggaaagctgcgctcagagcctctggaggtggtgtcttcagcagggtagttgggtttcttacaatggaggcccgggsctccaaaagtgagggcacaggaggcaggaaaaggaagctcttaaggcttggccccggaaatgggcactgcgtcatttccgcataaactcatggtcaaaacagtcacagagcctgctcagattcagggaggggtctttgacttcaccccttcatgggaggggtgtcaaagaatttgcggccctctttaatcaaccacagatggggagtatagtagtgctgatctgataaagtaattgtgaggattaaataagacagtatctataaagtgttcaacagcattcatcagattaaatgttccgtgtgttagatgttatatgtttatatatactatttctctatataaatgtatacatgtataattat

SEQ ID NO: 784577 - DNA, 502 bp, Homo sapiens
acgattcttcttcctctttatgctgtcctggcatgctccatgctggccttagacatgcagccatggctaaggttgagcaaaagtgcagtggtcataaatgtccctggaactgaggaagttgagtaggttggtcagtatgttataaaggtcattttcctggatactgatgatggtagcagaagtttgagttggggagatacattactaccagtggtaacgtcatagaggaaggtaagaatagagcattggaagtaagcatatgggagcaatgagaattgatgaccagtggtggtaamggtgagaaggggaggctgtccaatggtgggagaagcacagtcattggagaaggagctgtgggaagcatgatgtgctcacccaaggaagtggtttgactgaagggggtcaggtttcagtcatggggaggagcaaagggaaacatggaatgagatcaatataggaatttcacagggtaacatgaaagggctagtggaggaaaggggca

SEQ ID NO: 784578 - DNA, 632 bp, Homo sapiens
aatatatagattgttttgctgaaccacttcagaataagtttgtcacttctctaaatatttcagcaagtatcttctaaaacaaggacaatcttcacacaaaaccataatataaatatcaaacccaagaaatcagtattatttaatgtacgcaccataatcacatttccccagttgcccaaatagtgccctttctagctgtttcttttttaatccgggacccagtcaaagatcatgcattgcatttagttattaggccttgttaatctcatttcctttcatctaaactgtttctccacctttttttattcacatgacaatgacactttttaggagcttaagcctgtgatgaatatgttctaaatttgyctggtgtaggttgcacatatgaagaacataccaaaaaccaattatacaatttaaatgggtgaatatgtgcaaaatgtctctaaatttgtatttgtctgattgtttccttgtggttagaattaggatctgattcttaaacaaatttgcaaccagtccccctgttttcaagcctcatctttacctgctctctcagagcaaatgatctcctttcatcctggcgtttttggggaactttcaggtacaaattaaggtattttttgcttttt

SEQ ID NO: 784579 - DNA, 569 bp, Homo sapiens
aactcatactgatagtgttatttaatgtttaggttttttttttaatttgaggaacctcttttatatgaattgtaagaattcagtgtactttaagttttcttcttccaaaggtaatcctaaatattattgcaaataatgatgctcattagccaatttgctgtcaataactcatttcggtggcataatgttctatgttatctttgttgatgtcaacattcctaattaaactggcaagaaatttaattacatttcaatacagttcatataactcactcctcttcattaattgactcatcagacaaatacaagagcctgttcattacttctaatagaactttatctcttcctgttattactattttgatttatgatctraattttaattactttgttatattgtcttgtttcattatttcttgatgtcataattatttctattaatcccattgacctttattattttcatttcatcttgcattcgacaattgtttgatttttctctaacatgttttgttttaaagatggataaaacaagagaagataaaattcatgtatttcaaatcaggaac

SEQ ID NO: 784580 - DNA, 569 bp, Homo sapiens
aactcatactgatagtgttatttaatgtttaggttttttttttaatttgaggaacctcttttatatgaattgtaagaattcagtgtactttaagttttcttcttccaaaggtaatcctaaatattattgcaaataatgatgctcattagccaatttgctgtcaataactcatttcggtggcataatgttctatgttatctttgttgatgtcaacattcctaattaaactggcaagaaatttaattacatttcaatacagttcatataactcactcctcttcattaattgactcatcagacaaatacaagagcctgttcattacttctaatagaactttatctcttcctgttattactattttgatttatgatctaaattttaattactttgttatattgtcttgtttcattatttcttgatgtcataaytatttctattaatcccattgacctttattattttcatttcatcttgcattcgacaattgtttgatttttctctaacatgttttgttttaaagatggataaaacaagagaagataaaattcatgtatttcaaatcaggaac

SEQ ID NO: 784581 - DNA, 630 bp, Homo sapiens
tagcatttctatacatctataatgtttaagctaagggccacatcaaaaatgcaatcccatttacaatagccataaaaattacatatgaacacatctaaccaagcaggagaatgatctctacaagaactacaaacactgctcaaagaaatcataaattacacaaatwaaaaaaattccatgctcatggattggaagaatcaatatagttaaaatggccatgctgcccaaagaaagctaccaattcaatgctattcctatcaaactaccaacgtcattatttgcagaactagaaaaactgtttcaaaattcatatgggacagaaaaacagcctgaatagctaaagcaatcctaagcaaataggacaaagcctgaggcaactcattacctgacttcaaactatactataagactactataaccaaaacaacatactactggtataaaaacagagaagaacagacaaaaatagaccaatggaacagaatagagaaaccagaaatcaagctgccattagacattttatcttcaacaaagtcaacaaaaataaggatagggaaaggacagtttttttaataaacggtgctgggataattggctagccatattcggaagaataaaactgaaccccta

SEQ ID NO: 784582 - DNA, 484 bp, Homo sapiens
gaaggaaggcaaatgccttaagaaaattacggttctcttaagaagaaagaagggggaaatggataatctgtaggcaaacaacaaccatgttctgcgtccttctaatacatacatctttaaaagtgtccacacctacatgaaattccttcaagtgtccctaaagagaggctccctaaagtttcttctgggtaatgcactcaactcaagtccataatctctaagtgatgcatcagtgatccaagactaaatagtattatactaaccccaaacacattyatgtacccatgatgcaggaaaaacaaggcaacattaataaaagtgattattttagaccatcctggccaacatggtgaaaccccgtctctactagaaacacaaaaattagctgtgcatgacggcacccacctgtagttccagctactcgggaggctgaggcaggagaatcgcttgaacccgggaggcagaggatgcagtgagccaagat

SEQ ID NO: 784583 - DNA, 484 bp, Homo sapiens
gaaggaaggcaaatgccttaagaaaattacggttctcttaagaagaaagaagggggaaatggataatctgtaggcaaacaacaaccatgttctgcgtccttctaatacatacatctttaaaagtgtccacacctacatgaaattccttcaagtgtccctaaagagaggctccctaaagtttcttctgggtaatgcactcaactcaagtccataatctctaagtgatgcatcagtgatccaagactaaatagtattatactaaccccaaacacattcatgtayccatgatgcaggaaaaacaaggcaacattaataaaagtgattattttagaccatcctggccaacatggtgaaaccccgtctctactagaaacacaaaaattagctgtgcatgacggcacccacctgtagttccagctactcgggaggctgaggcaggagaatcgcttgaacccgggaggcagaggatgcagtgagccaagat

SEQ ID NO: 784584 - DNA, 682 bp, Homo sapiens
acagttacaggactataatattctgtttttctacagacttactattctcagtgagttttgtaccttcagatcatttcttaatgctcattaacatccttttctttctgactgaagaatgaactctcttgtcctttaaggtttccgctgaaaagtctgctgccagatatattggtgctccagtgcctgttatttgtttcttttctcctactgcttttaggatgctttcttcatctctgacctttgagagtttccgattaaatgccttgagataggattatttgrgttaaatttgcttggtgttctatagcctatttgtacttgtatactgatatctttttctagtttagggaagttctctgttatttttcctttgaataaactttctacccctatctctctacttcttctttaagatcaatattgatttgcccttttgaagctattttctagatcctgtgtgtgttacttcattgtttttaattctgtttcctttaggctcttctaaccatatatttttaaatgtcctgtctgtatgctcactaattatttcttctgcttgaccaattctgctataaaaagactgatgactttctcactaggcttcatgttttagctccagaacttctgcttgattcttttaaattatttcaatctctttgttacatttgtctgacagaattct

SEQ ID NO: 784585 - DNA, 614 bp, Homo sapiens
attcctatggtcacatacccatggcaaaggtatgggtcaatcctaaaaactgagtagaataagaacaattccgaatctaaacaaagtgaggttaggggcagtgactcacgtctgtaatcccaacactctgggaggtccaggcaggcagatgacttgaagtcaggagtttgaaaccagcctggccaacatggtggaaccccatctctactaaaaatagaaaaattagctgggcaaggtggcacatgcctgtaatcccagctactcgggtggctgagacatgagaatcgcttgaacccaggargcagaggttgcagtgatccgagatcacgccaggctaaactccagcctgggcaacagagcaaaactgtctcaaaaaaaaaaatgtagtgagattcatgtagacatcagttgtctccattcatcagtcatctggctgtcatgatctcttatcaggtaaggcattcacctataacactcaaagctaagaattgtggatattttagggccattttttcccttcatatgggaagcttacaccactagggagaaaaacagtactgaaatccgaaaagtaaataaaagtaaattgtatctgttatctcagtttaagagtc

SEQ ID NO: 784586 - DNA, 672 bp, Homo sapiens
gacaaagctatcctaaccaagaacaataaaaccaaagaaatcacattacctgacttcaaattatgctaaacatatagtaaccaaaacagcatggtactggcatgaaaagacacatagaccagtggaacagaatagcaaacccagaaaaaaatccacacatctacagtgaagtcatttttgacaaacgtgacaataacatacattggggaatggaccatctcttcaataaatggtgatgggaaaactggatatccatatgcaaaagaatgaaaccagacccctttctctcaccatatacgaaagtaaaatcaaaatggattaaagacttgaatcgaacatcttaaactatgaaactactgcaagaaaacattggagaaaatatccaagacgttggcctcggcaaaaatttcttgagcaatattccacaagcacaggtaaccaaagcaaaaatggacaaatgggatcayatgaagttagaaagcttctgcacagcaaaggttacaatcaacaaagtgaagaaacgacccacagagtgggagaaaatctttgcaaactacctttctgacacaggtttagtaaccagaatgtatatggagctcaaacaacaatatagggaaaaatcttataattcaataaaaaagatcaaaacatttaaatagatatttctcaaag

SEQ ID NO: 784587 - DNA, 579 bp, Homo sapiens
gcaccacgaagatactcctcaaaaagagcaactgcaagacaaataattgtcagattctccaaagttaaaatgaaggaaaaaatgttaagggcagccagagagaaaggtcaggtcaaccacaaagggaagctaatcagactgactgtggatctcttggcagaaactctacaagccagaaggggggggagcaatattcaacattcttaaagaaaataattttcaacccagaatttcatatccagccaaactaatcttcataaatgaaggggaaataaaatcctttacagacacgcaaatgccgaaagattttgtcaccaccaggcctgcctttcaagagctcctgaaggaagatctaaacatggaaaggaacaaccggtaccagcyactgaaaaacatgccaaactgtaaagaccactgatgctaggaagaaactgcaagaattaatcagcaaactaaccagctaacatcataatgacaggatcaaattcacatataacaatattaaccgtaaatgtaaatgggctaaatactccaattgaaaaacacagactggcaaattggataaagagtcaagaccga

SEQ ID NO: 784588 - DNA, 572 bp, Homo sapiens
gtgtgctgtattcaggagacccatctcaggtgcagagacacacataggctcaaaataaagggatggaggaagatctaccaagaaaatggaaaacaaaaaaaagcagggcttgcaatcctagtgtctgaaaaaaacagactttaaaccaacaaagatcaaaagagacaaaaaaggccattacataatggtaaagggatcaattcaacaagaagagctaactatcctaaatatatatgcacccaagacagaggcaccaagattcatgaagaaagtccttagagacctacaaagacacttagactcccacacaacaataatgggagactttagtaccccactgtcaatattagacagatcaatgagacagaaggttaacaaggasattcaggacttgaactcagctctgcaccaagcagacctaacagacacatacagaactctccaccccaaatcaacagaatatatattcttctcagcatcacattgcacttcttgcaaaattgaccacatagttggaagtaaagcactcctcagcaaatgtaaaagaacagaaactataacaaactatctca

SEQ ID NO: 784589 - DNA, 664 bp, Homo sapiens
  misc_feature 540: n = A,T,C or G
ggcagatcacctgaggtcaggagtttgacactagcctggccaacatggtgaaaccctgtctctactaaaactacaaaaattagttgggcattgtggcatccgcctgtattcccagctacccaggaggctgaggcaggagaatcgctggaacctggaaggcagaggctgcggtgagccragattgtgccactgcactctaccctgggtgacagagcaagactctgtcaaaaaaacaaaaaaacaaaaaaaaaaacaaaaaaggatacccttagggtatatgtacttgggttgtctctgtatagagggcacaagtacactttcatctgtatatgatataattatattagtcgaagagcttttgtaaatcggcaggctatcaaatagtggaatatagtgttcatgtgttgtttttgtctatccaacatacattccgattgttcggggaaaacactatggttttccttcaaggaaccagctcttgcattctccctcttctccttccccctctccctctcattttcaatccacaagatttgagcnggtgatttcccactgcctggttcaaagagtaggcacataaactcaagcctggccaaggagaatgttctattttctggcttcaggaatgggcatgtgacccaaactgatattagcatctggctag

SEQ ID NO: 784590 - DNA, 439 bp, Homo sapiens
  misc_feature 407: n = A,T,C or G
tgtttctgaaagctggagcctaggtaaaaggaacattcccacagaggcttcctgtgccatcgcacagtctatggctgggtacacttaacatattgtttgacctaccatacaggtgaatcaatgcactttataacaaggtatgattgcagtactaaaatgtttaacaaccctataagytaagaaatttgggttctcttatttaaaacaacacactgggctctgagaatactgctttatgtgtaaggttaatatctattctacaggtatttatatatatgttcacaaatacctccagtttatctgaacgcatcagttttgggccaacagctcctggcattgcaagaggtgggtttccaggaatcagaacaggtgtatttggtacaagttctgcaggaacgaggcccatncccaggatgtggtatgtaaggattgaaagcca

SEQ ID NO: 784591 - DNA, 559 bp, Homo sapiens
aactcccagtgccctttggcctgggaagctgcccaagtttgtctttccctttcattttaggccccagcactggaaagtgcttgtctttgtttctagaatgcttgctcacctgcatacctgggactgtgcttatcaagtgaagaggttctaggcaatgagagagaatatagaatgtattaaaatgagtcctgggctgggcatggtggctcatgcctgtaatcttagtgctttgggaggccgaggtggaaggattgcttgagcccaggagtttgagaccagcctgggcaacagagtgagaccctgtctctacaaaaaayttaaaaaattaaccaggcgtgatggtgcacacacctgtagtctcaactgctcgggaggctgaggcatgaggatagcttgagccagggaggttgaggctgcagtgagctgtgattgtgccactgcactccagcctgggtgacagagcaagagcctgtcacaaatgaatgaacgaatgaatgaatgggttctaggcctgaagtcaggcctcctgagttttagtccagcttctgtgctgtgtgtt

SEQ ID NO: 784592 - DNA, 624 bp, Homo sapiens
ccccaaggctgcagagaagaccctgaagcatatcagaacctagataaaatattttactggcaaggaaaaagagaaagaagagacagaaagggcaaccagaagtgtaagaatgggaagaaatttatgtttgcctccctacctggatggtaagggtaaaggaatatgtctcatatcactttcatatccccagtaaccagtattttgcctcccacagaaaatgttttggggaatatgtacaaacacataatggtgaagctcctataatcagtaaagtatatacttgaagtcattttcttaagagtggaaatgactttaggctcttacatagacactttgtctcctaagccatctcatggcaactgctctgtgttcaagaragcaccatggtttcactggggcagcaggcagataccatgtaattgagaaatcagatcaaacagatgcatctagagagggtcaagacaaataatacattctctgcattttggacagtttcctcaggtgtagccatgagattatatgccctgaatggctgtcatagcattgaaagcaaggaaatgtagtcctcatctccatctgttgaaggggacaataactattgaagaaggccactgaattaacaaa

SEQ ID NO: 784593 - DNA, 620 bp, Homo sapiens
tcctgcatgcattactctgggcaatctaaagtgaaaagtaatttgaaatacatgagggactgtaagagtattcatattcttaaatcaagaattccccttctgagaattcattcccagataatcaatcaagatattagggaaaaaatgaagctgttctctgtagaattatttgaatgacagctctgaaaatgtagctgtccaacagttggggaatggttaaatcaattttaatacctttactttctagaattttgtacatatattgaaacttgtgacatatacatttttaaaaatgcagattgaaaattgaagtactgatacatgttacaacatggatgaactttgaaaccatgctaagtgaaaggtggtcggcacaaacaaccatatattgtatggttacatttatatgaaataattagaataggcaaatctatgaakacataaagtgatgaatgattgcctgggactaggtgtgtggggtggggtgcaggaatgaggagtgactgctagtgggtacatggtttctttttgaggcgataaaaatgttctaacttatattgggatggtgctcgcatgactctctgaatatactaaaaaccattgaactgtacactttcaat

SEQ ID NO: 784594 - DNA, 620 bp, Homo sapiens
tcctgcatgcattactctgggcaatctaaagtgaaaagtaatttgaaatacatgagggactgtaagagtattcatattcttaaatcaagaattccccttctgagaattcattcccagataatcaatcaagatattagggaaaaaatgaagctgttctctgtagaattatttgaatgacagctctgaaaatgtagctgtccaacagttggggaatggttaaatcaattttaatacctttactttctagaattttgtacatatattgaaacttgtgacatatacatttttaaaaatgcagattgaaaattgaagtactgatacatgttacaacatggatgaactttgaaaccatgctaagtgaaaggtggtcggcacaaacaaccatatattgtatggttacatttatatgaaataattagaataggcaaatctatgaatacataaagtgatgaatgattgcctgrgactaggtgtgtggggtggggtgcaggaatgaggagtgactgctagtgggtacatggtttctttttgaggcgataaaaatgttctaacttatattgggatggtgctcgcatgactctctgaatatactaaaaaccattgaactgtacactttcaat

SEQ ID NO: 784595 - DNA, 594 bp, Homo sapiens
cattttacagatgatggaactgagtcctaaagaggatgaataacttgctcaaggccatgtaactaaaacatgacagagatgggattccaatccagttagtgtggcttcaaaatgcacacttttaaccaacacatctcctacgcctaaacagaagcatcasgagccttcaaaacatcaaattcagacaacgagagcatccaccaggcaatggccagcaaatgtttgcctctgtggcttgtaacccttaaacacaagatgtgttttgcagttcttcacactagtcatttagagatcaaaaactggacatgaaaactaatttctgcactgtgcctaaaggcaaagagactagtgccattgtactgcccttatgggcttaaaaatgataaatttagctattaaaagttcattaataatttctatgtgacaaaagaaaacaggaaaacagcctttccaggatgccatgattgtgtcccaagccactgagataatgtaatggcagtgaaatactaaaagataaaattctattgtggaggaagtgggtgggagttgcttgcttcatatttcccttgtccttcagatatcaaaattgttcag

SEQ ID NO: 784596 - DNA, 633 bp, Homo sapiens
ctttgcaatactgattttatttccttatacacccataagtgggattgctggatcatatggtagctctatttttaatgttttgaggaccctccatactgtcttccattatggctgtaccaatattcacagtagttaagatatgaaaacaacctaaatgtctgtcaatagataaatggataaagaaaatgtgaataataaatgtgaattattattcaaacttataaaagaagaaaatcttgtcattcccaacaacatgaatgaacctggaaggcattatgctaagtgaaatgtcagacacagaaagacaaacactgtaagatttcgctaacatgtggaatctaaaayagccgaacacatagaaggagggagtagaatggtggctgcccggggctgggggtagatgttggttaaggggtaccaagtctcagttatgccagatgaacaagttctggagagttaatgtagagccgggcgactatagtgaccaatgctatattgcatatttgaaacttgctgggagggtagatgttaagtgttctcaccacacacacatacacagaggaaaaaaaagaaaagaaaatggtaaccaagtgaggtgatgggtatggtacttagcttgattgtggtaatcat

SEQ ID NO: 784597 - DNA, 589 bp, Homo sapiens
ccagctgagcctagactcctggctcctgccaaaaggcacatatgtgaatgatgctgtcttgaacacttcagcccagcccagctgctggctaaataccactgagtgagcatagtcagtgccacagaggagaaaaatggcctaaaaatcatgagacataataaatggttgttgttttaagccagtaagcaytggggtcatttactttgccccaaaagataattggaacacccggactccaaggaaaaattgtggattgtttctggtgcaagtgcatattctgtgtttgaacaatttctgcaattatttttcctagatgtcattcagtcttatttaaataccttgagggggagggcaattattacttctggatttattccatttaatagtggaatggttatggctttcctccattcttccttctctctcttcgtcctctcttctccttgcctgtctcctccctgaatatttactggggagagaatcagagaatggctcccagaggaggtgatgcctgagctgggtcttgattggagtgtaggagttgagcaggaacattggaaagagctcattctaggcagggcatgtgcag

SEQ ID NO: 784598 - DNA, 570 bp, Homo sapiens
gaattgcatatgctgaaccatctttgcattcctgggatacatttcacttgatcatggtgtatttttttttgatctgttgttggattcagttagctagtattatgttaaggatttttgcatctatgttcagagatattgtcctgtagcttttttgttgtgtccttgtctgattttgatatcagggttttatagaaaaatctaggctstaccagaaaactcttagaactgataaacaaattcaataaaattgcaggatacaaaattaatatacaaaaatcagtagtgtttctgtatatgaacaacaaactagctgaaaagaaattaataagtttatcccacgtacaatcgctaccaaaaacaatagaataccaagaaataagtttaaccaaggaggtaaaggacctctataaggaaaactacaaaacaatgatgagagaaattgggctgggcacgatggctcatgcctgtaatcccagcactttgggaggctgaggcaggtgaatcacttgaggtcaggaatttgagaccaggctggccaacatggtgaaaccccatctctgctaaaaatag

SEQ ID NO: 784599 - DNA, 633 bp, Homo sapiens
catatgattttgtccttcagtctatttatgtgatgtacaatgtttattgaattgcatatgctgaaccatctttgcattcctgggatacatttcacttgatcatggtgtatttttttttgatctgttgttggattcagttagctagtattatgttaaggatttttgcatctatgttcagagatattgtcctgtagcttttttgttgtgtccttgtctgattttgatatcagggttttatagaaaaatctaggctctaccagaaaactcttagaactgataaacaaattcaataaaattgcaggatacaaaattaatatacaaaaatcagtagtgtttctgtatatgaacaacaaactagctgaaaagaaattaataagtttatcccacgtacaatcgctaccaaaaacaatagaataccaagaaataagtttaaccaaggaggtaaaggacctctataaggaaaactacaaaacawtgatgagagaaattgggctgggcacgatggctcatgcctgtaatcccagcactttgggaggctgaggcaggtgaatcacttgaggtcaggaatttgagaccaggctggccaacatggtgaaaccccatctctgctaaaaatagaaaaagttagccatg

SEQ ID NO: 784600 - DNA, 610 bp, Homo sapiens
aatgatagagttcttcatgaatgtttacaagttgtaaggaataccgttagtgaaagaggaaaagaagtgggttctgaaaatgcagtttcccatccaatgattttgataacaaaattccaacttttctcaatgaaactgatgcagtattatttgtgcaaataaaatgtgtcataaatatgcaaagaaagggagacatactgttcttatcttgaatatgtgcatttaaatgaattgtccaaaatgcataaatgccttgcgttctataaaggaaacaggaggtcaaaaagacagcgagatatctagtccttccacaaggtatggaaagcaataaacatcttcctttctttctggatctgtctgtgatstttacacacaccttcacatctacacttcaagttttaagcccctagacatgtgtcttcatgagcaggaatgtccactattattactttcatggaggatattgggtctaattcattgtgggaaactacttacctacccagcatggaaggcagggaggaagttagtctcttttcatcaagattcaagagtacaggggcaatttattacactgcaatgtacaaaacaaaaggacctgtttctgttagag

SEQ ID NO: 784601 - DNA, 627 bp, Homo sapiens
agtagaatgcttccacagtgcattagaaggtgcccaagctccacagggccaataatattagagtatatgtcatatagaataaggttaattaggagggtgattgtgaataatgagatttttaatttttttaagaaaaagctctcaaatgctaggctaataagttcatgattttaattcatgattttaattcatgattaaaattatttgattattgagtcttgataattatatcatcaaccattaccctctacatcaccgccccgaccttagctctaattatatcagagccaaaaatgtgtctttggttagatctgttggaaaagagaattttctataatgttatgcgcactcagcccttctgttcacatttacacacatgcacacacacatacacatatgcatttttcctttacggagtaagcaastatgaaaatctggttggttgagaaataaatggaagatgttcttgaaaatgacctcaggaaagcagaagataaaggttccagatgatatttgtaaggaggctatctctgtataataaggaaatggcatagacttattcctaatctcattatgaaacgatggtgtcatggacgtttaaccatattgcctttcagcatgctttga

SEQ ID NO: 784602 - DNA, 649 bp, Homo sapiens
agttcaagatcaagaccctagctgatttagtgtctgatgtgggcccacttcgtggtttacaaacttgcaaacagtcatctccttgtctatcctcacgtggtggacagcagagagaggaggcaagtgctgtcatgcctcttcctgtaagagcactaatcccattcatgagggcttcaccctcatgacccaactacttcccaacagccccacctccgaaygccatcacattggggattagggcttcaatgcatgaatttggaaggacagtccataacacactctctgccttgtcatcaagtaggggaagtgagagtgagagggaaggagccaggactgagagtgccaatgagcaggtcagctctgcaggcaactggagctcatcccctctgaggaccctctagatctgcatagaacagtcccccaagttacacccacatgggaaggaaatcagagtatttaccctctcctcctgtctgtcattgtttgaggactgctctcaggacctccatcaccgggtgcaggtcagacagagacgcactcctgtggtcagagaacaccctcaggcagagttacaagtcatcagagcagggagtccttggcatctatccatattgcccaggtgatacgggacattggcagtgtctgcaac

SEQ ID NO: 784603 - DNA, 535 bp, Homo sapiens
gcagtgccttctaggaggacaagacaggaaaaataatggcagttactgactgcatctatttaggttgcccttagttaatagagttttgtattactagtatttgtttttaactctgtaaagtagacactcttttttatttttaactatttttcatagtgcttagcaaagtctgggcacatctgcatrtggcttgttcattggtcactgtgtttatcattgcgctttgagtttgctgctgtgtgctctccccagtggctgctttggtgcattagactcggggatgccgatgcacagaccttgcgaccatatattttcactaaatgtccacgtggatctatcaagacttttattgctcttgggtacttgtgagtttgctaccacactggtgaatttttgtttgagattctgattgttagttgctgtctgaagtcctgtgtgagattcatgaatcttacataatgaggttagtttagacatgacaaagtctttgatcacttcaggtcagggcagggagttcatgcctttcctcacttgg

SEQ ID NO: 784604 - DNA, 580 bp, Homo sapiens
catctctacaaaaattttaaaattgcccaaaacccaaggtggcggcgtggccatcactggccaggatcacgggcacagtcctgcgctctgtggtggctcctcacagccctgctccagactcccgtgcaggcatctagtgggacacggcaaactcaggctgcaaggacatccrggcccagatgaggagagttttctgtgcttcccctacgacagcaacctgctgactgagagatccacctccaaaacccctcggtggtgttcttctacatggcccgcctgcaggcaagaagtgatggaatttatgttgtcatggaagttaatgtttcaactcaagaagagaaataacctatcgacattatctgatgacaaattacaagagtgtttcccatccccacagtataaaaaggttatttgcataggtgcaaaagaaaatggtttgccactggagtacaaaaagaagttaaaagctgtgggaccaaatgaccgtacaggaaaggtctcagaagaaattgaagacatcatcaaaaaggaatcacgaactcattagaacataacagaatatatctaaggatattccatg

SEQ ID NO: 784605 - DNA, 580 bp, Homo sapiens
catctctacaaaaattttaaaattgcccaaaacccaaggtggcggcgtggccatcactggccaggatcacgggcacagtcctgcgctctgtggtggctcctcacagccctgctccagactcccgtgcaggcatctagtgggacacggcaaactcaggctgcaaggacatccgggcccagatgaggagagttttctgtgcttcccctacgacagcaacctgctgactgagagatccacctccaaaacccctcggtggtgttcttctacatggcccgcctgcaggcaagaagtgatggaatttatgttgtcatggaagttaatgtttcaaytcaagaagagaaataacctatcgacattatctgatgacaaattacaagagtgtttcccatccccacagtataaaaaggttatttgcataggtgcaaaagaaaatggtttgccactggagtacaaaaagaagttaaaagctgtgggaccaaatgaccgtacaggaaaggtctcagaagaaattgaagacatcatcaaaaaggaatcacgaactcattagaacataacagaatatatctaaggatattccatg

SEQ ID NO: 784606 - DNA, 541 bp, Homo sapiens
caaacccaccggggggagcgaacaactccagacgcgcgcccttaagagctgtaacactcactgcgaagggctgcagcttcactcctgagccagcgagaccacgaacccaccagaaggaagaaactacgaacacatccgaacatcagaaggaacaaactctggacacgccgcctttaagaactgtagcactcaccacgagggtccgcggcttcattcttaaagtcagtgagaccaagaacccaccaattccggacacaatgccatcaccagtaagaagatacatcaacatgatgttccctcagtaggatgcagggagaaggaacaatgccacctgtggtttcctgcccaaaatgaatagmctccatctaacgccgagacacacccacgttgagagatattctacgaaatcagtgaccagtacttttcaacagtggcaaagtcatgaatgacaagggaagactgagggactgtcacaggttttaggagattaaggagacatgacatctatatgtgatagtgggaaaactgttgaagcccaaat

SEQ ID NO: 784607 - DNA, 541 bp, Homo sapiens
caaacccaccggggggagcgaacaactccagacgcgcgcccttaagagctgtaacactcactgcgaagggctgcagcttcactcctgagccagcgagaccacgaacccaccagaaggaagaaactacgaacacatccgaacatcagaaggaacaaactctggacacgccgcctttaagaactgtagcactcaccacgagggtccgcggcttcattcttaaagtcagtgagaccaagaacccaccaattccggacacaatgccatcaccagtaagaagatacatcaacatgatgttccctcagtaggatgcagggagaaggaacaatgccacctgtggtttcctgcccaaaatgaatagactccatctaacgccgagacamacccacgttgagagatattctacgaaatcagtgaccagtacttttcaacagtggcaaagtcatgaatgacaagggaagactgagggactgtcacaggttttaggagattaaggagacatgacatctatatgtgatagtgggaaaactgttgaagcccaaat

SEQ ID NO: 784608 - DNA, 541 bp, Homo sapiens
caaacccaccggggggagcgaacaactccagacgcgcgcccttaagagctgtaacactcactgcgaagggctgcagcttcactcctgagccagcgagaccacgaacccaccagaaggaagaaactacgaacacatccgaacatcagaaggaacaaactctggacacgccgcctttaagaactgtagcactcaccacgagggtccgcggcttcattcttaaagtcagtgagaccaagaacccaccaattccggacacaatgccatcaccagtaagaagatacatcaacatgatgttccctcagtaggatgcagggagaaggaacaatgccacctgtggtttcctgcccaaaatgaatagactccatctaacgccgagacacacccacgttgagagatattctaygaaatcagtgaccagtacttttcaacagtggcaaagtcatgaatgacaagggaagactgagggactgtcacaggttttaggagattaaggagacatgacatctatatgtgatagtgggaaaactgttgaagcccaaat

SEQ ID NO: 784609 - DNA, 482 bp, Homo sapiens
tttctaattacacaaaggtgccaactggctgttagctctactcgtaggtgtagtgtatgtgtaatggactggatcagcaaattgagagagagattacaagttcagtgcagcaaaaggcattgtggtgatctatttgaaattctttaccatattatgaaaaatattcctctctaaatctagtgttttcattgaaaaattcatactctctgccataccagaaacctactgtcactactcacatattcttcagaaatttcytgaatacatccaaatatatatttttgtacacacacacagccacagccacacatatattcatttatgcaaatggaagtttgctattttatcccttgtttttttaaaaacttcaagatttttattattgtggtaaaatatatataacataaactatatcattttaataatttttaaagggtaaaattcaatagcattaaggacatttacatcatttgtgaaactct

SEQ ID NO: 784610 - DNA, 582 bp, Homo sapiens
caagcatcgtttcaggtattaattgtggctatttgtgtatcttcttcagagacatgtttactaaaatcttttatccattttttacttgggttggcttttgagttttaggcatttattatatattctggacattaatcccttgtcagatatatggtttacaaatattttctcccattctgtcagttgtcttttcactctgttgatagcatactttcatgcacagaagttttaaattttgggccgsgtttagtggcttatgcctgtaatcccagcactttgggtggctgagatgggaggtcaagggttcaagaccagcttggtcaacatagcaagatgcccatctctataaaaagaaataaaaaagaatttaaaaaaaccaaaaaaataaatttttaattttgatgaatcccaattcgtctactttttcttttccttctttccttcctttctttctctttcttgcttccatttcttttctttctttctttctccttccttccttccttctttccttcctttctttctctttcttgcttccatttctttccttccttccttcctttttttctttcctgagacaga

SEQ ID NO: 784611 - DNA, 582 bp, Homo sapiens
caagcatcgtttcaggtattaattgtggctatttgtgtatcttcttcagagacatgtttactaaaatcttttatccattttttacttgggttggcttttgagttttaggcatttattatatattctggacattaatcccttgtcagatatatggtttacaaatattttctcccattctgtcagttgtcttttcactctgttgatagcatactttcatgcacagaagttttaaattttgggccgcgtttagtggcttatgcctgtaatcccagcactttgggtggctgagatgggaggtcaagggttcaagaccagcttggtcaacatagcaagatgcccatctctataaaaagaaataaaaaagaatttaaaaaaaccaaaaaaataartttttaattttgatgaatcccaattcgtctactttttcttttccttctttccttcctttctttctctttcttgcttccatttcttttctttctttctttctccttccttccttccttctttccttcctttctttctctttcttgcttccatttctttccttccttccttcctttttttctttcctgagacaga

SEQ ID NO: 784612 - DNA, 605 bp, Homo sapiens
aagggaagttttcatgacagtacaagtcttcatctatctccaaagacttcaagtttaattcaagaatagattaaagacatatacttcaaattaagttataagatttgggtatttaaaacactttacagtggaataatgagtcttattttttcatctcacttgtaaacttgtcttgtcattcaaagttgaaagtatagggactttacataaatgtacaggatgttgccattgtttaaaataatcttggcttccttttatgaamtcatattttgtctcaggtgtgattatttatctcagcctaaacgtgattatttgtctcagcctaaacttgatgcaaatcaccttctgggaggcagatttgacctttgaaaaatagaaagatgattgaatgtgaagtctggtccctaaggtaggttaacaaattgggtaaggctaattttctttaaaaaagaggtaagtgcctgtctgtttcttccatggctcacaactaggatgcttgactaatttagattgattaggtgttcaatcaatagtttagacaaaaaagtcggcttttactctgagtgaactgggaatgaatgaatacatgaattcaacaaatattg

SEQ ID NO: 784613 - DNA, 605 bp, Homo sapiens
aagggaagttttcatgacagtacaagtcttcatctatctccaaagacttcaagtttaattcaagaatagattaaagacatatacttcaaattaagttataagatttgggtatttaaaacactttacagtggaataatgagtcttattttttcatctcacttgtaaacttgtcttgtcattcaaagttgaaagtatagggactttacataaatgtacaggatgttgccattgtttaaaataatcttggcttccttttatgaactcatattttgtctcaggtgtgattatttatctcagcctaaacgtgattatttgtctcagcctaaacttgatgcaaatcaccttctgggaggcagatttgacctttgaaaaatagaaagatgattgaatgtgaagtctggtccctaaggtaggttaacaaattgggtaaggctaattttctttaaaaaaraggtaagtgcctgtctgtttcttccatggctcacaactaggatgcttgactaatttagattgattaggtgttcaatcaatagtttagacaaaaaagtcggcttttactctgagtgaactgggaatgaatgaatacatgaattcaacaaatattg

SEQ ID NO: 784614 - DNA, 487 bp, Homo sapiens
atttgtttgtgtcatctataatttatttcagcaatattttgtagttctccttgtagagatcttgcacctccttgtttagatatattcgcaggtattttttgtggctattgtaaatggattgcattcttgatttggctctcagcttgaactttattggtgtatagaagtgctactgatttttgaatattgactttgtaggatgaaactttgaatcctggaagaaaacttaggaaacacaatattggacatctgccttgagaaataatttatgactaagctttcaaaagcaattgcaacaaaaacaaawgttgacaagtgggacctaatttaactaaagagcttctggacagcaaaagaaaagatcaacagaataaacagacaacatatagaatgggagaaagtattcacaaactacacattcaacaaaggtctaatatccagaatctataaggaaattaaagaattgaacaagcaaggctgggcatcc

SEQ ID NO: 784615 - DNA, 580 bp, Homo sapiens
aaaagaattggctaaacaaaaaacaaataacgccattaaaaaatgggcaaaacatgaacagacacatctcagaaaaagacatagaggcagccaacaaacatatgaaaaaatgttccacatcactaattatcagagaaatgtagatgaaaaccacaatgatatactatctcacatgagtcagaatggttactactaaaaagtcaaaaaataacagatgctggtgaggctgaggagaaaaatgaacacttayatgctgttggtgggaatgtaaattagttcagccattgtggaaagaagtttgaaaatgtttcaaaaaacttaagacagaactaccatttgactcagcaatttcattactgggtatatttccaaaagataataagttgtactacaaaaaagacacatgcactcacaggttcattgtatcactactcacaaaaacaaagacatggaatcaacctaggcgcccatcaaaggtggattggataaataaaatatggtatatatatatacaccatgaaatactatgcagccattaaaaaagaaggaaattggcccggtgtggtgcagtggctcactc

SEQ ID NO: 784616 - DNA, 626 bp, Homo sapiens
cttttacatggaaaatgcgagaacatgggttgttggcagaagtaaggtaaatatagaacctctgatggcgtttgggtgctatgaagcttattcatcgccacagaccagcaatgacaacattgttcacaagtggtaaggttgcaataaagtagtgcaagtcttccaaaagatgtggtattaaaattcatgctaattactctcctgtcatttttctacatgcccacatatctatctaattgtgctaactttgatggactatttcacttcttttcatacctcttttggttactatygaaagaactggcttatgagtctgggtggagaaagagatgatgacaatcttgagtttgaaatgtattctggagtcaaaaaaagggatttgaatgaattctgagctcagctgagtatagtcagtagtttaagtgaaactgtactaacataaatcttgtgaattagcagaacatgaagacaagttagcattttgtggggctgcagacttattgcctctggcagtgaaaatatgactagttgcattttgttcagaacttagtaaactatataatgacattacaagttgaaaaataacttgattttgaatttacagttttgaatccatatgagctgtc

SEQ ID NO: 784617 - DNA, 590 bp, Homo sapiens
ctgatggcgtttgggtgctatgaagcttattcatcgccacagaccagcaatgacaacattgttcacaagtggtaaggttgcaataaagtagtgcaagtcttccaaaagatgtggtattaaaattcatgctaattactctcctgtcatttttctacatgcccacatatctatctaattgtgctaactttgatggactatttcacttcttttcatacctcttttggttactattgaaagaactggcttatgagtctgggtggagaaagagatgatgacwatcttgagtttgaaatgtattctggagtcaaaaaaagggatttgaatgaattctgagctcagctgagtatagtcagtagtttaagtgaaactgtactaacataaatcttgtgaattagcagaacatgaagacaagttagcattttgtggggctgcagacttattgcctctggcagtgaaaatatgactagttgcattttgttcagaacttagtaaactatataatgacattacaagttgaaaaataacttgattttgaatttacagttttgaatccatatgagctgtcttcaaaactgcttaccttacatttc

SEQ ID NO: 784618 - DNA, 566 bp, Homo sapiens
ctctcagggttcattcctgacatttcagagctggctctgaggttatgcaaacaaactgcggccagagtctgactggaggtgcaggcttagggggcagacctggggcccgttttctaacatttcctgcccaaggagaaggagaagaaggtctgtgtacatcccagcctggctgagctctaaggccagggaggagagaactagaaacatgtggccctgccctctgtgggatggctggccaagccagttgaacaaataaacccgtccttttgggggaagtcgtcagggggtctgctgctgctggtgcctgccctgcacccccacctcatcccaggcatgagccagctggtcatccccaggcygagggtatctgtgccagctgtttccaggcccccttcttggaaaaatcatcccattcctctaagaagcagatgctgtttcccccatcccccagtcccaaactgcttagaaaggagccagcagtgaggttaggaaatcaaaccccaagatattttgttcggcaccgagactcatttcttgtttggataactgaaggctgaaaatgccaa

SEQ ID NO: 784619 - DNA, 510 bp, Homo sapiens
ttaattttacatttcaaaaaaaaatttttttttctgagagagggtcaccggatgccaaaggaccccaaggtacaggaaaggttaagacccctgaaggcctgtcccacacaaggttcctcactggtgtccccagtaggctaccaactctgagagtgcaaggactttgcctgccttctggggcctggaagactgtctggatatttgtaggctctgctgttgaccccaattatagatgggcaaatggaggttcaggctcagagtcacttccctgaggtcacccatcaagttgcagatgctagattcctcctcakgtctactgatttggaaggctgggaggtcaggtcttgtgggtgtaagagggtcaaggcgggggctgggcgggtgaaagtggtgcttccctcacccagggtacgacccaggctttagccttgcagccagtgagcccagaggatggggtgaaccctgctgctggcttctgcctgttgacccagttcctgggtctctgcccag

SEQ ID NO: 784620 - DNA, 635 bp, Homo sapiens
ttttgatgccaacatttttgggggtagagtttcttcataattggggtgtgccctgggaagtgtgtcttgcatgagaacatcatgtcatggtgaactaaggatttaatacagctgtcctggaggactccccagggctaagaaggatggggaaagagagaaagacaccactgcccctgctgaggtccctgctctgtccttggggaggacccagaaccatgcaggagggccctacacagacagtgctgggcagcgcatcctccgatgcccgcctggcagtgcaggacgcatgtcaccgatgaccaagggaaataaaaaacatctgggcacccgcctgcccactcaggcctccacatatgggaggcagtcgccactgctggaggcttgctcagaagatcccccagcacatttctgcytaggggtagattgcaccatctctagcaagggggtgggccctggagatgactcccagcttagagactccctgggatcagggctagaggtcgctagcccactggacccttctcagcactcaggaggtggggggaccagcagggcagaacattcagcagaatgttgaggttgccttggctttggggcctgacaaaccaccacttcctagctgggtgatattgggc

SEQ ID NO: 784621 - DNA, 556 bp, Homo sapiens
atgtatacatctgtaatgattaaattagggtaattaacatatccatcacttcaaacatttatcactttttgtggcaacaatgttcaatcctttcctcttgctatttttgaatatacattatttttcactgcagtgaccctactgggcaatagaacaccagaactcrtttcacctgcccaactgtaactttatacctgttgatcaacctctccccatcgcccctcctccctgccctccccaggccctggaaactacgattctactctttacttctatgatgtcagctttttagatttccaatatgagtgagatcacacaatacttgtccttctgtgattggctcatgtcacttaacataatgttttctaggttcatccatgttgctgcaaaggacaagagttcattattttttatggctgaatagtactccatcgtgtgtatacacaacatgttctttacccattcttctgttgatgaacacctacatcgatttcatatcttggttactgcgaattgtgctgcaataaacatgggagtgtagtgatttctttgacat

SEQ ID NO: 784622 - DNA, 646 bp, Homo sapiens
agagttcctatcacatcatatcaaaggtacatagtatatgcatgacattactgcctgcctgcatcagccttgatcacctggctgaggtagcgatggtcaggtttgtctgttgtaaagttactctatctccccctttccattctataatccaccctatggatggatgrcttccatcctgtactctatggaaggaagccactatgtgtagttaatacctatggggtaggagtcttgcttctactcatggaatcctactcatgaaggcagggtatctgtgtaaattatttgaaattatccttcattggaaaattgtcttttctccttgtttatttatttgttcattcatttaaccattaatttatatcaaaataggttagtggagatttattttataagttgagttataacccatgcctttattgctcctttagttggcctccttggctcagctttggtcattaggagttttcagttggctcctgtgctttttgagatagctttgtcaatgtgtatgttgttttatattttgtatgtttgtttgttttaagcactttcttcctttttggccctacaagctgcttcagacccatcttgtatattacctcctccagtcccagaatgagccatttgtttaaggatccctggt

SEQ ID NO: 784623 - DNA, 470 bp, Homo sapiens
gggctggcccacctgccgggcaccctgacccctggaggttacatcctaatgggggaagataggcagtaagcgccaaagaagtaaataagataacgacacactgtgctaagtacttgggggcgataggctgatgtgctggaagacagttttagacagggtggtcaggacaggcttcctaaggatgtgacatttgaactcagatgaatgacaagaaggagccaggcgaagtaagagctagggagggaaagctggtgccaagaccccgaggttaacaggaggcgacagattttgagagacagaaaggccagtgcagatagaggctgttgagcragatggggagtggtaaggaaagtcactggtaaggtgggcaggggtccaaccactggggcctgtggccacaggaaggagtttcagttttattttaagtgcagtgaaaagcaaggggaaggtctagaccttccccttgagag

SEQ ID NO: 784624 - DNA, 477 bp, Homo sapiens
caacttaacaattcttacttcaaacatgtaagcatgacgttcctctccttcatgccttcctggccatttttttttttttttttttgagacagagtctcgcttcttcacctaggctagcgtgcaatggtgtgatcttggctcactgcaacctccacctcccaggttcaagcaattctcrtgcctcagcctccccagtagctgggattacagccacatgccagcacgtccgactaatttttgtacttttagtagagatgggggtttcactatgtaggccaggctggtctcgaactcctgacctcaggtgatccgctcgcctcggcctcccaaagtgctgggattacaagcgtaagccaccgtgcctggcctggccctattttatctgggtctgacaaaagttatttcatcctagtatctgcaatttttccgcagaaaattacagagacgcacagtgaatgtgaaaggagggaaattaac

SEQ ID NO: 784625 - DNA, 612 bp, Homo sapiens
tcagataatatttaaaaaacaaacagacttagaaaatggatttatagctttcaaacaagaaaacttctgagaagaaattttcttctagaacaaatgattctatttttctctgcagattgttagtaacaaaaatgatttaatgtttatgtgacrtagaattctctgatcttagaagagtgagtcttttctctctctcaaaaactcttaaaactgcattttttaacctaaaatataaactattaagatacatctgtagatggcactagagttttgctttttatagcctctcaagtttgaatgagacatttccaacttgaaatgaggcttattgaaagaattgcttgataaatttcacgatcatcaaaccactcttccctggttgtgaaataaaaatgtgaaaattccttaatatgtgctttatattttgacctttaggtttggatttggaacaatagcattatttgtactgtaggtttttaagtcatgtctcactgaaactatcccagacttgctttgaagaaatcttaatatacctttgattgtggaagtaaagggaaatcattagctttccttcagcatttcagaaacattcatgttagacagttgctttca

SEQ ID NO: 784626 - DNA, 621 bp, Homo sapiens
agtttatataatttggccaacatctacaaaacaagtggacaatatttcctcttcacttttaacaaagagtagcaaaatgtttttccttacgtagaggtgactggcacacgagcacaaatttaggcttttaagcattactgaaagaaatatctcaggggattttaatttytaaactgatgcatatgttcttttcctcaggttacaatcttaatctaaaagtggttcctgcttcataatgcctgtggacatgaagctaacaaatcttttcaaaatgtgttcatgtggtaattcactgcagcacaggagcaataatcagctatgtgcaggcatctatgctactgtctcttaaaatactttaaaagtaaggttagttattgtctattcgagtcagttagctcttacaattcatttgatagtgattatcagtacaatatattagtttgttggagtgtgagaataatggtgttaatccttagaaaaatgcaagaccaaagggaaatttaaattttgcatatttatgtttaatgtcaaatttatattcaaataaacggttatgattataactctttgtaaaagaaactccattttaagccccccagattatgatcactttcaaataca

SEQ ID NO: 784627 - DNA, 558 bp, Homo sapiens
taaaagaactagaatcatcttggtccattccaaaatttctaaataattcagaagacagaaagaagtgaggcctaacatacacacaaggatagacaggattttgaacagccttatgtgccttttcttagagatttaaaaaaaaaagggcaggcaatccaaagacatacttaggatcttgaattgacaagatgtggtggtaattcccaggtttctggcttggagaacagatagggaaactagaaagaagagtaaggggtcaatactttggaagtgagtaaagcaaaacaaaattaaacaacggaaaaaacacacaaaaattataggtgaaattttgttttatacattatacacagtgctytacataaatataatccttattattgcccctgtaaatatgatcactttcattttctgatgaggagattcatgtgaaagtttaaaaagcctacctaaaataataccgacagaaaagtgctcttgatcccacctattctatgctaccaaactgctctcccaaaaggcagttagaaaaatttcaatgcaagtagtatagtgtag

SEQ ID NO: 784628 - DNA, 626 bp, Homo sapiens
aaaatatcccagattagccaaagcattcttttaaaaaaaatagaaagttggaagaagacaaaaccaattatggtaatcaggatagtataagctaggtctgaatgtatttcctccaaaactcatgttgaaatgtaaatgtcactgtgattgtattgtgagatgagacctttaagaggtgtttaagttatgagggtgcctcacaaactgactaatgccaktatcactgagaatggttaaccctttttgctgtctctcaccctgctggcatatgccttccactatgctatgaagcaggaacaaggctcctgccagatgccagcaccttgatattggacatcccagcctctagaactgtgagccaataaatatctgttcattataaattacccagtctgtgggactctgttacagcagcacaaaatgaactaagattgtgtgatactggcataaggattgacaaacagatttcttcaattatgttttactgttctttccactgactatgccataattggaaacagtacctgatttcccacaattttattttcctaactcacaagctccagctattttctaccttaacagccacagaaaatttatggagaagaattttagacatttgtacc

SEQ ID NO: 784629 - DNA, 682 bp, Homo sapiens
tgcttagtgtcaggcttgccatctaaagtatgttttcagaaatgtcaagcagtttttggccaccgagtgtatgtcagtgtattctggcggatacaaattattgttttgcgttacttaccatattatcttgcaataaaagacctgcaaactcatcacaagatcaactgcaaagtcatctacagaatgtaaccatatctataatgacaaagaaaacattgttatattaccaagtcaaaatatcctacactggcgctatcctacacattgtacggccaattataaatatctttctggtggttttagcccaagtaaaagttaccccagtgaaggtgtgttaatgaagtccactccactccctgcctggtkactaaaacctttactcaatgctcagaacaaagtctgattaattcttcactgactttcagaatacaaacagtatccgtattttctcttccattaaaacaagcagtgattagcagaccctggcaatacatactcagtcattcaaatctctttagaaggtactgaaagatactttgtaggcaagagtcatgaaaccaagatttcagggtcaagtacaaaacaggcacaactcttaagtatattccttttctaataaaaagtattttcagatctcttatattaaaatagaaaatagttttggttgttctgacagcagttt

SEQ ID NO: 784630 - DNA, 563 bp, Homo sapiens
aggacatggactatctcatacataagattatgatcagcagtgggctgaattgaataagcctggcaggatccatgaagctgggtgtataccacatgtgcttgtgtgctctctctctccttcatatacaaatatacataaacatacatacacacacastttcaggatcctgagtgttcaagatcaacttgaaagtagcaaaactataacagtagaaaaatacctttatgatttctgtaagttaagagacgtagaggggctaagctgattctgccagtgacatcaatctgactttcagcaaataaattcacctatctccacctcaatttcctaggaaggcaagggctttctctgttagttttactactttatcctcagctcctagaatacagcccagcactggtagagctcaataaatatctcttgaaagaagaaataaaatagtttgatctcaaatgtctagggtctgggctaggccataaacgaatggcaaagatgcgctgatggccttggcctctggcatacactaaaaatagcttagcgacatccttggcccttcatcttag

SEQ ID NO: 784631 - DNA, 424 bp, Homo sapiens
aaacacagccaagcccctaatctctctggtccagcctgaacttgaatctggacttcctttgtctactatttccttgtgttgtaaagaagctgctggccattggatctgcttcatttctggaacttagtgtctttccacttgagaggagtcattggctagccacacctgatacccatttcagagagccgggcagaaaacaaartgtgtcctgtagattgctggagaatgagcctgtgcggctcctgtcctagccctccctccctacctccttaagaacagtaatagtgggctgggcgtggtggctcactcctgtaatcccagcactttgggaggctgaagctggtggatcacgaggtcaagaggtccagaccatcctggccaacatagtaaaacctcgtctctactaaaaatacaaaaattagct

SEQ ID NO: 784632 - DNA, 620 bp, Homo sapiens
gttgccatgttactgttgtccatggtgccctgtgcatggaggctgacagcctctgacaggccctgcccttctgctgacccccaggctcgtgaagggaggcagaagggcactgcttataaagcataaaagtgggacatgccttcragcccagttttctaacctttgtcctcacaagattgcacaaatcacttggttccatgcctgaaacacatgcttcatgcacagggagagtctgtcatacttttgagggagtgttacccatctaggagcagagctgctgatcagcgcattttcctaggtacgcatcacaattcatgcacaaatagattctcaacacttggggctgagtattggaaggtagctggagaatgggacttcattttggcaacaataaattccattttttctagagttttctaaagaaattcatagaatcatcagaggcttgaatggtaagaggttaaaagatgaagtgacattgcacttaggctgtgtcagtgaatgactggctgaggcatctgtttccctgttttctcattgctgaaaaatggtatgctgccttttgcaaagtctttattttgtatctttatcttaaagtggaagataaagactttgaaaaa

SEQ ID NO: 784633 - DNA, 488 bp, Homo sapiens
actgtttttccctgttactgtgtctacccgtcccagctacagcctgttataaaaaggtggccatactgttccttccaaaatcgcccaatgcctcccgctgtcactcagagtgagtgaggttcccctagtggcccctaaggactgctgtgatcatggtctgtgcctctgcacctctccagcctcatctcctaccaccttgcctccctggctcacccactgcagccacactactgcctygcgcctacttaccgtcactctccatccgccaaatatggccatgtccgaattcccagaagctgcagattactttatgtgacaaacggacttgcaaatgtgattcaactaagaattttaaaatgaggagattatcccggattatccttgtgggtccaatctaatcgcaaagttccttacaagagaaatgcaaggagagtcggaagaaggcaatgggatgatggaaacagggcgagaagaggtgatgtgatgtg

SEQ ID NO: 784634 - DNA, 609 bp, Homo sapiens
atattttctcccgttctgtaggttgtctgtttactctctctgttgatagtttcttttgctatgcagaggttcttttagtttaaccaggttccatttatcaattttttatttctgttgcaattgcttttggagacttagtcactttttttttttttttttttgccaaggttgatgtctagaatggcatttcctaggttttcttctaggaattttatagttttaggtctaacagttaagtctttaatccatcttgagttaattyttgtatgtggtgaaaggtaggggttgagtttcaatcttctgcatatggccagcctgttatcccagcactgtttattgaacagggagtcctttctccattgcttgttattgtcaaccttgctgaagatctggccttaggcatggggctttatttctgggttctttatcctgtttcactggtctatgtgtctgtttttatgccagtaccatgctgtttcaggtagcaaataaaggcaggaacataaaaccaaatactgcatgttcttacttataagtgggaactaaacattgaatacacatggccataaagatgggaataatagacactagggactactagagggggta

SEQ ID NO: 784635 - DNA, 458 bp, Homo sapiens
ttgtagatgaggtgttactagaacacaggtatgtccatttgtttacatgttgtctacagctgcttttatactacaaaggcataactgggtagctgcaacagagactgtatagcctttaaggtctaagacattcaccctgtgactctttacagaggacatttgctgacctcaacctaggctatgagagctccaaggccattcaccaagtatattgtaaactccctgagagcagagtccytttggaacctcccatgggacctcacacagtgaggtacacaagagaatcaaagaatcaacttttagagctgaaagggacctcgggtatcattttatccaacccttttattttagagatgaagaaacccaagctgccagttgaaaataacagaatggcagaaagcagaaccaaaaatcaagtttcctaaactccactgtaatgctctattacttgacaattg

SEQ ID NO: 784636 - DNA, 552 bp, Homo sapiens
tgaggatcccagaaaggttttgtttatgtggatgatagttattgatatttaccgtgttgtaagttaaagctgaaaaacatttaaatatttagaaaaatgctataataaatgtgtctattaacatacacaacatcttaacacaaaataactatattttctaaaaacaagaaatttagtaaaagtggcaatgttttatatttttacaaaatctttaacatctgacttagtagaagtcggcttccacatttaatctcttggtatttagttggggtatatggggcttttgttgttgttgttgtygttgtttttgaaacagagtcttgctctgtcatccaggctggagtgcagtggcgcgatctcagcttattgcaacttctgcctcccaggcagtaaatactgacaaatattaagtctgagtaagcatggtgtgtcagccagttgctctttcaggtaaaaactgctttgtgagggaggcagctggttcagctggcaactcaatcatacaagtgcttttccttccacaaccatcagactttggaatgcagccaaaga

SEQ ID NO: 784637 - DNA, 642 bp, Homo sapiens
tatttgtggtctaaaacctttcaatgcattttgacacttccagtcattgtgatgattccttaagttctgcttgctcaagggagaattaaacaaacactatatttcccagaccccccttatatcttgggtgtggacaagtgcctacatttcttcaaacacacatggcaagacttcagttggaagggagtttgtgcagctgcattctggtggtgcrggcgtagtggctgagatcaccacatccacattgcattcatcctcctccacttaggccactttcaccctgttttcaagggagacagccacacaaggctcctcatgctctcacaatttacactctaaaaagatgtgttaacggaatgtgctggatctttagctgggaaagttgaaatactagaggtggggctggggagaactgggctctaaagttggcctttgaggcaggtaggaaattttccagaaggtgggaaaacaatctctgaccaagcagcatctctatcccagggtcctcaactgacatactatcaggtgggtggtagtgctgtggcatgggctgtgagtggtggtgagtggagggagtctgctctcttgtttgatacagttgttcagaagaagtcaggggctgtcatatatatatggggtggg

SEQ ID NO: 784638 - DNA, 497 bp, Homo sapiens
ctgctatatggttcttaacacagtactggacataatacaagtatcaataaatacttactaattaattcttttagctctttgctactgccttggcctataattataaataagctatttttacatttgactgttattctctgatgaagaggaaagcaaaggatcttaactctgcttaaaaaacaatgaagtgttttggagtctgaagtcttgcattctgaattcacctttattattcattaactgcttgaccttggtcaaatccatttttctcagcatctcttttgtcatttgtaaaacagtaataacwatatttgcttcgcagaataaggaccaatgaggtcaggcatatgacagtatttgtaagatattctatgttatacaagtggtggttatttatattatcaatgagaagttgggagaaaaaaaacttccctaatgtccagttaggagacatgcatgtaaaaggaatgtggggctgtggagagctgagttaagac

SEQ ID NO: 784639 - DNA, 566 bp, Homo sapiens
cttcttcagtggaccactggaatggtgagtgttcagtgaaccgcacaattgccaaagagataaatattccagatgttgggaatcagaggttaaactaggttttgtttgcattactaacagacaccttcctacttaaatcagaaagactcatgggcctacaggaagtgacacacaacctcagaggtatttactgtccatagtctgtaacagcatctcactccatgcacagttgtaactgcagagacgttcttggacgtgtgttcccagccctaagtaatctccataaacttaaccataaatctaactacagctaaacgtgagagtttctgttttgttattatatatcttaatcytccgtgtggaacatcactcattccacaagaaaaaggagaagaaaggctctgaacaataaaatcagcaatgtgtctccccaaatcatgaaacagttaagaatgagccccactgaaaatacaaccagaatgtgaaacaaagcccctctcaagcccatcataaaaccgtggtctggtcaagctgcctttgtttagtagtcaggtctttgctagtga

SEQ ID NO: 784640 - DNA, 611 bp, Homo sapiens
attaaaaatgtgctctgctgataatatttttataaacactgcacactgaacaagagcaatgttctttagataccaatttgctgctcttctacagccagtctttctgctaggtcttgtcaattgacagattctgttcaatatggttatttctgctgaaatgtactagagaacttacatcaaagtccccttatgggttaaaatgttgaatttggtgtctctctttaactagtacagccactagacaattcatcagtgtgaatgctggaatgtccaaatatttgttaraaaaaaaaaatgtctataaagccaaggccttcaacttcaggaaaggtaacaaatgatttgatgtcaaatgtgacttgtaggaaagcactcagtttaaaaatattttccctcgaccctgatgctcaggtagaaattgctttcactatcattaaagtagtcatagtgaaggaattcttaggctttccattatttccttagatttatcccgggacacaaaagccacaggagtttcattaaagcaaacttaactcacaataggtttcatgagtggcggagaggagtctaatctgaaaactaaggagtcagcaaaagttaatggctggagc

SEQ ID NO: 784641 - DNA, 617 bp, Homo sapiens
gctaatacagtagccaatagccacatgtggctatttaaattttaatgttaattaattacaatgagacaagatgaaaatttaattcctcattcatagtagtcatatttcaagtacttaatattcacatgtggctagtgggtaccatatcagcatagatacaaaatatttccatcatcatatctttttttttttttttgagatggagtcttgctctgtggcccaggctggagtgcagtrgcacgatttcggctcactgcaagctccgcctcccgggttcatgtcctgcctcaacctcctgagtagctgggactacaggcgactgccacgacgccaggctaattttttgtattttttagtggagacagggtttcaccatgttagccaggatggtctctatctcctgaccttgtgatccacccgcctcggcctccctatcatatctatttatgggacagtccttctctaaactaggggctagggaagcttttcttaaaatttaccttaacagtaaatagtaaatcattgaagcttccagacccaatgacctctgtcacaactgctcaactctgcctttgtagctggaaaacagccatacctagtaagtaaacaaatgaaca

SEQ ID NO: 784642 - DNA, 611 bp, Homo sapiens
attaaaaatgtgctctgctgataatatttttataaacactgcacactgaacaagagcaatgttctttagataccaatttgctgctcttctacagccagtctttctgctaggtcttgtcaattgacagattctgttcaatatggttatttctgctgaaatgtactagagaacttacatcaaagtccccttatgggttaaaatgttgaatttggtgtctctctttaactagtacagccactagacaattcatcagtgtgaatgctggaatgtccaaatatttgttagaaaaaaaaaatgtctataaagccaaggccttcaacttcaggaaaggtaacaaatgatttgatgtcaaatgtgacttgtaggaaagcactcagtttaaaaatattttccctcgaccctgatgctcaggtaraaattgctttcactatcattaaagtagtcatagtgaaggaattcttaggctttccattatttccttagatttatcccgggacacaaaagccacaggagtttcattaaagcaaacttaactcacaataggtttcatgagtggcggagaggagtctaatctgaaaactaaggagtcagcaaaagttaatggctggagc

SEQ ID NO: 784643 - DNA, 549 bp, Homo sapiens
aaactatgcaaaagtgactgtactggaaactctgaaattcactcattgataaaatgaatgtataccaaagataaacgatgaatgatatacaccaggaaagctttgtttggaaagctagaaagctaaagccagatttaattgaaacttcctaaaaatgctaaaggataaatattaagaatgggataaaatggtttaatgttagtaggtggctatcaaaaaccactcaaatacagctctcaaatatgccagaagtttaatgctgggaagaataggaagaagatgaaaactaaccaggttacatcctgagggggggaaatcatcattgctaaaatgatgggatcttctgagatgcacmagctattgagatatcaagtccaaggaggtcagtggttttacggaatacaaaatgtgagctctttgatttcaagaagtatgtcttacttatctgtataaccccagtagctgacgtcatttcacattcaataaatacagaagaaaggatagaagaaagaaaggaatggaaagagggagaaaggaagaggaccaggt

SEQ ID NO: 784644 - DNA, 472 bp, Homo sapiens
ctccaatctctttccagacttcttttgagcccatgtaaggcaatattcccccatgccttttagatctccatgagtcacatcatttctgtttctcgctctccccggcttcctgtgcttttctttagccttccttcctttcttgcttttttccttcccttccttccgtttccaccttttatttattcattaaaaaaagacatataagccctcaaacacaattttggtatacaaggtcttgtttattatataatagtcattgttttggatcaactcagagaaaagtatagagcccttcttgaattacttaaaacttaactataaattagrgcatgctttatttaaatatactcaagcactgaaaaggaataggtatctgtgttctagagcaggctgtggcaaactgggggaacaggccaaatcactcattctaacacttgataacatgattttttatttcagttattcacaagaa

SEQ ID NO: 784645 - DNA, 569 bp, Homo sapiens
ctatgaatatttgcagaaatatctttgtgttaacagatgtaatcacttctcttgtataaatacctaggattgaaattacttggtcatatatttttaaccttttaatatacagccatcatttttccaaatgctgaacttttscctcacatcctgtaccattttgccttcccatcagcagtgtatgacattttcagatgccctatatcatcactaaaaaatgatattcataggcctcttaactttcatctagtgagtgtctaatgctatctcattttgattttaatttgtatttgtttgatgtctagtcatctttttatgtgcttattgcctattcttatgtattattccttttgtaaagtgctcaaatctttcatccactttttaggtatattttctacttattatcgagttgtaagagttctttttataaaaaggatacaaactctttgtacatagagttttgaatccgtaatgaagttaatttgggcattgttttatattttgtgcttttagggttctgtctaacaaaacctttgcataacctaaagaaacaaatgtttttacctatt

SEQ ID NO: 784646 - DNA, 569 bp, Homo sapiens
ctatgaatatttgcagaaatatctttgtgttaacagatgtaatcacttctcttgtataaatacctaggattgaaattacttggtcatatatttttaaccttttaatatacagccatcatttttccaaatgctgaacttttccctcacatcctgtaccattttgccttcccatcagcagtgtatgacattttmagatgccctatatcatcactaaaaaatgatattcataggcctcttaactttcatctagtgagtgtctaatgctatctcattttgattttaatttgtatttgtttgatgtctagtcatctttttatgtgcttattgcctattcttatgtattattccttttgtaaagtgctcaaatctttcatccactttttaggtatattttctacttattatcgagttgtaagagttctttttataaaaaggatacaaactctttgtacatagagttttgaatccgtaatgaagttaatttgggcattgttttatattttgtgcttttagggttctgtctaacaaaacctttgcataacctaaagaaacaaatgtttttacctatt

SEQ ID NO: 784647 - DNA, 610 bp, Homo sapiens
taacttttacaacctaattttataaatcataaaaataagtttatatgctttctgtattcccacatacaagccagaccctacattaaatagaatcctcttcaactttatcaatttctcatgagccaagcaagataaaattttctagacgtaacaaatagatttttacttactttagtgtttttacttattatgtgaaaatatttctttgtgactagttatcttaagattaattgtgagaccaatgttgtgattcttcagtcccctttgcctcatcattctaaaagtttagttgtagggctagcttaaaaaataattaaaatttatttctaagtgtgtatatatgcatgctcacatatgaatgcttatgtgccttcttacctaaaacttagcrtaagtgtagtaggttgcaactctaagtgtaagcaggttgtaactgcaaatatagtaagttgcaaatgtcatttatttgacatcttaaaatattacctactctttattttaggatcagcttctttaccccttcataatactgagcttgcccagcttacatagttctttgttgactttggagcaaatcttaaattcccaaagagcattctttccaatcttc

SEQ ID NO: 784648 - DNA, 556 bp, Homo sapiens
gagcagaggacagtgccttgacccccacctccagcactttgactcaaatctgtgtcctttctctttgaaagtgaactggaactctcaaaagtaagaacaggatagtaagagatagttaaaggaatgtaagctcatacatgtcaataaaattcaaagttctatttatgtcttagtcactttatttgtgagacctgttccaattcacccactgccttaagacatctatatgctagccctccaatacaggagcaaggtacaagcacatggctagtttttttcatttgttttcactcgatccatccccatgtgacaactgcatggttttgccacgcaggtmttttttcctattctgctttatatctctccgggtaaatgttagataagaagattctgccctttagttaatagaaaaagaaataataggagagggagaaggaaatctgatttttaaaataattaatactatgtgttttatatatagtataaaactttatgttaaaaaataaagaatactttatactttaaaaaaaattttattaatgctatgtgctttata

SEQ ID NO: 784649 - DNA, 628 bp, Homo sapiens
ctagtttttttcatttgttttcactcgatccatccccatgtgacaactgcatggttttgccacgcaggtattttttcctattctgctttatatctctccgggtaaatgttagataagaagattctgccctttagttaatagaaaaagaaataataggagagggagaaggaaatctgatttttaaaataattaatactatgtgttttatatatagtataaaactttatgttaaaaaataaagaatactttatactttaaaaaaaattttattaatgctatgtgctttatataaagcatgtctatatatactgatcttcacaaccaccatgacttctgagtattattttccaaatgatgagaccacagctcagggaggtaaaataactctactagggatgtgcagatataaaaactaggctgagattcatgatctttccactttctttcctttctaartcctgtttctgggaaaaaggaatcacatgtgcctagagttgcccaaagtccaaggtatcccaatcttatagtagtccatgtgaacaacacctgacataattgtgcaatgctttcataggcctgtctctcctcaaggatttagtataaatggtctactaatcaggtgagacac

SEQ ID NO: 784650 - DNA, 654 bp, Homo sapiens
atataacaatattggttcattaattgtgacaaattaaaacttatattaatgtaggatgttagcaatagggaaacctgtgtggagggtatataggaactctctgtactctcttcctaacttatctgtaaatctaatactattctaaactttaacagtaaactaaaaaataaaaataaaaaagctgaggtagcatattatgaagcctatagcttctattttaaattttaactttccatattgatgttatttattgagatttcactcaaatcttaaatttgcgaaaggcaagcattctacagccaaataaaaggtaaatggcataattcataatattgtacgtaaatattacatgtatggactgggtgtaatcatttaatttatctctacaccttttaaatgctcaayacattaagagaatagttaaatagccagaaacatagtgacagttgcatgaaaagcagtataaagagaactttattgtgtgggagtctaaatctcattgtaggtctctaagaaattgctttataaatctgggtgctcctgtattgggtgcatatatatttaggatagttaactcttcttgttgaattgagtcctttagcattatgtaatgcccttctttgtcttttttgatctttgttggtttaaagtctg

SEQ ID NO: 784651 - DNA, 604 bp, Homo sapiens
atacgtgctgataataagtgctgcaaaggattatttgaagatccagtgggataacattatataaagcaccttctggtagctgacttcaaatgacagaaaccactactattgtgctagattacatatggcaatggctacctgaaatctttttttcaattctcttgtgcatttgacactcctcatgtttttgataggttttattaaataacaagaagataggtgaacaaaattactttcaaaaaatttactactactattagtccctacagccaatggtactctaattcatcatagcctaaaatacagactcagaagaagccacagagtaaacccatggtattccgccaccacagtttcagtcatccttcatcttgctagaatgtcagcttgtgttagtctgctygcataaccataaagaaatatctgaggctgagtaacttacaaagacaagcggattatttggcttacggttctgcagggtgtacaagaagcatggcaccaacatctgcttctggtaagggcctcaggaagctataagtcacggcagaagggaaagggggagcaggtgtgtcacatggtgaagcagtgagcaagagaggatggg

SEQ ID NO: 784652 - DNA, 447 bp, Homo sapiens
ccctcctccttattagctaattcttcctcctgggtgagagaaaacacaagcatttccttctagacccccagagaagtagcaatctctctgtctcctctttccctcttcccctctctccctctctccttctttctctccctctctcatatttatctcctttctctcttcatttattcctctgtastccctgtttttcttcctttctccccctctcccccactcaccactgtccctgctgtcttctcaactaaagattccgtcttctcttaaaaataacccatgaagtgattttttttcattccattgctcttggtttaaaatttgctgctgcctcttatttgggaaatataaaaaaagaaccctcaaactgaagagaacagtttttactttatattattagaaattccagttgttttagatttctctgtgttttatattcacaggtca

SEQ ID NO: 784653 - DNA, 681 bp, Homo sapiens
agtcaaactctatagtccaaacagtaattttggaagtttttcacatacctcttttccaaatctcgttagccatcctctacttttttccaaggccctaataattcagccgaaccatttttttcccactgccaataaattaggatatatatccttgcctcaggctctctctcctcccaggctgagtagacagtgagatatacaccttaaagttcacctcaccgagagtaattcccttcaccactgccttccaagaccatccctgagtggctctgtaataccacagcagtccactttcatctggtgccagcatattgtattaagttattgtaaaataggctctgattttgttcctgttcaactaattgattatagggaacagcatatgagtaagggttggttgagggttgttggtggtaggagttggtgtactagagtatgagccatctgcttatttaacttactggtgccttcataacttgcttcatttccactcttatatctaccacttgtccttgatgatgaagtgcttctgygcatagcagtttcctggctaggcagattaacagattaacatagcacccagttcagaagggatagttcagtttgcaggatcacagtatcccatggccaggaattcagtctgtagtagggcccagtagcaaaccaaaagttatttttcaa

SEQ ID NO: 784654 - DNA, 632 bp, Homo sapiens
gccagcggcgtccctaaaagacctagtgccgggtgggctcataggaggggtttctgccccagacctggaggagtttcccagtggccaggagcaggcccaggaacttccagaaagaccacccagcttgccagcttggagatagaaggcaggaggcagtgaacagagggtggctgaggctcaccttggggcctcggattccaatctcaccagggaggccaacaggtccaggaggcccctggggagcagagagttgatggtcaggatgcctcagagggtcagataccctgggcacraaggtagagacaggcacccaaagcccgtttctccacttttactttttttttttttttgccaaccccagagagactgacagactgaggctttaaggaccagagaattgcagagccagtggacaggcccagagtgggctggccctgggtctctggcaggtccacttattcctgacactatcacagcaagctggctccttcccatggtggccattccctcgaagcctttctgttgtcccctccttccctgggagttctggggatcctgccccatccctgaggacttacaggaggtccagcaaaaccagggccctggaacagaaagaaagaaaattggcttca

SEQ ID NO: 784655 - DNA, 520 bp, Homo sapiens
attcttgcaggagtaaggtggtattattgcattgtggttttgatttgcatttccctgataattagtgatgttgagcattttttcatgtttgttggccttttttttttttttctttttgagatggagtctcgctctgttgtccaggctggagtgcagtggcgcgatcttggctcactgcaagctccacctgccrggttcacgccattctcctgcctcagcctccccagtagctgggactacaggcacctgccaccacgcccagctaatttttttgtatttttagtagagacggggtttcactgtgttagccaggatggtctcactctcctgacctcgtgatccacctgccttggcctcccaaaatgctgggattacaggtgtgagccaccgcgcccggccaaccatttattttattatcattatcttcttttgataattgtctattcatgtccttagcccactttttgatgggattatttgtttttgtttttgtttttttttcttcctgatctgtttgagt

SEQ ID NO: 784656 - DNA, 560 bp, Homo sapiens
atgtctattttacatacatatcaagaaactgtttgacaatgagtattacaaagccccttcccaatgagatgacatgtacaaaaacaaaagttgaaaaaaaaaatcttaataaacaatgtatacaaaatccagatatatttataaaactgtgtttaaacttcttcatttttaaagataacccaaagaagttcctgttagagacatttaaaatatacagtttggtgacaaaagacatagaaatggataagtacatcatatttcatagatattagagyactgtactatgaaagaaatgagcaacttatttccatgttactgtgccacagaaaaatcaggactgtttggcttgttttttggttttgtttcacacagcaatgtaacatgattatcaataattaactatcaagacccagttaaaatcagctaaatacattgtttttagtaaatattttaaaaggttaatggcatattcataaatgaataaaaaaagcatctaaatgagaggggaaaagtgatctttaagtattttcactcttctgaatccatttagaattaacatt

SEQ ID NO: 784657 - DNA, 663 bp, Homo sapiens
cattttctctcttgccttttcattgttctttttttagattctaaagaattataaaattctcattctttcttattttctatctctttgtatttttatagtctttagatggggagggggatgrtatcttaattttttttctttgaatgcctctatcgagtttttgatttctattataataatttgaatttgtattttgttttctaattattacatttcatactactttttcttactgcatagatggagtcccttctcttactttctgaggattgtgttgatataatttttaaaaatatttcatctccctgcatagtctgttttttccaagttactttaaaaaaattctctgttttgtcttgtctttctgggtagaggttttcttcgtatggctgacgattctttgctgtttgaccttatttaataacaaggtactaaactctgatcagaagctctgtgtaattgtgtgggacggccagactctggactttatagagggggtctggctgggtcattttcttggtcagtatctttatatctttcatcttattctgcttggattccccagggtagacccttctgatctgtttggaaggtactggactggctatcaatgttctggagtgaaaagatcgtaaacgtatgtatgccacattcactggatcc

SEQ ID NO: 784658 - DNA, 648 bp, Homo sapiens
attctttcttattttctatctctttgtatttttatagtctttagatggggagggggatggtatcttaattttttttctttgaatgcctctatcgagtttttgatttctattataataatttgaatttgtattttgttttctaattattacatttcatactactttttcttactgcatagatggagtcccttctcttactttctgaggattgtgttgatataatttttaaaaatatttcatctccctgcatagtctgttttttccaagttactttaaaaaaattctctgttttgtcttgtctttctgggtagaggttttcttcrtatggctgacgattctttgctgtttgaccttatttaataacaaggtactaaactctgatcagaagctctgtgtaattgtgtgggacggccagactctggactttatagagggggtctggctgggtcattttcttggtcagtatctttatatctttcatcttattctgcttggattccccagggtagacccttctgatctgtttggaaggtactggactggctatcaatgttctggagtgaaaagatcgtaaacgtatgtatgccacattcactggatccttcatttcagcagagtagcctttgtcttttacatggcttgtcccct

SEQ ID NO: 784659 - DNA, 616 bp, Homo sapiens
attgtgcacttaatggaaaatggaattccacaaatcctgtaggctttcttcattctttttttctcttttcttttttaatctgcctatgttatttcaaaagtcctgtcttcaagttcagaaattcttttcttctgcttgggctagtctgttgttgaagctctcaattgtgttttttatttcattcattgaattcttcagctctaaggtttgtttggctctctttatgatatctatctcttcattgaatttctcattcaaataatgaattctgttcctaattttgttgactcatctatctgcattctcttatatctcactgagtttccttaagattattatttttaattcttttttagcatgtcatatatttccttatgcttagggtctgttatggaagaattattgttttccttttgaggtaacatgtttccttgstttttcatggttgatgtgtccctacattgatttctatatatctggtagaaaagttgcctcttacaattttatagagtaggttttgtaaggaaagacttattcattttcataggtattgactcagtggagttcattggccttggttctaggtggatgcagtagtatagtatccatttagttt

SEQ ID NO: 784660 - DNA, 599 bp, Homo sapiens
cactgtctctactaaaaatacaaaaatcagctaggtatgatggcaggcgcctgtaaatcccagccttgggaggctgaggcaggagaattgcttgaatccaggaggcagaggttgcagtgagtcgagattgtgccattgcactccagcctgggtgacaagagtgaaactccatctcaaaaaaaaaaaaaaaaaaactggagatacgtctgttcctttacccaccctgcccccactcctcacctcccaaacatatcccacacattcccaccctgtgttcctttgccagcaatcaccagattgcctrtctggcatgtccctgtgctatcctccctttgtcgcatctgcctagccttaagcacctcaatcaaatcccacctctcccacagagaccttcccagggagccacacctgggaacaggtgtaagcctgtactgtttatatgagggttctcatctgggacacaggtttgccacacctgagaacaggtgtaagcctgtactgtttgtatgagggttttcatctgggacataggttctttctctccaactagacttttcctgaccttctgaagtccccttcccagcacctaagccagtgct

SEQ ID NO: 784661 - DNA, 636 bp, Homo sapiens
ttccagttcctttagaaaacataatgagaaatattcaaaacagcagagaagaaaataaaatacctaggcataaatttatggagaaatattttaacactataaaacaccctgaaatatgcaaaatacacttgatcaacagggaaggcataggattcaacataggccaggcacagtggctcatgcctgtaatcccagcattttgggagccraggtgggcagatcacctgaggtcaggagttcgagatcagcctgaccaacatggcaaaaccccatctcttctaaaaatacaaaaattagctgagcatggtggcacacgcctgcaatcccagctactcaggaggctgacgcacaagaatgacttgaatgtgggagcagaggttgcagtgagccaagatcacgccactgtactcctgcctgggcgacagcctgtctcaaaaaaaaaaaaaaaaaagaacatttcagtaccataaaacagggtaagaaaaaaaaaagattcaacattataataacagcagttctccttaagctaatttaatttatatatctaacatcactccagtgaacgtagtcttggtatttgggaatgatggaagaaaaatagataatattataataaaatatatttggaagcacaaa

SEQ ID NO: 784662 - DNA, 615 bp, Homo sapiens
tctggggtctggcacagtggctcacgcctgtaatcccagcactttgggaggctgaggctggcggatcacctgaagtcgggagttcgagaccagcctgaccaacatggagaaaccccgtctctactaaaaatacaaaaattagctgggcatgatggcgcrtgcctgttatcccagctattcaggaggctgaggcaggagaatcgcttaaacccaggaggcagaggttgcagtgagccaagatctcaccattgcactccagcctgggcaacagagcaaaactccatctcaaaaaaaaaaaaatagagtttggagcaaggcagggtcctgtgccttttcaaagagggtactcctcttctgagagcagctatgttttggtccccactgtttgagggaataatggaggaaatcataaactcactcaccctcttagatgattttgtattttatcagtcacgagagcatcgaagtagattagaagaatagcagtgcatgtgtgttccacacatggttttttgcacttatacgtaaggcttggcacctcttgccagaactgcacagccctgtgggatcccagaatcacgggctttctctaccacattctgtgcaagttttcaa

SEQ ID NO: 784663 - DNA, 628 bp, Homo sapiens
tttcaagtccatccaaaatatatctttaaatacccactgtgtgccagcaagtcttcacattcttcttaccactggggactacattttctagctgattgagatatgcaggtagctctgcaattttcctcccaacactgagaagttkttgtgctagatcatcctccagatgaactgactgtaagatgacccaatttgggttgaatattaacatacccactcatcagactgatgctttctctgatacagaggtccatgctggaagaactgaatgccaacaactgcataacatggctcacattttcatgcaggagcagcagcagcaaaagccaaaagaaagttaaggggatgatttaatgtcccaaataataaagttcatgtatattctgaggacgtttttcaggttaaaaaatagctaaatagaaggtcttgagtgacttcttgaggaagagtaatttctcccacccaccctattaaaaattagttttaggtacctgtgtcctctacaggaaaaagaaatggccatttctgctattgatcatcaagatattagccaatttcctgacataaagaatgacacctttaagtaaacttgtttttgatagagtaggctttccaaatgacttttatc

SEQ ID NO: 784664 - DNA, 678 bp, Homo sapiens
atttctgggatgttatttttcttgtccttcccagaatctctccccaaatccacaatcctgcaaagatcttgaccacccaaccccccagacgtcacccgattcagagctaaaaggatctttctgttcctggtcggtctgtttgtcatagctttgarggggcgctcctggggtgtcactgcacactacctcattgatttcgattttattttaacagccttggtgtaattatgaaagcctgctgtaattatcaaaacacaactccaagtatttcattgttaaaatacccctatggtctattattaattcattagataaatttggattatatcactcaataattaatgtgcagacctgaatccggggaatttggccactgtgagtcacatggtaactgtgggaagcaatgggagcctgagagattaggaggcagaggtggagagaatggaaacagggaagaaaacaggtggtcatgaaaggttgatgaccagctgctctgtgacattcatttaaccattaattcaataaacacttattgctggcctactacatgctaggaattttgagcaccttaacatccaaatattaactactcaaggtggttcctggggttctctcttatctatctatatgttcatcattcatcacccatctgtctacccatccatatagccatacagc

SEQ ID NO: 784665 - DNA, 564 bp, Homo sapiens
gaatgcggttcttgcttcccataatcccaaagtatcccctacaccagccctcacctgggctctcatcccaatttagcgaaatccaggtctgtcacaggacccctaaattaccactcccaccgcgacccccatcatcccatacattatraagcactttgcactaagctccttccatgcctcatcccactgactgctcacaaccactttttaaggggagggtcctattatgattcttgctttctgaggctcagagaagccaagccacttgtccaagatcacacagtaagtcagtgactgtgctgggattcaaacttgcatctgtctgacttcaaagcccactggctatactatgtatgtatctcatctttaattcttctttcctcctggtctggagggtggcagaggctttcctcacccttcgcactccttcctgtttccaccacttcccatttctctcaatctatgtttttggactgctgtgggcagagagaaaacagtgccagcaactcactaactgtgaggatatttatgcctctgcaaacaccacacaagccttttgcatga

SEQ ID NO: 784666 - DNA, 635 bp, Homo sapiens
ttctttgaaaggactgtacaaatacatttctttcactgggaacttcaattgaagataattattcttttctgcctcataatatatattaaaaatgttcacatgtggctttccagggaattctgccaaatattttcaggcaccacatccaactttactaattttatatggcctgcttagtctattatagaatatcctttcgtgcagtatgaatttgctaaagaggctaaaatatattcttatattaaacaactagtttaaaaaaagttttcaagattggggacttacgctcttcttacttatctcacaatgagataaccacagaaaataaattaaggcccttctgaaaaattgtacgtttttctagacttttactaccatcaagaaacaaaataaaatagactatcaccttcaggaaatgcaaagcacactgacatgaaggttgttttcagataaacagtgtrtttcattaccaccagggcatgcaatatctcaaccactacccttcatggcctttttctgtttttatgagttcatgccaacaacaagcaatgagcacaaaggctgtgcgaaatgctgcatttgttggagtgtttgtgttggcttccttcaaatcggctgatttccaaatctccttc

SEQ ID NO: 784667 - DNA, 475 bp, Homo sapiens
acatatactgtaattatcttctatgtgttggcttttctctctcaacgatgtcttttgaaaggcaaaagattttaatttaacatagccaatttatcaacatttccctttgtactcggcactttggggccttgtttaggaaaatttttcattaccacactatttatcattcccaaaagctggacgcaacccaaatgtccatcaagagtagaatggggccaggtgcagtggctcatggctcatgcctgtaatcccaaccctttgggaagccaaggcaggaggatcatttgagcccaggagtttgagaccagccttggaaacatagtaagrccccatatctacaaaatatttaaaaattgactggatggggcgttgcatgcctgtattcccagctactcaggaggctgagatgagaggaatgcttaaacctgggaggttgaggctgcagtgaggcctgatcttgccactatacttctac

SEQ ID NO: 784668 - DNA, 617 bp, Homo sapiens
gcaagaggaaagtagggacacggggagctaacattgtgtgatgatatttgcagtggttttagacaaactaaataacaccaaaaaaagaggaaacgatacaacttctgacaatgtcactatcctcacattaacttttttggaaagagagacatagaagggaatgatacagaagagaatgatagacttactctgttttgctcatcacataaacacaagaataagggtgggagattgtttaaggaaggaagattgcaagtcaaaaagggggaaatttttctagccataaaaacgcgtcaaaattgaatcatctcttttgtatggttttgaactccagtttggggaagagacctcaaccaaagactattgaccactggaatttgagtttgagattgakgaccatttaatcccaactctaagattttatgccctgaatgttaccaatatattttctattaagatataacttatacaacatgaaagttaccattttaaagcgtacaattcaattatgtatagtatatttgtagagtcatacaaacatcaccattttccaatcccagaatatttttatgaagccaaaaagaagctttatatattagcagtcactcctaattcct

SEQ ID NO: 784669 - DNA, 587 bp, Homo sapiens
aagtgctgggattacaggcgtgagccaccgcgcccgcctcttttttcttttaaaaacagtgtttcactctgttcctcagtctggagcgaaatggccagatcatagctcaccgcagccttgaactcctgggctcaattgttcctcccacttcagcctcccatgtagctgggaccacaggtgtacaccaccacacctggctaatttttwaatttttttgtagagatgagcatctcgctatgttgcccaggctggtctcaaactcctgggctcaagtgatcctcacgcctcagcctcccaaagtgctgtgagccactgtgactggcaggaagatgtttttaaatccataaagtaaaatacgtaacaatgcaagggaaaccaaccactgtgcggaaatacaatcctatccatgaatcctctgagagtctgtggccctgagataaagaatcccaaccagtttctaggcttttttctactacaaactgctgcaacaaacatttttgtacatatatccactagtttctataggataattttctagaaatgtaattactggggcagaaatcatatgcatgttatgtttggatcaa

SEQ ID NO: 784670 - DNA, 591 bp, Homo sapiens
tcagaagtggagaatcaatttgatttgtacatctaggcttttcattcatttaatcccaagacacacaggcagtctcaaccacacacatgcccacagtcatccctatagagctggtgggaactggttaaccactagccctgtgctttaacctcaaggccaaagatgtgtcagaaatgtggttttgctagagatgcctttactctgccattgtcattgctagattaagtggtacatggaagttggtgaccatgtgtcagtctgaatattactttctcttcacactttatttttatttatttatatatttttggagacagggtcttgctctgtcgtccaggttggtgtacagtggcgcgaccatggctcactgcagcctcracttcccaggctcaagtgatcctcccacctcagcctcctaagtacctgggacaaacaacagatacacaccactatccctggctaatttttattttttattttctgtggagacagggtctcactattttgccagggctggtcttgggttcctgggctcaagtgatcatcctgccttggccttccaaagtgctggtattaaacaggcataagcca

SEQ ID NO: 784671 - DNA, 414 bp, Homo sapiens
agccatgtgggtgaacactgatgagttgtagtgggaattcggaaggaaattgtcatcctttctgtttttttctccccggccccatgatgtttctttagttagtatttctggtatataggggggaacaaaacagattcctgccaagcactgtctggctgctctagtttaagcacgtgcwcggtatgtagtattaggcagcttaattttacacagatgcagcaagactctgagcggcaagccttcctggggcttaaggtcatatagggcaggcatgtcaacactgtttccctgaattagacctgtactgttctctgccttctggctgtgcacatggagtcatgccagcagtggcagtgctttactgtcttacagccctctctctcccttggtggagccctaggacatgttggctta

SEQ ID NO: 784672 - DNA, 637 bp, Homo sapiens
ctctataatattttactacaagaatgattttggtaatagctccattgttcccatcaacaaaagagctacagcaatatctttagtgtgttttcactgggactttttgaatctcattgtggtctgagtccaccattagggctgacttcacctttgggtatgggaggcactagggcccacgatacttttagggcttcatgaaaatgttttcattttaatgtctcttaaaattaaaaaagaacataacaataatgaatataataataaatgcagactggattatatttgtctttttaccaactcagtcacaaatataaatttttattattttttatggaagaaagcaaagaagtcataatacagccctaccaactttaggttcagatgtacaggaatttataacacttcagattagttaaaacctgggagacactacaagagtctctgcattctaggtccaraagttagtagttaaacttagaaagacagttagattttgagacttaaattagtaaaatgaatgtaacgaatgaggtcaataatttgcaaaaaatgatctcaaaatataggaaacctctcaggaaaaacaaagttgggctatctgcggtagtaactgtaatcattgagcatttattatgta

SEQ ID NO: 784673 - DNA, 591 bp, Homo sapiens
gtcaatagagtagtaaattttgggggaaaaaaatagaaactttcatttttgtacttggatatgttggaattctttattgggctgtattccatttgctacaaaatgagtaaatgcacctctgtcccttctctgctgcttggtgggaacctagagagtgttttccgtgtgtgtctgtgtgtgtgtgtgtgtgtgtctgtgtgtgtgtgtgtgtgtgtgtgkggaaatgggggtctcgttatactgcccacactggtctggaagtcctggcctcaagccattctttgagttcagcctctccaggtactgagattataagcatgagccactgcttccggccaagagttatttccttaactggattttgctctagttgtccttcgtttccaggaattgtgctggtctggtatatgactttctttcagatatttcctcctaacatttgagctttgagtttatctccacatcatctaaggttaaagaggagaacaattcaaaaggggaatgagttttggagctttttctaaagatgtgtgtgcctctcacatgcacaaaattctctctcaaaatttgaattagccaaaagctatcaca

SEQ ID NO: 784674 - DNA, 591 bp, Homo sapiens
gtcaatagagtagtaaattttgggggaaaaaaatagaaactttcatttttgtacttggatatgttggaattctttattgggctgtattccatttgctacaaaatgagtaaatgcacctctgtcccttctctgctgcttggtgggaacctagagagtgttttccgtgtgtgtctgtgtgtgtgtgtgtgtgtgtctgtgtgtgtgtgtgtgtgtgtgtgtggaaatgggggtctcgttatactgcccacactggtctggaagtcctggcctcaagccattctttgagttcagcctctccaggtactgagattataagcatgagccactgcttccggccaagagttatttccttaactggattttgctctagttgtccttcgtttccaggaattgtgctggtctggtatatgactttctttcagatatttsctcctaacatttgagctttgagtttatctccacatcatctaaggttaaagaggagaacaattcaaaaggggaatgagttttggagctttttctaaagatgtgtgtgcctctcacatgcacaaaattctctctcaaaatttgaattagccaaaagctatcaca

SEQ ID NO: 784675 - DNA, 442 bp, Homo sapiens
aagtcttgatttgtagtgtttgtcagttttcatggtataaagactcccacaattaacaaattcaagatatgcaagcaacgtgacagaacacagtttgggaaatgataataattggctcttgtgagttggcttcagygcacccctgacaggctatttctaagccttgaagcttttatctgattaacatgtatgaaaagttttataaccattggccatttttccaatcttgtgctgaccaaggcatagaaatagaactgtagagatgatctgtttttaatacttaggaatatacctttatccattggagaaaaaattctaggaaaaatggctacactagacaacatgttctgttgtaactgatggctcttaaatccattcgcttaacacatagctaacataattgtgaaggactgaaaacattttctctaaggtcaggaacaag

SEQ ID NO: 784676 - DNA, 615 bp, Homo sapiens
aataagctgcactgattttttacctcctaaatatttctcaaaacctcacttccccttcatattcactggcactcccttattcagcatctcatcattcattcaacaatatttaatgagtataaagcatacctaggtgtttttaaacagaacaaaaacggtgtgatctttgctttctggtggctcaacatctagttatttcttatctgaactattcagatatactcttgtctcctaccattaattatctcaacagtagccagagtgtctcctcaaaacttaaattagatcatttaattcagggatagtaaactcttcctataaaggccagatagtaaatattttargcttctgggccatatgttctctgttgaaactactcaactctgctcttgtaacattaaaaatagccatggacgatatacaaacccatgggtatgactgttccaatatggcttattcataaaaataggcagcaggacagatttgacccatgggctgtagtttgctgacccctgatttaattaatcacagtgcttcttactccactggaattaatccagattccttcccatggcttagaatgtgctccaccctcaactgactattacttgctcc

SEQ ID NO: 784677 - DNA, 539 bp, Homo sapiens
cccattcccattagtacccatcccaatgcccaaacactctaactcccatagctctatttatttattttttcaaattacttatcaccatctgaaaaaatatcatttgttgcatgtatatatatagtatatatatatatatatatatatatatatatagtctgctttcctaccaccacactactctaccactattagaatgtaagctccatgagggcagagactgtcttattcactcaccccctaggttcccagcacctggatcrgtgcctggcacttagcaggggctcagtaaatatctattatctaaactgttattgcctctagtctccctccctccaacccactggtatcttcactgccaccagtgatctttcaaaaatacaaatgagaccaaatatagtggctcacacctgtaatcgcagcaccttgggaggctgaggcacaaggatcgcttgaacccaggtaggtgaggctgcagcaagccatgatcacactactgcactccatcctgggaaacaagagtgagaccccatctcaaa

SEQ ID NO: 784678 - DNA, 641 bp, Homo sapiens
agtacattatgtgcagtaatacatacatatatccatctattcaataaagagctgtttggcaccaacaaatatatagcactgaactaagacatatatatgtctagttagtacttctgagcacctactataggccagacactatatcaggagacactggagatacacacataagtaagaaaagggccctgccatccaaaagcttatagtttaatagaggaattatgataacaggtgctaagataaaartcccatagcaatcagtagaggcaaaaaggagagaaacatacgggtgatactttcttaactgacttgccagcttatgtgacataccaacttctcttcaaaataaactggctgagttgcatagcacactggaggctggttgtgtattactcacatctactcccaccagccaggttggctgcttcagggtcagtagttagttcacgctaggtatacttgttattttaattacatattaaattattatataatacaaacaagtgaaatatgagtataaaaaagatatttctatgaaaaagaggttgaatgcttggaagaaatttgaaggcaagttgctaaaaaaaattgctgctgaattagatatgggcaagacaacagtaaaaggttgtagtggtgga

SEQ ID NO: 784679 - DNA, 548 bp, Homo sapiens
gagcccctttctgggctggccaaggctggagcccactccctcagcttgcagggaggtgtggagggagaggcacgagcgggaaccggggctgcgtgcggcgcttgcgggccagctggagttccgggtgggcttgggcttggtgggccccgcactcggagcagccggccagccctgctggccccgggcaatgggggacttagcacccgggccagtggctgcggagggtgtactgagtcccccagcagtgccggcccatcggcgctgtgctcgatttctcrctgggccttagctgccttcccgcggggcagggctcgggacctgcagcccgccatgtctgagcctcccacccactccatgggctcctgtgcggccggagcctccccgacgagcaccaccccctgctccatggcgcccagtcccatcgaccacccaagggctgaggaatgcgagcgcacagcgcaggactggcaggcagctccacctgcagccccggtgcgggatccactagatgaagccaactgggctcctgagtctggtggggacgtgga

SEQ ID NO: 784680 - DNA, 577 bp, Homo sapiens
attctatgtctggtgattcccaaatctgtatctacagtctagatctctcagtcaactccagcctccaactgacttaccattccctcatagccatctaacaggtacctagaacttaacatgcctgaacctgaactcttgacaccccatcctgaccacaccccagcacgttccctaccccagtaacrgtaccaccattcacctgccaggccacaaatcttcagagttattattgactcttctcttacaaattcccaatccaattcatgagcaaatcctatcagctctaccttcaaaatgagtctagaattcaacccttcctatcccttccaccttttgaacagtgcaactcagcctcattttgttctgaattgctgtggtagctcctaactggtcttgctgcctcctcccttgcttccctgcagtctactctccacactgcagccctgctcatcatctttcaatggcttcccagtggagaaaagctaacggctttccaaaaccttacatggcccagttcacccttactcactggcccccagctacactggcctctctggtcatagaacatggcaagcaa

SEQ ID NO: 784681 - DNA, 571 bp, Homo sapiens
ctttccaaaaccttacatggcccagttcacccttactcactggcccccagctacactggcctctctggtcatagaacatggcaagcaaacacccacctcagggcctttgcatatgcttcccttcgctagaagcacacttccccacagtcaygtggttagctctctcacttcattgagctctctgctcacagcagcctttgtgaccactccatctgaaagtgccccgacactctctatgctcttacctcattttaatttttcttcatgccacttgtaaatctatttaggtgtttatcattttctcctcccactagagtgtaagttccatgatggtagggacttcactttgttccctgctgatccccgatgccacagtgcctcacatagagtaagcactcaataaaggcacattgaatgaatgaatcaagagctgttttttgggtgatgggatttggaacaatttattgctggcttctttttacttttcagttttgcttgaattttttataacgagtatttacttttttaaaaaaataagcaagagttattcctttaaaaattaaaaaaggaa

SEQ ID NO: 784682 - DNA, 635 bp, Homo sapiens
caaagttaacaaaatcatgcaaccagcacccagataaaaaatagagcatcgctagtgctctgaaagcccctttggcttcccttccagtcattacccttccataagggtgaccatgatacggattactatcaccatagattggtcctgcctcttttaaaatttcatataaatggaatcatataggatgcactcttgtttcatgcctctttcactccttactatgagattcatccatgttgttttgtaaaattcatattcatactctcattatatacgtagtattccactgtaygaatacaccacactttgtttattcattctacttctgaagagcattttggtagttatttgggtcttataattaacactgctaagagcatctttgtatgcctttaagtcatcctactagttttatcctttctgaatccttttgttttaggtatgtctcttctacagagcaatgaattggttttgcttgaaagtcaatctgaaaatattttccttttattaggtgattttcagctcatttatatatttatattactgatatatttagtcttaagcctgtcatattattttatattatttttactgtttctattatgttaaattcactctgtgatttgttttctttg

SEQ ID NO: 784683 - DNA, 548 bp, Homo sapiens
tgctttttactctttggtagagttatggattcactaccagattctactgtatgctcttgacaactatgaccacaatgggtgagttgactgatctaagtggtgaaaaatactgggagcatcaatggcaataacagctttctatcagagactttaagcatctttggtaacattgtttttgaaccagagtggraaaaataagatcaggtcagaagaaggatgcttggtactcaaagattgtttgtgactctaagtaattagcagccaaaaccttaggaaactatcagaatgcctgtgtatgagactctcttcaagagtggtccaagagaggagagaatcctacttggagaaagaaggtggtagcattggacaggcagcagaggagccctcagcagcaagaaaggagctaagagaccctgtatctgtccctcacccttcagagctggtgccccaaactcaaagccatcatcacattggatggagcccctgcctcaggtttagtcacttgatcctatttgaggagaagcaaagatatctgtgactcatgaaga

SEQ ID NO: 784684 - DNA, 616 bp, Homo sapiens
ctttaaccactccagcagcggttctatggacagagctttgatctctccctgaaatggagctcctggtgggaggggcagctgccacctctgcagtttggtcaactcagccattccaacctgctggctttggagaatacaggtggtctggaggaggaaggatcccccacagtgcagcacacctgctctaccccaaagcagccagactgcttttttggatgggtccctgatcccatgcctcctgactgggtgagaatgcscaacaggggtctccagccacctcttgcaggtatgtgcgggctggatacaggtcagtatccccctgggatggagcttccaaaggaaggagctggctgccatctttgctgtttctcagccttcactggtaatatctccttcagagtctatgaggaacttaaatttacaagaaaaacacaaccccattaaaaagtgggcagaggatctgaacagacacttcccaaaagagacatgcatgcagtcaacaaaaatatgaaaaaaaaaaactcaacatcactgatcattaaagaaatgcaaacaaaaccacaatgagataccatctcatgccagtcagaatggctactattaaaaagccaaaaaa

SEQ ID NO: 784685 - DNA, 642 bp, Homo sapiens
caagaagattttcacctatcttttcttctagtagttttccaatttcatgtttcacagttaagcatttactttgagttgatttttgtatattgggtgagataggttgcaatttcatttttctgcaagtggatattcagtttccccagtatcgtttattgaagagactgtcctttcctcatcttggattcttggcacctttgttgaatatcagctgagtataaatgcatggattttttctgggctttgtattctgttccattggtctatatgtctgtttttgttccagtaatatttaaggttgttcttaaactttgtgagaaccttttagattaagggagccaacagagaygctatatcaaaaattatactggaatttttatagtgtaatgatacgaagaagttgacattggtggggtgaaaatgggggaaaaaagccatttgtaaatccaaccaatttaagtttagttagattttctctcattcaggtttgggctttaaataatcatctaagcatatttcacaaattttgacaaacataaataattacatttttagtgggctctaaatcaatttttatatcaaattccaggaaaacatagcaccatcaactgacttatataattcagtaaaatcaagtttttg

SEQ ID NO: 784686 - DNA, 590 bp, Homo sapiens
ggtgctgcccacatgctggggactctggtttctcttcagagaatcctgctttctattctatactggttattgtttacagagctcaggagttgattattttcccaaagtaggaaggtccagtacccaaggctccaggactctgaagtgtgtctaaaatcaccagcctttgatttcaatgtaaaaaagatccaagtctttcacaaacccttactaggacaattcaacccttgcagaacatcacaaagactgtttttggatgactcctggtgtgtgtgtgtgtgtgtgtgtgtgtgtcttttctgtgtgttgtgggggaggtgtattttaaaagagaaaataaaagggaaaataaacttttcaaaaccccttctgtatcccagacagtattgcacttttacatatctcatttaatacccataacacctrtatgaaatatacactgttactctgttttttcttttagaaacattttgttatggaaaattttaatcatatacaaaagtccagagaatcatacactatatcctcatgtagtcatcacattgctgcaacagtatttcagctggcgccagtcacatttcatccattct

SEQ ID NO: 784687 - DNA, 607 bp, Homo sapiens
aaaagtttagtgtgcatgaaaactactgaggagcttgtaaagatttacattcctaggttgtacccccaaagtatgattcaggaaatctggaatggggcccaggaatctatagacttagcaatgtcccaagtgattctaagtcagaggttctgtgggatgaccctgtgagaaacaatgcaagagtgaatgaacgggggaggaacctctttatccaaagcaaaagggacctggtagtcaatgttttgcttcaatgaagaaatgcctaaaactatataccttttctgaaacagaaagcatctttcatggtctaataaycataaacttttagaattcctacccaggcctttgtctcaaattctcctattactaaccctattccctgccatgccctccctactctgcgcccggcttttttggcctctcccgactgagggcattcacccaggcctgacccttggctttgtgttcttagcaaatactttactcttaaaggatgacccgttccccttacttcaactattatttgttcatttactcataacaactcataacagccaattatgagcacccgctgagttgtagatgcaggagctacaacatgaacagt

SEQ ID NO: 784688 - DNA, 528 bp, Homo sapiens
aggatgatgagagcgggaggcggaaaaaagggtggccagagagagggagaaaacacggtggggaaaagttttggggtagatgggtggggaaaacggaagtgagcggtatagtatagaaggctttgcaaaaagacartggggaaaaaatggtggggaaaaagttttggggtagatggaggaagaaaaagggtggcgagagagggagccaaagacggtcgggaaaaaaattcctcctgttactgattttttaatactcttccattccggtcagaaaaaataattgatatgatttcagggttttttttgttttggtttagtttggtttggttttttgagatggagtctcgctccgttgcccaggctggagtgcagtggtgtgatcttggctcactgccacctccacctcccgggttcaagccattcttttgcctcagccttctgagtagttgggattacaggcatgcgccacgacgcccagctaattttgcatttttagttctaaatggggtttctccatgttggtcaggc

SEQ ID NO: 784689 - DNA, 528 bp, Homo sapiens
aggatgatgagagcgggaggcggaaaaaagggtggccagagagagggagaaaacacggtggggaaaagttttggggtagatgggtggggaaaacggaagtgagcggtatagtatagaaggctttgcaaaaagacaatggggaaaaaatggtggggaaaaagttttggggtagatggaggaagaaaaagggtggcgagagagggagccaaagacggtcgggaaaaaaattcctcctgttactgattttttaatactcttccaytccggtcagaaaaaataattgatatgatttcagggttttttttgttttggtttagtttggtttggttttttgagatggagtctcgctccgttgcccaggctggagtgcagtggtgtgatcttggctcactgccacctccacctcccgggttcaagccattcttttgcctcagccttctgagtagttgggattacaggcatgcgccacgacgcccagctaattttgcatttttagttctaaatggggtttctccatgttggtcaggc

SEQ ID NO: 784690 - DNA, 621 bp, Homo sapiens
cccaccaccaacatttaagatcacattcaacaggagatttggagggtaaacacatccaaacaatgtcatttcacccctatggcccccaaatctcatgtccttctcatattgcacaatacaatgtcatttcatccctatggctcccaaatctcatgtccttctcatattgcacaatacaattatcctcycccagtagtccccaaaaatctcaagctgtttcagcatcaactcaaaagtccaaaatctcatctgagcttcaaggtacattcctccatctatgagcctatgagatcaaaaccaacttatttgcttccaatattcaatgcagtacaggtgttgggtaaatattcccattcccaaatggagaagttgggcaaaagaaaggggcaacaggcctcaggcaaatctgaaacccagtagggcagacattaaaccttcaagctccaaaataattcttgatttcatgtcccgcatccagggcacacttgtgcaaggggtgggttcccaagaccttatgcagctctgcctctgtggctttgcagtgtacagtcaccatggctgctgtcttggatcagagttgcgtgcctgtggtatttctaggctcaggatgaaagcttccca

SEQ ID NO: 784691 - DNA, 621 bp, Homo sapiens
cccaccaccaacatttaagatcacattcaacaggagatttggagggtaaacacatccaaacaatgtcatttcacccctatggcccccaaatctcatgtccttctcatattgcacaatacaatgtcatttcatccctatggctcccaaatctcatgtccttctcatattgcacaatacaattatcctctcccagtagtccccaaaaatctcaagctgtttcagcatcaactcaaaagtccraaatctcatctgagcttcaaggtacattcctccatctatgagcctatgagatcaaaaccaacttatttgcttccaatattcaatgcagtacaggtgttgggtaaatattcccattcccaaatggagaagttgggcaaaagaaaggggcaacaggcctcaggcaaatctgaaacccagtagggcagacattaaaccttcaagctccaaaataattcttgatttcatgtcccgcatccagggcacacttgtgcaaggggtgggttcccaagaccttatgcagctctgcctctgtggctttgcagtgtacagtcaccatggctgctgtcttggatcagagttgcgtgcctgtggtatttctaggctcaggatgaaagcttccca

SEQ ID NO: 784692 - DNA, 506 bp, Homo sapiens
tgtatggcttttttggtcctgatttcattaccttattctctaacctttgttatttccttctactagctttgggtttggtttgttcttttctagtgtgtttggctattttagcttgttaatttgaggtctttctctctttttatgtaggcatttagtgttataaactctcctcttaacattgttttttctgtatcacagacgttttggtatgttatgtttctattttcatttgtttcaggaatttctttaaatttctgccttarttctgttatttacacaaaagtcattcacgagcagattgtttagtttccatgtacctctgtggttctgcgagttctcgatattgacttctaattttattccacagtggtctgagaagatacttaatatagttgtgatttttaaaaaattattgaggcttattttatgactgagcatgtggtcaattttagagaatgttccatgtgcaaatgagaaaaatgtacgttctatggtttctgggtgga

SEQ ID NO: 784693 - DNA, 574 bp, Homo sapiens
aagttctgggggagaatcagtttccttgccatttcctgcttctaggggaatgtttctagagtattccttggctcctggacccttccttgaacttcagagccagtagtgcagcatcttctaatttctctgtgactctgacctttgcttttgtcctaacatcacctcctctggctctggcactcctgcctccctcttacaaagatcctgtgatgatcttagacccagctggataatccagggtcatttcatctcatgattcttaaactaatcacatctgcaaaatctttttagccatgacaggtttttacagatttctagaattaggatgtggatatttttttgagggggggaagggggtgcttactctgtcaacccacatggggattaggatgtagacatccttggggccattatyctgtctgctacctagtattaggccatggacatctttgggaccattattctctgtatcacatgaggagtaggacatgggtatctttgggaccattattctgtctcccacatggggattaggatgtggacatctttggggccattattctgtctgccacgt

SEQ ID NO: 784694 - DNA, 574 bp, Homo sapiens
aagttctgggggagaatcagtttccttgccatttcctgcttctaggggaatgtttctagagtattccttggctcctggacccttccttgaacttcagagccagtagtgcagcatcttctaatttctctgtgactctgacctttgcttttgtcctaacatcacctcctctggctctggcactcctgcctccctcttacaaagatcctgtgatgatcttagacccagctggataatccagggtcatttcatctcatgattcttaaactaatcacatctgcaaaatctttttagccatgacaggtttttacagatttctagaattaggatgtggatatttttttgagggggggaagggggtgcttactctgtcaacccacatggggattaggatgtagacatccttggggccattattctgtctgctacctagtattaggmcatggacatctttgggaccattattctctgtatcacatgaggagtaggacatgggtatctttgggaccattattctgtctcccacatggggattaggatgtggacatctttggggccattattctgtctgccacgt

SEQ ID NO: 784695 - DNA, 592 bp, Homo sapiens
ttttttttaataaacctctgttcaaaaataaacttaacacgtttttctgagcagcctgaacctgttcccaatttcttgtccacacaataaaaaatatacaagtgcattattttaagggtgactctagctgacctttctgtggggagaaaaacggcacctgcctggagccagaagcgtgttcggagagtttgatggcgtttgatgttaaggcaggggccacatgggtcggcctgtcatcgaatgacgttttcacaccagtccccaaaacaggagatctggaaaatctgacatccaaggttttagatcttggcttagaaaaacagacattccaagatgcctgaagtgtttaagtggctattgctaattggatagtgttgactgtggaagtaatggatcccaaattgaaatgggagattagatgattagacgtattctccagatgcttacaaamacaattatgtgtgtgcgtgtgtgtgtggagagagagagagagaaaggtatatagacagactgggcgcggtggctcacgccactaatcccagcactttgggaggccgaggcgggcagatcacctgaggtcaggagtttgaga

SEQ ID NO: 784696 - DNA, 573 bp, Homo sapiens
gctttaggtcatcctgtactctttagtacacaacactattgctcaagagtactatatggtgcccctgggccctgaaaaacttaatgtacaactctaagagtctaaattactgccagggagtgatgtaggtagtgaaaataaattccattaatatcttgctaagtggttaatcagcaagtcaaataataataataaagtgttagatctgttttctcattctgtcctttatggacagaaagaatacctkttaggtgtgttcctcttaaacagcctttaataaattttaaagtagtgatcaagacttcccttgggtttcttatctctaaactaaataaaccctattcctttcatctttacaagtaagatccgttttcatccctttaatcattttcattgttctcgccaatgttctcttcaatttattcacatctttataaatgtgatgaacaataatatttatctgaagaagtactagaatataatttggatgttccttcttgactattttttgtttgtttgtttttgcttttttttttttttttttgaaacggagtctctctctgtcacccaggc

SEQ ID NO: 784697 - DNA, 586 bp, Homo sapiens
gcataggcgtcgcctgacaacttgttagaaatgcaaattcttgggcaaaaatgcaaatttttgtttcagactcactgaaacaaaaatcctgtgggtgatgtccagaaagctgtgttttaacgactctccaggtaatactaatactaaaatttgaggacccatgtccacctattttcactgatgctttatctgcgtgtttttaatctatattctagctccccagagaaatagctaacaacctcacatagatattatgcctaaccttacacttttactaaagttcactacagaaacccaatgaaaagagtgggctatatgtgatttagaattcaaaagccatagattccaaagcagtttgcccatttgctagagaggttacrttcagcaagttcttaaaagtctccaagtgtcagttttctcagctttcaatgagagtaatagtagtacttatagcaatgagctgttgggaggaaaaaatcagaataccgacgtaaagctctagtataacgtctcatatataatagcactcaggaaaggctggctctataaagaaactttctgaaaatttgaaaatatataaataaat

SEQ ID NO: 784698 - DNA, 639 bp, Homo sapiens
caataaacattctttccccatagagccatgcaaggcagaccattttcaatgtaaaaatggagagtgtgttccactggtgaatctctgtgacggtcatctgcactgtgaggatggctcagatgaagcagattgtggtatgtcttatttttaggaaaatacttttatgactttagcctctgcatttggactctacagtgtcaaagaaagattataactgtgtytattaggacctgttttgatgctttggaacgagaacatctcatctctgagatgattttagcacctctgtccccatctggatagaagaaaagttaatacgcaggcctcagtttattgtttgtttcaatttggtcacacttattaactgtaattctagagcaacaaatatccatataggaagccgagaataccacagagacaatattccaaaccaagcaggctagcaccactcatattggctactgttttctgtttgttgcccacattcagaggcacctgtgtgcttacttatagttcactttctccccctgccctgctgagttttcattccagctccccttccacacctcaataacattatgagtaatggatacttttattatgtctttttatttctaagcaaatatttaacacttacgt

SEQ ID NO: 784699 - DNA, 652 bp, Homo sapiens
atagtgtattgcatctggatgctacacttttttcatctcctttagtgtagagtagcccctttctgtatttcttgtttttaatatttttgaatacaggtcagttattaggtaggaaaattcttctatttgaaaaaaaaaaaccctcaagcttgctcctttatcagccttaatatagtcctactctttgagaacttcttttattttctgtcaaaataagatgttccaggttaatcttgtgtgttttctatcctagtcctgaagtcaacttttctgtaagaaaccttatttctatttaactaatttcagytatttctgtattttggtaaacatgatcttgtgtgcttatggctactgatgttgtgtcctgttcctaaaactatacagtgaacaaagctctattatatacctacaaatatatactcaaaacaatgactccaactccaatagaatactacaggataaatcctaaccttgtcttctgtatttttacatcttgattccaataacaaaaaacattgttcctattatccacaagctattgatgtatttgctgaagtctggaaagcctggaacacaaaaaggagtttgagaattgctgactcatactactgcataaagcacacgcatcaaccaaggtttcatatttgttttc

SEQ ID NO: 784700 - DNA, 652 bp, Homo sapiens
atagtgtattgcatctggatgctacacttttttcatctcctttagtgtagagtagcccctttctgtatttcttgtttttaatatttttgaatacaggtcagttattaggtaggaaaattcttctatttgaaaaaaaaaaaccctcaagcttgctcctttatcagccttaatatagtcctactctttgagaacttcttttattttctgtcaaaataagatgttccaggttaatcttgtgtgttttctatcctagtcctgaagtcaacttttctgtaagaaaccttatttctatttaactaatttcagttatttctgtattttggtaaacatgatcttgtgtgcttatggctactgatgttgtgtcctgttcctaaaactatacagtgaacaaagctctattatatacctacaaatatatactcaaaacaatgactccaactccaatagaatactasaggataaatcctaaccttgtcttctgtatttttacatcttgattccaataacaaaaaacattgttcctattatccacaagctattgatgtatttgctgaagtctggaaagcctggaacacaaaaaggagtttgagaattgctgactcatactactgcataaagcacacgcatcaaccaaggtttcatatttgttttc

SEQ ID NO: 784701 - DNA, 549 bp, Homo sapiens
atgctcttcatgagtcacagatatctttgcttctcctcaaataggatcaagtgactaaacctgaggcaggggctccatccaatgtgatgatggctttgagtttggggcaccagctctgaagggtgagggacagatacagggtctcttagctcctttcttgctgctgagggctcctctgctgcctgtccaatgctaccaccttctttctccaagtaggattctctcctctcttggaccactcttgaagagagtctcatacacaggcattctgatagtttcctaaggttttggctgctaattacttagagtcacaaacaatctttgagtaccaagcatccttcttctgacctgatcttatttttyccactctggttcaaaaacaatgttaccaaagatgcttaaagtctctgatagaaagctgttattgccattgatgctcccagtatttttcaccacttagatcagtcaactcacccattgtggtcatagttgtcaagagcatacagtagaatctggtagtgaatccataactctaccaaagagtaaaaa

SEQ ID NO: 784702 - DNA, 543 bp, Homo sapiens
tacatctggaaggttacacgaaaaacctctgaggtttctggagatgtaaactgggggcatgaaggcaggggaaagggagagacttcactgtttacctttttattattttccaattttaaatcatttgaatgtataacttgtctaaaaatcaaattttaaaagttgagggaattaacattacagaaagtaacaaacctcaaggaagcagccaccttcaccagatggacagtctacctcactcttcccacgctccagtagttactgaatgccagtcccctccctccattcagtctgccccacctgctggccttctagagcctcagtgcagtcctattccyacacctccaaacacatccatacactgtgatggtcgatctgcgaccaccagttgagaggaaatgtgttgtgtttccacacttcagacaaacagagtgttattttattgaggtttgggatttttttcttgcattaacagggtttctagatcccagtaggtgaatgagaaagaagtatgcttttattgcgtaaggaatttgtttctga

SEQ ID NO: 784703 - DNA, 623 bp, Homo sapiens
ctttgaaggtattagtagccctgttttctgctgctcctctttcagcttccttttgggtttcctcctatctcagttgactttatttctcagccttatatactggcttcttctctaatctatgaatttttcttaggattgagtcattttccattttctatcctctaataactctctatgtgatagtacctgtttttacagcttaaatacgattttaaaactacaaaaaatgtttttattttacgaaaaatagaaaatactaatcacataatgaagaaaataaaaatttcctataatcttgccactctaataaatcaacttacttctacaagagtcaaaagtttgttgtttatccagttcttaagacctttaaaaaaatkaagtagtcaggattcttaattgcacactgatttagtcagcaaaggaatttattggaagggcattggttatctcggacttgaaaaatgattacaaacaagggaggctatgcagtatccaagactatagcataaaaccagcttccacttttgaatactgtatatcacagcttataccatcattgctgaccatagtggatgctgctgatgctgctgctgcggtatcactcacccatagaagcttgaagt

SEQ ID NO: 784704 - DNA, 611 bp, Homo sapiens
ggcattcaaattggaaaagaagtcaaactacctctctttgttgacgatatgatcttatatgtagagaaacctaaaagactccaccaaaaaactcttagatttaataaataaattcagtaaagttgcagtttacaaaatcaacacacaaatcagtagttcctgtatgccaataatgatctagccaagaaagaaattaagaaggcaattccatgtacaataaatataaaaaaacccaaaatacctagaaataaatttaaccagggaggtgaaatatcactacaaagaaaactataaaacactgtttaaagaaatcgaagatgacacaaatgaatggaaaatatcccacgctcatgaactggaaaaattaatataattaaaatgatcatattgcccaaagtaatctacagattcaaygcaatccctattaaaataccaattcattttttatagaattattaaaaacaatcctaaaattcacatgcaaccaaaacagagcccaaataaccaatgtaatcctgagcaagaagaataaagctggaggcatcatattacctggcttcaaaacatattaccaaaacaatatagttaccaaaacaatatagtaaccaaaa

SEQ ID NO: 784705 - DNA, 616 bp, Homo sapiens
cggtgactgatggaatgtggagcctgggttgggagaggtgaggtgaaagggaggggtgattgggcagcaactgccggggtgcaggggagaggcttgtagtgcggcttctgaaatcgctcctgactgcaccctaaccgatgtcagtacctcctcccttgcttctcagttagattctgctggctgagagcrttgccctaaacttctcctggatccacatcaccctgttcatgtctacaggagtcatttttctgaaacaccagtctgatcaggtcccatttttgagcaaacgccttcaaggagtctgtcctgcttcctgaacaaagcccagatgcatgagcatccctagcctgccttccccacctcttccatcatcccttgatccagtccatgctccacgaagacgccattcctcggtgctggttttcctcagtgcctagtgtcttccagctctgtgtctgccttctgcactcctttgcctgcccattatgtttcagctcccacttacaagatatcaattattgaagatttcccgtaactataaattacttaattaaagctgtgtgtcctgcgaatggttctcttcattgcctgctcagcactctggttatctgcatgc

SEQ ID NO: 784706 - DNA, 495 bp, Homo sapiens
ccaagtgccccttctcactgttgtctcactaaaggcacctgcagaaaataactgactcttaatgaatgcctttgtcagtgacccgacaagtgccccttgcctggaccaagatgagaaagccagtgttacttccaggaaccccatttccatggactgatggaatctgcccctgattctgctgtcggaggcgaaccagaccctatagaaggaggaggtgattttytgagccaaaatcaaagcgcgggtgggagttctgccaatattttctttagattagtttcatgctttctactctgggagcttagggcagtttatagtctgagtttcatttttaggtacacatttgtggtacacagacaaaaaaaaaacgtaagagagtgattcgggatcagcaaaaaggagaaagaaaaaaaaaagacgtgtctccttcactcacctgataaatcttttatatttactgacatttttgaataagtacattgtgcccatcactaa

SEQ ID NO: 784707 - DNA, 538 bp, Homo sapiens
cttgctccgtctacctcattgggaggtcacagcagtgctggcttcgtgctaccacttcacagacaaggaaaccaaggcttgcagcagtcagtggtttaccttgggctgcatggcaacggagaagccgacactcagttctagctcatcagagtccgcatttctatttgtgatatcatacagtgtcatgtgacatcatgtgataccatgcaaggcatcagtgagtaactgcatctctcgcaaygccacttcccccatcttcacccccctcaccaaacacttctccaaggctaagatttcattgtagagaactattgattctcttctatatcactcctacttttccagatcggaaaatagataatccacttgtatcacccctgtttcctggataactcacctagaaatggtctaatctgtttacatctttttatccaggtgaaaatgccttagtgaaaggcatctggggcattttatgacttggaaaatcacaagaattgatgtaaaatagagcagaggagccaaagcaaatatatattca

SEQ ID NO: 784708 - DNA, 631 bp, Homo sapiens
actgaaaaagctgccctgtatgatgattgtcatctgcaataccttaataacctgaccacacttccaggatagggcggtgggttaggctttcttatgctactcacagcccctggagagatgagaaacacttggtaagtatccatcagataaaccctaaagatatcatagtgaaaatgcctaagtggctaaagaatagtatttctcaagctatattttccagtgagattacttggtcttcttggtaaaatgcagaccctctgcycccaccctcagggacttattcaggaggaacatacaggttgacagcacctggcccatacttgaagaaaccatattagagacttaaagacatggtccgtggtgtttgctgggaccaagaagagtacagataattagttatgggagagaaagagacaccaaaggggatgaagtgcttttgatttacatattttgaccctgctaattggaacctaattagtacattccaaacacagacattaagtatctacttgcagtgataaatcttagatgtatatgtcttaattgaagctaaacctctcttcttaaagacaagcattagatttccctgataaggcagtcttaatccattgcttgtcctaaatgtgatcta

SEQ ID NO: 784709 - DNA, 646 bp, Homo sapiens
ggctaggtaattttgtaaacttaatatcatattaataagaatgatgaaacacaatactattccatgaaaattatgtattatgatagtaaaatatctagtgatagccatagttatctaagaagctttatgagatgcattctgtgcttctgcagagagcttgatggtaatctgtccatctgatgtatgtgctggttgatgcttctggggttacaggttgagatctttaagcttcataaagtgaggacaggctcagatgggaagcatggtccacagcttctgttccttctctatagctaaagagaagaaattgtaccagagccaaaggaggaaaaagattatatatcctctttcatgcttttcacccaatctcattctgtttttctaataaagcaatcatttaattccctgctgcagttggttttgtacatgtttcagagtcctcagttcattgtgttgtgatcatctgagatcctccaaattagagtttgaaactcttgcaatayagaagaaacaaatttgtccatagttgtatctaccatgtgatgagtacgtttgaaagttactgagatggagcacatggaagggcctatacaatggctcttgaaattcaatttctagacttaggtgtaaataaaaatagtgtttt

SEQ ID NO: 784710 - DNA, 587 bp, Homo sapiens
tagaaaccctcattccagttccagttctgctaacaatcttgttggaacagttgcctacaggtcagtctcagaatacagatgaatttcccttctatacaacctcttcttattcctgtaaaacaggaataataatcactgtcctacctaactcacaggttgctgttagcatgtagagtaggtgccaaagcatttggaaaagtgcagtctgcaaacatgaaatattgtcstgaatcaccttcgtcaatcaaggtgtttctttgaagttccaagtaatatttgagatacaaacagctgtgtagccaccaggagatgaacctttctttctgttgactttgacctctaatgggtcacctgctcctcatagcacctggactactaaattctttggtagctcgctatggtggagaagtcctctggcagttggttcgaacacctaacttccctacatggagatcatttaatcttttcatttttgcgtggctgatgtgatccagttcaatgcttccagttggctcaaattgcgcatttgtttctttggatcctgacagcctaggacctctctgttctcttgtttatggtgaaagtcc

SEQ ID NO: 784711 - DNA, 562 bp, Homo sapiens
atgaaaaaatgaggagtcaggtgagtaagaagggagggggaataaaatcatgcatcacttaataacagagatactttctgaaaaatgcgttgttgggcaatttcattttcctgcaaacatcatagagtgtacttacactaacctaaactgcagccctctactacacaactaggcaatatggtatagcctattgctcctaggctacaaaactttatagcatgttactttactcartactgtaggcaattgtaacacaatggtagatatttgtgtttctaagcaaacatcaacatagaaaaggtacagtaaaatacagtaagatagtcgtatgggtctaccatcgtatatacaagtctgtcgttgacgaaacattgttatgtggtgcatgactgtaatatggtatcatgttgagcagaaagtctcaaccttctcagttgacgcacagtgataaaaactataataagaaatgtattactgattacaaaatctcataattatgagtaatttgttctttcataaatttaagagaatttctccagaataacaacactcactttcattc

SEQ ID NO: 784712 - DNA, 562 bp, Homo sapiens
atgaaaaaatgaggagtcaggtgagtaagaagggagggggaataaaatcatgcatcacttaataacagagatactttctgaaaaatgcgttgttgggcaatttcattttcctgcaaacatcatagagtgtacttacactaacctaaactgcagccctctactacacaactaggcaatatggtatagcctattgctcctaggctacaaaactttatagcatgttactttactcaatactgtaggcaattgtaacacaatggtagatatttgtgtttctaagcaaacatcaacatagaaaaggtacagtaaaatacagtaagatagtcgtatgggtctaccatcgtatatacaagtctgtcgttgacgaaacatygttatgtggtgcatgactgtaatatggtatcatgttgagcagaaagtctcaaccttctcagttgacgcacagtgataaaaactataataagaaatgtattactgattacaaaatctcataattatgagtaatttgttctttcataaatttaagagaatttctccagaataacaacactcactttcattc

SEQ ID NO: 784713 - DNA, 597 bp, Homo sapiens
tgcataatgttaagcagtaaaataaaataaatgagtgtgtatttgtttcctggggctgttgtaacaacttatcacaaacttagtgattttaaacaagataaatttattctctctcagttagagagaccagaacaatatttgtttcactgacctaaagtcaagatggcagaagggctatattctcaacggagactccaaragataatccattcatggcctcttccatcctgtgggccttcctctattttcaaatccagcatcacagcatcttcaaacttctctgtttctattgtcccattgccttctgctccctctgtctcctttttccaaggacacttctgatggcatttagggctcactcagataacccaggatgatctcctctcaaatttcttttttctttcttctatttttttttttttttttgagacagagtcttgctctgccacccaggctggagtgcaatggtgcgatcttggcttactgcaacctccgcctcctgtgttcaagttattctccctgcctcaggctctcgagtagctgggattacaggcgctgccactaccacacccagctaacttttgtatttttggtaga

SEQ ID NO: 784714 - DNA, 552 bp, Homo sapiens
tcccagaagtgaacccaaacaaaaagctactatccctttacagttggaaagtagaagacactggtgatgtactcagctttcatcttttatccttcgatgataaattgacccaaatgtacctctggccaggaagaagcaaggaatttaaatagtactagatgtcaaacaatactattaaaatacttccaatttgaatatcacatcacagttttgaaaatgcatcttcatttattattgctttgttctcctgtagtacaaaagggaaaactgaggttacayatctaggaatcaaactcatgtcttctaattcttgagctatgtctactttggtctatagcttctaaatttgtaatagaagctcagaaatactcaggcgatgggcacagaggtgcatccaattaatcctatgactttaacaggaattaagaagggcttgattagctgggcacagtggcttacgcctgtaatcctagcacattgggaggttgaggcaggctgatcgcttgagcccagaagtttgagaccagcctgtgcaacatagtgagacccctg

SEQ ID NO: 784715 - DNA, 583 bp, Homo sapiens
tttttatgttcttaaattgtttttagtaaaaaaaaaatagtgtctaaagaattggatcagtgaatgcagatgaaagtttgaatttgtattggatgatgctttaaactacaaaacagatataattctatggtcagagggattgaacttgaattgtttttaaaaagaaacttgaatattrgacagttttcaatactgtttatagcaataatatcatgtaaatgtggaaataacttcttcagtttgtcccaatctcagcacctgggggtgaagttttatttttatatcctctatgttattaaatgataacatttagtaaagtcacatttcattgtgactgacaatatcttatgagaacagagcttaacaaaacaaagctgaaagaagagttttggctttgcttcatatttcatttcctgtccatagcttattgttatcaaggatggagagcctttttacattctttagaacagagagttcatttaccattagtagatatttataccagagtgagtgaacaaatgaaactgtagcttttaacaataatgaaatagcccatttaagacagtcttctcttcagtcactt

SEQ ID NO: 784716 - DNA, 583 bp, Homo sapiens
tttttatgttcttaaattgtttttagtaaaaaaaaaatagtgtctaaagaattggatcagtgaatgcagatgaaagtttgaatttgtattggatgatgctttaaactacaaaacagatataattctatggtcagagggattgaacttgaattgtttttaaaaagaaacttgaatattagacagttttcaatactgtttatagcaataatatcatgtaaatgtggaaataacttcttcagtttgtcccaatctcakcacctgggggtgaagttttatttttatatcctctatgttattaaatgataacatttagtaaagtcacatttcattgtgactgacaatatcttatgagaacagagcttaacaaaacaaagctgaaagaagagttttggctttgcttcatatttcatttcctgtccatagcttattgttatcaaggatggagagcctttttacattctttagaacagagagttcatttaccattagtagatatttataccagagtgagtgaacaaatgaaactgtagcttttaacaataatgaaatagcccatttaagacagtcttctcttcagtcactt

SEQ ID NO: 784717 - DNA, 590 bp, Homo sapiens
aagtagaaaaatgaagaaatggagatgataagtgtaataaaaaactttttgtgaaatctgactatgaagaagagacagatgtagcacaacagggtgacagtgacaataatcaataataatttaactgtatgttttaaaataactaaacaagtataattggattgtaacacaaaggacaaatgcttgaggggatgggtgccttattttccatgattagattattacacattgcatgccagtatcaaaacatttcatgtaccccataaatatayacacctactatatacccccccaaaataaataaataaataagaagagaaagatgtcaggctaagtggagctagggagggttttgattaactgattgatcattagaggtgttttataatgttgtgttttattttgtaatttttacgtatgtttctctttttttctttttctttttttatttctttgagggaggaatactaggcaaacttgtgagcaagaggctgaggaaaagagaaggttgattctgtaactttttgcaaaaagaaggaaaggatgaaaataaaaacaatggcaaagggattggtcttccacaggaggaa

SEQ ID NO: 784718 - DNA, 579 bp, Homo sapiens
agacactgtatatacaatattttatttaccctcacagaaaacctatggagttcatgttatttatagaaaagtcagctcaggtggagagaagttacataacttgcacagaggcagacagttaattagtgttaaagtttgattagaacccagttctcccggatttttttcatttgacccaattcaggtaaaactacagagaaacaactttctcactgccactactgcccactccaaacttcaggttcatgttgccccttcatttctttcggttaccatgttattagttcgttaattctttaaatcatttcgcaaggatttactgtactgagcacctcttctgtgccaggaatgtgttaggtgcctgcygggaaggatttcaaaattgagggtggagacaggaaaatagacaacatctggttggcagcatgttaagaggtcagtgtaagatgggtgtagcctccgagagatccttaaaacatactgggggtactaaaaacagatacttaaaacaggctggggcaggcaagacttcctgaaagggatgaggcctgcaccaagccagctaggtgaataggtgaa

SEQ ID NO: 784719 - DNA, 601 bp, Homo sapiens
tgtaatattcagagaaactcagaagacaaagaatatatttcaaactgttaatggagccctcagcactgccttgtgctttttttaagcaaaattatagattcactcacaaagaactgtaaacatttcatctatgtttaatttttaaaagtggtagataagattatggctgtgtwttatacaaactgcggcttgactgtcacatccaccagtcatggaaacttctataggttcttatgatctctctgggccttggtgtcttcacggatgtccaattgggttaatacacatctgctccggctgttatggaattagaaataatagtgtatgtaggggccctgcacatggccagcactccttgtattgttatttagagaagtgctgtgcaaactgtttacattgaaaggacagtcacattctgagtttgatgttgcttaaaggccttctttcctgctggtggctgactttcccttttcttattgttctaagaatacttctccatttgggccatgtaaatagtaacaattgtttggttgttccatcagaagggagaagccttcctggagcctggctggcagagccccagtctgatctgtctagcagt

SEQ ID NO: 784720 - DNA, 603 bp, Homo sapiens
caaactttattaattcaaaaacagcagtagccaaatctcacaggccatgtcttgctaatacctgctatagaagctcagttcgtcgtttactaagtaccacctaaagtaaggaaaatagccctcttgctttccatttctaattgcaatcattactcctccactgttatataaaaccactttatttgaggcttgtatcatccaagctgtgctaccatctattattctttaatataatgacctcctggttatcccaggagaataaaagacattgacacggccgggcgtggtggctcacgcctgtaatcccagcactttgggagcctgaggcgggcggatcacgaggtcaggagatcgagaccatcctggctaacacggtgaaaccccgtctctactaaaaatacaaaaaaattagccrggcgtggtggtgggcacctgtagtcccagctactcgggaggctgaggcaggagaatggcgtgaacctgggaggcggagcttgcagtgagccgcgatcatgccactgcactccaggctgggagacagagtgagactccgtctcaaaaaaaagaaagacattgacaaatgtttgtaacatgattatgttt

SEQ ID NO: 784721 - DNA, 614 bp, Homo sapiens
caggacctcatgctttattctacctgcagtgagaagccctgaggggccttgaaagggggatttgggtctacgttgtcattaacgcatagccgactaaatatgctgtaattcattgttaatgctttcttctgcaagaagcaagatatgtgactaaaagggccctagagagaagcaattccagrttggctcagtcattcagtgactcctgggccctggggcagcctcttcgtggtccttggtgctgctcccacaggttcacaagactgtggttgcgatgccaagtatcacgtgctccctcgaacgaaggcagggaccggaagaaacctctctttgaaaattggggaagaaaacctgttttccagaaaccttcacattcctttgcccaggattgggtgccattcctctgctgagctacaaacacaccaggaatgtgattatctgagattttcagattctacagtgggaggcaaccagtgccgagaaagcgtggctttcgatagggaaccacagcaaatgccagagctgtattttatcacagccataaactccacacacactcatgtcatccacacagagcgagcacagcctcggaaaacacccagaacaagaccaaa

SEQ ID NO: 784722 - DNA, 550 bp, Homo sapiens
ctttaaaataaataaataaataaataaaatttaaaaataataagtataggtggcgtgacaatgaaactcttttaaagaaaaggggaatgaattatttaggagttttatatctatcaagtagggaagtacaagaaagtaatattttacctttgtgagtaattatatattttatgttatgtgaataaatttacaggaagggctgggcgcagtggctcatgcctgtaatcccagcactttgggaggccgaggtaggtggatcacctgaggtcaggggttcaagaccagcctkgccaacatggtgaaccctgtctctactaaaaatacaaaaattagccgggcatggtggtgcatgcctgtattcccagctactctggaggctaaggcaggagaatcacttgaacccgggaggtggaggctgcagtgaatcaagattgcaccactgcacactagcctaggcaaaagagcaagactctgtctcaagaaaaaaaaaaaaaaaagaatttataggaagatgaataattttttaaaattaaattataaaggaaccgcc

SEQ ID NO: 784723 - DNA, 538 bp, Homo sapiens
aaggactcatctctcaaatttgttctgttattcagaacatattattaattggcatgtattttaaacattctgtgatcacccataatggcagccaattcaaacaagaatggcttccagtggcaatcaactaaaaacmcagactgtggaaaatttttcctataaaaatagatcttctcttatttaagatgagatttcacactgtggaaaacagtatggtggttcttcaaaaaattaaacatagaattaccatgtgatccagcaattctacttccatgtatatagccaaaataattgaaagcaggcacttgaatttgtacaccagtgctcaaagcagtattattcacaatagccaaaaggtgaaaacatacagatgtgtattgattggtgaatggataaacaaaatgtgttatatacatagagtggaatatcattcagccttaaaaaggaagcagattctcacacatgctacgacatgaatgaaggaaccttgaagacattatgctaagtgaagtatgttacatacaaaaagacaaacatt

SEQ ID NO: 784724 - DNA, 521 bp, Homo sapiens
tttgagggtcacccagtctttcctttcttataatttatcttgaaatatgcctgtgtaactctaaatagaggggtggattaatactgctactagatagagtaattctggataagacctgatgaattttttggattttctgaccctggtccaactggttttcaggtgcttcaggatagttttataacagttgttaaatctagattgaatgatttgtgaaactttttcacaaatggttttgcaartaatttatatatgcaaaattagtatatgtctatattaatttcttgatccctgacaggtcttgaaaaccaaatgaaaaactgaattactaaagcaaattatactttctgtactatttgtactgtgtacaatttatgctatcctctggggtgactatcatgtgtcatttgttacacccctgctgactcttccttccccttgtagttagaatgcaaaattttctttagtattgccatacagggctgtcttcttacacacttgcttgacattatttggctttt

SEQ ID NO: 784725 - DNA, 593 bp, Homo sapiens
gcacggtggatcatgcctgtaatcccagcacttcgggaggccgaggcgggcagattgcctgaggtcaggagttcaagaccagcctggccaacatggcaaaacctcgtctctastaaaaatacaaaaattagccaggcatgttggcaggagcctgtaatcccagctactcgggaggctgaggtgggagaatcacttgaacccaggaggcagaggttgcagtgagccaagatagcaccattgcactccagagcctgggcaaaaagagcaagactttgtctcaaaaaaaaaaaaaagaatgagtaagatctttatgaactaatatggaatgacttccagaatatattgttagttgaaagaagtaaagcatatctatagtaagctatttttatgtaagaaaaagaggaatttagaaaatacacatatgcctaaaggcagatacagcaaaaactaagtaaaaagaataataggaaaggtggaaaatgacacccctttttatataatcctgacttgtaaaccgtttaatgtttcacacgctgaagaaggtaaagatgggggagagacctcaaaaagggaacataaacaggccaggcgcg

SEQ ID NO: 784726 - DNA, 618 bp, Homo sapiens
ccttacgtgtttggtgagtctcttgaagacagcaggtacttggttggtggatttttattcattttgccattctgtatcttttaaatggagcatttaagccatttacattcaacgttggtattaagatgtgaggtactgttctattcatcatgttagttgttgccttaataccttgggtttttttccattgtgttaytgttttataggccctgtgagatttatgctttaaggaggttctactttggtgtattttgaggttttccttaaagatttagaacttctttaggcatgttgtagtgctggcttagtagtgattaattctttcagcatttgtttgtccaaaaaacactttatctttccctcatttatgaagcttagttttgctgaatacaaaattcttggctaacaattattttgtttcaggaggctaaagatgggaccccaatcctttctggcctgtaaggtttctgccaagaagtctgctgttaattgataggttttcctttataggttatctgatgcttttttctcaaagctcttaatattctttcatttgtcttgactttagataatctgatggctatgtacctaagtgaagatctttttgtgatgaatttc

SEQ ID NO: 784727 - DNA, 628 bp, Homo sapiens
atccacttatttcatgccatgtgtagaactatgaaagttttattcaactgcttttctgaatctttttaaacatctgtgtttctttttgttgatattgagtacattagctaaagataaaaatatacataggaaagttatcttgcctagttttaaaatttggcaaaaaaaaattcaggaaaaaaaccacacagctactgttggccatttaagcttctgaatgtataactcatatttggcattagcataacaatattagctaagggcaaggcaacataggagttttccttttaagttatttatatgaatttaaatcagatcacccgtgaggtatctctcggcattactggtaaactatttacggacacagaacacaaatgagaactgagtcctttttctttgctagcagtctcattaaaatcagcacaggtaaagtcatgacagtaacaaacttcaagtagccataagtactacagatgttatttagttttaattttctatccgaaatttttaaaatcatttaattggttagaaatatttwttgaattctaagcagaaatcacttgctttggggaaaattattgcaagacagacaaaatatctcctcttaagttctcagtcagtgaaggag

SEQ ID NO: 784728 - DNA, 588 bp, Homo sapiens
tctgggacctaaataaatttgaaagacagaactgcaatttctggacaagttcttgtgctgtgttaggatcagagccaatggacttggggctcatgtgaccaagtgagacgctagctagaatggcaaatgaggtgctggcataaccccttccccaaaaccaggcagtgcagcttgcarcttgagaaggagagagaagaataaagaagatattgtcttgcaacttggatactagctcagccacagtaaaacaaagcaccaagaagagtcctagacccctcatttcagaccatagctcccatatgacatttctggacccaccttgggccagaaaggaacccactcttctgaaggaaaggacccagttctggcaaaattctccaccttctgacaaaagagtcttgtaccttgaataaacatcaatggtagcaaggaaatagctgctacagcccttgggtgagacccagtattgtgctggccttagatgtgaaccagtaaagtcccaatggtgatagttacaagagtacttgcatcaccactccccaactccaagtagcacagcatggagagagaggctccatttgcttgcgg

SEQ ID NO: 784729 - DNA, 655 bp, Homo sapiens
aattcaggagttcaaagactgtacatgctatacctgtgaaataaagttccaaatctactcttccgaacatgtctgtgaatccgggaaaaggagttatacgagggcaattacagtacagttagctgcttctctaggttgtccccttcagagagaaaactgaaagtgacactgagagccatggaaggctccagcaaagtgacatcatattgagacatgaactgatggatgaaatcaaatacatacacacagaggattcttagttttatatctttttttttttttttttttactttttgkcaaaaagagataaggaactaaaaactttgaggccactgactcatcaagttgttatagtggtgacaatctatagtggaaaagagaagagacagatactatattaaaaaaaactggtttatcatagtacgtggtggcaagactaattaaaaccagccaatcaacaaatccaaacaaaagttgatgcaagaattgaggtgcccaacatcaggctagagtttgtggggacaaaaaaaaacctaatgactaaaatttaatacaaattatgtatttgttaattaataatgcaagactgataacatctagtcaccctaagcttcatcttcggagaacaatgccaggaagtgagggattgagcagt

SEQ ID NO: 784730 - DNA, 637 bp, Homo sapiens
caaaaagtcaaccacagacaataggatttttttccccaaacaactgtacttggtccatcacctcccctttacccactaatattgctttggtttttgtttacctggttctaatgatcttctctatctctattcagcttagtctctacttttggccacgttgctgttttgtatacttgctaattgaatacttggctgttggttctgctaaatatcccatgttctttgtatcttatataacatatgtgttgaattttcctttcttagtctcagaacctgataataacctcattagtccatttgctcagcccccaagagacaggaagtcagagttatccacaacaggtattctaataactattgttcrcttattaatttttgctattaaggaaacatttttaaatggtggcgaaataaagagacaggcacacaaacacacacacatgcacacacacacaaacacagtattttacatacacaattattctagaacttagctgaaacataataacctgtatatcccatcattggatggttaagtcatatagattacttgctattatcaagcccagtaacatgatgtatattttattatcaccattacagaaatggagaaagcaagtcaattaaagatgtacaa

SEQ ID NO: 784731 - DNA, 642 bp, Homo sapiens
aacaggacggaattttaatctaggatggcctcctagcaaagagggctgagtggaaaaaccatgggatgtataaaaaggagatgctcctcctcccctaacaccccttccccaaagtcataatcactaccaggggtcatgatgttagaacctctgggtaggaaaccaaataccagataaacctattctggaactgccatggcaaatgagtaagagtggtaccatttgctactactactattatgactaccactgccaactgataactattattatgcttttatatgttccgacactgtcctatgaattttacatgtaatcctcgatgtaagttataaagttaccactgatattgaccctttataactggcaggagttgagacaaggcaattaaatacttgaatagtggacacagagcctgagattccttagaattatccatctattgctttgtaactcactgccaaattaatttttttttargaagattcttaagggattctggaaccccctcctatgtagttagaattaagagcacctgcatttttacttcagcgggttaaaggcatagtttcactataaaccatggtctcaatttcctacaagataacactgaaaagcaccttcctccattaggcaaaaaca

SEQ ID NO: 784732 - DNA, 615 bp, Homo sapiens
ccttttcattatctattgtgatgtccatgtggttatttttaattctgtttatgtggtgaatcacatttattgatttgtgtatgctaaaccaaccttgcattccagagacagagcctacttgatcatggtggattagctttttgatgtgctgctgaatttggtttgctagtgttttgtttagaatttttgcatctatgttcttcaaggatattggccaaagttttatttttatgttgtgtctcttccaggttttggcatcaagatgattttggcctcacagaatgagttagggagaaatcccccctcctcattttttcagaatagtttcagtattaatagtaccagctcttccttatayatctggtagaatttggctgtaaattcatctggtcctgggttatttctagtttgtagggtttttattaatgattcaattttggaacttgttattggtctgttcagggattcaatctcttctcggttcaatcttgtgtggttgtatgtttccaggaatttttccatttctactatgttgtctagctcgcatgcatagaagtgttcataatagtctctgacagttttttgtatttctgtgggttcagtggcaatgtcccc

SEQ ID NO: 784733 - DNA, 497 bp, Homo sapiens
acttaaaatgagatcttaatcatttattattattcaagtactgtttttctaggacatttaactcaaaggagttttcatggtatgaactacattgttttggcatatattgagatgttgctatctgttatacttttcttattgggcctactaatgggatatatacctaatattaggttattttgttttttttttttctttttctggagtgtagttgcatcttggctaacyacaaccaccacttcccagggtcaagggctcctcccacctcttcctcctgagtagctgggactacaggtgtgcaccacacgcatggctaattttcatatattttgtagagaaggttttttgccatgctgcctgggcttgtctcaacctctgagctcaagcaatttgctcgccttggactccaaaagtgctgggattacaggcaggagccactgtgccaggctactgtattcttgattacttgtataagtcccatttagatgagataaaat

SEQ ID NO: 784734 - DNA, 497 bp, Homo sapiens
acttaaaatgagatcttaatcatttattattattcaagtactgtttttctaggacatttaactcaaaggagttttcatggtatgaactacattgttttggcatatattgagatgttgctatctgttatacttttcttattgggcctactaatgggatatatacctaatattaggttattttgttttttttttttctttttctggagtgtagttgcatcttggctaaccacaaccaccacttcccagggtcaagggctcctcccacctcttcctcctgagtagctgggactacaggtgtgcaccacacgcatggctaattttcrtatattttgtagagaaggttttttgccatgctgcctgggcttgtctcaacctctgagctcaagcaatttgctcgccttggactccaaaagtgctgggattacaggcaggagccactgtgccaggctactgtattcttgattacttgtataagtcccatttagatgagataaaat

SEQ ID NO: 784735 - DNA, 635 bp, Homo sapiens
agggagtggggagggaaataagggacagtgctaaaatcatggtctgccacctaatttcgaagttttgggaaaaccccacctgccacacacactgtactaaagaatttggaagtcatcaaaacatgtatggcagaacaacttaaaaaaaaaaaaagagaatgctgaaaacaaatgggtataacgtgatctaacctacatttaatgctgaattttaataacattatagaaggtgaattgagaaaggaatcctggaaatacagacaaagtgggaaactcctgcaataatctgtgtgaaagatgacaaagtgctgcattacggtagggaaaggaatacaagaaggggcacatttgacaaagctatagagacacaataaaaaacgtggtgatgaactagatatgagtacaaamgacagaaaagaagtcaaagaagagcccaaggctactcacttaggcggcgggaaaatggtgaatgcaaaggtggagaagattaaaaaaaaaaaaaaaaaaaaaagctgattttactggttttggacatgctgaatttgaagtattccagatttttatggactttttaggtggaaaagtctttcagcagttgagaaaaggagtgtagagcttaaaagagaagactgagt

SEQ ID NO: 784736 - DNA, 534 bp, Homo sapiens
cctttcaccctctgccatgattgtaagacctccccagccatgtgaaactgtaagtccaattaaacttctttttgttcccagtttcaggcatgtctttatcagcattgtgaaaatgaaatactacagtaaatttataccagtagagtggggtgctgctgaaaagataccccaaaatgtggaactgactttggaactgggtaacaggaagaggttggaatgatttcgagggctcagaagaagacaggaaaatgtgggaaagtttagaacttcctagagacttgttgaatgtttttgaccaaaatgctgataatgatatgaaaagtaaggtccaggctgaagcagtctcagatggagatgaagaacctctcggaagctagagtaaaggtgactcttgctaygttttagcaaataaactggcagcattttgcccctgccctagagatctgtggaactttgaacttgaaagagatgatttagggtatccagtggaaggaatttctaagcagcaaagcattcaagaggtgacttgggtac

SEQ ID NO: 784737 - DNA, 624 bp, Homo sapiens
ggggtggaaatacattgtttggctgtgtccacatccaaatctcatcttgaattgtatctcccagaattcccacatgttgtggatgggacctagtgggaggtgattgaatcattgttgccggtttttctcatgctattctcatgatagtgaataagtctcacaagatctaatgggtttatcaggggtttccacttttgcttcttcctctttctctgttgctgctgccatrtaagaagtgtcttttcgccctctgccatgattatgagacctccccagccatgtggaactgtaagtcaaattaacctccttttcttcccagtctcgggtatgtctttatcagcggcataaaaacggactaatacactgttaaagaataaagttatgttgttttgttgttaaaagaggtggggtcggggaaagaagaggaaaagcaaatgaaatcaaaaggagtaagtaaaatgtagaaagtaagttcagaaggaagtagtagaagattgttttttgaaaagaaggaagggagacacaaaggaaaggaaggaaaaaaaagaatagaaaaaaagaagaaagtgatatcaactaagtacaaatttatgaacctgagtcatacaactgagaaattaaatc

SEQ ID NO: 784738 - DNA, 628 bp, Homo sapiens
tcaggaaggaacctgcatccaaactgacttgaaaagagcttcttccaggcctaagtcttttgctgcattttgcattattacattgtccctttatgaaaatcaagtattctgttttactcttttttgcctgtttcttagtagatatcaactccaaatatcttttaatatctacagcaatggtgattgtttcccaggccttttaaagacaataaaaactctgatgttgaatacttgcaaatagcaaatatagcctcaagttatagtgtcttcaaatagtttcctgtccactgtccttatgacagtctaccaagacatgagctttgtgatccataaaattaatttaaacactttaggggaaaaaactaatagcattaatttaatttaatttaatttaatktaatcatgtgttgacataatttctaacaatgaatttctaggtaaaatatttatactgttatataatatatgtgatttattaaaatatatataacactaaaatatatcctttgatattattaaatattttaatacctcactttgcaccagtattaaacaaaatcatttttgtaacacatgttagatgattaaaaaactttactcttcaaagaacaatagaaaatcattaaat

SEQ ID NO: 784739 - DNA, 615 bp, Homo sapiens
gattttgctaaatatatagtcgcagcaaaaaggattgctagattgtgtgaatggatggatagtttacttttcttataggaaatcagctctagtctattcctagaatggcttttttgaccaaaatattttgttttccatatattgttagtctttatggtcaatgatgaataaacagtgctaaatactttctttttatggatgtaccaaaagcaacatttcaattcattaagtaaacagttacatttatgtattgtctttctctggttacatcctagtcaacttgattagaactgggtatttatcttctgcaaaatatttacaaactgttatgtatttttagcatatggccatgttttctttttattgatggttttaactagtttacaggtatggctcttactgrtttttttcaaaattataaatattttgtacacacccataatgcattgaaaaaactagggctcaagtggctatatgttaattttaaatgtttaatcagcaaataaatacttcaaacattttattttgaaacacatcttataaatcatctttttaagttttattactagtattagtattattttgatccacatatctcttgacttttttctttta

SEQ ID NO: 784740 - DNA, 625 bp, Homo sapiens
tttgctctttttaaagacttgaaataagatagaaagtgatttgtatcattcagggatcattgacatacctagctgaagaaatagatatgggcttaaagatgatctttccaataagagattatagtctttctcacttggaaaattggtttgttgatctggaggggaatggggggctatttcatggtttctgaaggccaagattccctctgagtggatttatcgtttgagccacctgtgtacttagactcccactcactttcttcaaggagaatcctgctgtctatggatttagccaggtttaaaatatatttatagtaggaactaccaaacattatctcaagctgagctataagaaagcccatcaaagttaacttccaaggcattctgatagttatgccttgattctggatcttgattttyccacacttctgttttcctttttatgtggaaaaaaaaatcagaggaaaactcagtattcagaaagaaaaaatgtacaggaaaataccagcctggacaatgataggtaaaggaatgccaggaactctgccaactgctaccaggatgacagaatctagcttcagaatccagttgctggaggctttctcttaaaagagcttaatagaac

SEQ ID NO: 784741 - DNA, 635 bp, Homo sapiens
agggagtggggagggaaataagggacagtgctaaaatcatggtctgccacctaatttcgaagttttgggaaaaccccacctgccacacacactgtactaaagaatttggaagtcatcaaaacatgtatggcagaacaacttaaaaaaaaaaaaagagaatgctgaaaacaaatgggtataacgtgatctaacctacatttaatgctgaattttaataacattatagaaggtgaattgagaaagraatcctggaaatacagacaaagtgggaaactcctgcaataatctgtgtgaaagatgacaaagtgctgcattacggtagggaaaggaatacaagaaggggcacatttgacaaagctatagagacacaataaaaaacgtggtgatgaactagatatgagtacaaaagacagaaaagaagtcaaagaagagcccaaggctactcacttaggcggcgggaaaatggtgaatgcaaaggtggagaagattaaaaaaaaaaaaaaaaaaaaaagctgattttactggttttggacatgctgaatttgaagtattccagatttttatggactttttaggtggaaaagtctttcagcagttgagaaaaggagtgtagagcttaaaagagaagactgagt

SEQ ID NO: 784742 - DNA, 587 bp, Homo sapiens
atactatgtttttatttactgaatctggcaactctaattcagccttttggccttgaacctgattgaatttgtttctcttcttttctcaaaatacgattaaactattttaatagtgtttatgccctattaaatgaagactgtataatcatgatcctcttgaccttctttgaagacatacagaaaaagaaactccagagcatatgtaattctggatcaatgtgtagaatggcattatccacagggcctagtraagcccagtatgttgaattttgctaaaaaagaagaaaaaaaataaaggaatagggtttcagcattttctaatgacatggccagatgatgccacaaaatcttggcattactgataagcacacgctgtgctggaaaatcaatagtttctgaaggggatcctgaagggaactttccattattgaagttagaaataacttagccccacactcataaattcctggagttcagggtgctcagtgttcctaagcaagaaagcacgggacttgtcctaacttcataacctgctgagctggaattattgcttttacaaattacagagtacctacttttttaaaact

SEQ ID NO: 784743 - DNA, 583 bp, Homo sapiens
ctaagcatctgaggatccctagataaacaaacaaacaaattatactgccaacaggaggatatttttttctcccgtggtctctctttaactgatgatgaaaatcttctaattgggtcttcgaggaattatcatagcaagcagtcatccactaaggttgtggagattatgtggttgtttcacaacacaaagggaaggttcttrtgtgttagttttgttttgtttttaacaaatgcattttcagagaccagtatctagaggaactactggctaggagaaagggtggttttaggattagctgttattgaactgaaatagtaatgccagttcatttcacaaaggtataactggtatttttgtaagaaagaaaataaagttggatttgatttaatggaaagcgatttaaagtacagtactaaatatttaaatgcagtgtgacaaccagatcaaagatgtttcatattgacatgatttataaaatgttatatataatatatatctcatatataaattttaagcaattgtgcaaatattctgtaaaaagggtcatttcacattactaaattctagtggtccagaaatgcag

SEQ ID NO: 784744 - DNA, 575 bp, Homo sapiens
cccaacggctaataactgggaaaagattcataatgcctaatactttctccaaaaaggttgtttttagggtcaagactcaaaataacttagctcaaactaaaaactatttcctaagaagccaggtggtaaagaacttacattttcctatcctctccctggtttgctgagcgaatatacgggactacatattacacagataagaaatttggctgaraagtgggctaaagaaatcatttctcatccataaaaatgaaaactttgtatgtctttgtaacaagttccattgtattggtatttctataataagaaaatcattatgtatcttattttaatttgaagatggaatgagattaaataccatttgaattattaatatttcatttccttatgctaatacctgaagctctttttctaagagcaagttcttgattatgaaaagtgttttttaccgaaaaagccaatgaaaaccaaaaagcaaacgtcaggcctaagagacctagtatatttttaatgttcaataacaaattttaaaatcataaatgttttaacagagaaccaaatagtccctctgataa

SEQ ID NO: 784745 - DNA, 575 bp, Homo sapiens
cccaacggctaataactgggaaaagattcataatgcctaatactttctccaaaaaggttgtttttagggtcaagactcaaaataacttagctcaaactaaaaactatttcctaagaagccaggtggtaaagaacttacattttcctatcctctccctggtttgctgagcgaatatacgggactacatattacacagataagaaatttggctgagaagtgggctaaaraaatcatttctcatccataaaaatgaaaactttgtatgtctttgtaacaagttccattgtattggtatttctataataagaaaatcattatgtatcttattttaatttgaagatggaatgagattaaataccatttgaattattaatatttcatttccttatgctaatacctgaagctctttttctaagagcaagttcttgattatgaaaagtgttttttaccgaaaaagccaatgaaaaccaaaaagcaaacgtcaggcctaagagacctagtatatttttaatgttcaataacaaattttaaaatcataaatgttttaacagagaaccaaatagtccctctgataa

SEQ ID NO: 784746 - DNA, 575 bp, Homo sapiens
cccaacggctaataactgggaaaagattcataatgcctaatactttctccaaaaaggttgtttttagggtcaagactcaaaataacttagctcaaactaaaaactatttcctaagaagccaggtggtaaagaacttacattttcctatcctctccctggtttgctgagcgaatatacgggactacatattacacagataagaaatttggctgagaagtgggctaaagaaatcatttctcatccataaaaatgaaaactttgtatgtctttgtaacaagttccattgtattggtatttctataataaraaaatcattatgtatcttattttaatttgaagatggaatgagattaaataccatttgaattattaatatttcatttccttatgctaatacctgaagctctttttctaagagcaagttcttgattatgaaaagtgttttttaccgaaaaagccaatgaaaaccaaaaagcaaacgtcaggcctaagagacctagtatatttttaatgttcaataacaaattttaaaatcataaatgttttaacagagaaccaaatagtccctctgataa

SEQ ID NO: 784747 - DNA, 577 bp, Homo sapiens
gtgttacagtgccctttttgctttgctgtccatggatggcttaagtgttaacacctcagtggagggtcagtgtgacagccttttgtacctacactcttggcacctgagttgttgcctggcatccaggaggaattaggttgcatgaatgaattgaagatggtaaatgtgggggattttattgccgatgaaagtggctctcagcaggaaagggagctgaaaggggacagaatgggaaggcaatcttcctctaaagtccggctgtccttggctggactcctctctgaaggtacattgtcaagctgtccctctgaaatcaagctgcttctctccaacatccagctgtagcctctaacgtccagctgcttctcctcgctctgccagctgagcctggagtttttatgggtgcaggatgggkgtggggcgggccatgagtggttttggaaaagacacattcgagctggaaaacagtgatgtgaaattctcactttggtttgtggtatcaggctttttggcttgagggtggggcgcttgccagggatccgccctcttctgcccagaatttccctgcactctgtcc

SEQ ID NO: 784748 - DNA, 602 bp, Homo sapiens
agccatatgtagaatgctgaaactggatcccttccttacaccttaaacaaaaattaattcaagatggattaaagacttaaatattagacctaaaaccataaaagccctagaagaaaacctaggcaataccattcaggacataggcatggccaaacacttcatgtctaaaacaccaaaagcaatggcaacaaaagccaaaaatgacaaatgggatctaattaaactaaagagcttctgyagaacaaaagaaactaccatcagagtaaacaggcaacctacagaatgggagaaaattttgcagtctactcatctgacaaagggctcatatccagaatctacaaagaactcaaacaaatttacaagaaaaaaacaaacaaccccatcaacaagtgggtgaaggatatgagcagacacttctcaaaagaagaatttatgcagccaacagacacatgaaaaaatgctcatcatcactggccatcagagaaatgcaaatcacaaccacaatgagataccatctcacactggttagaatggcaatcattaaaaagtcaagaaacaacaggtgctggaaaggatgtggagaaataggaacacttttacag

SEQ ID NO: 784749 - DNA, 610 bp, Homo sapiens
atttttagaatcaaattttatttcttgtcatataagcagctcttctgatattttaggtgaaaaacagagcagtgtagatcaagacttaagtctatgcaagatgtcttattgattattggacataagacaattctaagttttttctcccacaggatgttaaaaatgtgaatgacttcaagctgctctaagaatggaatgtgttcatagaatttaatattcccttttgtagatattacaaaagactcagggactttgaggaaawtagctgctttgcttctctcttttgtatgttttttcggtttttgttttggaaaagttggaggaagaatatatctgcctcagtcagattttgttggatgtttctcaacttttatttgtgttactattccccttaggagaaaaattttattttaatcaatgaatttaaattacataattttaattaattgatagattaaaaattaaatttctccctaatgagaggaattaagtactacagcttaagattttgttgggcagggttgtgcttttgagggcaacaaactattgtcatatctaagattattttcacgtcccctcccaagaactaacttcaccctttggggtggct

SEQ ID NO: 784750 - DNA, 525 bp, Homo sapiens
ctacctcatagggctgttgtaactgtttagctgatgtctgtgataggctcagcacaggctaaggattacagttgttaatttacatttaaaaaaacacttctgggctgggcgcagtggtgcatacctgtaatcctagcactttgggaggccgaggcaggtggatcacttgaggttgggagttcaagaccagcctggccaacatggtgaaaccccatctctactaaaaatacaaaaattagccagatgtggttgcaggcacctgtaatcccacctactcggaaggctgaggcaggagaatcgcttgaacccaggaagcaggggttgcagtgagccgagattgtgccattgcactgcagcctgggagacaaagtgagactcygtctcaaaaacaaacaaacaaaaaacacttccaaacatctttatagatggcttctgaatagcacccggtagatatttaaaatatcattgttgaaatgaaatgaaattcaaaaggtaaagtgttcagtattaaacagcagagtcttt

SEQ ID NO: 784751 - DNA, 625 bp, Homo sapiens
gcctgctgcatacccatctcctggatgacttccaccaaattggcatacgactgccatttactctcagttttgggtatttcaccagcgtcattccacacagtccgtatggctgcccattgccactcaatcagagtgtggtcatgttgctcttgtgccaayggcctgctcacctgcaaccactgacagagggatgagtgagttatgatagaggccagcttttccatctcagaggcagaacaggagatactatctgctccctcatcccacaaacgaagcatccgggtgggcagaggttctcctggaagctggctgcactgcttgcctaattcccacaactcagttggggtataggcagtatatgaagtatgttgcgttatggtggggggatccctaagcctgcccttcgagccccagtggctgttcatgatctaccttctgacagaccactgggcaagcctgcaacagaggttcttcctcctcggcatcagacccagtgggggtctctggccaagatgacggacccaggcctgcatttacagcagcctctaattccttttccaagctgtgtagccaggccttcaggcatcccacctgtgcctggaggtccccattcacagcagcttct

SEQ ID NO: 784752 - DNA, 628 bp, Homo sapiens
atctggagtcatagagaaagggaggaagcatgtgctctcatattggctctgccactagccaggtgtggggcctcccatggaccttatccaatgagggctgaacctctaaacaagaaatctgaggtcacatatcactcagctcttcctgttcttgattctcagtgctacttcaaatcatactcaaacccatcacactttttccctccttacagaacttttgtaggaatcaacaccaaaggggctagatccttatcatgtctggaagtttgtagccccatctacaatcataaatcgaaacaaagatttaggtagattgattatgtgtcttctcactctacatacctccatgagrtaatttcttttgtagctgattctcttctttccccctgcaaaaggaagatggattaaagttacattacagaaaaaggatactttacaacagttcataaagttgaaaatctgcagaactagaacttttggaacatgtttaaaagcctgcaatgctatttctaaaattggaaaatagttacattagcctcagttcttgcatttgagattttgtaatgcagcggataaccaaactgtttatttcattaattttgtgggaacaccagcaccatagtcatga

SEQ ID NO: 784753 - DNA, 643 bp, Homo sapiens
tggcccgtggagtccctgaggagagatactcagattgtccaagtgtgttcaggcgcacctattcacacaacgagcctaatgttttcttgttggagtgatgttccaaaagtgaaatatttagagtggaaatggtggaaacattgtttccacaatgggacctggaaatatcattgtatagactctatcaatattgttctaaatcttaaattgttatgtctcaaaagtcattctgaagtcagggcttactgtgaataatggcttggaaaataaaaataatgtctctcctgggatcagaagcactgacccraataacaggacgggagggactgactgagagggacagagaagctttcccagagtgtacagttccaggggtctggagcctgggagtctagaatggactgccagtgaccttcatgtgaccgtgagggtctttttgcttccgaggatccttgggtcgctcagtagggatgtgagtgaggagacgctgctggggcctccaggcccgatgtcggtggttctcaccagaatgcctcggctgcatgacatagagctctcttataaagttggagtttcctgttccaaaacgttcagatttcttgcactttctccttgtgggtggaggtgagggcaggtttctggc

SEQ ID NO: 784754 - DNA, 561 bp, Homo sapiens
agaggccaagagtgtggccttcaagggcacctcatggcatgggtggagcaggatgctggaatccaggctgtaccccttgtcctttcctttattcattcactccacaaagaattactgagcacttcctaggtggcagttgctgtactaggcactaggtcaaccctggtcggcaaaacagacacaatgtctggtcacttgaagcttccattctactgagagagacagagcctggatacctaggcaaacacagaccaatgtcatggagcgttgccataaattccatgaaaaagaggcacgaaacaccacagacgagaaaaggaagggatcaggggtcatccctgctggcgatggcaggggtgaaagctcargggtcaggcggtgcctctctaaggctgtggcattagccagaatgacagagaagggaaggggtgggtcccagcaggggacagaatgtgtgaggcccgactggagaaatgccttgatggggtggaggaacccaaggaagttaaggaggctccagtggcaggtgatggggggagactggggtgggatgaggttggg

SEQ ID NO: 784755 - DNA, 551 bp, Homo sapiens
ttgtctcctcagcctttacccttctctcctgcatttgcccctcccccctcttcggaccatctctctcaggctacaatatgctctcatctcttctaggtagaaaacacaaacagtctccctggattctgcatgatatctggccacctctctgtctcttccttattactctataacccttttaarcccatcgccctctttcttccacctgcattaagatggtagagttgttttggctaaggcaacctgtcactttccacatgcaaagtccagtgaagagtttgtagtcttatcttactggattgatttccaagcagcatttgacatgatgactctttccttctcaacagtcagcaatatcgcatccttgttgtctgccttccaccccacaagccatttcttcctccatcttcctcacgagctcatctttccactctaatcgctggtgtatctaaggctcccgtctcctacccgtctctctcctgccacattttcctcttagatgatcccattttggtcctcatttcaacctatacctaaatgcatgttaatgg

SEQ ID NO: 784756 - DNA, 551 bp, Homo sapiens
ttgtctcctcagcctttacccttctctcctgcatttgcccctcccccctcttcggaccatctctctcaggctacaatatgctctcatctcttctaggtagaaaacacaaacagtctccctggattctgcatgatatctggccacctctctgtctcttccttattactctataacccttttaaacccatcgccctytttcttccacctgcattaagatggtagagttgttttggctaaggcaacctgtcactttccacatgcaaagtccagtgaagagtttgtagtcttatcttactggattgatttccaagcagcatttgacatgatgactctttccttctcaacagtcagcaatatcgcatccttgttgtctgccttccaccccacaagccatttcttcctccatcttcctcacgagctcatctttccactctaatcgctggtgtatctaaggctcccgtctcctacccgtctctctcctgccacattttcctcttagatgatcccattttggtcctcatttcaacctatacctaaatgcatgttaatgg

SEQ ID NO: 784757 - DNA, 491 bp, Homo sapiens
ggctactctcaggtctcctacccaggtgtataggagacatgtaagcagaattttgccattattgtgctggaaagtgtaagacaagaataaataggaaatctgatcaccctagtatctgaagtacccagcactctacctggtatagtgtaggtgctcaaaaaaagtccccttttmttttcccagaggagatgtatactgcttattaaaaaatcatattttggtcttttggccggaaccgccatcttccggtaattcgccaaaatgacgaacacaaagggaaagaggagaggcacctgacatatgttctctaggccttttagaaaacatggagttgctcctttggccacgtatatgcgaatctataagaaaggtgataatgtagacatcaagggaatgggtactgttcaaaaaggaatgccccacaagtgtcaccatggcaaaactgggagtctacgatgttccccagcatgctgttggcattgttgtaaaca

SEQ ID NO: 784758 - DNA, 491 bp, Homo sapiens
ggctactctcaggtctcctacccaggtgtataggagacatgtaagcagaattttgccattattgtgctggaaagtgtaagacaagaataaataggaaatctgatcaccctagtatctgaagtacccagcactctacctggtatagtgtaggtgctcaaaaaaagtccccttttcttttcccagaggagatgtatactgcttattaaaaaatcatattttggtcttttggccggaaccgccatcttccggtaattcrccaaaatgacgaacacaaagggaaagaggagaggcacctgacatatgttctctaggccttttagaaaacatggagttgctcctttggccacgtatatgcgaatctataagaaaggtgataatgtagacatcaagggaatgggtactgttcaaaaaggaatgccccacaagtgtcaccatggcaaaactgggagtctacgatgttccccagcatgctgttggcattgttgtaaaca

SEQ ID NO: 784759 - DNA, 447 bp, Homo sapiens
aaaaaaaaaaagtatgtgtattacatatatgtgtgcgtgtgtgtgtgtgagaaatggggagaggagtgaaaagcacttcaaaaattaaaaatgtgtcagactgggtgtgatactgctcgccctacctaaccataagtttgggagtcctgaaycctatttaagaattctggaagaagctacaggttgagcactcctaatctgaaaatccaaaatctaaaactgctataagtggaaaattccacacctggtctcatgtgatggatgcagtgaaaacactgttccatgcacgtcattaataatactgtataaaattactttcgggctattgtataaggagtatatgagacatacatgaactttgtgtttagatttgggtctcagccccaagatatctcattatgtatgtacagctgacccttgaacaacatgggtttgaactgcatagat

SEQ ID NO: 784760 - DNA, 570 bp, Homo sapiens
catagcttgatagacgtatttttagtactgaataacattccactgtctggatggaccacagttcgttcatctaatcacccactgaaggacatcttggctgcttccaagttttggtagttatgaatagggttgccgaaacttctatgtacaggttgtggtgtggctgcagcaaggggcgcagctactggactgtgtgttaagacctgtttagctttgttaagaaaccacctcatggccatccagagtggctkcaccactttgaattcccaccagcaaggagggagaactcctgcgaatgacataaaaaaaacctttctctattctccatttgtttcctatttcactagttcctgcttttactatttccttcctacctaccacactccctgagtttgattttttattaatttatagagatgtatacttagatcattgattttcagccttttttttaaagtatattcatttaattctacaaatttccttctcagaacagctttcagcttcatcccacacattttttatggacaatattttcactgtcattcaaaatattttataatgcccact

SEQ ID NO: 784761 - DNA, 570 bp, Homo sapiens
catagcttgatagacgtatttttagtactgaataacattccactgtctggatggaccacagttcgttcatctaatcacccactgaaggacatcttggctgcttccaagttttggtagttatgaatagggttgccgaaacttctatgtacaggttgtggtgtggctgcagcaaggggcgcagctactggactgtgtgttaagacctgtttagctttgttaagaaaccacctcatggccatccagagtggcttcaccactttgaattcccaccagcaaggagggagaactcctgcgaatgacatwaaaaaaacctttctctattctccatttgtttcctatttcactagttcctgcttttactatttccttcctacctaccacactccctgagtttgattttttattaatttatagagatgtatacttagatcattgattttcagccttttttttaaagtatattcatttaattctacaaatttccttctcagaacagctttcagcttcatcccacacattttttatggacaatattttcactgtcattcaaaatattttataatgcccact

SEQ ID NO: 784762 - DNA, 526 bp, Homo sapiens
aatttcaaataacagaatttttacttattgttattactgatttctagcttactgtggacagaaaaaagagggatgctttcaattgtttgaaatttgctgaagcttgctttatgagctgtcatctagtcaattctggtagatttcccatatgcactggagaagtgtttacyctatagcttttgggtgcaggattctatatgtccgttaggatgagtgtgttcactgtgttcaaaatgtgttcaacaattcgaatccatactaaccttctgtctgtttgtcctatcagctcttgagagaggctttgttaaagctccatagacttcctctgcaggggccagacagtgaagagtttaggcttcactggccccctacagtttctgttagatattcttttttaaaccaaccctttaaaaactccaaaaagcattcttagctcacagacccacacaaaagcaggccaaaggccagacttggcctactggctacagtttgtggacccctgtgctcacacgtcccactgtgatta

SEQ ID NO: 784763 - DNA, 497 bp, Homo sapiens
ttactgtggacagaaaaaagagggatgctttcaattgtttgaaatttgctgaagcttgctttatgagctgtcatctagtcaattctggtagatttcccatatgcactggagaagtgtttactctatagcttttgggtgcaggattctatatgtccgttaggrtgagtgtgttcactgtgttcaaaatgtgttcaacaattcgaatccatactaaccttctgtctgtttgtcctatcagctcttgagagaggctttgttaaagctccatagacttcctctgcaggggccagacagtgaagagtttaggcttcactggccccctacagtttctgttagatattcttttttaaaccaaccctttaaaaactccaaaaagcattcttagctcacagacccacacaaaagcaggccaaaggccagacttggcctactggctacagtttgtggacccctgtgctcacacgtcccactgtgattacagatatgtctgcttcgtt

SEQ ID NO: 784764 - DNA, 614 bp, Homo sapiens; identical to SEQ ID NO: 770142

SEQ ID NO: 784765 - DNA, 519 bp, Homo sapiens
gccaggaaccacgcaggggtgcctgttccagctcctcggtaattttgcccacgctgcacgctgccagtcttttcaatttcaaccatcctagtgggaaacacctggcatgtgtgtgtccccccgtgattaatgacgccagcaacttggcatgtgccttttggctatttgtgtattttcttttgtgaagtgtttctatacatttttgtcaatttgtttggactgttttcttcttctggaattgtaggagctatttttttcctatctattttggatctgtgtcctttgtcagatatgtgcactgtgaatattttcttyccatgtcttgctttttcattttcttagaggtgtcttttgtcgagcagatgctttaattatgataaagaccaattttatcagttttctgtggttaggctttctgcgtctcatctaagaaacatatgcctatctcaagatgatgaattattcttctatgttctcttctagaagtttaatggttttgctgcttatgcataagtctgt

SEQ ID NO: 784766 - DNA, 512 bp, Homo sapiens
gcctctggcctccattgcttctgatgagaagtcagctgtacatcttagacggcttcctcaaacacaatgactcattcttctcttgctgctttcaaagttctctttttgtctctttcaaccatttgactatgatgtgtctagctgtggatttctttgagtttatcctacttagagttcattgagcttttgaatgcatagacaaatctttttcaaatttggggagttttggcagctattattttaaacatttttctgttctactctctgctcctttgctacgaagcttatcatgcatacaccagtatgtctgawgttgttgcataggtgtctgaggctctgttcatttttgtccactcccattttttcctgtttctcaggttaagtaataaaaacgacctatctgtaagttcacttactcttttttctgttaactcaaacccacagttaagcccctctagtaaatgttttctctgagttattgtactttcaattacaaattcttatctctcttt

SEQ ID NO: 784767 - DNA, 512 bp, Homo sapiens
gcctctggcctccattgcttctgatgagaagtcagctgtacatcttagacggcttcctcaaacacaatgactcattcttctcttgctgctttcaaagttctctttttgtctctttcaaccatttgactatgatgtgtctagctgtggatttctttgagtttatcctacttagagttcattgagcttttgaatgcatagacaaatctttttcaaatttggggagttttggcagctattattttaaacatttttctgttctactctctgctcctttgctacgaagcttatcatgcatacaccagtatgtctgatgttgttgcataggtgtctgaggctctgttcatttttgtccactcccatttttycctgtttctcaggttaagtaataaaaacgacctatctgtaagttcacttactcttttttctgttaactcaaacccacagttaagcccctctagtaaatgttttctctgagttattgtactttcaattacaaattcttatctctcttt

SEQ ID NO: 784768 - DNA, 693 bp, Homo sapiens
tgtctggaaatcagattccaactctttcctagagtttgttattattatttgttgttattttcagtggtgctccttgttgagtaattttctggactaattttgaaaactctgtattctctgttgtttgtagccacttaagtttctgttcaattcatttagaattcagttactgaggccagcacagtggctcacacctgtaatcccagcactttgggaggccaaggtgggcagatcatttgaggtcaggagttcaaaaccagcctggccaatatggtgaaaccccgtttctactaaaaatgcaacaattaaccgggtgtggtggtgggtgcctgtaatcccagctacttgggcggctgaggcaggagaattgctagagcctgggagatggaggttgcagtgagcagagacggcaccattgcactccagcctggcrgacaaagcaagactccgtctcagaaaaaaaaaaaaaaaatcagttactgagtggacagtctaaccttaaaaatcttaacccttttcccatttagaaaacaaatgtgcagctctctgccagtgctcatttaattttacataaacacgctctttgaggctgaagtaaatctgactgatttgcaatgtgaaaataaaatataaaaaccgttcttggagttatttctaaacagaactaccatcagaattatctgagtcatcaga

SEQ ID NO: 784769 - DNA, 665 bp, Homo sapiens
aggtacacttggataatcttcctgttttcacatcaactgattattaacattaattacatctgcgcaatccattttgccatgtaatacaatataatcatcaaagtaacactgggaggctaaggtcatgaccatctaatattctgtataccacacaatygtattgctttctgaggtcattgaacactttcagaattcatgaaagttggatactcactataaataagatagatatggctagcaagaagaaaaatatagggattctatacttaaaagatacagctatttccatttatataattgtcacaataaaaatttaaatgtgaataagtgaatagcaagtatagaaagtttagcaaaataatgagaattagatatataaatgaatttttaagatagtctcagaaaaagtgtaatatttgtcatttatcctgaaatgtcaaaaattttcctaagcagaactactcaccaccaatttctcagtttcatccctgaaaaaaaaatcattcaagtggatttattttggcaaagtgaaactgtgaattgcttggctccagaacagctgcccatactcagcaggactgcattcccacactccattcacccttaccccatcccttccaggaacacttggtctaggatccagctctagatctgcaagaagttgt

SEQ ID NO: 784770 - DNA, 653 bp, Homo sapiens
aggtacacttggataatcttcctgttttcacatcaactgattattaacattaattacatctgcgcaatccattttgccatgtaatacaatataatcatcaaagtaacactgggaggctaaggtcatgaccatctaatattctgtataccacacaattgtattgctttctgaggtcattgaacactttcagaattcatgaaagttggatactcactataaataagatagatatggctagcaagaagaaaaatatagggattctatacttaaaagatacagctatttccatttatataattgtcacaataaaaatttaaatgtgaataagtgaatagcaagtatagaaagtttagcaaaataatgagaattagatatataaatgaatttttaagatagtctcagaaaaagtgtaatatttgtcatttatcctgaaatgtcaaaaattttcctaagcagaactactcaccaccaatttctcagtttcatccctgaraaaaaaatcattcaagtggatttattttggcaaagtgaaactgtgaattgcttggctccagaacagctgcccatactcagcaggactgcattcccacactccattcacccttaccccatcccttccaggaacacttggtctaggatccagctctagatct

SEQ ID NO: 784771 - DNA, 619 bp, Homo sapiens
agttttaccacatttatcctaaattatgattttataaccagtaggtgcctttaaaacattacgtggtcataaaaatacgtaatttgacatattttcagatttgttaatatgaataataacaaagctataccaactaaaatacataaaaagctagttaaagcaaggtattacaagacacagcaatacacttcaattcatctggggaatctagaattaagtgtcgaagaaaatcacttaattaaattttaatttgaaaatactcacttcaggtgtaarcatttccatttataactacattatggtcttaacatgtggcaacataaagacattaaaattactatttcagcagtacagaactatctaccttaaaatatgactctgtgcctaataaaatttcataggtgacacaatgtcttttctcaaagtaaatcatctctcacctctatcttttatttcctagaaatgaggcatgtttctaagccgatatagtaaacacatttttcctttttttattaaaacagctttgttgaaatataatttacatactatagaatgtatctgttttaacttaaagttaaaagatttttagtacatttactgagttgtgcagccatctcta

SEQ ID NO: 784772 - DNA, 619 bp, Homo sapiens
agttttaccacatttatcctaaattatgattttataaccagtaggtgcctttaaaacattacgtggtcataaaaatacgtaatttgacatattttcagatttgttaatatgaataataacaaagctataccaactaaaatacataaaaagctagttaaagcaaggtattacaagacacagcaatacacttcaattcatctggggaatctagaattaagtgtcgaagaaaatcacttaattaaattttaatttgaaaatactcacttcaggtgtaagcatttccatttataactacattatggtcttaacatgtggcaacrtaaagacattaaaattactatttcagcagtacagaactatctaccttaaaatatgactctgtgcctaataaaatttcataggtgacacaatgtcttttctcaaagtaaatcatctctcacctctatcttttatttcctagaaatgaggcatgtttctaagccgatatagtaaacacatttttcctttttttattaaaacagctttgttgaaatataatttacatactatagaatgtatctgttttaacttaaagttaaaagatttttagtacatttactgagttgtgcagccatctcta

SEQ ID NO: 784773 - DNA, 594 bp, Homo sapiens
acagaatagtctcttcaaaaaattaaggaagttctttcttttttctttttcttttttttttttttttggtttgagatggagtcttgctctgtcgcccaggctagagtgcagtggcacaatcttggctcactgcaacctccgcctcccgggtttaaggaattctctgcttcagcctcccgagtagctgggattacaggygcccgccaccacgcccagctaatttttttgtatttttagtagagacgaagtttcaccatcttggccagactggtcttgaattcctgacctcatgatcagcccgcctcggcctcccaaagtgctgggattacaggcgtgagccacagcgcccggccgcaagttctttcttcttgaaaggattataaatataattcatactggcatgacacttttactaatatagattgacttttcgcttcaaataacccattcgtatatcgaaattaattttggtcagtatgtgtgtgtgtggatgtatgtgtgtgtggatgtgtggatgtatgtgtgtgtggatgtgtggatgtaaatggcagtaaagggtaaaagggaaggtggaaaaaagggagatggtctaac

SEQ ID NO: 784774 - DNA, 594 bp, Homo sapiens
acagaatagtctcttcaaaaaattaaggaagttctttcttttttctttttcttttttttttttttttggtttgagatggagtcttgctctgtcgcccaggctagagtgcagtggcacaatcttggctcactgcaacctccgcctcccgggtttaaggaattctctgcttcagcctcccgagtagctgggattacaggtgcccgccaccacgcccagctaatttttttgtatttttagtagagacgaagtttcaccatcttggccagactggtcttgaattcctgacctcatgatcagcccgcctcggcctcccaaagtgctgggattacaggcgtgagccacagcgcccsgccgcaagttctttcttcttgaaaggattataaatataattcatactggcatgacacttttactaatatagattgacttttcgcttcaaataacccattcgtatatcgaaattaattttggtcagtatgtgtgtgtgtggatgtatgtgtgtgtggatgtgtggatgtatgtgtgtgtggatgtgtggatgtaaatggcagtaaagggtaaaagggaaggtggaaaaaagggagatggtctaac

SEQ ID NO: 784775 - DNA, 540 bp, Homo sapiens
tttttgaaaaatggtctcactctgtctcccaggctggagtgcagtggcatgatcagagctcactgcagccttgaactcctgggctcatgtgatctcccagctcagactcctaagtaggtaggactgcaggcataacaggtgtgcaccgccacacccagcttttgttttgttttgtttttgtagagactgggtctcgttatgttgcctggactggtttcaaattcctgtgctcaagtgattctcccaccttggcctcccaaatagctggaattacaggcatgagccaccatgcctggccctggttaacrtctttaaatgagtttcccagtttttctcgtaactgtagtgagcgaatcttatagtcctggccaatgtgaaatgcagaattcactgctttggatttctgaaaatctgtttggaaaggggagagttattgttcctcttttttgttgaccaatttccctttgctttctctgcttgctgctctctggaaataggatgaaatgccctgagttgggtttagcaacttgaagaccattg

SEQ ID NO: 784776 - DNA, 643 bp, Homo sapiens
tattatgcaggactctcttgacttcaagtgactgaaacctaactggatccagcagaacattgaattatttggctttacttactaaaaatgtacatgagtagatgggcttctgtctcagtgggatcaggggtcaactaatatcaaccaaggctcattctgtcccttcatttcctgtgtcagctctgcttttcaggcaagctgttttgagagagcagcaaaaatggccccataaagttcacatcacttacttccttacaaatagatatgccaataaaaagaaagcacctcatttccgcagtttcatcaraagttcagagatgacttccatgagcccagcttggatcacatgaccactcctgaatcaattaccctgctgatctgattgcccagggtgggtcagccttcccaaatcacatggactagtattgaaagacaggtcctcccatgaaaaaaaaaaaggaagggtagtggcagaggaatatgagtggggggggcctcatctctatataaaaagtatgagcgtatttgtgctcttttgtacattcatttgtatagtcactgggaaaaaaatgagaaaaacccaaacacggctttctatatgcctctgtgctttgttttcaacactgagctgtgagaaatctag

SEQ ID NO: 784777 - DNA, 592 bp, Homo sapiens
atgcaggactctcttgacttcaagtgactgaaacctaactggatccagcagaacattgaattatttggctttacttactaaaaatgtacatgagtagatgggcttctgtctcagtgggatcaggggtcaactaatatcaaccaaggctcattctgtcccttcatttcctgtgtcagctctgcttttcaggcaagctgttttgagagagcagcaaaaatggccccataaagttcacatcacttacttccttacaaatagatatgccaataaaaagaaagcacctcatttccgcagtttcatcaaaagttcagrgatgacttccatgagcccagcttggatcacatgaccactcctgaatcaattaccctgctgatctgattgcccagggtgggtcagccttcccaaatcacatggactagtattgaaagacaggtcctcccatgaaaaaaaaaaaggaagggtagtggcagaggaatatgagtggggggggcctcatctctatataaaaagtatgagcgtatttgtgctcttttgtacattcatttgtatagtcactgggaaaaaaatgagaaaaacccaaacacggctttct

SEQ ID NO: 784778 - DNA, 469 bp, Homo sapiens
tggatccagcagaacattgaattatttggctttacttactaaaaatgtacatgagtagatgggcttctgtctcagtgggatcaggggtcaactaatatcaaccaaggctcattctgtcccttcatttcctgtgtcagctctgcttttcaggcaagctgttttgagagagcagcaaaaatggccccataaagttcacatcacttacttccttacaaatagatatgccaataaaaagaaagcacctcatttccgcagtttcatcaaaagttcagagatgacttccakgagcccagcttggatcacatgaccactcctgaatcaattaccctgctgatctgattgcccagggtgggtcagccttcccaaatcacatggactagtattgaaagacaggtcctcccatgaaaaaaaaaaaggaagggtagtggcagaggaatatgagtggggggggcctcatctctatataaaa

SEQ ID NO: 784779 - DNA, 619 bp, Homo sapiens
tgccaataaaaagaaagcacctcatttccgcagtttcatcaaaagttcagagatgacttccatgagcccagcttggatcacatgaccactcctgaatcaattaccctgctgatctgattgcccagggtgggtcagccttcccaaatcacatggactagtattgaaagacaggtcctcccatgaaaaaaaaaaaggaagggtagtggcagaggaatatgagtggggggggyctcatctctatataaaaagtatgagcgtatttgtgctcttttgtacattcatttgtatagtcactgggaaaaaaatgagaaaaacccaaacacggctttctatatgcctctgtgctttgttttcaacactgagctgtgagaaatctagttactaaaatgaaactttgaaaaaatataacaatttgggacaatggggacacttagctgatgcagcacaggtgaacagttcttcttttgtgcccaagaggacacaattcccaggaggctgcatgtggtctcctaggacaagcctgtgggcacccactggctgcagttccacctttccttccctggactctcaggaagacatgagttctggattcagctgaactgagctcaagttcaagttc

SEQ ID NO: 784780 - DNA, 643 bp, Homo sapiens
tattatgcaggactctcttgacttcaagtgactgaaacctaactggatccagcagaacattgaattatttggctttacttactaaaaatgtacatgagtagatgggcttctgtctcagtgggatcaggggtcaactaatatcaaccaaggctcattctgtcccttcatttcctgtgtcagctctgcttttcaggcaagctgttttgagagagcagcaaaaatggccccataaagttcacatcacttacttccttacaaatagatatgccaataaaaagaaagcacctcatttccgcagtttcatcaaaagttcagagatgacttccatgagcccagcttggatcacatgaccactcctgaatcaattaccctgctgatctgattgcccagggtgggtcagccttcccaaatcacatggactagtattgaaagacaggtcctcccatgaaaaaaaaaaaggaagggtagtggcagaggaatatgagtggggggggcctcawctctatataaaaagtatgagcgtatttgtgctcttttgtacattcatttgtatagtcactgggaaaaaaatgagaaaaacccaaacacggctttctatatgcctctgtgctttgttttcaacactgagctgtgagaaatctag

SEQ ID NO: 784781 - DNA, 505 bp, Homo sapiens
atgatcaaagttgaactctaccactgttcagctgggtgactttgggcaagtgactttccctctctgatcctcatgttcctttttgataaaaacagcaaaatgtcaggcctatggggattcaaggagccaaaagaaaaatgtgtgtcttagtctgaatttcctggaagtagatccygaggcaaagattcaaatacaaaaattttgtttggagataacgctaggatattaattcaactgccagttcttccttagggtgctaatcccaggaaacatcagtggaggagtggggaactgagacaggaaaggaatgcagcagttaaacggaccttcatcaagaaagtttccactgtggcagccaggactcagccctgccaggtacctctgagagacagcacagaacatgtgcttcagagtcatcatacccagagcaagggaccaggggtatttatccaccaatacccaccagtcactcctcagggatcctcccaagggcatgattcctcca

SEQ ID NO: 784782 - DNA, 566 bp, Homo sapiens
gtgactccatgggatagacgataaggtgggaatcagaggaaagagcaaaattaaggcgagtgaaagtcttaagaacaaaatgcaaatttaggctgaaaatgaagggggaggaggtgtggtctcgacaccaaatgcctgctgggtggcacatgctctacacacactgtcactaattctccaagcagcctcgtggagtaaaagaaattcctctcaatgtacagatgacagaaacatagttcagaaaagaaaactgattttactaatgtctcagcaagttagtgggtgacatggagtcccagatctttctgtccacaaagcctacaaattctcccttgttaggcaggctgggtaccaggccctgcttctgggctctgcttcttttcctgctaggctaaaacrgcagaactgacagagacatcatcccccttctccacctggagcagaaccaatgagaggggctggggaacagccatgaggcccagcacccaccattcaatgtcttcagaattgccgtccctcagaactcttgcaccacgaggtggcagcactcccagtgtctgggtgtc

SEQ ID NO: 784783 - DNA, 503 bp, Homo sapiens
tggtccacctgctcctggcacacccttgcagaggtggctggttgctctttgagccagcttggacttacttggcatgcacaggccccgggtactgacaagctgctccgagtgagcttgtcttgtcttgggccaaattctaastctggccagggccacagaaggctgagtcccctgggtggtaatcctggctgctgcagggaggcccatggtgctcctcccctcccagggctcaggatgaggttcaactgggacaggaccctttaggtatgggacttgtgccccaggagggggcctctgtcacacaggttgggtaagatgtatggcatgctgctggcttccagggctgttgggatcacatattcacccttccctccagggacctcaaaatgaccagcttcccctttgagaatgacttcccaaggcctaggagccatctggggctgcagggcagctggctgcatgctgccctggcttcttccatgttgtgctggtcactacccacc

SEQ ID NO: 784784 - DNA, 503 bp, Homo sapiens
tggtccacctgctcctggcacacccttgcagaggtggctggttgctctttgagccagcttggacttacttggcatgcacaggccccgggtactgacaagctgctccgagtgagcttgtcttgtcttgggccaaattctaagtctggccagggccacagaaggctgagtcccctgggtggtaatcctggctgctgcagggaggcccatggtgctcctcccctcccagggctcaggatgaggttcaactgggacaggaccctttaggtatgggacttgtgccccaggagggggcctctgtcacacaggttgggtaagatgtatggcatgctgctggcttccagggctgttgggatsacatattcacccttccctccagggacctcaaaatgaccagcttcccctttgagaatgacttcccaaggcctaggagccatctggggctgcagggcagctggctgcatgctgccctggcttcttccatgttgtgctggtcactacccacc

SEQ ID NO: 784785 - DNA, 503 bp, Homo sapiens
tggtccacctgctcctggcacacccttgcagaggtggctggttgctctttgagccagcttggacttacttggcatgcacaggccccgggtactgacaagctgctccgagtgagcttgtcttgtcttgggccaaattctaagtctggccagggccacagaaggctgagtcccctgggtggtaatcctggctgctgcagggaggcccatggtgctcctcccctcccagggctcaggatgaggttcaactgggacaggaccctttaggtatgggacttgtgccccaggagggggcctctgtcacacaggttgggtaagatgtatggcatgctgctggcttccagggctgttgggatcacayattcacccttccctccagggacctcaaaatgaccagcttcccctttgagaatgacttcccaaggcctaggagccatctggggctgcagggcagctggctgcatgctgccctggcttcttccatgttgtgctggtcactacccacc

SEQ ID NO: 784786 - DNA, 598 bp, Homo sapiens
taaaataagtaaaaataataataatgtttaagttaaacaagaaacattatcatgcaaataatgtatcacttacaaaatgtgacctttagtatttttagtgactagacataacttgaagtttgcttaaatagaaaaataatcacataaagtaaaatttctacttattttaagtttagataacagaggaygcacctgtgtaatgctgtttagagtaaccagacaaaaatacagttaatattggtctactgcatatacatgattttagaaaggtagtgttttattagtacaaaggttaaacaatggccaggtgtggtgactcatgcctgtaatcccagcacttggggaggccaaggcaggcagatcatgaggtcaggagatcgagaccatcctggccaacatggggaaaccctgtctctattaaaaatacaaaaattagctgggcatggtggtgcacacttgtagtcccagctactcaggaggctaaggcaggagaattgcttgaagccaggaggtggaggttgcagtgagccaagattgcaccactgcactccagcctggtgatacagtgagaccttgtctcaaaaaaaaaaaaaaaatt

SEQ ID NO: 784787 - DNA, 598 bp, Homo sapiens
taaaataagtaaaaataataataatgtttaagttaaacaagaaacattatcatgcaaataatgtatcacttacaaaatgtgacctttagtatttttagtgactagacataacttgaagtttgcttaaatagaaaaataatcacataaagtaaaatttctacttattttaagtttagataacagaggatrcacctgtgtaatgctgtttagagtaaccagacaaaaatacagttaatattggtctactgcatatacatgattttagaaaggtagtgttttattagtacaaaggttaaacaatggccaggtgtggtgactcatgcctgtaatcccagcacttggggaggccaaggcaggcagatcatgaggtcaggagatcgagaccatcctggccaacatggggaaaccctgtctctattaaaaatacaaaaattagctgggcatggtggtgcacacttgtagtcccagctactcaggaggctaaggcaggagaattgcttgaagccaggaggtggaggttgcagtgagccaagattgcaccactgcactccagcctggtgatacagtgagaccttgtctcaaaaaaaaaaaaaaaatt

SEQ ID NO: 784788 - DNA, 598 bp, Homo sapiens
taaaataagtaaaaataataataatgtttaagttaaacaagaaacattatcatgcaaataatgtatcacttacaaaatgtgacctttagtatttttagtgactagacataacttgaagtttgcttaaatagaaaaataatcacataaagtaaaatttctacttattttaagtttagataacagaggatgcacctgtgtaatgctgtttagagtaaycagacaaaaatacagttaatattggtctactgcatatacatgattttagaaaggtagtgttttattagtacaaaggttaaacaatggccaggtgtggtgactcatgcctgtaatcccagcacttggggaggccaaggcaggcagatcatgaggtcaggagatcgagaccatcctggccaacatggggaaaccctgtctctattaaaaatacaaaaattagctgggcatggtggtgcacacttgtagtcccagctactcaggaggctaaggcaggagaattgcttgaagccaggaggtggaggttgcagtgagccaagattgcaccactgcactccagcctggtgatacagtgagaccttgtctcaaaaaaaaaaaaaaaatt

SEQ ID NO: 784789 - DNA, 715 bp, Homo sapiens
cagacaggatccccccagcgtgggctcacagtgcagctgccccatgccaggctgatcatgctaattgattgcagttctgcatctttctgcaatggagccccaagtgacaagaaaagacgttgagccacagggtctcctctgctgcttccaagctggggaagtaacataaagcctatgatcatttcagaactatggtgtgcagcctggatgcaccaagccaagatctgcagtgagcactcaagtgggagaggagcctacactgactttcaaaacattgagaggaagcatagctgcaacccatgaggaaatacggaggagccacatgactgagcaggagcctacacagtgaccattacacttcagcaccagctactagatcacaccccaaaacttcaacaccaataatactttgctatcataccctgctgtgaaaagaaagacaagaatttagctacaaataaaggccctaaacaaagccttaggactctgaaaacatggaaagaagtctactgactgtactcaatttacactgcaattaaaggaacacccmcacacacacacacagatgagaaagaacctatgcaagatctctggcaactcaaaaggccagcatgtcttctttcctcccaaagatcacactggttccccagcaagggttcttaactaggctgagatggctgaaatgacataaattgatttcagaatatagatagga

SEQ ID NO: 784790 - DNA, 715 bp, Homo sapiens
cagacaggatccccccagcgtgggctcacagtgcagctgccccatgccaggctgatcatgctaattgattgcagttctgcatctttctgcaatggagccccaagtgacaagaaaagacgttgagccacagggtctcctctgctgcttccaagctggggaagtaacataaagcctatgatcatttcagaactatggtgtgcagcctggatgcaccaagccaagatctgcagtgagcactcaagtgggagaggagcctacactgactttcaaaacattgagaggaagcatagctgcaacccatgaggaaatacggaggagccacatgactgagcaggagcctacacagtgaccattacacttcagcaccagctactagatcacaccccaaaacttcaacaccaataatactttgctatcataccctgctgtgaaaagaaagacaagaatttagctacaaataaaggccctaaacaaagccttaggactctgaaaacatggaaagaagtctactgactgtactcaatttacactgcaattaaaggaacacccacmcacacacacacagatgagaaagaacctatgcaagatctctggcaactcaaaaggccagcatgtcttctttcctcccaaagatcacactggttccccagcaagggttcttaactaggctgagatggctgaaatgacataaattgatttcagaatatagatagga

SEQ ID NO: 784791 - DNA, 575 bp, Homo sapiens
tctcccacccctcataaaaacataacctacaattgtcttgaagaaagagattctcctctctctgccatagtgacaggtatatgcccaactaactgtggaaaacagttctttctttcaaccttactcatcaccctcacggtctgtttatgaggctctcctccaccagccagaaaggatgacgtgccatacctgcaaaacttatacagcatcaacagaatgaatctttccaacaagccgaaacattgagtattgtggcacagaatatgccccacccattactcaatctagatatccttttattccaccgtctcatgattttctttttcctggaaaacaaaagtatttctttcatagcccagctagcacgataaatcagcragtcagaattctagctttgttgtaaggttttgcgaatatctgatcctcttattttgtacttttctatttcctaggcaaatctgagtatttcacccagttttccttaactaggcattgaaaactcagtttttttcttacaaaccttcatgtcttcctgctcatttgcacagtcttatcttgcacctcctataaaatgg

SEQ ID NO: 784792 - DNA, 567 bp, Homo sapiens
tccaacagacctgcagctgagggtcctgtctgttagaaggaaaactaacaaaaagaaaggacatccacaccaaaaacccttctgtacatcaccatcatcaaagaccaaaagtagataaaaccacaaagatggggacaaaacagaacagaaaaactggaaactctaaaaagcagagcgcctctcctcctccaaaggaacacagctcctcaccagcaacggaacaaacctggacggagaatgactgacgagctgagagaagaaggcttcagatgatcaaattactccaagctacaggaggaaattcaaaccaatagcaaagaagttaaaaactgtgaaaaaaaaattagacgaatggataactagaataaccaaygcagagaagtccttaaaggagctgatggagctgaaagccaaggctcgagaactacgtgaagaatgcagaagcctcaggagccgatgcgatcaactggaagaaagggtatcagtgatggaagacgaaatgaatgaaatgaagcaagaagggaagtttagataaaaaagaataaaaagaaacgaacaaagccttca

SEQ ID NO: 784793 - DNA, 552 bp, Homo sapiens
ctgaactaagtgcaaatagttgatagcgcaagctcccaaggggctggggcctggagcgcagatggatggatccactgtgggcagaactgggccgtgggaggggtgtgccgatgcagatgtgtttgagtgtggggggccagaagctgactggggcgaagcgtgacagtgcagctccaagcacgctggaggtgttcrccaagcaactcaagagcagatggcagaacgagcagctgaaataacagcttgtgaaatcaaccctactttgtggggagaggattggttaaggattctagccatgagaaccaagaagaggaggataatctgttcatgcctattatggggctttgggggagcagtttcagcctcaacctggagaatgttttagaaggccagagaaaggaaccctgcaaatcatgtgagctggcccctcactttcagatgaagtgtccatacagcagtaacgccaccctctgtagtggttctagagtgtggcaatctggaggggtcattatggaaaagggctgaagcataagaatgtaggcccaatactga

SEQ ID NO: 784794 - DNA, 656 bp, Homo sapiens
acttaccctgctcatccttctttatagcacccctcaccacctgctgtattatttgtttatcattcagctttctctctaaaatggaagatctatgagaacaagaacctgtctgctcattgaggtgttcctctagaaaaatgtctggcccatagcaggtgcttaatcaacaatttktgaaggaaaagtggaggaaaaaaagataggagaaagcaaactcatgaagaagagtgcttgggtggggtgggaggagaagagggcaatggatccaggccctacagggattcactgttcaagcagaaagtccagggaaagccacatggcctccttcaatcggatgagctggagctgctgacatcccctgcaacctgggagccagtgcatgcaatgctccagctgggtctaaggacagaaggaggctaatgaacagccaccttcggagcaacagggtcacttcagtcctccctgtttacttccaagctgctgagagtcttatgcacatttcctcttctcacttgcctcttcacatccctagctgccgcaggaatttatggcttaattaaagtgggaagcagggtttatacatgtttatataaagttatattttcctccacctctttgttggaagaaaactcaaatgttaaaattcttaggagccc

SEQ ID NO: 784795 - DNA, 610 bp, Homo sapiens
atcactgaataacttatcaggagtttggtgaacataagggaaggccacctatggtggctgtattttattcagtgttggtcactgttgggcacttcatagagcttatttcatttcatcctcacaagcgccgtaggaggaaggggccccagagggattcatggttagaatagcagagtaggagcatttggcagctatattctgtgtaggtgataacttaaaaratatttttgttataaaatgtttcaaacatacaaaaaatatagagaagcagttttctatagttattaaatattcttaaaatattcttaatgggtagtcatagaaattatcatccaaagtgggatattcttgagagaaaaaggaggttctatttataattatggtgggataacaaacttaagatgaacagctctagacaaactgggttgtatggtccctggaaaacaaggattactgtaaatgtgagtcccgccttgtgcttctctctgtcccaccaagaaaatatgatcttgatacagatgttcattgtgtcaaggcaaccatggcaaccatgatctagatacactgttcaagttttatgctgatcctacctatatatgtctcaggagct

SEQ ID NO: 784796 - DNA, 619 bp, Homo sapiens
gggctctaggctgacatcgctggctgcccctttgggcggagaggggacctcaccagtttttttagtatcgcccacgcccagttccctggccaagtccgcagggccctcctagagccaggtgggagtggggagcgatccgcagctgctcactccaccttgcgcggcccatactgggcgtgtgcatctgaatcctgctggagagcaaacacgaacttctgttccctgcaaaatggttagaaagaaacagctggattacgttcctctaaaaaccacctgaacgtaaccttcgcagggcgtcaagtcatcttttcttgccttcggctgtggcttctrtggctttccggatttgcacatttcctggggtactatgaacgtgagtggggtattttgttctggcattagaagaaaaacaagcaagcaaacaaaaacacagcctccgatgccaaacatgttcccccttcttcacttccttggaactggaagtgttattcctaagtctagtgcaaaatgcttctactctctgtgtcttcctgatagggatgtttaatgtaagtaggatattaatttcagaacattgatttcttatctgtgtgtctgacgtgccatctttaatgttaaa

SEQ ID NO: 784797 - DNA, 593 bp, Homo sapiens
cttgtgtgattcaagctaacccctcgattatcagaagcagatgtttcaaacgactgaagatcagtgaggcatatcttatttacaggttaataattggctactagatgcaggtgcaccaaatggtcttagagacattagataggagagacaatgtcagtgctccccctaccctgcctcccctaatctaaagcctactctgtttcttttatcaagtgattggctgtatgttaacagagcctggggcactttcctgttgaaatgcctttaatcccaagcaactggattgattttttttttttttttttggatggtttagattggacgactgattattggacagaatggcatcttgtcracacctgcggtctcctgcattatcaggaagatcaaggcagctggtggaatcattctaacagccagccactgccctggaggaccagggggagagtttggagtgaagtttaatgttgccaatggaggtatgtggttcagtatatgccttaataatcacgatttctttcctcttatattattatagtctcacagtgaccctttgatgatagacaagcaaggtgcagaggacctagctcaga

SEQ ID NO: 784798 - DNA, 389 bp, Homo sapiens
ggaggagagaggcctttagtttgtatcaaaaccagaagaactgtttatcttctatcaggtgacaacccttcattcctttacttaacacattgattagcatctgctatgtggccatgtgctaggcagggccactttctgagtcctgcgaagtcagttgcatagtgtcctgcacttgaaagtgccccgcattcggtttaacrctctgctgtcacattaataacgatatctttacacttctgtttcgtcagcgaagtcctgtaggacaagggggcatgcacaggagcagaggagccacacgtgatgtgtgtggctgccgttccctgccgccccattcacataatcttctccatgcccctggggagccatgctgtgggatgtgcaggaaactc

SEQ ID NO: 784799 - DNA, 389 bp, Homo sapiens
ggaggagagaggcctttagtttgtatcaaaaccagaagaactgtttatcttctatcaggtgacaacccttcattcctttacttaacacattgattagcatctgctatgtggccatgtgctaggcagggccactttctgagtcctgcgaagtcagttgcatagtgtcctgcacttgaaagtgccccgcattcggtttaacactctgctgtcacattaataaygatatctttacacttctgtttcgtcagcgaagtcctgtaggacaagggggcatgcacaggagcagaggagccacacgtgatgtgtgtggctgccgttccctgccgccccattcacataatcttctccatgcccctggggagccatgctgtgggatgtgcaggaaactc

SEQ ID NO: 784800 - DNA, 389 bp, Homo sapiens
ggaggagagaggcctttagtttgtatcaaaaccagaagaactgtttatcttctatcaggtgacaacccttcattcctttacttaacacattgattagcatctgctatgtggccatgtgctaggcagggccactttctgagtcctgcgaagtcagttgcatagtgtcctgcacttgaaagtgccccgcattcggtttaacactctgctgtcacattaataacgatatcttyacacttctgtttcgtcagcgaagtcctgtaggacaagggggcatgcacaggagcagaggagccacacgtgatgtgtgtggctgccgttccctgccgccccattcacataatcttctccatgcccctggggagccatgctgtgggatgtgcaggaaactc

SEQ ID NO: 784801 - DNA, 389 bp, Homo sapiens
ggaggagagaggcctttagtttgtatcaaaaccagaagaactgtttatcttctatcaggtgacaacccttcattcctttacttaacacattgattagcatctgctatgtggccatgtgctaggcagggccactttctgagtcctgcgaagtcagttgcatagtgtcctgcacttgaaagtgccccgcattcggtttaacactctgctgtcacattaataacgatatctttacacttctgtttygtcagcgaagtcctgtaggacaagggggcatgcacaggagcagaggagccacacgtgatgtgtgtggctgccgttccctgccgccccattcacataatcttctccatgcccctggggagccatgctgtgggatgtgcaggaaactc

SEQ ID NO: 784802 - DNA, 481 bp, Homo sapiens
ctctaattggagttacttccctgtgctaaccgacccctgtgttgagatgacatgaaaggaaagggcaggacactatggccacagtgccctgagggtgcccaatctcgtctcagaagctaagcagggcctggcctcrttagtacttgtatggaacaaggaaaggggaagagagagcagcctatagctcctgtcctttcagtccttccttagtgtccatgatcccaaggtagagagtgttgctggagtgtgtgggtgtcaggaagtgagatagaaagagctgagctagttttgtgcagcgtatctactggtttagcaagaatgaaatacatacacatggatgagctatggaatgtgaattgtgtaattgtgttgattctacatatgaggtcaatgctaatattttcatttataccttgcgtcctacaatataaaaacaaatggtaaaaagtcacgataatttaaatttattttttattttatt

SEQ ID NO: 784803 - DNA, 481 bp, Homo sapiens
ctctaattggagttacttccctgtgctaaccgacccctgtgttgagatgacatgaaaggaaagggcaggacactatggccacagtgccctgagggtgcccaatctcgtctcagaagctaagcagggcctggcctcattagtacttgtatggaacaaggaaaggggaagagagagcagcctatagctcctgtcctttcagtccttccttagtgtccatgatcccaaggtagagagtgttgctggagtgtgtgggtgtcaggaagtgagatagaaagagctgrgctagttttgtgcagcgtatctactggtttagcaagaatgaaatacatacacatggatgagctatggaatgtgaattgtgtaattgtgttgattctacatatgaggtcaatgctaatattttcatttataccttgcgtcctacaatataaaaacaaatggtaaaaagtcacgataatttaaatttattttttattttatt

SEQ ID NO: 784804 - DNA, 481 bp, Homo sapiens
ctctaattggagttacttccctgtgctaaccgacccctgtgttgagatgacatgaaaggaaagggcaggacactatggccacagtgccctgagggtgcccaatctcgtctcagaagctaagcagggcctggcctcattagtacttgtatggaacaaggaaaggggaagagagagcagcctatagctcctgtcctttcagtccttccttagtgtccatgatcccaaggtagagagtgttgctggagtgtgtgggtgtcaggaagtgagatagaaagagctgagctasttttgtgcagcgtatctactggtttagcaagaatgaaatacatacacatggatgagctatggaatgtgaattgtgtaattgtgttgattctacatatgaggtcaatgctaatattttcatttataccttgcgtcctacaatataaaaacaaatggtaaaaagtcacgataatttaaatttattttttattttatt

SEQ ID NO: 784805 - DNA, 501 bp, Homo sapiens
tggtactactaacaaaatgggctaagatttgcattattgcatgaaaacaacaaaacatatcaataaataacaaaaagcttggaattcagacaacagatcaagtctgggcttgatctcaagctagtgttttgatgttgaaaaaatgttatttggtctttctaaccccatttccttatgtaaaattggggatgataaattcactgataataagagttaaatgagattcttgaggactcagaatggttctaacgtgtaagtattagcagtcatactgtagcataagaaaataccgtctgctgaaagaggracaataaagattatctacatggtcatcatttaaaagctaccagatataggaagaaggggccataaaatgataacgttatgatgattaattttgatgcttaggtcagagtccattctaggatatctgctgcccaaaaacagcagagactcatttctttggaatcacaggacgctgagtgagaggaaagaaaaaga

SEQ ID NO: 784806 - DNA, 614 bp, Homo sapiens
ctccctggatcaagtccgactaggagatcctccaccattcctatgccatggcagacgtgaaacacggtcatgcttgtgttgcatgctgggaggaatggtggacaggtggaaacttccagtacccagagccgagccctggcccagttctgctgcccagagggctgcaaggaggcacttggtgtcctgagcaggactctgagagacaacatgacactggaggaacactcaggggaggacacacgcagaagacagaaagagccgccatctgagcactgcccccgactccrggcagatcagccctggcgaggatgggcgggaggagcggccagcccacctgtgcagggaaacacgcaggcaaggcgtggaaaggagctgatgctcagcgtcttcaaaaccagacgcaaatctcaccccagagccagtgggctcctcggaagttttggtcagggagaaggaatacgctctgagctaggaatcaggagacatctctggagccagcagtggggtttctgtccacagtcagtggaagcagggcgactccctagggcttttcagcagagagaagcccagaacgcccagcctgacttgattttctccccatgcctaggtcacag

SEQ ID NO: 784807 - DNA, 598 bp, Homo sapiens
ttgcttctcttgtctgtttcttcaagcagccaaagggatccctgttaaaatgttaagtgcaatctcatcagcctctgttcaaaaccctcagatggctttaagcagagtaaaatccataattctcaccacagccagggggaccttggtgacctcattcctccatgagggtatctccctccactctcctcatcccgttttctgttccagatgcactgaccatctagtcctacctgggaacatgaacaccaggaatgctgctgcctgggaagactttcactttctgttctttctgcctgaaacactccttcctgggaatccacattaatccatattctttctttgctagagtckgactgaaatatcatctgtgcagagaggcctatcttaccaccctattttaaataatacatgtatgtgtacgcacacccatgtgtatgcactctccatctccttacttgctttatttttctttattcactcatcatcttcttctatacatccattcatttactcttctatcgtctgttttatactcctgcccttgattagaatataaatttcctaagagtacagacttggtctgtttgattcactcttc

SEQ ID NO: 784808 - DNA, 593 bp, Homo sapiens
attttaggaaacaggtttaagccaatcagtgcatggcatttccctggtgacagttctccgttcaggagcaagtacattcactaaattattccaatcagactgaaggagaggggagtttaattccacagttagataagagactctctctcctacttgtcaagaatattgtcccagttggcagctgcttgcctctgtaagaatagagctctcagatggaggacagagcgaggaaataaaaaagcctgaacttytgagtctccacttacatgagccaacgaaaatcttttatagtttaagctctcttgagacaaacatcctattacttgctgccaaaagcatattaacttctacataatctttcctccctgtgtctcacccccaataatattcacacaaattagctgtgtgctagaaattttcttgagataggggtttatatctcagaaatataaaacatataatttaacattgactattgaatataacatttttcttttgtcatttctgtctacatttttatttcctaagatatggagtaatttgattttaagcagatttttgcttcaaaggatccactgaccacggtgacagaa

SEQ ID NO: 784809 - DNA, 597 bp, Homo sapiens
ttccttggagaaggtaagttatggtgccataaaaaatatcccaaagtctcaatggctcaaacagtaaagatttatttcttgttcacattatacatcacggtgtcattgtcctccctctggatccaggccacggagctgctgttcatagtcatcatggcatcaggaagagagagcttggcaaagccttcgtgtgcacttaaaactttcatcccagagaggcccaagcgcygagagacacacctcctgtgtggaaggattccagatgacagatacaaaggcagcatgggttaactgtccagccctcagaatgcgctgtgccctactgtactcccctcataaagcggggggccttcgcaatggggaagccaggcaaacaccacgtcggcccagtgaccaaggtctacacgcatctgtgatgagacatattggtagcaggatcttaatgggatgtgatgagaagggcgtctctcctctgtggtcttcccaccccaaccccataccctcagtctgataatcatggtgaaaacatcagacaaacgcaaattgaagtatattctacaaaatacctgccctggattcctcaaaactgtcaaagtc

SEQ ID NO: 784810 - DNA, 588 bp, Homo sapiens
tgtttccaagtggccttgttgcatctgctgggctaaattaccagtttgtgggaccagcgggccccagtgtgtgttgctatgcccctgggagagagtctcgtgtttctctagtgtcaggtctgtagtcagtatcattacattctcatttcttcaaatattgccactgattggaatttgttttacaaaagagtcactgagttggagtcattgctacaagagtgcattgacttctagagcaaatataataaaaggtgagtagaaattaggtaatraagtaacaaatgtttggggaaagtgctggctgccggcgtcctgctcctggatatccaacacagcatctgtgaattgcgctcatccaagctgccatcaatctgccttctctctgctgaaaacctgtctgctattctcatgaattgccagctaggtaataattatatctgtcctaggcactttactcctttacagaattttttatagtgtccgtgggattcctttcctaacacagaacacgacaaggtacaacagttaggcacagtgcatgatgtgagggtaaagagaaaggcaggccgggcgcggtggctcatgcct

SEQ ID NO: 784811 - DNA, 591 bp, Homo sapiens
tgtagacagtaagcttcaagggtgcagatgatttgcgttctcagagtgaacaattccagatgttgcccaatctcccaaactcctagaactgcatgtgtgaagtttcaggatggccaacgcctgccaggtcgtgcattatttctgagcagccccaaggaaggcttgcatttgagtgtgaacctctgcttctcgtgccccttctgtcctgtcctgtcccatcccataagagggccctttctctcagctgcagtgtagacagtactctggtactgacgtccctgaaatgctactaagccagtaaggaaagctgggtgggtgtggagatggagagcacaacttggagctgagtgtgtgggggatgtggctgctctgaggcttccccstcaagcgtctctgccatgatgtagccacaccacgcatcactgttcagcctcctccttagcaccagggcctacactttctcgcagcctaggctgatataataataaccttagacaaatttaacagagtttaactgagcaaagaacgattcacaagttgggcagctgctgaaccaggaggagttcacagaggccctggcactgccctgtg

SEQ ID NO: 784812 - DNA, 496 bp, Homo sapiens
ggggtcccctgaagaggtaggaattctgcctccagactgcctttggactcaagactgcaacgtcgactcttgctggaatttccagtctgccacccctccctacagtttatgaacttaccgggccccacaagcatataagccagttctttaaaataaatctctctctatacatgtacactctatcagctccatttctctgaaaagctgtgactaatacacctttgcataagaaagaaaactaaaataatattttattgacctgaytgggctctagtaggaacaggaacagacctgagaggacaggtggctgtcagtgcccacagccagtgtacagcttctgcatacagaaactcttaaaaatgcatgagtttggcacagaactctgggagcagccaattgctctgtgaccctgagcaagtcacttcccttatctaagcctcagtcttctcatctatacgatgaagataatatctgttttataaagaaatatgttctt

SEQ ID NO: 784813 - DNA, 562 bp, Homo sapiens
ctgtggcgattacatcacacactggtgcaaaggccttgaaccattaatgtgctgcctctgcgagggtgaccaggattccagcaatgaacagagaaggtgcttgtccccactgctcactgggtgccttcagattcttaacttttgtctttttcttttttctttcacttcttacctgtatctataaaacaggactctgtttgctttgaaaagagccagaatgacctcaggggtcagtgactcatgctgttggctctgtgaacacaatcgagtgccccttacgtaagaagctcctgctatctgagggaagggaggtccgagccattattccttggttataaacactccatgtggttttgtttggyggttttaaaaaaggtgtgtccacagggttggtgttctagaatcgtgggcagaaagaagtctagctcctttcatccaaggttctaaagggttctctgagctgtaactcagctctaactggacaaagaggcaacaattcccctcatttcctgtgcgctgtcaccacaggaggctacacttaaggaggtcaactcaagttgtt

SEQ ID NO: 784814 - DNA, 662 bp, Homo sapiens
ctggcttggatgcatcagtacttgactgcaaagacttaaaccacagacaggaaaggcgctgctgcagtctcgacggtcaaatgcagggccccctcagctgccatcccactgaggggcgaaggcccatcatctcccttcggctcggtaactgcctggcgyagcacaagggttctctttaaatccccagcaaatggagctgagtggaaattccgccccatattaccaggcacacgtctccttccactcctcactataccctgcccatgccacggccgccttctgagaataacgctgacagttccatggcccacagcccctctagttaacttgctgtgcacacggcagcccagccagaaacacgcagccaggtcggatattgggtgcattcagtcgtgaagcctgaggcttcctggctcccactgagcacagagaagtgttctgaaggacaggaagcagctggcctcactgctcttctcagacggctgatggagaaaagctcacagctgcctgcgccgctctgcctggacttgcatcctcggccccaccccttgcgcagcagtgaggccccccgagacactggtgcctgggcttgcggtaccgcagggctgctggacaacgggccagacgcagccccagtgtggatccagaggtctctctccgta

SEQ ID NO: 784815 - DNA, 637 bp, Homo sapiens
tccatttaccaatgtactggaaggctgactcagggcggaaagcagaccaactggcaagtatgtccactccttactcatagacaatctgtctaccaagaaaacaaaaaacctgtagacaaaatgtaggaattaaacaagtcacatatatttacttaatccagcagtgggactgaataaacatgaactaaatttaaaaacatggataaatcttagaattaatgttgagggtaaaaagcatgtcgaaggtgattatgtaccataggagatcatttctattacactcaaaacaaaacaaaaccacacaagaaattatttaagggtacaaatatrtgtggcaaagccattttttaaaagaaagagaatgataaaatgcaggggagttactgtcacagaggtgaaaaaggatggtggaagagcacctaagtagcttttagttcctaaaatggtgaagggggagggtgtcaagagtatgtgctttattaccatgcttcctaacttacatatgttatagattctttaaccattacataaataatataattaagttgataaaatagtacaaacaaatgatggtcagtagatacatatttaagtaacacacttaattaaagctcctgttaaaaacaactcatttcac

SEQ ID NO: 784816 - DNA, 492 bp, Homo sapiens
tattgctttatttagaattttttgcttatatgtttataagtgagatggtctctaattatgtttttttcatactgaccttgtgtggtttgtttcaaggtaacataaggtagataacagaagtgagtttctctttctacggaatgggatgaaaaaggtaaagtttctcttttacatgaaggtttagtaaagctagaaattatcctttatttttatagatctatttgaatagcatactgtattattttaaaaatttatattggtttcgtagttgttcccttttcacctccaacattttttcttgatcagtcttgcctgtttgtctatttttattagtgttttcaragaacaatttttagttgtcttctaactattatttgctttctagtacatgcatgtatgctctcagctttattagttccttttttattaacatgtatgttattctgttattcttttcctaatttttgaatagaacacattgtgttaatttat

SEQ ID NO: 784817 - DNA, 602 bp, Homo sapiens
gtaagcatagctggggtcaaagcttttatggaaatcacaatgttaaggcctgaagtccttaataatgcttgagaaagaatggcacttttatcatcatcattatcattgtcatcatcattattatcatatcaaccttatatcacatgttgaaagcccagtgtggtgaactgtgctaataattgttataatttatgtatttcattattgatatttcaattttgtttgaacaactgtagggatcaatttaaaataaaaaggaggaaatatataaaaatgtatttagaatagtagcctcattgtcytgtcttatcagccagataagctttgtgctttgtagagcatctctcactgaaggatacctaattattggataaacaattagttctttaacagttcttaggctgggtgcagtggctcacgcctgtagtcccagctactcaggaggctgaggcatgagaatcgcttgatcccaggaggcagagggtgcagggtgcagagatcgcacgactacactccaacctgggtgatagagtgagactctgtcaaaaaaacaaacagacaaaacaacaacaacaacaacaacaaaacccaaaccaaagaac

SEQ ID NO: 784818 - DNA, 560 bp, Homo sapiens
gcaagggcaagagcaaaagattgaacttgcagcttcaagcccttttataattgtcatgactccattcgtgagggtggggagctcatgacccaaacaccttcctttaggctccacctcccaacattgttgcattggggattaagtttccaacagatgctttttgggagacacattcaaaccatagcaacctcctatatccatacccccattttctaaatagttatattatcatcttaaaatcaatattatctttgcaaacattttgattatgtaaatattgtacatggctgagccatattttgtactgacttttaaagtactttacatagagttaataattcccttgtttcctatttctttgctttatttatatagaactcattagattttccctaarttttatagcagatagttaaaacccctttttgcaatcaaacatatcaggtattctatcagctccttctcttttttcttccacacttcctcccatctactcatgccctcttcctctcacattccttgctccaatctggactaatcgctctctaaaccagttccac

SEQ ID NO: 784819 - DNA, 574 bp, Homo sapiens
agagccgtaggtacttgcccaacttctatggttgactaaaatcggagtcccggtaatgaatttagaacagattttcaaaataactaaaaacctaggcttttaaatcagactctattgaattgtatcttctgatcctggtaagtcacagaacttcctgacactacaggtgcttgaaaaagaggtgctgagctactgtgatcatgaatgtccatatttggtgccatctttagtggtggtaatatcttggcaaggtagtagagagttgataaaagctccagtaaataatcytgtgtgtccacagtgccttaaaactctaccaatcctctgcccaaggtttttgatcaaatactacttccctgagtgcaagattaagttaaaggtgtattcgttgtttgagttgttttggagtggctctgccacttactagctatatggccttgggtaagtaacttaacttctctgagctccacttgtaaaataggaatcataatatccactgcatagttttgtgaagctttcatgagttgctctacctattttccacactttgcacggtgatgcctccagaacagaa

SEQ ID NO: 784820 - DNA, 559 bp, Homo sapiens
catccaacaagtctctaggaagttccaagctttgttatatcttcctgttttctaagccctccaagtctataggaagtttcaaaatttcccacattttcctgtctttttctgagccctccaagctgttccaacctctgtctgttactcagttacatagtcgcttccacagttttgggtatccttataacagcattccattatactgatttcaattcactgtrttagtccattctcaggcttctaataaagacatacccaagactgggtaatttataaagaaaagaggttgaatagactcacagttccacagggcaggggtggcctcaggaaacttaaaatcatggcagaaggggaagcaaggatgtcctttttcatatagtggcaggaaggagatgtgccgagcaaaagtgggaaaagcctcttataaaaccagcagatcttgtgagaactcactatcaggagaacagcatgagggtaaccacccccacgattaaattacctcctactgggttcctcccacaacacgtggagattatgggaactacaattcaaggtgaga

SEQ ID NO: 784821 - DNA, 615 bp, Homo sapiens
attcagctaatccctccccacttattgaagagcctccccttttcttcctggactgcaatcttggctttctttcaaatatatatatatatttttaatgaaactcaaggttacagacaagttttcccattaatgtcctcattctattccaggatctcatccacagccctacatcagatttacttgtcaaaacaatctggttcctctggtctgcaagaggttctacatctctccttgtttgtcatgaccttgacggtcccaagcagtaygggccacgcgtcctgtgaactgtccctgagcctgggtttacctgctgtttcttggaaatcacaccacagaaaggaaatgcctatctcagcacaccgccccgggggtgcgtgatttccacctgccattgctgggggtgccgaccttcatcatgtggttaaggaggcatctgccgggattctccactgtgagcttcctgtggttcctttttgagcctattgtttgcaaactagtcattgagtctgaccctgctcccctgtttggagaagagaggagcttattaatctccacctcctggataacgaggagtagctacatagaatcagaattctacagcaaagtttagtgtct

SEQ ID NO: 784822 - DNA, 611 bp, Homo sapiens
ccaaaacagacatgaatatagttatttaaattataaccaaccacaagttcaaacactagagcaaagattgggcatgttaagcagagacttggaggttattaaaaagcaccaaatcaaacatgaaaactgcagtgtatgagatgaaaatacactgaatgagattaatggaaacttagacattgtgaaagaaaatatcagtgaacatgaaggcatagcaatagaaactatcaaaaatgaaatgtatagagaaaaaactaaaacaayagcatattagtgaatgatagaaacttttttttttccttgagacatagtcttgctctgtctcccaggctggagtgcagtggcatgatctcggctcactgcaacctctgcctcccaggttgcagcgattctcctgcctcagcctcctgagtagctgggaatataggtgtctgccaccatgcccagctagttttttgtatttttagtaaaatggagtttcaccatgttggggaggctggtctcctactcatgacctcaagtgatccacctgcctcggcctcccaaagtgctgggattacaggcatgagccaccgcgcccggccgagaaactttttagtagcctaatatat

SEQ ID NO: 784823 - DNA, 524 bp, Homo sapiens
acttgacccttatttagcaaagtttctccctgcatttctaaagaattgtgtgtagcctttgaaattcaagccaaatgaccggccctcatggctgtggcggaaacagagaatggttctttttcctataaaaccatctttatgacatcttctcacagttatcagtgagccgaagactcccacatscttttcatcagaggcacctcctgccttgattcctgatttccatatgtccttccagtggagaagtctatttctgtatagttttgcttctggggacgttgctgttggttaggctaaataatttattgttcctcttcagagtgtgtcccatcagtttccagatgtcttttcatgctggaatctgtgatctaggtagttttctaagaccagagttcttcgctggccataagagcaacaaaaatacatgtactgttatttatatttgtctctgaaaatcatatgtttggttcagcacatttacatgccagcacattttgacctagaaggcagtttctttaacttga

SEQ ID NO: 784824 - DNA, 555 bp, Homo sapiens
tgcaaatgaaattaagaggaaaataatttatgataaaataagtatttcaacatgtcaatgtttggacataactacattggaagatataattaagttgtcatgcttatactcattcataggatcaccttaaatgtcagttacagatgtagatatgttgtgtagctactaaaaataatgactagggttgccttctgtgatgtgattttctgaaatagcaaaaaattattgagaaattgccaaacaaaataaagaatatattttctcaatgtgtctggtagttgctattaatacagtgtaaaagagatactttgtatttatatgtaaaatgaatttaagttttaggcttaatatataaatatgtttttcacccacatgaatgtsacataagaccaggttcattcttcattgtgtgagactattccgcacattgtagaacatctacaactctaggtcctactcactgaataccagtagtgcacctcaatctccaagttcttctaatgcctaaggatacaccttaactagtatatcttctttttttttaagttccggtgt

SEQ ID NO: 784825 - DNA, 552 bp, Homo sapiens
ccttgccagcatctattattattttttcttttttataatggccattctaatttgggaaagaaggtatttcattttagctttgatttgcatttcccaaataattagtaatgtcggccatttgtatgtattattttgagaaatgtctattcatgtattttgcccacattttaatgggactatttgtrtattttgttgttgttattgttgttgagttccttgtacactctggatattagccctttgtcagataaatagtttgtaaatattttatcccattcatcaggttgtctcttcactctgttgactgtttctcttgctgtgtggaagcttttcagtttaatgcaatcccatttgtctattttttgaagttttttttttttttttttttttttgcctagaccaacatcctgaagtgttttcactatgttttcttctactagttttatagttttgggtttttcatttaattctgtaatctattgtgagttaattttttatagttacagataggtttataatttcattcttctgtatataaatatccaattttcc

SEQ ID NO: 784826 - DNA, 641 bp, Homo sapiens
ttggtctatttttccatctctgcaccattgctctacccatttaatggctgtggctttataataggttttctatctggtagggataatattcttctttattctccttcaaaattttatcggctttttctggccctttgctctttcacattaaatttagaagtagtttgtcaagttaaagcrtgaaaaattccatgcaaaaattaaaaaatagaacaaggtaaaggggattgagagggaagggcgtcaggttatggtattaaatagggtagtgtggataggtttcattgaaaagttaagatctgagcaaagacttgtaggagataaagaaatcagccagttttctggtgacacgtcttacaggcagagggaacaatcagtatcaagattctgaggcagatgggattgaggaagagcaagtaggccagagagactgaagcagcatgaacaaggggagaggccaaggagctgaggtcagagtgcctgtggtcagagtccagtaagccatggtagggatgtcggcttttgttctgtgtgagatgggaagtcattgcagggttttgaataaagttgtgctgtggtctgactcaagttttaaaagaatcactctggctcccatgttaagaattgagtgtagggagtaa

SEQ ID NO: 784827 - DNA, 641 bp, Homo sapiens
ttggtctatttttccatctctgcaccattgctctacccatttaatggctgtggctttataataggttttctatctggtagggataatattcttctttattctccttcaaaattttatcggctttttctggccctttgctctttcacattaaatttagaagtagtttgtcaagttaaagcgtgaaaaattccatgcaaaaattaaaaaatagaacaaggtaaaggggattgagagggaagggcgtcaggttatggtattaaatagggtagtgtggataggtttcattgaaaagttaagatctgagcaaagacttgtaggagataaagaaatcagccagttttctggtgacacgtcttacaggcagagggaacaatcagtatcaagattctgaggcagatgggattgaggaagagcaagtaggccagagagactgaagcagcatgaacaaggggagaggccaaggagctgaggtcagagtgcytgtggtcagagtccagtaagccatggtagggatgtcggcttttgttctgtgtgagatgggaagtcattgcagggttttgaataaagttgtgctgtggtctgactcaagttttaaaagaatcactctggctcccatgttaagaattgagtgtagggagtaa

SEQ ID NO: 784828 - DNA, 523 bp, Homo sapiens
tgacctactgctgctttacaaaccaccccaaagcttaaaggcttaaaaccacagtcatttattcgttaccattctttggcttggcaatttgggcagagcacagctaggatggctcatttctactctgtatctgtttgcagttgttgatgggttggtccatcatagatggcctctctgtccgcctgggacctggggagagagtcctgtaatggctggatggctgggtctctttctccatgtggtacctctcatccttaacaaaggacttgttcacagacagcattattcaaagaaggcgaaagtggaagctacagggcctctggaagccaaacyttggtagtcatatgatattgcttctgccatatcctattgctcaaaacaagtcacaaaatcagcccagatcccagggagtggggaaatagattctgccttttgatgggaagagctttaaagaattcgtggccagatttatctcaacatagggcatttccaatggggagaacagcttctggaagggaataga

SEQ ID NO: 784829 - DNA, 595 bp, Homo sapiens
atctttcaaaatgtttaatgcatataccattgatctacgtagtctactgctacgacttcaccatacgtgatgtattagttacccagtactacattacacattaccacaaaatttaacagcttaaaacaacaaatatttattatctcatacagtttctgagttcaggaattgggagcactttagctgggcatttgtggttcagggtctctcatgaagttgctgccaaactgtgggcagcagctgcattcatctcaaagctcaagtggggcaggggaattcacttcccaagcacactcatgtttgctgttgggaggcctcagttcctcaccacctggaccttccgtgggtggcctgagtgcctttatgatatacatgctggcttctttcamagcatataaaccaagagagacagagggagccagtcagagagcacccaagggggaagctgcaatcatttataaccaaatcttggaagtggcctaccattatttctgctgtagattattgatcacatagaccaaccctggtacaggtacagtgtgggaagggattacacaagggtgtgaatcttagaagctggggtccttgcaggcca

SEQ ID NO: 784830 - DNA, 529 bp, Homo sapiens
atgtgaaaacacaaaaaggtaaaaaaaaaaaaaaaaaaaagaagaactttaaaaaaatcataatacatgcaacagaatccatacattttatatctatgtatactaatagaaaaaaaattttaatacaaagagttcataccagatgaattagagaggttttagctatggcttctcttctcctagcaaaccccctgacccctgytaagagaccccccaaccccttaatacagtgtaggcgcctgactaaagctaggctaaccagtgtttccctgggatgcttgtaattgatacaaataggaagaccctcttgcctgttgggccacagaggtggaaggattgaatctggggttgccaggaggtcatgaaaaaaaaatgaaaccaaggtgacaagcaaaaatgggagacggggacagagggcattgcttgactccctgaatccagtcaggcccaagcctgatcagcttcattcctgttaggtaaaccaacatatcacttttctgcagaggtaaatcaagttgagtttctgtca

SEQ ID NO: 784831 - DNA, 616 bp, Homo sapiens
aagtcaaaagacttgttcaagatggacaactaggaagtggtggggacagaccagtcctgtctgatgccagatccagcgctgtatctgccagtcagcatgcacactttcatctctccagcctcttcccactcacctttactcaacatttctgggcctccatagtgattgtagtaattcggtaaagatgattcatttctttagtccggtcttcggacttgacttcttaraagcaggtcttgtgcaatagttgcatattaaccacttggtgacacagtgcatgagggtatgccaactctttttgctcatggccgtgcagtgcagaatttccaggcattgtccgctctgtttcctggacttcggagtgatagcaaagttttgtattccctgatcagctgtgtatctctgagcagcaagttgatctctctgtataagggtgactgtgcccatggaggatggcatgcaattgcctaaagatttcagtctgagaatctgagaaacgatactgaatggagatgacaggcttagtgcctgcttccaggagccatgcctcctcctggcctggaatgaatacctaaacacctgaggctctgagttccggcagtgtgctgaaactgct

SEQ ID NO: 784832 - DNA, 596 bp, Homo sapiens
ggtgcgtgaactcttttgaggtgtgaattgttgcactgtaactcattcctcattaccacggtattgctgacgtggcatgtaagatgggatgtcttacaggccaagacggaacctcccctcagtcctccctgtgaagccagccgctgtggcccttggtgccctctgaggagccatctatcccagcggcccccaagggctgtgtgggggatgcaggcacagactgaatgggatgatttgtcccaaatgcagcttttctttccttctctagagtttctcatcaccagctgggtggctgcaggragggtgtctgaatccttaccaatacccatgaggccagggatggtcaggcccccagaaggcctcttagtactcttctggccatctggggccatctgtcctatagcatagcctctctgtcacatcgcactcaccatgtgcaggtacttctaaatgcaagtgcgctggagaatgtgtgtgtgtgtgtgtgtggttatgaaggaaaacaggaccttcgcttgtcgtggtgtgtacaagggcaggcgtgtgttctccgatgttatatggattttgtggccctgaagccgtcagccacttgg

SEQ ID NO: 784833 - DNA, 596 bp, Homo sapiens
ggtgcgtgaactcttttgaggtgtgaattgttgcactgtaactcattcctcattaccacggtattgctgacgtggcatgtaagatgggatgtcttacaggccaagacggaacctcccctcagtcctccctgtgaagccagccgctgtggcccttggtgccctctgaggagccatctatcccagcggcccccaagggctgtgtgggggatgcaggcacagactgaatgggatgatttgtcccaaatgcagcttttctttccttctctagagtttctcatcaccagctgggtggctgcaggaagggtgtcygaatccttaccaatacccatgaggccagggatggtcaggcccccagaaggcctcttagtactcttctggccatctggggccatctgtcctatagcatagcctctctgtcacatcgcactcaccatgtgcaggtacttctaaatgcaagtgcgctggagaatgtgtgtgtgtgtgtgtgtggttatgaaggaaaacaggaccttcgcttgtcgtggtgtgtacaagggcaggcgtgtgttctccgatgttatatggattttgtggccctgaagccgtcagccacttgg

SEQ ID NO: 784834 - DNA, 548 bp, Homo sapiens
gtccagacctgagtgcttttgagaatgaaaggggaaatgttaataattacatggagacagtagttagtatccagaacatttgtcctgttttgtgcctgaaaccaagaaagactactacactcggcttctctataaccagaggatcacagagccagcgtcacccgcagcaccaaatgataaaagctcagagtagccggtgcctgcaygtgaagggcggtttgtgttcctcgctactggaagtaggattatggttgtaataattatgtcgacttcagtattttttccttaagaaagttttattgtgccaacatctgcaacaatagacgctgtatactcttaggtaccaagcacccaccaggatttcgccatgcttattttgtcttttcctgtttatgcctgtgtgtgtgtggtggggagttaggggtggtagtggtgtgttttaaagcaaatctcggatgttatttttcttcttgtgatgcttacttcaaagtaagtaccactaaccttgtgccagtgttcttatgtggggtgaggattaattaaagact

SEQ ID NO: 784835 - DNA, 548 bp, Homo sapiens
gtccagacctgagtgcttttgagaatgaaaggggaaatgttaataattacatggagacagtagttagtatccagaacatttgtcctgttttgtgcctgaaaccaagaaagactactacactcggcttctctataaccagaggatcacagagccagcgtcacccgcagcaccaaatgataaaagctcagagtagccggtgcctgcatgtgaagggcggtttgtgttcctcgctactggaagtaggattatggttgtaataattatgtcgacttcagtattttttccttaagaaagttttattgtgccaacatctgcaacaatagacgctgtatactcttaggtaccaagcacccaccaggatttcgccatgcttrttttgtcttttcctgtttatgcctgtgtgtgtgtggtggggagttaggggtggtagtggtgtgttttaaagcaaatctcggatgttatttttcttcttgtgatgcttacttcaaagtaagtaccactaaccttgtgccagtgttcttatgtggggtgaggattaattaaagact

SEQ ID NO: 784836 - DNA, 546 bp, Homo sapiens
gtctgagcagtgccccagcccccatgccgctttggatttcagtggcctctgcagcaatttattattcttacatcagatgtttgaagtaggtgaaggggcaggtggcatgtgtctggtgaggttgctgacactgcttttggatgagagagagagtagtggttgaaacagagcattcaaaaaagcgtacactttaacctgtaatccgcaaacattcctttgagtttacccagccgtgggaaaggacgctgtaccyctgccctattggctgcaccctttgctgttgatgtgaggctttatttacctgggaattgacagggttttggtccatgattgctcctttctccgcaatcacatttaatgcccatgatatctcatctttgcacacgaaggcaaagccttctactgctttttctcttaaagtgttcagcactcccctgagtttattagaaggatcagaagaaagagaccctgagtgtgaggctaggtcaaccggagaaattcacccaattatttcgtttctttgtttggatccctgcttttcatttc

SEQ ID NO: 784837 - DNA, 543 bp, Homo sapiens
ttaaaaatttctggcaacctgtttttttccccaaaacttgagggttgctgtgtggattggctgtagtggtaattactgaaaagtcatcaaataacagtgaaaactagacaactgattagaagggaatcaagtagtcattcagatggtattttcggtaatttaatctgcctctgaccatatgttctagtcagctgaaataatttaacagtgacaacatatatttcagcaagcagagattaaaaacagcccatttattttctgttttctcccgcagtaatatttttatgtctcygttaacaaatatgatgttcgccatttaaattatatggaagcagctttggatgatttagcaatatacataacatttattctttgttattatctagttttatgtatgtaagcatgtttattttagtggtgtttcataattcaaaaatgttaccagaggtggtaattgtatttatattggacatgggtaagacatcagcgtgagatgaagccacatttttgctgcttttgtgactcaattcttgggcttccaac

SEQ ID NO: 784838 - DNA, 628 bp, Homo sapiens
ccaattttttacatcctgtgagtcaactctgtagtttgttgttgatattcacaaaaggagaaaagccactgccactgagactgcagaacaactagataaaagtctcactttgttgcctaggttggagtacagtggcaggatcttggctcaccgcaacttctgcctccctggttgaaatggttatcatgcctcagtctctcatgtagctgggattacggacaggtgtcaccacgcccagctaattttttttgttatttttagtagaagcaaggtttctccatattacccaggttggtctcgaactcctggcctcaagtgctccacccacctcccagagtgctgggattacaagagtgagccatggcgcccggccataactacttccaaatgtcacagatcaaaagggagaaattggaagggatagcacaaggtctttctttccctgaagagtwaaaaatacacgactgtcatctcatcaattcatacttattaactgcccatatgatgaattagatgctttagtaaaggcatacatgaaaagcagtatcactagtctcctcacaattctaagaaataatgctgtgaggaaacctgcctagcgaaaggcagtagactacaggaaaagaaa

SEQ ID NO: 784839 - DNA, 589 bp, Homo sapiens
tgttttcaacatcggtagactcgtcaaccctgggttgcgtaccgcagtgactcattaatcccctctaacaattgtgcctcaataccctctgtcgtttcatcaattcatctagttatggtgctagccaaaagaggaatacgtgctaccctttcaactgcagtctctctcaaaagttcacgacagatgtccttagcagcagcaggcaggatcaactccaccaacrgtaaagggattcctagctttagcaatgcggttagacactaagagtgacgctctcagtgcagacacagtcaactaagtggtggccttcaatcattgcttctgttcttcgtgttcgtgtttttttttttcttttgaaaaactctaaaggtttgtcttttaatgcaaggtgcttggtctccatgtggcgaagcggttttgaaggttttacggcttcactggatagccagtggtcacatattatgcaaagagggcttggggaatatgaatcacttgttgcaatgaatccataattgaagcagggctcttgctgtttccttttaaatgcaactttctttgagtcttctgctgtttcaccattgggcctttc

SEQ ID NO: 784840 - DNA, 520 bp, Homo sapiens
tgggcaatccgggaaggcctcatggacaatgacccaggatttgaaagacaggtggtatctgacaagtgggcattccagaaggagcaaaggtacagagaggtgtgaaagcacaaggaagtttccaggccctcaaagccatccctataagctcatgtattatcggacaagtggggaagtcagggagagaaggtgagaaaggtgggctggggctccattgcaragagtgggatgacgtcaaccccggagagctctctgggtctgaccaggctgagaagggccagaccgtgagtggcatgggcagcagaacccagccctcaaatcttgggcatctagtacccaggtacacaggtcctttgctggaagacaggacacccaaagcctcctgcttctctggacttgtgaagccccagctgccattccccgatccctccacccagacacctggacaacagggagaaggggtgcaggaaggttggagcaaattcattccagacagaacacacggatcccctgccatggg

SEQ ID NO: 784841 - DNA, 662 bp, Homo sapiens
ggatttgagcccagagagatctaaactaccacactcttctattaatacttctctacatcagggtaaccaattacatgcttaacttatgcccatttcacagaaaaaactaagactctaacctgacaatatcaagtagcttggagagaagggctacttgacatgagacaaagcaaggttttctggagaccaaatctcagcagtgttgcaaaagtgggagtagtgggcactcgatgccagtggtattctctgatgcaagagccttggaaccaacaattcctcctccctcccccaacctttgccttaaaaattccccattcagtgcaggcagatgcctataaattttcagatgcccctacctggtaatggatgacatgctggactttaggaatatccagaccccgagcygccacatctgttgccaagagaacacagctggggtagagagagaaagcttattaataataactaacagctatctttaatcaaattcttaccaactgctgagcatcctaaacattacagtccttaccaatactctgtaagatatcacttgtatacccttttacagaaaaactgaggctcggagagattaacttcccaagctatctacatggctattcagctgtggagtctggatccaaatttgggactcattgacccca

SEQ ID NO: 784842 - DNA, 594 bp, Homo sapiens
cattcctgcctggcaccacagggatccactgggagggtggccacaggagctgggggcaaaactccacagaaagaaggcattctctagccaaattctgtaacaatttgatttaacaatctgaacaggaccagaagcctcctggccagaactcgggggagggcacgaatccagacttcacaggtaggggaagaactaaagccccttttctttcagagctgggaagcagataaccttgggcaagttttcaagccctcctccyggaaacagactggggctgttggggaggacacggtgggagtaagactgcccttcggtttgtgagggagctgggtgaggcccatgactgctggctttcccccatttccctgacaacctgcatgactcaccagaggcagccataatcctcctaggtacacaactccagtgacctgggaatctaacccccatcccccacaacacccacaacaagacccacccaaggagagtcagagcaggcgtagacctgcccccacatgatggtccttccctatccaccctggtagcagaagacaaagggcatataatcttgggagttctagggccctacccactgct

SEQ ID NO: 784843 - DNA, 594 bp, Homo sapiens
cattcctgcctggcaccacagggatccactgggagggtggccacaggagctgggggcaaaactccacagaaagaaggcattctctagccaaattctgtaacaatttgatttaacaatctgaacaggaccagaagcctcctggccagaactcgggggagggcacgaatccagacttcacaggtaggggaagaactaaagccccttttctttcagagctgggaagcagataaccttgggcaagttttcaagccctcctcccggaaacagactggggctgttggggaggacacggtgggagtaagactgcccttcggtttgtgagggagctgggtgaggcccatgactgctggctttcccccatttccctgacaacctgcatgactcaccagaggcagccataatcctcctaggtacacaactccagtgacctgggaatctwacccccatcccccacaacacccacaacaagacccacccaaggagagtcagagcaggcgtagacctgcccccacatgatggtccttccctatccaccctggtagcagaagacaaagggcatataatcttgggagttctagggccctacccactgct

SEQ ID NO: 784844 - DNA, 613 bp, Homo sapiens
agacctgcccccacatgatggtccttccctatccaccctggtagcagaagacaaagggcatataatcttgggagttctagggccctacccactgctggtccctctccatactatagctgatgctttctggaaagtgccacctcctggcaggaggccaactaacacaaaaacagagcattaaactaccaaagctaagcaccctcacagagtccaacacaccctcagccatctccaccggaacaggcgctggtatccgtggctgagagccccayagacggttaacatcacaggactctgtgcagacaactcccagtaccagcccagagccgggtagatttgctgggtggctagacccagaagacagacaacaatcactgcagtttggctcacaggaagccacatccataggaaaagggggagtactacatcaagggaacactccatgagacaaaagaatctgaacaacagccttcagccctagaccttccctctgaaacagcctacccaaatgagaaggaaccagaaaaccaaccctggtaatatgacaaaacaaggctcttcaacagcccccaacaaaaaatcatactagttcaccagcaatggatccaaacca

SEQ ID NO: 784845 - DNA, 540 bp, Homo sapiens
aaccagggacggatccattctatttaggacctgaagcttacataattggtggggcagagagcttaaaaaaagagagttataatacaaaataccagtaacactataatgtcaccccaaaccaggggaagtatggcagagggaagccagattggaaagcaattacaagacaacagccctaatcaattactcttagaagaacttttgcaaataataataataacaacaaagtgagcaatggctagagctgctcttagggtcttggaaggagccagtgcaagtgagggtccctgaactcaggcytcttttgcttcgaggtaaacccatttctgcttctatcatcagtagctacatataattatttatataggagtataaaattttatttattcaatttttgttacttcccacttttgctgtgtcaacctaaataacaaacagagagaagccctctaaaagaaaatgacatttgagaatacggcattgcagtgggaaaattcatgccatagtaaactatgtacatattcaaggatgtaaaggaag

SEQ ID NO: 784846 - DNA, 588 bp, Homo sapiens
agccatgggttggtagcagatacctacgagtttgggtaaattcctctccttaagaggtttcaagataacttggggctcttgggcctgtcagaaagtgacattctttggtcaggaaccctgtacagtgactgtgtaggcaagatacgaggctagttttcccaaggggcttttattggctctataagtcaagtttgattccttaagggaaagcacatcattacagtcaaagccttggtaaaataaccgatgtctccaattgcatccaattgcaaaatgaaatggattcttattgtacttatgcagataactatattgycataaattaagaatatgcagtttccaaattctggagaaatcaggtagagagaagcaaatatactccaaattttgttcacagtagtatactttactcaattatcaaaagttgtaaatagctcaaaataaaaatttttttggctctgtaaaagatcaggaaaaagtcagaaagattggttcagacttctgttagtttagttcatgcgcttaattcctgttctgtctgatgctcatgaacatttcagctctccatgaaagtcctgaaagattttt

SEQ ID NO: 784847 - DNA, 588 bp, Homo sapiens
agccatgggttggtagcagatacctacgagtttgggtaaattcctctccttaagaggtttcaagataacttggggctcttgggcctgtcagaaagtgacattctttggtcaggaaccctgtacagtgactgtgtaggcaagatacgaggctagttttcccaaggggcttttattggctctataagtcaagtttgattccttaagggaaagcacatcattacagtcaaagccttggtaaaataaccgatgtctccaattgcatccaattgcaaaatgaaatggattcttattgtacttatgcagataactatattgccataaattaagaatatgcagtttcyaaattctggagaaatcaggtagagagaagcaaatatactccaaattttgttcacagtagtatactttactcaattatcaaaagttgtaaatagctcaaaataaaaatttttttggctctgtaaaagatcaggaaaaagtcagaaagattggttcagacttctgttagtttagttcatgcgcttaattcctgttctgtctgatgctcatgaacatttcagctctccatgaaagtcctgaaagattttt

SEQ ID NO: 784848 - DNA, 514 bp, Homo sapiens
aaaacaaggtaacagttgcctgtggatgacaaaaagttttaggacagccgctattatagccacaattggctagaaattgtggttacttctatggcatacaacaattttacataacaattataactattagtagcatacactaagtcatatcatgattataggagtttcccataattttagaacacataccaataacttagttatacaaatacagccaagaaagccaaacacccaaccatttcatatttaaccatgcttcctatatgatttttataccaaataaggcaaatatgtcatttttggacttgaggagacctartatctaaaagattaattaggaggtcagaagaagacataatttataatttgattttggaaattttgccaaatatcagaggtttaaaacacttgatattataaaatcaaatcccaggtcaccataagtcatttacttagctgaaacaataactcagaattttttaaaaggcaaaaaacctttactcattaatagagg

SEQ ID NO: 784849 - DNA, 398 bp, Homo sapiens
cttcagtggcggggggaaggggctctgcccagtgaggtatgacacccttctcttctctaaagctggtctggctttacataccccaccgcctggtgcaaggtaggggctcagtgcacatggtgctgaactagcaggaagtgctggtgcccaggacctggcctggcatcctggtgccaccatctaaaggtgtctgctcaaagccagggcacaagggggaagagcactgcactaagagtcataggctgagctataattgccctkctaaggccaaagtgctttgtgacctcagctaagtccctgtcctactctgggcctcagtttcctcattgcaaaaggacgatttggggctggaagttttccgcagatttttcagttctaaagagtctgcaactcagcga

SEQ ID NO: 784850 - DNA, 522 bp, Homo sapiens
gctgggattacaggcatgagccactgtgcccagtgagtagtgtagtttttaaaaggagagccaggagggagccgctgttccgagtttcttgtctcatagaccttcacaggaaagagggcacctcaggtagggtttgagtgggatytcagaaggaagaggctgcactaaagaaaagggacagaaacgccggagtagggacttgcattttggctggagcatgcggaaccccctgagcagtctgagaaggtggctgggggaccacgtggggccccaaacaccaggctgaggtttagactccatcaagggcggtgcaaggggagcctcacacactcatgcctctctgttctctgtctttcccactctttccaaagcaagctaaagtatcccattaatcttccccagtgcagaggattaagctggtggctctcaggtttgaacacgcatcaggaggccctgtatcaatgcagagtgtggacccacctccagagcttccaggccctagaatctgcatttctaacaagt

SEQ ID NO: 784851 - DNA, 522 bp, Homo sapiens
gctgggattacaggcatgagccactgtgcccagtgagtagtgtagtttttaaaaggagagccaggagggagccgctgttccgagtttcttgtctcatagaccttcacaggaaagagggcacctcaggtagggtttgagtgggatctcagaasgaagaggctgcactaaagaaaagggacagaaacgccggagtagggacttgcattttggctggagcatgcggaaccccctgagcagtctgagaaggtggctgggggaccacgtggggccccaaacaccaggctgaggtttagactccatcaagggcggtgcaaggggagcctcacacactcatgcctctctgttctctgtctttcccactctttccaaagcaagctaaagtatcccattaatcttccccagtgcagaggattaagctggtggctctcaggtttgaacacgcatcaggaggccctgtatcaatgcagagtgtggacccacctccagagcttccaggccctagaatctgcatttctaacaagt

SEQ ID NO: 784852 - DNA, 596 bp, Homo sapiens
cagtctgaaaaacagagctggtttcatgggtgtgtgacagtgctgttgtgtggggcctgcatttagaagagacgagccccatgattgatttaatgttctactgtcactgtcttcaaattcttaataatttctgaacaaagggctctgcatttgcattctkttctgggccttacaaattatttagcaggttcctctaaaaaaaatctcagtgtattgagagctccttcgtgtcatccagaaccacagtgtttattgcactcattttctatatcttgacaagagaagagctctgagggtccctggagtcagaattgtcagtcactaggggggtctatatacactgtggccaatcaaggatttcagaccaaaaaaacataagcttctactcaataaatgagatttccaaatacagggaaacctggttaacaactttggttagtgaagtgaagcaatgccaacaggtggttaatgtggaacacatggtgtagattcagctgtcatttgagaaaagtcctggcctttactagaatataggggatagctgggcaaaaacaggtacaactaactttactgaagagtctggttagccatactag

SEQ ID NO: 784853 - DNA, 596 bp, Homo sapiens
cagtctgaaaaacagagctggtttcatgggtgtgtgacagtgctgttgtgtggggcctgcatttagaagagacgagccccatgattgatttaatgttctactgtcactgtcttcaaattcttaataatttctgaacaaagggctctgcatttgcattcttttctgggccttacaaattatttagcaggttcctctaaaaaaaatctcagtgtattgagagctccttcgtgtcatccagaaccacagtgtttattgcactcattttctrtatcttgacaagagaagagctctgagggtccctggagtcagaattgtcagtcactaggggggtctatatacactgtggccaatcaaggatttcagaccaaaaaaacataagcttctactcaataaatgagatttccaaatacagggaaacctggttaacaactttggttagtgaagtgaagcaatgccaacaggtggttaatgtggaacacatggtgtagattcagctgtcatttgagaaaagtcctggcctttactagaatataggggatagctgggcaaaaacaggtacaactaactttactgaagagtctggttagccatactag

SEQ ID NO: 784854 - DNA, 572 bp, Homo sapiens
tgcactccacaagtgtcagcagttcacagaatccaaatgaaagagtggggtttcatggctctgtgatttgaattatgtagaatctataatctcaagttcacaaaattgcatgcatcttggggccattttcattgaggcaaaagagggagggaaaaccacatatcttttagagggaggaaaaacagttcaaaagagagcaagtgacacagattcttcttttaaaagcagcaaataaatttcaaggaagtgcacataagctttagctaacattctaacataaaactaacaaaagttttgcctacycaactcatatcaggtcttcaggcaatgacaatatagttttcattattcattactgagaattaattcaattaagtttctgcatatggtctttggattgatttgttaccccaaaccataccactttcattatacgctgtatggaggaattctttcaagttttcctgaacacacttttcaaactgtatgtttagtatgattttaccacaacaatgaaatttttttgggtgcaactgaaataaactacaactttgattttctaaaatacaaaa

SEQ ID NO: 784855 - DNA, 566 bp, Homo sapiens
tggaacatgctttatgatttacttgcttattttattttatttactctctgttgttcccactaagatgtcagctccatgagggtatggcagggatttctgtctgttttatttactgatgtctccccaggaccaaatataggacctgacatataagagacactcagtaaatatttgttgactggaaggataaatgagttatattcccactgacgcakaatgttggtgttgtgaacagaaaatcgtatctggcattttgaactattctaagatcaatctctttcacattcctaccaaatgtccattttttttctggtttcttaccaaaatggctaaccatggggaaagttttgggcatttgatctagtgaacaaatgtagacttcaataaatggccactgaggaagccaagacttcctaggagttcttatcccccatcaactaccaagctatggtaatgaaggcatttttactcacccaatccacgtcatcccttctccatggaggcagaacctaatcctaatgttcacacctttgagaccatgtgctcaggaaatcaccaggcctggt

SEQ ID NO: 784856 - DNA, 605 bp, Homo sapiens
tatatacaaatacacacaatcacatgcaaacatgcagacttatacacagatacacacacgtgactctagatgactagtccattttacagggtgctcactgaagcatggttggtgatagccaaaaaaaaaaaaaactgcaaacaagttaaatatcgccagtagcagctggctgaataaactatggtatatggtatacagaatgaagtcaaatactggtacccaggatataaaatttcagttggataagaggaataagttcacaacacctattgtacaacatggtggctatagttaatagcagtgcattgtgtttttgaaaattgctaagagattaaattttgggtattctcaccacacacacamaaaaaaagtaagtatgtgaaatgatatatatgttaattggcttaaattggccattccacaatggccatgataaataatgtacatgataaataaatgatttttatcaattaaaataaataaatattattttaaaaacataagctctatgagagtgggaattttgtctgttttgatcactgctatatcaccatggtttagaataggtttgtcacatatgtactcaataaatagctgaatttgaa

SEQ ID NO: 784857 - DNA, 608 bp, Homo sapiens
caaactgaaggtctccttaataaatgccaattacagggcatatatgcacaaacgtggctagcataagccataggatcatttccttctgagaaaattagtaaccaagaaaacacccaggcagtgcaaacgaccggcccacccgacagtaaggcttgtccctgatcagaatactaaccagcattatttctttcttactctctctctctctcttttcaacttaggaaaagttcagaaccacacagaattttgtttggggttatacaaattccttcacaatttgtatagaagtctaacataactttttaaaagccatgacatgcccataatgtatacagagtctctgacttccgccrtaagcgaggctttttcctaacttaatcatactcaaatttcaccccttttaaagatcctgattcaaaaatgttcactcattctccacagtccacaaatttataccatctcttcctgtggtattttatgtgcataaattaaaaaagaatggcctccaatgaggattaaaaggttgaaaaaaatcatagactttctaaatttaggttcatttttcttattttaactctcaaaatatgtgtgttaacaaaacatatata

SEQ ID NO: 784858 - DNA, 626 bp, Homo sapiens
gcaccttcatcattaccattaaatggccttggaaaagggacctcatctctctaagtatgttcttcaattgtgaacaggactgataacagtttctacctcatatagcaggagaaatcaatgaaatactccattataagccactgaggacagaccctaacatatagtaagcattcaaaaatgctaactaatattaggttagagaaacaactggggtccagattttgcatgagatattaatccaatgctatttattacggaccaagtatatctgaagcctcacctttgctctcatgttatakgttcatcattacaggatattatcaaatatatgaatactcttagcatactcctatcactacacataaccctcaatgcactcagtatgttcctatgttacagttcacattctgccttatactagacagggactgtatacgctgtgcaaggactaggacagtgctatgcatctatcaagctggagtccagtaagggtcagttgaatcatatgaaagatggctggtctacgtgaggtatttgctgttaagagttttgttcgggatcccatagagtaaggcatccaccagccagggcttgcccagcatattgaagcagatgcgtttagataa

SEQ ID NO: 784859 - DNA, 620 bp, Homo sapiens
ccaagccatcatcataatgatagggacaagaggcaaagaaattctaggcagaaaagggtgcatcccctggtgaagccccaccctcaagccaaaacgcctgagaccacagtctaaattgagcacttacatccctgttttcctgcttgaatgttgccttttccaaaacaatccatggcccactctgcccccatcctgtgcctataaagaccctaggctcagctggcagagaggagaagcagctggatgttggacactatggctgcacatcagagagaagtggcttgacttcagagggacagcttgatggcataacttcagaaaagaatttgaccagaggtagccagacttcaggggaagattaccttcccaccctgtccccttttcagctycccttcccactgagagccatttccatcagcccaaatttactatccttcaattcattcttgtgacctcatttttcctggatgcaggacaagaattcaggagccagaagtgtggatgcaaaaggtggtcacactgaccctctgcccttgctggtggatggcagccacctgacatgaaaaggaagaggatccactgagctgttaacacttaagccatccatggatggcagagct

SEQ ID NO: 784860 - DNA, 597 bp, Homo sapiens
tgttcatgaatttcaaattttatattgatttttagtaaaatgttattatagaatggttaaaatcactattttggtggaaattaaaagcaccactaaaatgttatttttaaattttctgaatctttttttattaattcaacatctgttgctcaggaggtcaaggcaaataaaataaatgtgtttgtcttttttatggccatacatctatgagaaagaatataaaggcaaataataataataataataccacatcaggaatatgaatcaaatttgctataggatttttttaaattaaataatgaattctacccgagaaaaaaataaagcaaataggtgcttactaagcccaccaattatagaatctactttgtgactgccaaatactaataataaagttaaacttatggaacatttactgtgtaccagayacagagccaaatccttaatagatacaatattctaaaaatccaaaccccacctgaagtgggtactattattggcaccatattatagaagagaaaagtaagagatagagaaattatgtaattactaggccctggaaacatgtaccttaacatcttacaatgtggaattggt

SEQ ID NO: 784861 - DNA, 501 bp, Homo sapiens
ttccaaaatgcatcatgtgggtttttgtgtgctaaatataaattgataggaaatgtcctaaattatatttttacataatatcagtattaaattttatgtatattttatgtgaccttcaaaattagaagcacaatattaaattgtcttttagtaaagttgattctgtgagggacaaaatttatgtaattgaaattcaaatccttacagtagctgatcttgatctctgataaaatttaaagtaccaagggaaagggtggctsacacacatgttccctaaacattacttcttgtccttcatggatagtagatggcaaaacatccaaagttttattttctaatgattacctatgaggttggcatggcaaaagtaatttttgcctggaaatactttaaaacttgtattaatagtcagcatgttcggccagtcaatcagcagttccaagtgacatggtggaatttctctcagagtctacacagttttaaagatagactagatggttt

SEQ ID NO: 784862 - DNA, 647 bp, Homo sapiens
tagaaaaaaaaataattcacaaatttgaaagctcatgtcaattatttagtcatactttaataaaatattggggcaggaaaagctctcaattttattttatcactaagccatatatatccagggcacatatttgcatatggttacaacgtgctagcacagattcgaaacatcatacatttgtttaactactgcttcttttaaataattaggacttaaaagagtctagcaattayagtttaaattgcaaatggaaaaacatagaggttctatttatctgaatctgtattgtcttaaacatcagtgctggtagaattactttgcatttagcagtatttttccttatcatataaataatacattaaggtataaaactgcccacctgtgctgtacatggttattgttcattatgttgtccttgggaagtctggttcctaaatatttattactatgaactcatccagttgctttaattcataaggaatatgtggaaatcctaatcttgttcttttgaaatgcagtgaaccctggaattaatgtggtagctgaagtagggggaagtttaaaccacaattcttttgcacaggatcaatggatcagttccagtgtaaacaaaggttggtttagtcaaattagccatctgtctctga

SEQ ID NO: 784863 - DNA, 658 bp, Homo sapiens
tggtctcagtgattgactttaatgatggatatgtgacctaaatcaggacaagaaataaataatcccaggattaagtggatgctgtcagaaaagatgctgacttcaacggagctgtaatatggggattggagaactagggctgatgcagccatgttgctaccataagggaaggcatgatgttttggaggccataggatggagcctaagatgcagcctattccaaggaaggaagaacaggaaagcatagcaaaatcagatcactgataacattgtttgaggcactggataaaacctagaattgaacctaatctgtactacatctggattttaatttgcttgagctaattattcccttaaaaaatgactttggattagttctactgttactggcagcaataaaaagttttaactgatacaaagaaaaaaatattcagtggtatgacttgtgaaaaagagctcagtagcaagaaaattagaagaaagtagtatcactgaaaagcacagattaattctaatgygatagtgcaaggaggtgaatatgatgtagtggaaatatactaaacttgatttgctctattggtccctggaattactggactgaaatagaagagagagcagggctagaggtatggccctatgggtaactattaagatgaca

SEQ ID NO: 784864 - DNA, 483 bp, Homo sapiens
ggctgctcatccctcagcacacggtcagggtcggggatggaactcaatcccagcccaggggtactggaaagaaaagcatcctttccttcccacaagaccgaatggatgagaaagaagccctctcttcccttggatggggcagggtgtctgttgtcttattgcttgaccggaggatctagacttgtcctgggccacgtatatggatctgaaactaaagactaaaaacatgatgtaaggcagaatggaccggatgagagaagcaatatttttagtgatgttagctcatatcagttggattgggggttttgtttggtgtcactcacagcccasactttccatgcacagcaagtgcaaggctgagatgagatggaggagaggtggccaggtccttggtgagaatcctggccgaccaccccttgagtcggctctgtgagtagctccaagtactgagagggaaccatcttcctgtggttactggtacat

SEQ ID NO: 784865 - DNA, 629 bp, Homo sapiens
tcgctcgtagttgagaaccattgcagtaaacaaaggttggtttttcctaaagggaggagtgaaggagggtttaccatgacaagtcttaagcttccaacgtcaagattctttaataccgttataaaccgtatgttctttattgttattayggggaaaattaatatccttcagttctctagcaggactaagactctagtagaaaaaaaagaaaaaatgacttccacattccagatcgggaattgtcttttcttttctttttttaattttttacgtctagtgaaaactgcacacaataaattctacacactgaaaaaatacaagcacttttatgtaaagaacaaagagatttctgagttgaatcatacaaatattatttgctgtaggccatgtaatggtgcactgtaactataaattatttgcaaccaaagtgtatgataattccataaagctgccacactctactttcaaataatacttgtggaaggaaaaagtcaaatgtgctttaccccacagcaagatataaaactgttgaaaaaaaattcgatgctggtttctttccctggagtttcttaaagcatttctacaaggggcaattttatgggcttaattgtgccctgtgaatttttatg

SEQ ID NO: 784866 - DNA, 629 bp, Homo sapiens
tcgctcgtagttgagaaccattgcagtaaacaaaggttggtttttcctaaagggaggagtgaaggagggtttaccatgacaagtcttaagcttccaacgtcaagattctttaataccgttataaaccgtatgttctttattgttattacggggaaaattaatatccttcagttctctagcaggactaagactctagtagaaaaaaaagaaaaaatgacttccacattccagatcgggaattgtcttttcttttctttttttaattttttacgtctagtgaaaactgcacacaataaattctacacactgaaaaaatacaagcacttttatgtaaagaacaaagagatttctgagttgaatcatacaaatattatttgctgtaggccatgtaatggtgcactgtaactataaattatttgcaaccaaagtgtatgataattccataaagctgccacactctactttcaaataatacttstggaaggaaaaagtcaaatgtgctttaccccacagcaagatataaaactgttgaaaaaaaattcgatgctggtttctttccctggagtttcttaaagcatttctacaaggggcaattttatgggcttaattgtgccctgtgaatttttatg

SEQ ID NO: 784867 - DNA, 605 bp, Homo sapiens
aaggatgtttattttagaaaacaaaaaggacatcaaggtagccatcacgcaaaactccgaagtgtcttagacttccttactcttactgtacagcattatgttgggtttgaattaattagggggcatggggcatcctgatcgcctcgggatttgtggctttaaaagtctccggagaggactggcagcagttcccagggatgtgtgccattgtctgggacagagcaagccgagttcgttgagctacagcctayggtccagggacctgacttggctggaggctggacatgtcctacttctcttaactcagcaaatggacggaggtcagggaaaggttgactcggggtaggggctggaggaggttgcagggaagcctgtggaagccactcttgcagcaggtcccgggagagccccaggccctggatctgagcatcctcagtggggcttggggatccgtacctctagagggcagtggggctccaccaagagtcccttccagtgtcttcccagtggccaggaaatactcctcaccttagaacgggcctccctgctcagcctaaagggaaatttctacccacaggttgccttggctgggcgcagaggatgga

SEQ ID NO: 784868 - DNA, 604 bp, Homo sapiens
gaagttcttgactgtctgccaggtgaggcagaaaacagctgattgggccacacatggtggctcacacctgtaatcccaacactttgggaggcgaaggtgggaggattgcttgagccctggaggtcgaggctgcagtgagccgtgattgcaccactacactgcagcctgggtgacaccatgtcttaaaaaaaaaaaaatccctagctgattggaaactgtgtgtgtggatgggatttgttaactgtgggcttctgcacagggtgaccttatcggaaatgatcaggagcccctcatgtcggtatcctttgtcttttttctttggctgctyggtttcaccagagaagaatcttgcaatctcctctctggagggtctgtgtcaggcttccagcctactggggaagacggctggggctgtatgaaaattttcacttaatcctcttgtttaaatacattaccctctccagtgattaaaccttcagtgttttgctgggtagggggccgtcacccagctgcaacaacttggagatgttatctaaatatttcttcaatagacttccaaccaaagctctgttttctcctctgtttcccagttctgcagggcaaa

SEQ ID NO: 784869 - DNA, 631 bp, Homo sapiens
aacactggtattttctgctctatgaaaaatatataaccaagtataatgacaaagtcttgcagtctctcaattcaatatctatgaagatttcatccttgtagactttgttattttttgagaatcaccttttcctttaggagccaccttaaaattaaagggttagaaggattcccagaccaaatagtgcccaatcaaccatttttcaaggtctcaagaatgtttctcaggctragtcttcgttgccctcactgtctcctcccagtagatggctaatgggactaaagcttctttttgcataggtagactgccctgtggacctgctaatggacacatataccccttggtttgaggtctaggagctgttagtaacccagcagatctaagacgtgcacttgtatgcagctgttgttggttacttgggtccttaatttccagggttataaatcttaagctgatctttaactactctacattttacctaatatttgtcaaaagggagtcatcactgaattaattactgagtgagttataatttatgcatgataatggatctttttctatttttaaggataaagatggttcacagagttatagatttatctgggaaacttggtatctaaaatggagattc

SEQ ID NO: 784870 - DNA, 631 bp, Homo sapiens
aacactggtattttctgctctatgaaaaatatataaccaagtataatgacaaagtcttgcagtctctcaattcaatatctatgaagatttcatccttgtagactttgttattttttgagaatcaccttttcctttaggagccaccttaaaattaaagggttagaaggattcccagaccaaatagtgcccaatcaaccatttttcaaggtctcaagaatgtttctcaggctaagtcttcgttgccctcacygtctcctcccagtagatggctaatgggactaaagcttctttttgcataggtagactgccctgtggacctgctaatggacacatataccccttggtttgaggtctaggagctgttagtaacccagcagatctaagacgtgcacttgtatgcagctgttgttggttacttgggtccttaatttccagggttataaatcttaagctgatctttaactactctacattttacctaatatttgtcaaaagggagtcatcactgaattaattactgagtgagttataatttatgcatgataatggatctttttctatttttaaggataaagatggttcacagagttatagatttatctgggaaacttggtatctaaaatggagattc

SEQ ID NO: 784871 - DNA, 517 bp, Homo sapiens
agggcccaagggctgtttagtcagtgggtgacggatcctgccaggactgggtctttcccttcaaggcagtagtttcccttcggtcccagagtgtgtctagacatgttgtctgggaactagggcttgaaatagggcctcatgactctgaccagtgccctatcctacwgtggctgagctggtatacaagatgaaaggcaaagtcatccttttcttccctctcctcttgtcaaacagaaggaaaagttctcttctggagctgtgagctgcactgcctggggttgggggaggggtggcataagcactcctttagctgccctggctgatgtctcattggggcatgtgctctccaagtccactagttccgagcccagcacagcactagggcttgaagtccttgcagcctagactgtcattcaagttgatttagggctccagagcacttcagcctgtagtgtgaggctcgccagaactcaagttccaaccaccgggatgggtgatttcccctctggccagggct

SEQ ID NO: 784872 - DNA, 634 bp, Homo sapiens
atcgggagaataaacattaaagaaatgactatgagttctacaaacaggagtgcagggagttacggacatgtgtagttgagggctgttctaggctctaaccttgaagctgcttcctttctcttggtcagaatcagatcttactctaaatcttgtgcttacaatgaagacagacaactcagggcaygcaaagacagagactaagccaaagtttttacctgctcttggctccctgttaatctagtttatcagtatttagttataaatggcactgcttgtgggtctctgctctggctgagacggtcctgcaggtgctgacacactgggggctgattgtggatatcagaggcaggcagcaaaggagtcttgcccccagttggctgatgagctactgcacaaactacctgactcctattctggtgtgtgtgtgtgtgtgtgtgtgtgtgtgtgtgtgtgcactgttgttctggcctgttttattgcttcctgcagcagaagttgtagatccatggaaatgtccagtgacaactctcttgccttgtttgggatactgaagggcaatattcctcttactattatgtaatataaaaggcaagcaagcatgatttctaaaccaaaacaggcttttaatgggaat

SEQ ID NO: 784873 - DNA, 571 bp, Homo sapiens
tagataaaagaaatatatatatacaccatggaatactactcagccataaacaaaaacaaaataataccttttgcaactacttgaatggaactggaggccatttttttttaaattttattttttattacttatttaaaatttctttttcattttttaaaatagagatggagtttcgtcatgttgcccaggctggtctgaaactcctgggcccaagtgatccgcccacctcggcctcccaaagtgctgggattagaggcgtgaggtaccacgcccagtggaggcaattattctaagtgaagtaactcaggaatggaaaactaaatactgtatattctcacttataagtgggagctaatctgtggggacacaaatgcatacagtgtggtataatgggcattggagactcagaaggggggacggtgggaggrcagcgagggatgaaaaactacatatcgggtacaatgtacaccattcaggtgatgggtacactaaaatctcagacttcaccactgaacaattcgtgcatgtaaccaaaagccacctgaactccaaaagctattgaaataaacta

SEQ ID NO: 784874 - DNA, 641 bp, Homo sapiens
cattaagcagtcatttcccatttaccatttcctcaagcctctagaaacagtctttctgtctttatggatttatctattctgtacgtttcatgttaatggaatcatgtactatgtgaccttttgaatctgacttctttcacttaacayactgtttttgagcttcattcatgttgtagcatgcataagttcttaagtcctctttatggttcaatgatttcgcattggatgactatcacattttgcttattccctcattagttgatggagattttggttgtttccacttttgggctattgtaatgctgttatatgaatttatgtaaaagtatttgtttggaaatctgcttttaattctttcgtgtgtatatctaggagtggaattgctgagtcatatgggaattctatgtttaactttttagggaaataccaaagaggatggctagaatacacagggtggcaatgtactgagagaaaagagctccacagaaataaaactttggaaatgtgaaagagtccctttgagtcttcagctaagtactaatcagcacatgcactggagaaaactacttaaggattagaggtaacagcacctggtgctcacacagctctgggaattgttcttgttcccaccacccacattg

SEQ ID NO: 784875 - DNA, 641 bp, Homo sapiens
cattaagcagtcatttcccatttaccatttcctcaagcctctagaaacagtctttctgtctttatggatttatctattctgtacgtttcatgttaatggaatcatgtactatgtgaccttttgaatctgacttctttcacttaacatactgtttttgagcttcattcatgttgtagcatgcrtaagttcttaagtcctctttatggttcaatgatttcgcattggatgactatcacattttgcttattccctcattagttgatggagattttggttgtttccacttttgggctattgtaatgctgttatatgaatttatgtaaaagtatttgtttggaaatctgcttttaattctttcgtgtgtatatctaggagtggaattgctgagtcatatgggaattctatgtttaactttttagggaaataccaaagaggatggctagaatacacagggtggcaatgtactgagagaaaagagctccacagaaataaaactttggaaatgtgaaagagtccctttgagtcttcagctaagtactaatcagcacatgcactggagaaaactacttaaggattagaggtaacagcacctggtgctcacacagctctgggaattgttcttgttcccaccacccacattg

SEQ ID NO: 784876 - DNA, 446 bp, Homo sapiens
catttcattatatttataacatctcatttattatttcttcaattcacttcattttcctatatacagtattttttaatgaaggagctatcctataaaaatgattgtttccatctttaaatgtgaaaagatacatttaaaaaattatattctaccaattcctatgtctatttttgatctctggccttacttagctctagctaagaacatcacaaamggtgatgtgacaatgtactaatttattacaccacaatgatggcataagagtgaactatgataaatatttctattatttacacatagaggaattgcaacgtcaagtaatcttatgaatccacaaaatcttacggttaaaatggaaaggtccacaacaaaaagtcatagctcttgagtattattagggtgaccatataataatctaagttaggacaattttgagggtattaaca

SEQ ID NO: 784877 - DNA, 577 bp, Homo sapiens
taagcaagatatatattagttgcaaggagagtacataaaaatattcaatatatttggtttgctactgtaaaaagaaaaatacacatgaattcagtgtactgggaaaataaatcaaatatatttaaagacaggcataagtttctgtaatgaaggtagacatcagctgcaaagtagaaatgattagctcaaataacmtatatgtcaagtagatggacagcaaatttgctgcttttcgttagcttgtgacattagcttgaattctgtgttcatatgtgatgtgtgcttttctacattaccacaattaaccagttgatgattgccatataaaataattttagaagtttttacctctactcaccatagttctttgcccttacttattttaaaattatgacattgtttctttgggaaatttgtaattacaattcatagctttaaatgatttctatgcatctgatgaaaatttcactataagaaattaaactggtaagagttgctttggacttactcaattttaaacaacattaaggcaataatttttgcttttgctaagtgatatgagaaacaatagtctaaa

SEQ ID NO: 784878 - DNA, 618 bp, Homo sapiens
agttgtcagccccactccacaaataagtcacctcatcaaacaacaaccaacactatcgtagctcatacccacaccctaatctcctggagcttaaacatactgcttctcataatacatccctcttccagcagctaaggaaatgaaacctagaggtcacttacaagctatatttttccatatgatttctaccaattgcccrcgaaatctcaagggaaaacagttacagttatagagttgctgaactgccttagatttgctagaaagaaacaaaaatcctgggtaacattttttggggtgtgtgtgttttcctcagctgaaacagaaagcaactaaaattttagaggttctataaacctgtagatttttctttatgtactaaacttggctgtgtatatataaagtagccatacaccttttctctcaccaagtaaaacaataaaattaggaatgattctgtcaaataaatgcagtaatccttccaaaactaaacttacccggttatttcatgagtaaattagacctattaatgtatctaaatagctaaaaacagttatgaactaagaaaagctttgaataaatcttgctgaagtataaaaccctctcttctttcttataaaa

SEQ ID NO: 784879 - DNA, 651 bp, Homo sapiens
cttaaaccagatcaatcttatcacaagattctttccatatttttcatattttaacaataattttagttttaagagtaattttaaacatttgaaaaatgtaatctttgtaaatattaaaggtatgcaagaatataaagcctacaataccactatcaaagaaagcatagaagcatccaaaatttaaaataagtgctaaaactattttaatactatgtgcattggtcagtattctccagagaaacagaactaatagaatgtatatacatagacagagaaagagatttattataaagaattggcccaattatagagactgacaagtcccaaaatctgcagggtgagtcactaaactagagatccaggagagcggatggtgtagttccagtccgaagtctgacamatttgagacctaggaagagctgatgtttcagtttaagtgagaccatcaactgattgaacccagacccaccctcaaaagggagggcaatctgctttattgattctaccaattgaaatgttaatcccattcaaaaacatcctcacagacacaccagaacagtgtttggccaaaatataagtatcctgtggcttagtcaagttgacacataaaattaaccttcgtaccatgttatacacagaatttgttataac

SEQ ID NO: 784880 - DNA, 651 bp, Homo sapiens
cttaaaccagatcaatcttatcacaagattctttccatatttttcatattttaacaataattttagttttaagagtaattttaaacatttgaaaaatgtaatctttgtaaatattaaaggtatgcaagaatataaagcctacaataccactatcaaagaaagcatagaagcatccaaaatttaaaataagtgctaaaactattttaatactatgtgcattggtcagtattctccagagaaacagaactaatagaatgtatatacatagacagagaaagagatttattataaagaattggcccaattatagagactgacaagtcccaaaatctgcagggtgagtcactaaactagagatccaggagagcggatggtgtagttccagtccgaagtctgacacatttgagacctaggaagagctgatgtttcagtttaagtgagaccatcaactgattgaacccagacccaccctcaaaagggagggcaatctgctttattsattctaccaattgaaatgttaatcccattcaaaaacatcctcacagacacaccagaacagtgtttggccaaaatataagtatcctgtggcttagtcaagttgacacataaaattaaccttcgtaccatgttatacacagaatttgttataac

SEQ ID NO: 784881 - DNA, 628 bp, Homo sapiens
tgaactaaacaaaaccatcacacagacctaaacccagtaataaggctcctaatagctttattggtacattttttgaatgcatacttaaagatgcaatactgcagactagttgatattggatttgtcctcaaaaattttaagctactatacttataccaaaaataagaagaaaaagttgcaaataaccatagggcacttgaaattgggtcattgcttggagaatgctttattattggtggattaaagatgaagcagacccctaaytgcagctttaacttccatatgtcagtgtcagcactactcagggataaacttctaaaatgataatacttgatttagtattagactcttaccattcagtgcactttggcacctattattttcttttatcctcacaataagcccaagagggagagcaattttacagatgagcaaatagcagcacagcaggttaagtgaccgacagagggtcacaaagtgattttaatagcagacctgggcccccagacatgcttcagtctcctagtcctgaacttatttcctaggacaagggtgttccctttccaaactcacaggacaagtcacttggaggaagtgatgtcaacatggtgctgttcaagtctttctg

SEQ ID NO: 784882 - DNA, 636 bp, Homo sapiens
catacacatgcatacacataagaaagatagagagtaatgtgtgcaaatagtgaattatacacaaagggaattatctagttaatgtaaacaaaatatttctatcttgactacctacttgaccacctagatgtttcaaatccaagtagattgggacctaaatattaattgtccttttttttyttttcgcctacacttgaaattaaaacctgaccactttgtcatatatagtagaaattatgcccagcttatctcccaagacttctctgggtttcagttatttgttgtcttgagattttattttgattttctttgttaacatttttcatcactatcatctccaaattatatgcttaataaatgtatagtgctgtgtacaattttcaggcaaccagcccaggtgcaaatcagtgctgctactacctttcacaaacgttattcagagaaccgtgcaggagcatttaaatccaaaataatcccaggatgaggatttaattagaaattattggaacaggtatgtttttttccccttaaagaaggaaaagttggttgaaaattatgactaaagagcagcaggagaacaaaggagtattaagagaaaaaatatttacttatcagatggaattcagaacttaaata

SEQ ID NO: 784883 - DNA, 598 bp, Homo sapiens
tatattttatatcccctttgaagcaactaccatacctgaataactttcatattttttgtaaagataggttttcactgtgttgcccaggcaggtatcaaactcctgggctcaagccatctgcctgcctggacctcccaaagtgctaagattacaggcatgagccatcatgactggtatttatatttcttcttctgggaaatgtccattcctgtcatttttccactttttgatggaattgtttatttcttgctgakttgtttgagttccttatagattacatggatactagtcctatgtcagatgcagatgcatagtttgcaaatattttcttctattctgtgggttggctatttactctgattattatttcttttgctgtacaaacctttttagtttaattaggttccatttatttatttttgtttttattccatttgctttttgggtcttagtcataaattctcttctacactgatgtctagaatagttttttccatgatatattctagaatttttatggtctcaaatcttatatttaaggttttgaaacattttgagttgatttttatataaggtgagaggtacggatccagtttca

SEQ ID NO: 784884 - DNA, 567 bp, Homo sapiens
tggatttcacattgaataagataaattttaccaatgctgcccaatttctgtctctaggttgtttgtaaaagagaggatgattacagttttcaaggcaatgtggagtgaaggtagagaaagagttcttcatgaacgacacartatttagcaaggtcataaagaaatatgcccatacacgcatatctatttaagtattcatttacatattgtacgtgcatctctgtatacatgttgtgcccggtgaacatttgtgtgaatataacctgacggaagtcccataaaatgacaaaaaatgaaaaacaatgaaacatgtatatgaatgactactatagatgatacagaaggtagaccattattcacaaataatgtaataaatcctttgcccatcagatgtttctacctagatttggggcctttaaacatcaaccaattatggtaaatgtttaactgtaggagttcaggcagacagccaaattctggtttcaaagctgttgctagttttagcttaaagatttttttttttcatttttaagcaagaacatttctggataccggttgtgctctatt

SEQ ID NO: 784885 - DNA, 641 bp, Homo sapiens
gtgtggtggtgcgcacttgtagtcacagctacttgggaggctgagatggtagaatcacttgaacctgtggatagaggttacagtaagccaagatcgcgcaccactgcactccagcctgtgcaacagagtaagaccctgtctcaaataaatagaaaaacatggagtgaggttkggaaatgacatttaatgcttattgagaacaatatagagcagttttttattttggttttgtcatactttgacctttgtcttttccctttgcttttagattttggctctctatttgacttggagcacgacttaccagatgaattaatcaactctacagaattgggactaaccaatggtggtgatattaatcagcttcagacaagtcttggcatggtacaagatgcagcttctaaacataaacagctgtcagaattgctgcgatctggtagttcccctaacctcaatatgggagttggtggcccaggtcaagtcatggccagccaggcccaacagagcagtcctggattaggtttgataaatagcatggtcaaaagcccaatgacacaggcaggcttgacttctcccaacatggggatgggcactagtggaccaaatcagggtcctacgcagtcaacaggtatgatgaacag

SEQ ID NO: 784886 - DNA, 619 bp, Homo sapiens
tgccaaatattaccaaggaggtgacattcaggaatataatttcctaatatgtagcatcaccatgcttcatcttaatttcatattttataaaagaataaaacaagtgatccagtacattttggaaaattaaagatgtaaaaaagtaaaacaattgaatttaattaattcaacttaattcaattaactcaayttaatttattcaacttgttaggcaaccaagggttttttttaacattaattttactaaataaaatgtcagacctaaataacataatttaattggttgttttctgaaaaatgagtttatttttttctccaaaatagactatttccatatactcttcaacaatattatgggttgttttcaagctgttcatgtccactatttgacttatacaaggaaaacaagacttgctgatgggagaataaaattaaaatatgtataaaacttctcaatgtaaaggatataatacaaacagattatgagcattttatatgggaagaatagaaaaaaaatgaaacaaattgatctgtttaataaatgaagtgtggacttagagggaattaaattaaaatgtttttcaactcctttaaacctgcaagtctaacaattaatata

SEQ ID NO: 784887 - DNA, 619 bp, Homo sapiens
tgccaaatattaccaaggaggtgacattcaggaatataatttcctaatatgtagcatcaccatgcttcatcttaatttcatattttataaaagaataaaacaagtgatccagtacattttggaaaattaaagatgtaaaaaagtaaaacaattgaatttaattaattcaacttaattcaattaactcaatttaatttattcaacttgttaggcaaccaagggttttttttaacattaattttactaaataaaatgtcagacctaaataacataatttaattggttgttttctgaaaaatgagtttatttttttctccaaaatagactatttccatatactcttcaacaatattatgggttgttttcragctgttcatgtccactatttgacttatacaaggaaaacaagacttgctgatgggagaataaaattaaaatatgtataaaacttctcaatgtaaaggatataatacaaacagattatgagcattttatatgggaagaatagaaaaaaaatgaaacaaattgatctgtttaataaatgaagtgtggacttagagggaattaaattaaaatgtttttcaactcctttaaacctgcaagtctaacaattaatata

SEQ ID NO: 784888 - DNA, 548 bp, Homo sapiens
gatgggtattgaagttccactttaacaatattagtgtagctacattaggaggtaacccaaacttttccagttttggtttctttataaactaaaaatggtagtggggagtatgacaaaactatcataaaattgattgctatgactgaatgacaaagtcattacctcaaagaaggtggacattccatattgtgttagttggttttctgctattttaacaaaatgccacaaactatataatttacaaagaacagaagtttgtttggctcacggttctgaaggctgggaagttcaagagcatggtgytggcatctggtagcatcatctcatgtcagaaggcagagtgaacacaagagacagggagacaaaatgagggccaaagtcctgcaatagctaacctactcctgcaataagagaattaatccgttcatgagggcagaactctcgtggacaaatcacctcttaaatgacccacttcttaatattgttataacgacatttttagttgtaaacacatgaagtttgggggacatattcaaaccatggcataa

SEQ ID NO: 784889 - DNA, 600 bp, Homo sapiens
cagttctaagtaattccttaaatttgttaagtcttttcaatctttgggttttcagataagacaaccaaaggactgactgcagtaaatagagcttttgaaggcattatcattctattaacaataaagctgagaggatagatttgttttatgattttcacatgatattacttgtcggtgacctgagctgaatttgaactggcattcttgaaaagaaagattccctttacaaatcctttaacctctaatgcagtcattttaattcacaacaggctagaaccttgcataattgttctcagctcaatacaatctttaacagcttttgatttacatattgggcagctgttttgaataagaagttgtccatcatggatccttttgtcatctgtccaaggaatgtatttataaatggttccaattagagtaatgaaggwttcatgtgaaaacaatgatcaatagccaaccttaaaaacaatataagtcaaagacagatgtaaactgtgaccaggcataacaaagtcaagttatctatggggaatgtataccatcgctcctggaaaacaaatagaaattttcaagtctttgactattggacagatgttg

SEQ ID NO: 784890 - DNA, 608 bp, Homo sapiens
aatgtaaaaacaaaaactacagactcagatacatttagattcgaatcctgatgctgctgcccagtttgtagtaagtccctttcattctgtaggcctcagtttcccgatatatggaatagggacattaatatgaactttgaggggttgttgtgaagattgaatcagacatgcacgtaaagctctgagctctctgcttggcatatagtgggggttagaagttgtgtttcatgattttggtagagaagcttattttgtttttattaaatttttaaaattatgtaggtagttcargaaaaacattctcactgtaaataaaaccgatactaaagataaggctaaggacatgtcaaatgttgatgttcttcctttagaggaaagactgtcgggtgtgtaactttccaaaatttttctattcacttgcataccaaatgttcatctcaaaagagttttatcttataaaatagtagcatgatgtaatactagtttgcttttcccaagcgttttgctatgttggcacacacagaaccaccatgtggccctgtggcgatgtaaatatatctctcctgttctcttccaggcagagctgttggaagcgctcctcaactatt

SEQ ID NO: 784891 - DNA, 564 bp, Homo sapiens
gctgggtgcatttaaaatgcaacacaattctttgaaaggagactatgacatttgagcataaagcctataagaaaaagaaatgtcttccctccccccatgcttcacagagactatacgaatgttccatactcttcatatttagcaacaggagttccttagagatcaaacagcagaaaacaggaggaacttaggccatcaatggacttgtaaaacagataaaactccaaatgtattttaagattccatcttctccacagatgagaaagtgctgaaagggctcttcaacttttctttagcgacatcctctgtgccccarttagaaaaagagttgcaggatggtagtcctccttaaacagcacagactcaatctggaaagagtggcagaaacccctctcccccaacaatgtatccccgaaaataaactgccaagtgcaagagggacaatcttcagaataaataatattctgaaggactgacaaaacagactatttttagacaaagaacacaccaaatactccgaaatttcaggataaccatacatcaagtacttcgtgcaagtaatat

SEQ ID NO: 784892 - DNA, 306 bp, Homo sapiens
cctgcctcagcctcgcagtgctgggattacaggtatgagccaccgtgcccggccaataaagctgctttaaaaagagaggagagaaaaaaaataagaaaaaataaataaataaataaaaagaaaggagatagtgatgccyatctttcaaggttgttggggggattaagtgagaaatcatgtggatggtgcctgagtgcctggaacacagtaggagcttgtagcaggtgcagtgggtgcctccactgtccctcaccctcattggcaacagcacacaccccatttccagctgccagccccttccacctt

SEQ ID NO: 784893 - DNA, 628 bp, Homo sapiens
agcaacacggcaattctgtccagctagagcggtaaaactgttcatgccctttgaccaaaggatttcattccagggaatttctgcttgaagatggattcaactgtagcaaaagttgtatacacaaagatgctcattaactacagctagcactgaaaaagaaaaaggaagaggagaagtgaggaaggaaagggacggaagagggagaaggggaagcagaaacggagagcaggaaggaggaaaggaaggaagatgggagggaaggaaaaatgtcaaacaaaatgaacacatgtaggccagctgcagtggctcatgcctgcaatcccagcactttgggaggccacggcgggaggattgcttgaacccaggaatttgaggctgcagtgagctatgattgtgacactgcactccagcctgggtgatgaaatgagatcctgtctttaaaaataaataaataacacaygtaaaacacccaacagagtgctgagcatttggtgagtgctctacagacagtactatcgccattaattcttcctctctactagcagtaagaccagagcaattgagcatctgtcctactggggggcttcagaaggagggtgagtgtcaggggtcttaatgaggagggtct

SEQ ID NO: 784894 - DNA, 454 bp, Homo sapiens
ttaatatattgatatacaaacaaatatatatttatattgatatataaaagatatatatatgcaccttttatatattgatatattttatctatctatctatctatctatctatctatctatctatctcttttaaaaagaaatacatggcccttcttgtgagaagaagaacatatwtggcaggtgtgagactcaactgcagcacatctcctcatgtaaatctgcagaaatctttgagggaaaaagggaaagatattaatccagatgtgattaggaaccaggatgtaacatacaaactcattcatttattcttgtattcaagtatttagtacatagccttttctatgtgcccatattgcagctgctggtgctagttttataaacgcaaataccattcccattctcaggcttctttcctagtgtgaaggacagacgtaagtgttaccagcacagggag

SEQ ID NO: 784895 - DNA, 519 bp, Homo sapiens
ctttatattttattgcatgtttttccaggcttttcttaggcttgcagtccttgacatgcctggttccaatatgcaaaactttctgttgccatagttcagttataagtcagtcccccattaagaagtttgaaatttcagttactgcattatgttaactgtgagtaattgcataaactacaaactttacttcttgctcttctgtccaccaatccctttgcacataacatatgcacctcaaaaatcagtgaccaaagacaacacctctttcaaagtctgtyggtaattagtcactgcacatttgttattcagctcagacacagacagcaaagcttatagctgtgttgcctctgtgtctcccagtgataaacccatgtaacattttataaaaatgaataattgaaagagagaattgaccaataaagtgaaagatcagcaaaaaaacaaaaagtcgtcatgtcggaagtgcaattcaaatagaatgtaaatggaattatagaagaaatagctaactctgggaac

SEQ ID NO: 784896 - DNA, 491 bp, Homo sapiens
acactgtgctggcccagccgtttctgtaagaagattctagaactctaattttgagtcttatttattttacaaatattagagagaataaaagatagttagctggtttctcattaaggaaatagaattcattatggcaatgaacagaggcaagaacaatctagggttagaatgttgtttctcagctccccaaaatgaatgcttgttaattargtccaatcactcttttctcaatgatatcgtagcacattgtgtgttccttaataaagtctcttgttttgattctgtgacatacagctaatttttactaattgtcagaggtctttatcttcatcatctttatagatgctccacaacgactaacttcttggtttgcccaaagtaagctctcagtaaatgtcagtctgttgactgactcacatagtgattggctgaatatccttttcatgctcctgttgtgggagggtataactctcttattcatcaagtcaatc

SEQ ID NO: 784897 - DNA, 616 bp, Homo sapiens
agatagatgatagatagcttgtttggaggttctagcatgggagcggaggtactcgtatgcccttgactgaagactggtcctcctctgtcggggatggtcatcctctttgacagagcatgcagctttgggagggatgcatatggagcagtgagggaggaaggggacacccgtctaaccagtcagatcagccgartcaaccctggtgatcaatggggtgacagatgccgcagccagattgccctcacatcagatagatgatagatagatagatggatagatagatagatagatgatagatagatagatagatagatagatagatgtaatgatgtaaaatgtaaccactcagaaaaactgagtgaagcctacatgcatgcaacctctctgtgccatctttgtaacctcttgtgaggctataattatttcaaaataaaagggttgaaaaaatactaaggatcttcagccagttcacacagtcaaatctgaaagtgaacagcattgcttggacatgattgtaaattttctactcttgttattgaatagaaaggaagtttcccagagggcacattaggaaggtagagcctgctggatcttcagaaattgtcccctcgtaagc

SEQ ID NO: 784898 - DNA, 477 bp, Homo sapiens
aaagatattaggcattttttttttcacatactgatcgaccagtgcttatattctacataaaacaaaaatgtaagcagttaaaaacaataggtggaaaaaatgttaagggataaaatatagctttgcttgagaagaaaagagataaaaggtgaataacatagagattggtggctattagagtaccaggctgcagctccccagtcacagtggtctgcagcgtcttgagctgcacatgagattgatggtggagagggcatctccagacatgtgctttccctagagcttgctgacggggctttctcagcagcatatmctatttccccatgttggttggattcttaatagtttcaatagtttaatgtgaggtagaaagactcaaataattatattggaggtggaaatggtaaaggaaagacatatattattaatattgtgaagaaagaaaaatcctctaattgaagaggatccccttaactg

SEQ ID NO: 784899 - DNA, 523 bp, Homo sapiens
tttattgatttttagcatattgatggaattgtgcaaccatcaccccaatcaagtttagaatatttccatcacctaaaaaaagaatcttatacccacctcccacctgcagtcatccatcatttcctcttaattccttcagttttagacaaccactaatccactttatgtctctatagatttgccaattctggaagtttcatawaaatggaatcatacaatatgtgagctttttgttttttaaaaataaatagttaattttttaagagatatggtgtctctcaatcacccaggttggggtgcagtggcgcaatcgtagctcacagcaaccttgaactcctgggctcatgcagtcctcctgcctaagcctcccgagtggctgggactgaaggggtgcatcaccacacctggctaacttttaatttttttttgtagagatggggtcttgctatgttgaccaggctggtcttgaactcccggcttcaagagatccttctgcctcagcttcccaaaatgttgggattac

SEQ ID NO: 784900 - DNA, 590 bp, Homo sapiens
agcactcaatgccaacaggagaaagcaggaaagatctaaaatcgacaccctaacatcacaattaaaagaaccacagaagcaggaggaaacaaattcaaaagctagcagaagacaaggaataaccaagatcagaactgaaggagatagagacaggaaaaacccttcaaaaaatcagtgaatccacgagctgattttttgaaaagattaacaaaatagaccactagccggactaataaagaagaaaagagagaagaatcaaagagacacaataaaaaatgataaagaggatatcaccactgatcccacagacatacaaactaccatcagagaatactataaacacctttatgcaaataaactagaaaatctagaagaaatgaataaattcctggaaacgtacaccctcccaaatctaaaccagaaagaagtcgagtccctgaatagaccaataacaaggtctgaaattgaggcagtaattaatagcctaccaaccaaaaaaagycccagaccagacagattcacagtcgaattttaccagaggtaaaaagagcagctggtaccattccttgtgaaactgttccaaacaatag

SEQ ID NO: 784901 - DNA, 686 bp, Homo sapiens
tttattaatatcagggaagaacacctggcctgaaggagaggtccaacaggtcaaagtcaactccagactagattctgattcttgttgctttagtgtaaccaaccatcccagtttacctaggacaggggtaggggggctgttcccaggatgtgaactttcagtgctaaaactaagaaagtattgagcaaactgagatgaaytggtcacccgggatattttctttacatattatgaaggatgaaatgtgaatttttgcaaaggcagtatgtgtgtctgactgtgacatgaatttaagcctacaagttttaaagacaaggagccactcaaactgagtcccatgagatttgtatacattgcaggaaaaaagtcctttcccctagaggaaagggtcttaatctagttgcctaacctgaaaatgaaaccaaccaagaatgaaatgtatctgcaaacaacactgagcaattgtagagatcattgctgccgttagcttgtaacttaagactttgaagtgtgatttatcttagtttgcaaactctaaattggggtgtgattctccagtttccactagtaattaaagagtgaaaagttttgttattttaaatatgaaaaaaatatgagttcgcagtacaaaatacttgttttgtacaaattttgtacttcaacctcctgaacattgctctattttg

SEQ ID NO: 784902 - DNA, 569 bp, Homo sapiens
aacttattttactgatggctcatctcattatttttattatgtttaccataaatttcaagaaagaaacatttctggtccctttccttagtttgggggattctccttagtttatttattattattattcttttaagaaggagtttcgctcttgttgcccaggctggagtgcaatggtgcgatcttggctcatcgcaacctctgcctcctgggttcaagtgattctcctgcctcagcctcctgagtagctggaactacaggcatgcgccaccacgcctggctaatttttgtatttttagtagagacgggatttcaccatcttggccaggctggtcttgaactcctgacctcgtgatccacccgcctcggcctcccaaagtgttgggattacaggtatgagccaccgcgccaggatgatgatgatgatgatkattattattattattattattgagacagtctcactctgttgcccaggctggagtgcagcggtgagatctcggctcactgcaacctctgcctcctgggttcaagtaattcttctgcctcagcctgccgagtatctgagacta

SEQ ID NO: 784903 - DNA, 613 bp, Homo sapiens
tcttatgtcatcacttggtagactggatctgctcttgagaaaataggccggttactttatataaattgaacctaatatctgtccaggatggaagagggtatgctcaggtccttccagtaattcattcttctgaatcatgtggctggacttcttattccagatcttgatgggagatccagagtcccagaaatccctctcacagttgtggcagcaacagagtatagcagctgttcttagagtggctccayggccttcatcgttaataaattttttgtgtgtgtttttgagacagggtctcacactgtcgcccatgctggagtgcagtggtgctctctccactcaacgcaatctcctcctctcgggcccaagtgattctcttgctctagcctcctgagtagctgggattacaggcatgtgccaacagacccggctaatttttgtatttttgtagagactgggtttctccatgttggccaggctgtctggaactcctggtctcatgtgatccccccacctggcggttaattaatttctatagaaatgttaagaaccctggagagtggctaccaaacttcttctaatagatttaccaatctattaataagcacctgtg

SEQ ID NO: 784904 - DNA, 642 bp, Homo sapiens
tccaaaatcactggcagatggcagggaatcctgagatactgataaaagagctgcttcaagactaagggtcttaagggattagtggaaacaaatgaaaagcattacattatgaagagtaagtgacagtaagaaatacatctctcactcaatgtgttacctgaaagcaaaaatccatattaacaccagaaaacagacaaccaactcaacaattaggagattaatatattcctgatcaaatgctaataacagaatcacctaaaattagtttaacaaacatatatttaagataaacaatgtgataaatgaaagaatacaatttaaatgggasaacaataaattataaaacttatctgacttccccttttccaatttggatgccttttggatacgtgcacctccatgttgactgcagcactattcacaatagccaagatatggaatcaaccaaggtgtccaaaaccagattaatgaataaagaaaatgcggtatatatacatcatggaatactaatttagccattaaaaataatgaaaccctgtcattcacagcaacatggatggaactggaagatattatattaagtgaaataagcaaggaacagaagttaaataccacatattctcactcatatgtagaagttta

SEQ ID NO: 784905 - DNA, 614 bp, Homo sapiens
gtcttaaacctattttggcctggggagagtgagctcttttttgaagaacactctatacagccacaaggtggctgtcatcctgtacctaagccagtatcaattccacgtcaaacaattacatgtctcagagtcctggggaagacctagtcttttcaatattagttactatagcaaatcaatagatgtgagacagctgctcatctttctcttgcccaattctcctagaagggtgggcccgctcctattagttatttattcctgcataacaagttattccaaaacttagaagcttaaaacaacaaatgttggttggacacagtrgctcacacctataatcccagcactttgggaggctgaggtgagtgaatcacttgaggttaagagtttgagaccatcttggccaacacagtgaaaactcatctttactaaaaatataaaaattacctggcgtggtggtgcatgcctgtaatcccagctacttgggaggctgaggttgcagggagccgagattgccccactgcactccagcctgggcaacagagcgagattctatctcaaaagtcaggaatttgggagcagttcggctttgtagttaaggttgcactcaggatgtc

SEQ ID NO: 784906 - DNA, 498 bp, Homo sapiens
taaacttgtgaaaagacatgaaaaggcataacacattttataaaaatgatttgtatttaatgatattacatataaaccactaaaatgatagctatagatgtctacatatacaaaatatgcatatatgcatgcatgtataatatatgtatacatgtattatatatagtatagtatattaagcagaaatgtttttcaatatatttccatgtaactaaaccttgtatatatcactgcagatttctttgtcttttcatagacagaaatrttttataacttgacatgagacatctgtcacagagaatgacagtctcatacattttagcctggctccccacctccgccttggattcaagaaaaacattttgatgattcacgcacagtgtaaggataatatgacaataaaatgacttcaggctatgtaagcccataaataaagggaaatcaaacctttcatacaagtaaatccacgcaagaaatcaatttgtaaaattgaaaaaa

SEQ ID NO: 784907 - DNA, 515 bp, Homo sapiens
ccacctccgccttggattcaagaaaaacattttgatgattcacgcacagtgtaaggataatatgacaataaaatgacttcaggctatgtaagcccataaataaagggaaatcaaacctttcatacaagtaaatccacgcaagaaatcaatttgtaaaattgaaaaaacttcttctaaatgggcatgatgggtataagtctctaaaaagaataaacacatccatttgcagtttcattttttaacacattctctcagagtttcactcaacccctccccaaaaaatattttggagttttatggtgcccagcataaatttccttctaatttcttgcttttgaaacattctcaatgtkatgtgatttattagttgataggaatcaatcatttgttttccacagttaaccatatcggctagagcagagtttccccaaccttaatatgcatataaattacctggggacattattaaaatgccaattctgatgcaatagccatgggatgggattccatttctg

SEQ ID NO: 784908 - DNA, 462 bp, Homo sapiens
ttgagttggttgataatgttatttatcattttacaatttgtctatttgttttatcagttacttagatacattaaaatctctagttataatttgacattttcaatttcactctttagttctgtccattcttgctttatgcatttttaagctgtattggactcatacacattaagggttcctatgtcttcctgatgaattaatctgttattgtaaaatgttyttctctatttctggtaacatttcttatcttgaagtctactctgtctgatatacttaaatagccactctcatcttaatatgtttaatgtgacatggcatatcttttcttatcctttgactaaacttatttatgcttctagatgtaaagtatgtctcttgtatagaacatattattaggttttgttttttgtccattctgataatctctgacttttaatccaaatatttaatcaatttatattt

SEQ ID NO: 784909 - DNA, 655 bp, Homo sapiens
gccggtaccccatctgggatcactaatagttgtaatccactggccattgctctttgcctgcccaccttctatcagctgctgttgatatcataggataatcaccaatttattaccgtaacaccctctagttataatgatctttctccatcaatgtttattgcatttcattgcagctattttccattaggaaacacaaacagaaatcaatattgagatcattcactagtaggactgtctcctccccacagctactctttgttaagtgatttttagtaaatctaatataatttgctgtttcataagaactcagtcayaaactcagtcttggagaatgcttaaaatttagaagtaagtcaatgtacttctcagggctgtgtttacagtgtgaagcattactttgtgcgtcccaactgtgcctactgaacttgctaaaagaagatattctcacctctccctttctgaatgaggcaaacccatttaactactttcccatgagttatttccttcatgagaatgtagccaaaagctgcctgggactaaaacaaagcacatcttttccccagcacctgtgtttcaggacattttacaccttgaaatctaccaaattgtgtcaaatctgaacgaatcaccaggatcccaatttggaagtgacatg

SEQ ID NO: 784910 - DNA, 658 bp, Homo sapiens
agggatagatggtctactatatggatccacaatgactccagggaaaagctaatgggatgtccatttcattagtgacttggaaaagcaagaattggtggcaaggtgttctggggacaagacatgtggacagatttctccaaatggtaatggaattgcattagtctgttttcacacttctataaagaaatacccaagactgggtaatttataaaggaaagagatttaattgactcacagttcagcatggctggggaagcctcaggaaacttacaatcatggctgaaggggaagtaggcacatcttacatggcagccagagagagatcgtgggaaggaggaactgtcaaacacttataaaaccatcagatcttgtgagaactcactcactattacaagaacagcatagggkaaattgccctcatccaatcacctcccaccaggttcctccctcaacatgtggggattatagggaatacaattcgagaggagatttgggtgaggacacacagccaaaccgtatcaggaatattagaatattcatatcatatataaaagcctaccagagggcatctactgcagaacagtctcttaatattgatagaggtgatccttagtgtagatgccattcagcctccttgctcagcaaatgctgtgctcat

SEQ ID NO: 784911 - DNA, 658 bp, Homo sapiens
agggatagatggtctactatatggatccacaatgactccagggaaaagctaatgggatgtccatttcattagtgacttggaaaagcaagaattggtggcaaggtgttctggggacaagacatgtggacagatttctccaaatggtaatggaattgcattagtctgttttcacacttctataaagaaatacccaagactgggtaatttataaaggaaagagatttaattgactcacagttcagcatggctggggaagcctcaggaaacttacaatcatggctgaaggggaagtaggcacatcttacatggcagccagagagagatcgtgggaaggaggaactgtcaaacacttataaaaccatcagatcttgtgagaactcactcactattacaagaacagcatagggtaaattgccctcatccaatcacctcccaccaggttcctccctcaacatgtggggattatagggaatamaattcgagaggagatttgggtgaggacacacagccaaaccgtatcaggaatattagaatattcatatcatatataaaagcctaccagagggcatctactgcagaacagtctcttaatattgatagaggtgatccttagtgtagatgccattcagcctccttgctcagcaaatgctgtgctcat

SEQ ID NO: 784912 - DNA, 634 bp, Homo sapiens
gaggcctcacagtcatgatggaaggtggaaggcacatctcacatggcagccaacaagatggcttgtgcagggaaacccccgtttttaaaaccatcatatctcatgagactcattcactatcaagagaacagctcatgaaagacccgccccccacaattcaatcacctcccaccaggttcctcccatgacacatgggaattgtgggagttacaattcaagatgagatttgggtggggacacagccaaactgaatcatatattaaacgaaaacccctccaccataatctgaatcttgttttagatgattatattcttttcttggtacatgatatgtaaaatctgtattactaggacaatttggctgatttgcttcactaacattgggagggattgaatgctaaaggtctagtaaaatctkgatccttctggttatgggcaaagatttgcaagcaaactcacctggagaagagaggagaccttctgggggcaaacatctccaagtaataaggtcacaggggcaggatgaggaagcggtttatctatctttctaatatgaactttgtccatggagaatagcagaaaatgccacccaaaaaagaacactttggcataaggattattttgagctaaagga

SEQ ID NO: 784913 - DNA, 636 bp, Homo sapiens
tcaaaattcccactttagagatgaggatacagaggcacagaaagttcgataacttggccaggcgccgtggctaacgcctgtaatcccaacactttgggaggctgaggcgggcagatcacttgaggtcaggagttcaagaccagcctggccaacatggtgaaaccccatctctactaaaaaaacaaaaacacaaaaattagccaggcatggtggcacgtgtctgtaatcccagttactcaggaggttgaggcacaagaatcgcttgaacccaggaggtagaggttgctataaggcaaaatagtgccactgcactccagtctaggtgacagagagagactycatctcaaaaaaaaaaaaaaagaaagaaagttcaaaaacttgaccgaaaccacatgatgaaatgcagcattttaactatgaacaacagctgttgtttatttagctcctgctatgtactagaacttcgtgaagcactttatatattttctttttaaaaactgacattaaagccacaacatgaactaggtacaattattctcatcttacaaatgaagaaaccgaagctttgaaatattaagtaatttgcccaaggtctcgcagctaaatagcagtagagccagattttagtgccagatt

SEQ ID NO: 784914 - DNA, 636 bp, Homo sapiens
tcaaaattcccactttagagatgaggatacagaggcacagaaagttcgataacttggccaggcgccgtggctaacgcctgtaatcccaacactttgggaggctgaggcgggcagatcacttgaggtcaggagttcaagaccagcctggccaacatggtgaaaccccatctctactaaaaaaacaaaaacacaaaaattagccaggcatggtggcacgtgtctgtaatcccagttactcaggaggttgaggcacaagaatcgcttgaacccaggaggtagaggttgctataaggcaaaatagtgccactgcactccagtctaggtgacagagagagacttcatctcaaaaaaaaaaaaaaagaaagaaagttcaaaaacttgaccgaaaccacatgatgaaatgcagcattttaactatgaacaacagctgttgtttatttagctcctgctatgtactagaacttygtgaagcactttatatattttctttttaaaaactgacattaaagccacaacatgaactaggtacaattattctcatcttacaaatgaagaaaccgaagctttgaaatattaagtaatttgcccaaggtctcgcagctaaatagcagtagagccagattttagtgccagatt

SEQ ID NO: 784915 - DNA, 636 bp, Homo sapiens
tcaaaattcccactttagagatgaggatacagaggcacagaaagttcgataacttggccaggcgccgtggctaacgcctgtaatcccaacactttgggaggctgaggcgggcagatcacttgaggtcaggagttcaagaccagcctggccaacatggtgaaaccccatctctactaaaaaaacaaaaacacaaaaattagccaggcatggtggcacgtgtctgtaatcccagttactcaggaggttgaggcacaagaatcgcttgaacccaggaggtagaggttgctataaggcaaaatagtgccactgcactccagtctaggtgacagagagagacttcatctcaaaaaaaaaaaaaaagaaagaaagttcaaaaacttgaccgaaaccacatgatgaaatgcagcattttaactatgaacaacagctgttgtttatttagctcctgctatgtactagaacttcgtgmagcactttatatattttctttttaaaaactgacattaaagccacaacatgaactaggtacaattattctcatcttacaaatgaagaaaccgaagctttgaaatattaagtaatttgcccaaggtctcgcagctaaatagcagtagagccagattttagtgccagatt

SEQ ID NO: 784916 - DNA, 612 bp, Homo sapiens
ctgggtccagcccttactagctaaatgattttatgtgaggtactccccctccgattcctttgttgcccttccaaaacaccctgccttgcacttagaactttacactgctattgctagtttgtaattatcctcaagtagactaagagctccttaactggcaggcaccatatcaggcttactcacaggcttattctcagtgcctaatatagtgtatggaacacaacagtggctcaacaagcatatgtgggtgaaaaccgaatcactacctcaaaggactgttgtggttatgtgtaaagaacctggtacagtaggccatgatttgagcccttaattaatctcattttccttaatctcacccaatgtctcccctgatcaccacctgagttctgatggaattatggccatccttgactgtagcccaccagatacaacgcatsaacccctctgtctagagaataggatcagcctatctctcatcccacttttagcattggtagaaggctttcttcaagaggaagaaccatcctgactgagccaagatgctgctctctaaccagtctgttctttcccatgccccatccaacagccaaggctactttgagtcaatgccag

SEQ ID NO: 784917 - DNA, 629 bp, Homo sapiens
tttattgttgttttgttatttttattgttttttttaaaaaaatactttcaatccatggttggttgaacctgagaatgccaaacctgtagatgaggaacctgtagatatggagggtcaactgtacatttttatgacagtggccataattactctaacataactgcacactcctttagggctgaatctatagcaataaatccaccccatagttagaacagtgtttagctratagtatatattcattaaatatatactatgcttctaaactactttttaaaaaccaaacaaacatatgactgtatcagctaacaagtgccggtgctgaaaacatgtccttgaatttgaattcatggactttctgaaaattgactacaaaaacagtgttcaaagtattacagttcctggatttcctgccgtgtaattctcagcacatattgattttgaagctcaaatctttgcaattccctgataatgctattcctcagaataatgaagcaggaaggtctcctatgcccacaattgtgctagttgtgtaggaactgtgattttctttaaccacaggtatctgcatttgctcaggccctcattactgtatatgggatgttatttaacctccaatgaatcttttg

SEQ ID NO: 784918 - DNA, 598 bp, Homo sapiens
gagtcaactggtctaaggtttatgataatggtcacaaacggcagggcatccccatcagccttacaagcttatctcgttggattgcactagttgtgcccaggggtggtgaaaggaaagggtactgaggagctgaggtaggaggaaattttccctgcatcctcctctctcatcatgtcccagcacatgggcctcctgaacaatctcktgtatctacagcttgataatgccaaactaactggtctatgagaatcccgtctatgctcttgctgtgtcacccaggctggagtgtagtggcgtgatcatggctcactgatgccttgacctcctggactcaagcgatcctcacacctcagccttctcatgccagattctttttctttactttttctctctcccttttttgtttgcttgtttgtttattgtttgtttgttagagacagggtctccttatgtttcccagactggtctcaaactcctgagctcaagccatcctcctgcctccacctcccaaagtgttcacattacaggcagagccaccacacccagctactatcactatttacttactcctgaattattcccaaactatctcccaaat

SEQ ID NO: 784919 - DNA, 539 bp, Homo sapiens
gcaactcttggtgggcccctagatagcttcaggatgggagctgtcgccagaaagaccaagtcttaactagaagcttggaactctcaatcccacctccaacttccagggaggggataggggatggagattgagttaatcaccattaattccagtgatgtagtcatggctagataataaaaaccttcataaaaacccctaagtgatgggttttgaggacttttgggtgggtgaatgtattcatgtgccaggagggtggtggaccccaatccataggacaaagrcttctgtagccaggacccttccagccccttccagctctatgtacctcttcatctggctattcatttgtatcgtttataataaattagtcaacatgagttaggtgattccctgagttttatgagcggttcttgcaaattatcaaatctgaaggttggggggaaccttgactttgtatccatgttggaaagaagttcaggtaacttgggggtctggtacttgccactagtatctgaagggaggtcagtcttatgccactg

SEQ ID NO: 784920 - DNA, 539 bp, Homo sapiens
gcaactcttggtgggcccctagatagcttcaggatgggagctgtcgccagaaagaccaagtcttaactagaagcttggaactctcaatcccacctccaacttccagggaggggataggggatggagattgagttaatcaccattaattccagtgatgtagtcatggctagataataaaaaccttcataaaaacccctaagtgatgggttttgaggacttttgggtgggtgaatgtattcatgtgccaggagggtggtggaccccaatccataggacaaagacttctgtasccaggacccttccagccccttccagctctatgtacctcttcatctggctattcatttgtatcgtttataataaattagtcaacatgagttaggtgattccctgagttttatgagcggttcttgcaaattatcaaatctgaaggttggggggaaccttgactttgtatccatgttggaaagaagttcaggtaacttgggggtctggtacttgccactagtatctgaagggaggtcagtcttatgccactg

SEQ ID NO: 784921 - DNA, 523 bp, Homo sapiens
ctgcaaatttgatggaatttatcatgggaaagagaagcttttctgaaacaatgcttaaggtttagaattaaaggcatacaaataaatcttatttttagaaatatgaagccagaaaatataactatttctcaaagagaatttcccttaggcgttaaaasttgatgatatagaaatgacaaagcattataaaaatcttagacattagaagcaggaagagactataaaggttcctgattataaggatgattaaccttcagtaagtactcatcatgggcttgacgtgttgaaagtgctttcatatgaatatctcctttaatatttataagaagggtattaagaaagtagtactattgtccccattgtacagatgaggaaagtaaggcttacagaggataagaaacttgcccaagttcacacagccatcttgaaaggtgctcgcaatggcgcccagagttccagagcccaagttccaggcactttttttggactggctttctaacacaaccccttatttttatcaagt

SEQ ID NO: 784922 - DNA, 518 bp, Homo sapiens
ctgggtggctcacagctgtaatcccagcactttgggaggccgaggcaggtggatcacgaggacaggagttcaagaccagcttggccagcatggtgaaaccccgtctctactaaaaatacaaaaattagcagggcatggtggcacacacctgtagtcccagctacttgggaggctgagacaggagaatcacctgaacccaggaggtggaggttgcagtgagccraaatcatgccattgtactccagcctgggcaacagagtgagactccatctcaaaaaaaaaaaaaaaaaaaatatatatatgtatatatatatatatatatatatatatatatatatatatatatatgacattagataaggatcaaacattttactcaacatcaggttgaatgccttgatggcttataataatcagtaccttcttcttcagagctcagtcttgttagtctttcctaaaacactttgctgcctataatgccctcatggtctgtgttaacttgctcctaagtgaagtca

SEQ ID NO: 784923 - DNA, 645 bp, Homo sapiens
caaatctttccttcctgccatccccatctcaggaaacgtcacctagatgttcaggcaaaaaaccttggacttatctttttcctctctttctctcacattctatatagctctacctcagtagctctttttggcttgaacttcaaaatgcatctcaaatctgagacccttccattactcccaccactggttaaagctcctgtcactattcaccttgaaccttgcaatagctttctagctccgaaccaactgcgttcaygcctcatccctcctgccgtctgtttttccttcagaatccagtgagcctttaaaacttttagccccctcgtgattgttcaaaaccctccactggcttcctaacacaacttagaacaaagccctagacccctgtcgtagtgcacaggacactatctgatatggcctctaccgcctctcttgcttgctccactctgaccacccaggccttctcgctgtcacttgaacatgccaaggaccctcctgtgtcaggggccacttcctttcccagtgccagaattgcttctccctacacatttccccatctcttcatcaatctcagctcaaaatcatccccctagagagctctcccatagctgtctgatctaagatagctcgctccctgctgctgct

SEQ ID NO: 784924 - DNA, 551 bp, Homo sapiens
catgctcatcctcctcagactgaaggtctctgggtcagggccatgtctcttcttcagagtggagttcccaccacctcccctcacctccatattgttctctgccccggggtcccagggaaaacagtaccaagaatggggcctcagtccatagtgctcatcaaatggcccattaagatgtggtgtcctgattctcaggaggggcagctacacttactccatcaccctgcccctccctgggacattcagaataggtccctggacttgargcatcttttcctgcccaaccctatttctctagcccagtccgtcatctgaggatctgtgtgtctgactcagaaacccactctcggtctgcctcatattagacattagagaaatagatcagatattttccccaccctcaaggagctctaagtctcatgaggaagacacgcagatatacaaatattaccaagtggtgggctcggtgtcatgaaagaaacaggtccgaggtagagacatgctgtggaagagagtccctgtaggtggagagtcatgaagggcttcctgtg

SEQ ID NO: 784925 - DNA, 551 bp, Homo sapiens
catgctcatcctcctcagactgaaggtctctgggtcagggccatgtctcttcttcagagtggagttcccaccacctcccctcacctccatattgttctctgccccggggtcccagggaaaacagtaccaagaatggggcctcagtccatagtgctcatcaaatggcccattaagatgtggtgtcctgattctcaggaggggcagctacacttactccatcaccctgcccctccctgggacattcagaataggtccctggacttgaagcatcttttcctgcccaaccctatttctctagcccagtccgtcatctgaggatctgtgtgtctgactcagaaacccactctcggtctgcctcatattagacattagagaaatagatcagatatttkccccaccctcaaggagctctaagtctcatgaggaagacacgcagatatacaaatattaccaagtggtgggctcggtgtcatgaaagaaacaggtccgaggtagagacatgctgtggaagagagtccctgtaggtggagagtcatgaagggcttcctgtg

SEQ ID NO: 784926 - DNA, 592 bp, Homo sapiens
gactgggttgatttctctgctcaaggatccctcaggataaacttgtcatcctcatcaccccaacatgactcctcgtctagcaatccctgccctctttaccacttcagtagggttgcccagagtgagataacatcaccagcagcacctaacttaccgtgtgctaggcatggtgccacacactcacgtgtgttatctcacccagtcctcatggccacactatgatactattttcatacccattttagacatgaacaaactgaagctcagggagatgaaatagcttgcctgaggtcacttggctcacaagtggtaaagctggtggtgtactggtaaatgttgaataatcagctctccaaacaaacaygtacaagcttccatatgtggagtttactaatttctgtgatgctccacagaatttcaagttatcaacatgacatcactgaacttggagttgggaagagatgcccacagctggttcttatgagcaggtaagagcttgcttcagcacgtcatggggcaaacccaagtctgtttgatcctgaccaatcagcattctgtctagattcctaagatctgctattaagtgataaaa

SEQ ID NO: 784927 - DNA, 645 bp, Homo sapiens
caaatctttccttcctgccatccccatctcaggaaacgtcacctagatgttcaggcaaaaaaccttggacttatctttttcctctctttctctcacattctatatagctctacctcagtagctctttttggcttgaacttcaaaatgcatctcaaatctgagacccttccattactcccaccactggytaaagctcctgtcactattcaccttgaaccttgcaatagctttctagctccgaaccaactgcgttcacgcctcatccctcctgccgtctgtttttccttcagaatccagtgagcctttaaaacttttagccccctcgtgattgttcaaaaccctccactggcttcctaacacaacttagaacaaagccctagacccctgtcgtagtgcacaggacactatctgatatggcctctaccgcctctcttgcttgctccactctgaccacccaggccttctcgctgtcacttgaacatgccaaggaccctcctgtgtcaggggccacttcctttcccagtgccagaattgcttctccctacacatttccccatctcttcatcaatctcagctcaaaatcatccccctagagagctctcccatagctgtctgatctaagatagctcgctccctgctgctgct

SEQ ID NO: 784928 - DNA, 581 bp, Homo sapiens
cacttgtcctcaccccaccctcagttcacagccccatcccatggaacaaggacagaacagctatcaagcaagtatcctgtacccagggctgctcccacagagcaggttcccatggagaacccacttaaccctcacaacagcccataggttctgagctccccttcccttcttcactttcctgatgaggaaattgaggcatagagaagttgggccactttctcaaggctattcagctgaaggagtcagggcaggattcaaacccaggcccagctccaggggccttgctgtcagccagctcctcagtatcagaaccactcctattgcaaaggctcccaaacttcaaaagatttgccatctgccaatgctataattattcatgtaacatttttcttgagttagttcayttttttaatataaatttattctaagaatgaacctgaggctgattctcattcaaaagggaaagttagcaagagaagtgcccaaagtccccacacgcatgggggttcaattgagcctttcttcttgtccccagaatggaggacagggccgagggtgggtgtggaatggcgttttccttc

SEQ ID NO: 784929 - DNA, 660 bp, Homo sapiens
atagctggatgctgtttattgctagcctgacagtttcatcacccatttcatctcttttctcagttttacaaatggagcatcaagatacctgctcacatgaaatccatgggactggaagcagtttctctatagcaacatcactcaaatatttggttttttgttttttgtttttttagacagagtcttgttctgtcactcaggctggaatgcagtggcacgatcacagctcactccagcctctgcctcccagtttcaagcgattctggtgcctcagtctccctagtagctgggactacaggtggacgccaccatacccagcyaatttttgtattttttgtagagatggggttttgtcatgtttcccaggctggtctcgtactcctgagctcaagcaatccaccctcctcaggctcccaaagttctgggattacaggtgtgagccactgcacctggcccactcaaatatttgaaccccttcccagttacatgctgcaaactccatttttgctccattatcagttgacaacctaatcaggtcctttttagatttgataaaacaaataacgagaaaacacctgacatgcaaggttatttcttttccagtgtttagagccttatttttgaggaattataaccaaaaaggctttacttagacctatc

SEQ ID NO: 784930 - DNA, 635 bp, Homo sapiens
tatgttccttgaactgaactagataaaagtaaataaatactatgaagatttgtcttgtgccagtatgcttaaaaaggaattttatttcatccttcctgtcatcttgcaacatttccaaatattaatttaaaaatttcataattccartatatattttgcatcaggataaggcatattgtgttgaaaaaattgtcacaattttctttccttttttagagacagagcccactgtgttgcccaggctggcctcaaactcctggggtgaaggaatcctcccacctcagcctcccaagtagctaggactattggtgtgcaccatcaagcccgccatcacaattttctaatccattcccaggctgatataattattgaacctgaaagagtaaatacagataggtgacaaaatcaaaattggaggttaagcttgtcttgtccagtccagatcctgctttcaaacaagatttgggatattgtctcagagaattcccaacaaatatagaatgaaataaaatccatatgagagaaacaaataaagagctgtgggaaagcaaaggaggaggtggtcaggtctgtgagaaagttctgagaacactttcacagagaagataatagtggagcaagaggcatggacccca

SEQ ID NO: 784931 - DNA, 572 bp, Homo sapiens
aatatggtgtggctgtgcttccataaaacttcacttgtggactctaaaatgtaaattttgtgtaattttagtttgtcacaaaatataactcttcttttgactttttcctcagttatttaaaaatgtaaaaatcattcttgactcaggctatataaaaaagaggcaacaggccatagtttgctcttgggccctarcttggcaccccctgaactatatgaaagcttgactctaaaggcaaagaatgtgatagaagctgtgtacctgctgttaatgcaactcacattgcaatcaacacgaaagattaagatctcggccaggtctttcaatcctctttctctgtttttgtgccttacaaggattttcttagataagtttcatgagcatggtagatccaatggtctcaaaagatttatcctgcattctgcatgcacaggtgtttcacacagcaaagcccaggagcacaggtcttgcagcctctggataaccaactcgtctctcaccagtggttcaaaaaagcccatgctatcctcatccaaataaacttatgaaatgctttaccaaatgatttgttc

SEQ ID NO: 784932 - DNA, 639 bp, Homo sapiens
caggtgtgagatagtatctcattgtggttttgatttgcatttctctaatgacaatgatgttgagctttttttcatatacttgttggtagcatgtatgtcttctttggtaaaatgtctgttcatgtcctctgggggcatcttttttataagcgagtttctcaaatatataccagwcatgggaatcctgtgattttgtgtttctcgtccaaactagtgaagccacttgcattaagagaggcccttacctctccaggcccttggcagtcctgcattatccacacattgcccaacccggggccccacagttaggcctgtgctgctgccagggattgctgtgggtggagatggcaagggcctgacagatgcctacgttattgccaccacccccagggcaagtttctccagggattcagcagaggctcagcttgtagcctcaagggctctctggctctacctcctttctgcctggaggatcgtagccctggccctcaaaaggctgaatgtggaggggaatggggccaggcacttttatagtacatcacataggcacaggataaatgttttgagggaatcaggagtaaggaggtagaaagagctttagtgataattgactgtttttcagatcaatgccatgaaata

SEQ ID NO: 784933 - DNA, 590 bp, Homo sapiens
gtaaataaacagaagtcatatttttcaaaattcttgcactttattagaagtattataaaattaattgtaagtagattgtggtacttaataatgaatgttgtaaaccctacagcatacactaaaaataatgtaaaaatgtatatttaaaaagccaatagaggaattcaaaggaatattttataacaacatcagttaaccttaaagaagacagaaaataaggaagacaggaacaaaaawacaggtgagacaaacagaaaagacatagcaagttatagttgggtcttgattttcaaaatctgggctaagaatttccatcttttaatggggagaagtaatctatttataacaaatataattgtcaattaagttgggcttaagtcctattaaaatatatagatttttagcctggataaaaatgtatggccccattatatcctgtccataagagaaaaactttttgttaagaaaatacagattgattgaagcaaaataatggaaaaaattataccatgcattcaataaacataggcaatatggagtgcctatattaataccagaaaaaaatagacttcaatgtaaagagtattatc

SEQ ID NO: 784934 - DNA, 580 bp, Homo sapiens
aaatgtctttgttcataggaaatacacactaaagtagtcagggtgttgaggctttaggttgataatttattctcagatagttcaggaaaaattctttctgctgtttgtgcaacttttgtgtacgttggaaaatttttatacaaaaatcaacttcaaaattgaccatataaatgaataccattgaaatatcatttaaattatcagtagtaacattagatgctagagatagtggagtaatgccttcaaaattctcggggcaactgctgttcatcactgaatcatacgcagatcacctttcaatcaagtgtgagggtaaaacagcaacattttcagatatatgagaactcagagtccccattccctytatcaaaaactggagaatcaaccttatgcaaatgaggcaataaaaaatgcacacagtggtggagagaaacaataaaatgacagtgttctgttggcctaagaagttaaaaagaggggccaaaaagtagcagaatgggagagtgtgcagagatatgtctggaaattactattttccaatgtagatattttaaaataggtgcatgcatttctttactga

SEQ ID NO: 784935 - DNA, 546 bp, Homo sapiens
tagagcttcagcatttggaataggccccaaaaccccctttaatacattcactgaccaaaagtttctcttctctgcatttacaaaatgaacaataagctaatggtatcatttctgccagaaactgcacaagctgaaaatatacatgtttaaaaaaacattttagatacatctgagcaatattgtcaccatttgtaaacatcatggaagacaattattctcatagcaggtctcaatgacagtgaaatggtcagagccagtatacctgaaagttatgaagatgtttgagaaataaggctttagtcaatggcacctactgaaagatttctgagcgtggaagtatatacaactaagaggaattaagaaagatcatgtaataaaatgaggaagaaaatcytttatcacttccccaccagacatttttatcattttatatgtttttcccttatgtagcacttggtaaatttagaattatatatatgtaagtgagtctttgaagaatgccttatttccgcaaataaagtaggagatccacaagggcaagaacat

SEQ ID NO: 784936 - DNA, 575 bp, Homo sapiens
cacagaaagaagacactacaggatccagaaatacttaaataagataatttgtggaaatcttatcccttaaatatcttcagggagaagtatccttagcaacttcttctttctataggcaaatcatggctgggtaggtggtggtcttctgcttccaagaaaccggcaatcaacaactcaagttgcctcacttctcatatacaagtcccagcaagagcctagatgaattcactaatgcacttcatcctcctgccctcttcctggttcaggcaataataatcatagatcgccattgtcaattcttttttgttagacatgatgctttttaacattatttcatctaatgctcacagaatctctatgtggttagaaatactatyactttacaaatgaaagaacgcaaaataattgagggatgtagataactctctcgagataatgcagtaaacaaagggtgatatcattttgctgtgtccccacccaaatctcatcttgaattgtagctcccataattccacgtgttgtaggagggacctggtaggagataattagatcctgggggtggtttcccctatact

SEQ ID NO: 784937 - DNA, 619 bp, Homo sapiens
gccctatagaagaggggcctgactgttaaaataaaaacaaacagaaatcaacgacaacaacagcatcaacaaaaacattcccacaaaaaccctatccaaatgtcagcaacctcaaagatcaaagctagataaacccatgaagatgagaaagaaaactaaaaacacggaaaactcaaaaaaccagagtgcctcttctccaaatgatcataacacctctccagcaaaaactgggaggaggctgagatggataaattgacagaagaagccttcagaaggtgggtaataatgaacttcactgagctaaaggagctaagttctaactcaatgcaaagaagctaagaactatgataaaacattacaggagctgttaaccagaataaccagtttagagaggaacataaatgasctgatggagctgaaaaacacaacaggagaacttcgcaatggagccacaagtatgaatagtcgaataaaccaaggggaggaaagaatttcagagcttgaaggctaccttgctgaaataaaacaggcagacaggattagaaaaaaaaatgaaaaagaacaaacaaaacctctgaaaactatgtgattatgtaaaaagaccaaacctacgactgat

SEQ ID NO: 784938 - DNA, 534 bp, Homo sapiens
aacagaggctgggtctgagccttgctcgagattagctcttcaccaggtctgtgtggtaatcatatcgtagttaccgtaggtcacgctgcaagtgtaatttacagtgaggcatagtcttttccagtgattggaatacttgtgtcaccgatccagggtttctctttcctgagtctgaaatacctgggaaaccagttagaaggtgactgggtagcctaggagtcaaggatcagaaagggtacttcatatatatrtggcagaattggtgcaggtgatcctttgaaaaatgacaagaattgatgaaattttgtttacttcctccaattttttgctgaataacatctcctttctacctgattggagtaggcttgctttctcttacttaatttctataaatttgccattgttttgtctcaagtaaaatacagtgtctttcttgaccactgcccgcccattcaccttatatgcctgccacagtcttggttcatgtaataacctaacagctttggagatggcggtggagaagttaatggtaaa

SEQ ID NO: 784939 - DNA, 588 bp, Homo sapiens
tattatgggctgaattttgaccccctcaaattcatatgttgaagctctaatcctatgtatctcagaatgtgactgtatttgcagatagtgtcttcaaagaggcagttaaattaaaaatgaggtttttagggtgggctctgattcagtaggactggtgtccttgataagaggaggaaatttggacccagacagacacagarggagaccaaaagtgatggtacagggagaagacggccatctacaagccaaggagagaggcctcagaagaaaccaatgctgccaacaccttcatcttagacttctagcctccagaactgtgagaaaatagatttcttttgtttaagccacccagtctgtggtgctttgttatgggagccttataaactaatatacttactaagcaaacaatattagctactataactattatcattattggccaggtgtggtggctcacgtctgtaatcctagcactttgggaggccaaggtgggtggatcacctaaggtcaggagttcgagaccagactggccaacatggcgaaaccccgtctctactaaaaatacaaaaaaattagctgggcgtggtg

SEQ ID NO: 784940 - DNA, 504 bp, Homo sapiens
ctgttttcttactgcttgtgtttgcattccttaggactgtattatgtaagaggatcatacatgctgtctgttaccttgtgccctctgctgccagttgtggccatgtgactgactttgactgatgaagtatgagtggaaggcacttctgccatggcttttacccttctgtaagaaattaagaagagtatatataccggataagtgctacattccagagtagagaatgatgacacttggagaaagaggcagcagtcacagccagtctgcagtaaacaagtcaagtgactgagagaagcctttgggagatgtcagggttatttgctgttatgacagytctaatgagagctgcttgatttgtttggtatacttttgaccatctctttattttaagcctttcggaataggtattttagttgtgtttcttgtactgagcacaaagttgggttttgttttttgagcagatctgaaaatgacgagtatatgattggttcttaactgtcatac

SEQ ID NO: 784941 - DNA, 629 bp, Homo sapiens
gtgaacatttgtgttaaagtttttgtggtggtgtttttagttctcttagttacatacctgggaatagaattgcagttgctggaccatgtggtaagtccatgtttaactttttgaggaactgccagacattttcacagtggctacaccattataccttcccactarcaatgcacagtgttccagtttctccacatcctcaccaatacttgttttggtttttttttttttttttttttaaataatagtcaccctaatgagtgtgaaatgttgtctcattctgtttttgattgttatttccctaatgactagtgatgttgagcatctttttatttgcttattggctatttgtatatctttggagaaatgtctattccagtactttctccggattttaatttggctgtttgttttttggtggtgagttttaggtgttctttatatattctggatattaatcccctattagatatgtgatttgcaagtatttactctcattctgtgggttgtctctggactctgttattaatgtcctttgattcactgaagtctttcatatttttgaagtccagtttgtctattttttctttgtctggcttttgttgttatatagaagaaatcatcgctaaatc

SEQ ID NO: 784942 - DNA, 631 bp, Homo sapiens
aatctaatctgactgaagtccttaaaagaagagatcaggacacagaacacacagatgaagagtgaccacgggaggacacagtgagaaggtggccatctgcaagccaaggagagaggcttcagaagtaatcaaccttgctgacaccttgatcttggacttttagcctcacactgaagccacccagtctgtggtactatattaaggcagcactaccagccaaatataggcagtcaccagtgagcacaaggacaccaaagacatcagacagtgtgggagagttagaggatgagggaggctttgcatcctgcagcgcatcccctctccaggagatgcaaatggatctgtattccactcacccccacccctaggcctgagtcaccttgagcaacggctgacaagttttaaaaaggaagagctccctgagattagatgcaacctcattaaaggmaggccaccctcactgacagcacactcactgcagttggggggtagatggggtgaaggaggtagtcagaggctgccaggggcccaaacattctattaaattctgggttcccttcccagctattgctgtgttacactatgagatcttcgctctcaccttccctgagcaaagacagcctgagaaatg

SEQ ID NO: 784943 - DNA, 605 bp, Homo sapiens
aaacaattcgtaagatgcaacttctccattaaagctgtttaagtccacagtcaattacactgaaacactgattccaagagcatcttaagttaatctggatttattctttctaggtagttctatcacttagtatacttatgtattagtccattttcacactgccataaggaatacctgagactgggtaatttagaaagaaagaggtttaattgattcacagttccgcatggctggggaagcctcaggaaasttaaaatcatggtgaaaggcaaaggggaagcaagcactctcttcactaggtggcaggagggggcagggaacagccagacacttaaaccatcagaacttgtgagaactatcatgagtgcagcataggggaaccacccatcccccatcccccaaatgatccaatatcccaccagttccctcccttgacacgtggggattacaatttgagacaaaatttgggtgggtacacatagccaaaccatatcattctgctcccggcccctcccaagcctcatgtcatcacatttcaaaacacagtcatgccttcccaacagtctcgcaaagtcttaactcatttcggcattaagtcaaaattc

SEQ ID NO: 784944 - DNA, 638 bp, Homo sapiens
agctcaagatggattaaggatttaaaggtaagacctaaaactgaaactacatgaagcaaacatagggaaaacagacaggaccttggtctaggcaaagattttatggttatgacctcaaaagcgcaggcaacaaaaacataaatagataattgggactgtagaaaatgaaagagcttctgtaaaacaaaggaaggattcaacagagtgaagagacaacctgctgaatgggagaaaagatttgtaaactattcagacaagagactaatatctaggaaatacgaggatcccaaacaatttaacagtaaaaaaataatcacattaaaaatggacaaaggacaataatragtatttctcaaaagaagacaaatgaccaacgggtatatgaaaaaatgctcaacatcactaatcattagggaaatgcaaatcaagtcatgatgagccatcatcttgccccagttagaatggctattattaaaaagacaagaaaacaacagatgttgacgaggtgcaacgaaaagggaactcttaatacattgttgtagttcagaatataagtcagtatagccactattgaaaacagtatggagaagatttctcaaaaaactaaacatagaaatagagtatgtgtcagcaatgcc

SEQ ID NO: 784945 - DNA, 531 bp, Homo sapiens
ctgtgatatcacttataattatgtataaaacacagttaactccattttgaagacagtgaagtaagttttccaactatcagcaaaatatacattacattcaaatattatcactgacttaaaaccacatagaaaattttaaactacttatgccattttattctcatttaccatcattagaatggtcaaaatgtttttgccaaggcaaaattctgtgacaagaaacacagatatcaactatagaacacttttytgaatcaaacctaatatctcatgtattccttcatagctgaaataaaattaacaaataccaatagatgtttttaatatatttctttagtctcatgaactcattgtgatgatatgactaggaaaaccatccacaaagtgtctattacatattatttagcattagaacctcatggctgcatttctcattattaatttattaatgtcttgtcaatcattcaaaaatcacttaatgtcactgtataggccaaggatattgttatttcacctgtaattaaaaaaaaa

SEQ ID NO: 784946 - DNA, 507 bp, Homo sapiens
atcttcataaagagaccactatgaacaattttacaccaagaaactgtaatctaaaaacatggttaaattcctagaaacataaaacctaccaaatctgaactgtgtaaaaatggaaaagtctgaatagatcaatacaagtaagggattgagtaagtaatttttaaactctcaacaaagaaaagcaaaagacgaggtgacttcwtaagtgatttctatcaaacattttttaaagaaaattaatgccaatgcttcacgaactctttgaaaaaactgaagtggagggagcacttccaaattcactttataaggtcagcattaccaaagccagaaaaagacatcccaagaaaactgcaactcaatatccttgacagatatagaggcaaaattctcaacaaaattctggcaaattttaacaacacattaaaaggatcatataccatgaccaagtgagatttatccttgggatacaaggatggttcaacatgaaaatcaattagtatgatacac

SEQ ID NO: 784947 - DNA, 667 bp, Homo sapiens
acacatgatgctataagatacacatgtaaatggttaccataatgaaaccataatgaaagaaattaacatatccatcatctcacataatcgttcccccaccctctgaccacgagaagctataatctactcatttagtaaaaattctgaatacaacacactattaactataatcctcatgttttatattagatctttcaacttgtttatcccacatatttgctactttatagactttgacctacatctccccatttcctccttccacccccaacctggtaaccactgttttattctctctatatagttatacacaatggaatattacttggcctttaaaaaggagatcttgggccaggcgtggtggctcatgcctgtaatcccagcactttgggaggccaaggcaggaggatcacaaggtcaagagattgagaccatcctggccaacatggtaaaagccaatcactactamaaattcaaaaattagtttggcttggtggtgtgcgcctgtaatcccagctattcaggaggctgaggcaggagaatctcttaaagccaggaagtggaggttgcagtgagccgagattgtgccactgcacatcagcctggtgacagagattccatcaaaaaaaaaaaaaaaaaaaaaaaaaaggagatcttgaccaggtgt

SEQ ID NO: 784948 - DNA, 570 bp, Homo sapiens
caacacacaccgaggaaagccacaatcaatgccagctcatgaaagcatccaggagggaggctgtaccctgaaaagccgcaggggcagagtggcccaagaccacgtgaacccctctcttgcatcagcatgacctggatgtgagatacgcagtcaaaggagatcattttggagctttaagatttgacagccctgctggatttcagacttgcatgtgccctgaagcccctttgttttggacaatttctcctatttggaagggctatatttacccaatgcctgtaaccccactgtatctaggaagtaactaatctgcttttgattttataggctcacaggcagaaggaaattgccttatctmggatgacactttggactgtggagttttgagttaatgagggaatgagtaaagactttggtgcactgttgggaaggcaagattggttttcaaatgtgaggatatgagatttgggaggggccgggggtggaatgatatggtttggctgagtccccacccaaatctcatcttgaattcccacatgttgtcagaggatccctgtgggaggtaattga

SEQ ID NO: 784949 - DNA, 526 bp, Homo sapiens
tctacagttgttcttagtatttctttataatctttcttacttttgtaaggtcagtagtgatgtcccctctcactcttgattttagaaatttgagtcttttttcttttttttcttggacattctaaaagtttgacaatttagtttcaaagaaccaatttttagttttgttgatttttctttattatctttccattctctatttcatttcttactgctctattctttattatttccttttatctgcttatgttgggttcagtttactcttttttccaattttttattttatttatttatttwttttttttttgagatggagttttgctcttgttgcccaggctggagtgcaatggcgtgatctcggttcactgcaacctctgcctcccaggttcaagtgattctcctgcctcagcctcccaagtagctgggattacaggcatgagccaccacatccagcctttttccaatcttttaaagtggaagattatgttactgatttgagatcttttttctttttttaatatag

SEQ ID NO: 784950 - DNA, 611 bp, Homo sapiens
atagtggcttttttaatggggtatcctggttttgttcccttaccacacttggtctggattttctttttccttgtctcttttgaccctctcctgctcaaatttttttctacccgtggctgtttctcctccatatgaagccctgtcctagaagggtaccctggcagatgagttttgagattccctaggggctggactgctctagctgtttcagttcttatgtgagccctsgtgctggagaggataaaactcatagtttcagctgctggtcttaaattgggcctctgtaccttccaacaacagctcattggctattttagggttctcctgttgttaggttcctcagatgctactcggggatccaaagattgaaaactgtgttgctacctccactattttcctaaaatccgttttatttatttatttattttttgagacgaagttttgctcttgttgcccaggctggagtgcggtggcacgatcttggctcactgcaaccgccaccttctgggctcaagcaattctcctgcctccgcctcctgagtagctgggattaaaggtgcacgccaccatgctctgctaattttttgtgtttttagtagagacggggtttc

SEQ ID NO: 784951 - DNA, 611 bp, Homo sapiens
atcttccccctccaaaacaggatccagtctagaatcagatatttgattgttgtatctctttggtctcccttaatctagaacatttctacaacttttgtctcttatgatagtgacatttctagaaaatatagtccctttctgtaaaagaacattattcattttgggttggtctgatgttttctcatgatagactgagcctaaatatccatggggcagaatactaactgaagaggtgctgtgtccttcacagaccgtcacttctggaggccatgatgttcawctgtcctttatctatggtgctaatttggatcatttggtcaaggtattctctagtttctctactatttagttactgctttcccatttgcatttagcatgcaatctgtggggagacactttaaaatcacccaaatatcttggtcttcagttttccactaaagttagcatccattaatgattcttgaccaaaccactcttcattttgccactctagccctctctccactctccatatttaccagccagcacttggcatcatactgtaaaggcaagtcctcctttcccctgtttatatacctatgtattattggtatggactcacagactcctag

SEQ ID NO: 784952 - DNA, 563 bp, Homo sapiens
tttctcctatatttccttttcttttcctttttttttgagacagagtctcactctcgcccaggctagagtgtgatgacgcgatcttggctcactgcaacctccgcctcccaggttcaagcgattctcatgcctcagcctcccaagtagctgggactacaggtctgagccaccatgcctggctaacttttgtatttttagtacagatggggttttgccatgttacccaggctggtctcaaactcctggcctcaagcaatccccctgcctcagcctcccaaagtgctgggattacaggttccgctagattttctaagtatttggcagagagttacatgtaatagycttttgtaattctttttttctttttttaaataagatcttgctctgttgtccaggctggagtgcagtgacgtgatgtcggctcactgcagcctctgcctcctgggttgaagcgattctcatgcctcagcctcccgagtagctgggactacaggcatgcaccaccacacccagctaagttttgtatttttagtagagacagggtttcaccatgttgcccaggc

SEQ ID NO: 784953 - DNA, 539 bp, Homo sapiens
ttgtttgaagcatatggaacatgttctgctacttgagataatgggagtgatagaagcaaggagcctgcaagtctagacacattccagaggtcacgagggtttttatgccctgagccctggattccatccaagccacgagagcttttatgccctgggtttagattgtggtgtggcggggcagccttccaccctttagcacagagcttggtgttccaaaggccacgaggggttttagaccctggaccccagacatgttccaagactcttttacattatgtcagacatgcaagccctgcctcagcttttttcccaacactcagcttttacccaacatacccgcctcggcctcggcctcccaaaagtgctgggattacaggygggacccaccgtgcccagccccacttcagtggtttaaaagagcagatattttctctcacacagttctggaggctggaagtctgcaatccaggtgtcagcagggatatgccttaggggaggagccttccctgcctctcccagcttctggtggcgccaggtgt

SEQ ID NO: 784954 - DNA, 579 bp, Homo sapiens
ctttagccttttttttttttaatcattttccacgttttggttgttaactcccactggtggtccttctaggagggtccagcattcctggttatcataggaagtacggatacgtttttaactagtgggcagctgccacggtttttatcccaaggcaggaggaccacatakttctacactttccaagcccatgttctttccacgtttcaggtactctctaatacaacaggtgagcattggagataaccaacacatgacatatcagtggacagaggtagctgaaaaggttttcacatcatcaagaagtgattttaagcacacaggctcaagatactacttgtatttataaaaagaaaagtcattcccttggatgtcatcccctgtggcataaatcactttcaatctcctctccagatacctctcaggataaagttagccagccacctgtgactctgcctctaattattgtttacttcattgtcaaagtttaagctgataatactgtcattaatgccagttgagaggttctagtgccagactagatggcagtggcagagctgagtgtcagccctttactgaggc

SEQ ID NO: 784955 - DNA, 508 bp, Homo sapiens
tggtttgtagttctccttgaagaggtccttcacatcccttgtaaattggattcctaggtattttcttctctttgaagcaattgtgaatgggagttcattcatgatttggctctgtatttgtctgttattggtttataagaatgcttgtgatttttgcacattgattttgtatcctgagactttgctgaagttgcttatcagcttaaggagattttgggctgagacgatggggttttctatatataaartcatgtcatctgcaaacaggaacaatttgacttcctctttccctaattgaataccatttatttccttctcccgcctgattgccctggccagaacttccaacactatgttgaataggagtggtgagagagggcatccctgtcttgtgccagttttcaaagggaatgcttccagtttttgcacattcagtatgatattggctgtgggtttgtcataaatagctcttattattttgagatacgtcccatcagtacctaattca

SEQ ID NO: 784956 - DNA, 557 bp, Homo sapiens
ctgaggcaaaattttatttttttctctttcttccatttcattgtaaccttttaaaaattgtgataagatatacataatatttttcagtgcaaccattcaaacatgtggcttatccattgatcggtagtcttagatacattcacaatgtcgcgtaactattatcactgtctatrtccccgattttcctatcatctccaaaaacaactttgtaaccatgaaagaataacttctccttctcctcctcctcatgccacctgcagccatggtaacctctattgtactttctgtctctatgaatttgcctgttttaggtagctcatgtaagtgtaatcatatatttgtccttcagtgtctggtgtatttcactaagcatggtttcaaggtccattcatgttctagcatttttcaagatttccttcctttttaaggctgaattggattccattgcatgcatataccacactttatctgttcatctgctaaatagttgatttggttgcctctgtcccttggctgttgtgaataatgctcccaagaccagctgtacaaacagatat

SEQ ID NO: 784957 - DNA, 545 bp, Homo sapiens
tatttagctctttttttagactttacaggaataggaagtgctatgtatcaacatttaatttagaaactatgaatgctttcagatatgccatcttaaatgtttttacttagggtgagggttatttcagtgacatttactttgtttttgggcataattagaggatgaggatctcatataagtgcattttaaaataacgaaagcttgctcatttaagagcctatattttttatttcaaatgtttctgaagtaaatcttttaaaaatgtaattgtccaatcatttccttttgtaaacaaaagtgtttaatagacatataactcttcctaatggtccatggcaggacgcccaagtgaatctttgtgtctgggaaacttagatttgaagagaacyccagttcacccagtccatctccctcatcttcctgcccgatttatagaagaaagatttgaggagctacttccagccaaatgccctgagatttcttcggtactcttctccttccagacatccatgacctggagctttgctttcattatagaagtgctc

SEQ ID NO: 784958 - DNA, 629 bp, Homo sapiens
agtgaaatttgagatatggcattctcatgactatggtgagaaagttgttttgacttgttgttcaatccttgagcaaaaataagcctttcctaaagtctgcatgctgggtccctaacacttgaaggagatccatgggccatgcggcttcagctccatgcagagggtggctgcaggtgctgcaagggcagcttaagttctggacagtcatctctgttcaatggaatttgtaakgtcaaaaagtagacttaaaaccaaagtgatggggctgggggagtggagaggaatagaccctgcctatgtgaagttagtagtggaatagttctctcctgaaggtaaacctagttttcaaattgctttgtttattggttggcttctctacctgcatgaaaagtttatgcgttttagaacgtggcaaaacaagtggagcatgacttatgtttcataatgtacagagctgatttcctgagttccaggacaatgttcagccctttagtcccttgagaagttggttctctctctctcttatccataccctcctgaaacatacactcctctaaaactcatgttatcaccagaagtgtgataccaaagcttagttaatactttgggcacagatatttggctaactt

SEQ ID NO: 784959 - DNA, 348 bp, Homo sapiens
cttcattgtatgttatttctttctttctcctgctgcttttaggatccttttttatccttgatctttggtagtttgattgttaaatgtcttgaggtaggcttctttaggctaaatctgcttggcatgctgtaactttctttaattgactattgatatctttctctagattttgaaagctctctgttrttatccctttaaataaactttctaccccatttctctctctacttcctttttaaggcaaataactcttggatatgcccctttgagactattttctagatttggtagatgtgcttcattctttttgcttttgttttctctgaccttgtattttgtaatagcctg

SEQ ID NO: 784960 - DNA, 620 bp, Homo sapiens
tatgtgtgtatatatatgcttttcatgcttcatataagtgagatgaataagagcaatgaaagaaaagatgggagggaagaattaggtttttaaaattattattattatagtctcgcactacctgtgaaatggcatagtgttatttgaaaatacatttggattcattgaaaatatatattgtaaactttagggcaaccactagaaaaagaaaaaaagcaatataactgatatgctaacaaaggagaagaaatggaaacacatagaatgccaactaaaactacaaaaggcggaaaaggatcagaagacaaaaaaaggaacaaagaacaaggacaacaaatagaaaacagtaccaaggatggcagacattaattcaactatatcaataatcactttgaatgtcaatggtctaaatgcactatttaacagacagagtttgtcagaatgarttaacaaataaggcccacttatgttatctacaagaaaccctgtttatataaaattacatatagattaaaagtaaatggaaaaaatacataccatgttaacattaatgaaaagaaagctggaatatctatatttcagacagaggagacttcaaagtatgaaaagttatcaaagat

SEQ ID NO: 784961 - DNA, 587 bp, Homo sapiens
gttatgctgggaaaagtcagacatcgtctgaagctctgttctttgctctggctctgcaccagtacataattaaaatagcctatctcctaggtttttcactaaaattaaaagttactaagagttaacattgtagtatatgtaattataactactggagaaacagttttacatgcagaggtaaaatttaattttctcttttggacaagattttcatgtaatagtgacagataatgaaagaattttgtttgccttttgagtaaagtgtaaaaaaaatgaagtggggacggagggagagagaacagactcgaattcagttgacctcatgatgtcttaattgggtcttgttctttggaaagtggagtcttcactctatcaaagaatggctttttgaaagttttcagttatcactttggcraaatgaataatctgtgatactgattgttgatatcaggtgttttaaacctttgatatttgacaaacttttcaaaataaaattctaaattcagccttttgatctttaatttttctgagagggctaagagagacatgtgtttgactgatttgttacatgaagattatacagaaag

SEQ ID NO: 784962 - DNA, 647 bp, Homo sapiens
aaagaattttttaatttccatcttactttcattgttgattcaaaggttactatggagaagattatatttttgagagtttctttcggagttgatttccaattttattccactatagtctgagaggatatttgatataattaccttatattgtttatttttgctgtttcagattttttgatgcaggcatttaatgctatgaactttcctcttagcactgcctttgctgtaccctagagattttgataggttgtatcactattatcattcagttcaaagaatttttaaatatccatcttgatttcattgttgacctaacaatcattcaggagcasgttatttaatttccatgcatttgcacggttttgagggttccctttgtagttgatttccaattttattacactgtgctctgatagagtgcttgatatagttttcttaaataaatatcttaaatttattgagacttcttttgtggcttatcatatggtctatcttggagaatgttccatgtgctgatgaatagaatgtatattctgaggttgttggatagagtgttctgtaaatatctgttaagtccatttgttctatggtatagtttaagtccattgtttctttgttgactttctgttttgattgatgacctgcct

SEQ ID NO: 784963 - DNA, 647 bp, Homo sapiens
aaagaattttttaatttccatcttactttcattgttgattcaaaggttactatggagaagattatatttttgagagtttctttcggagttgatttccaattttattccactatagtctgagaggatatttgatataattaccttatattgtttatttttgctgtttcagattttttgatgcaggcatttaatgctatgaactttcctcttagcactgcctttgctgtaccctagagattttgataggttgtatcactattatcattcagttcaaagaatttttaaatatccatcttgatttcattgttgacctaacaatcattcaggagcaggttatttaatttccatgcatttgcacggttttgagggttccctttgtagttgatttccaattttattacactgtgctctgatagagtgcttgatatagttttcttaaataaatatcttaaawttattgagacttcttttgtggcttatcatatggtctatcttggagaatgttccatgtgctgatgaatagaatgtatattctgaggttgttggatagagtgttctgtaaatatctgttaagtccatttgttctatggtatagtttaagtccattgtttctttgttgactttctgttttgattgatgacctgcct

SEQ ID NO: 784964 - DNA, 580 bp, Homo sapiens
aaggtgccagcatgattggttctgttagaggccttcttccaggttgcaaacttgatttctcgtgttctgacatgggagaaagagggcttgctagttctctggcctcttcttataagcacactaatggcatgtatgagggctccacccttgtgaactgaatcacctcccaaaaaccccacctcctaataccatcacattggggttagcatttcaacatacaaatctggggagacagaaaacttcagtccataataccccatctgtatcagaagagcctctatcagacctcctgctgctccccgagaagyagatgaccactgcctcctcctcagtggaaggccccatgtgtaggagagttttctctggtctcctgctctgcacctgtgcctcagggggctctttctcagttctcctttcctaaatccaatttttctcatgagtactagatgaaagctcaggaaaaagagtcaatggataggtacaaggattccttctgcctggaactcccggagcttctaaactcccatgccagcccacatccagcctttaaaaatttgtcataatttcagcagtttttttc

SEQ ID NO: 784965 - DNA, 622 bp, Homo sapiens
tctgtcacagaggcccctggggacagtggacgctggctctgtgggccgaccaaggagcgagaccagctggagcatgtcaggggatggtgggtgtgattggagaggagggcggtcacagcaggtgaggttgtgtccctctcctaatatgcagggccagcctttgaagttcatttcttcagttcaggtaaagtcaatacgattgatttctagacctatagacctatgtgaagtatctcaaccaaagagatgtttatctccaacctaagcatagctctattttatttctccttttgtttttkggaatcattaaagataaaactactcccagccattacaactgtcatgatgacataaaatactgcatcagaaatagtaaccagggtctttatactgttgtttatttcattacttggaatgaaaatgacaatctaaggtgaagagatggacttggtttgtctgaaatagggaaacatctaggtgtagattttcagatctcacaggggacaaatttcttcatctgcagaggaggaaataaacaggatctgtgtagctcttggatgaccagctcaatacatggatgctggaggtgaagggagctctctagggaaagtttgatggctgc

SEQ ID NO: 784966 - DNA, 622 bp, Homo sapiens
tctgtcacagaggcccctggggacagtggacgctggctctgtgggccgaccaaggagcgagaccagctggagcatgtcaggggatggtgggtgtgattggagaggagggcggtcacagcaggtgaggttgtgtccctctcctaatatgcagggccagcctttgaagttcatttcttcagttcaggtaaagtcaatacgattgatttctagacctatagacctatgtgaagtatctcaaccaaagagatgtttatctccaacctaagcatagctctattttatttctccttttgttttttggaatcattaaagataaaactactcccagccattacaactgtcatgatgacataaaatactgcatcagaaatagtaaccagggtctttatactgttgtttatttcattacttggaatgaaaatgacaatctaaggtgaagagatggacttggtttgtctgaaatasggaaacatctaggtgtagattttcagatctcacaggggacaaatttcttcatctgcagaggaggaaataaacaggatctgtgtagctcttggatgaccagctcaatacatggatgctggaggtgaagggagctctctagggaaagtttgatggctgc

SEQ ID NO: 784967 - DNA, 622 bp, Homo sapiens
tccatcataccacctcctcttgctcctaggcgagcctaacttcctttggaaggggatatccagccacctcctggtagatagtatctggcacgacagtcatatgctgcacaggtgtgtggactaggagcaataggccataccctacagcctaggcatggagtaggttgtaccatctagattgtgtaagttcactctgtgatgtttgcacaatgacagaatcacctatggatgcatttctcagaacatatcccttttgtcccctcccccaccccatcctcttcatggccacatgktgtgttttgtcgttactatacctatatcttggagacagcactttttaagcatattttggacttctctctgccaaaaatgcggacaagtggcctctcttttgccctcagtgggtccttactcccagtctgtctagtttctccccttgattgaaagcctccttgagagcagccaccgcatgattttgtttactgttgtgtcctggagtgtaagacacagtgccttacacagggctggtgcccagaaagatttgtgaatgagttggtgaatgaatgaaattatctatttgaacaaaccaaagctggacacacatgggtagccgtatagcctg

SEQ ID NO: 784968 - DNA, 575 bp, Homo sapiens
gattcgacttggaacctattgggaggatatagggtggagacgcgtgattctggatcatgtgaacccaggatgcacgtgaatttcctgcatcacctaaggaggaaagtggggaggctgttgagcgaaagcagcttgaaattcttctygggatccacgttcacgtaattgattccttccttccttgctccttttttgcctttcttttgttgattgattctttctttcattaatcaaaatctgtcttcaaggatctcaccttcagctctgggaagaaagcccattaagcaacctcaaggcagtaaagaaggcaggaagagacaggaatggtcagagtatattgaaaaacgttcctcagtcagtctcccaaatgttcggtgtatgctggaatcacctggggttctctgtaccgatgccgtctcgaagaccaggggatctcaggtggtgatcaggaatctgcatttcaccagcccctgtccccaccccatccccagggcatgcttttggaaatctgctcacaacgtgtccctccccctccttcctgcttttattaactagatgttaaaatgcttggagtc

SEQ ID NO: 784969 - DNA, 653 bp, Homo sapiens
agatccctgccatttcaactccgtcagagacaggcaactcactgacaaaccaagaatataccagcatcagagaaagacagcataaaaagactctctataactaatgaacttatacaaagtcttcacccctacaagcacaagaaccaaattaggctaaaataaacactatggtctgatccttaagagagagaagaaggccgggcacagtggctgatgcctgtaatcccagcactttgggaggctaagggggcagatcacctgaggtcgggagttcatgaccagcttgaccaacatggaaaaaccctgtctttactaaaaatacaaaattagccaggcatgatggcgcatgcctgtaatcccagctactcaagaggctgaggcaggaggatcacttgaacctggaaggtggaggttgcggtgagctgagattgcaccattgcactccagcctgggcaacaagagcgamactccatctcaaaaaaaaagagagagagagagagagaagaaaaagagaaatttaaattaaaaaaatacagttcaatcaaatataaattcaagaaaaatttgaagaaatagtctaccaaaatgagaaggaaacagaaaagtaactctgataagatgacaaaacagggttctataacacctcccaaata

SEQ ID NO: 784970 - DNA, 548 bp, Homo sapiens
catctccagccaactaattgacaaagatgctaagaacacaccttggagaaagaatagtctcttcagtaaatggtaatgagaaaattggacatccacatacagaagaataaatctggacccttatctttcaccatatacaaaaatcagatcaaaacagatgaaagacttaagtgtaagatctgaaattatgaaattatttcaagtaaatataggagaaatgcytcataacattgaattgggcaaggactttttttaataagacctcaaaagcacaggcaactaaagcaaaagtagacaaatgagattacatcaaactaaaaagttctacacagcgaagaaaataatcaacaaagtgaagaaaaaactcagaataggaggaaatatttgcaaactattcatctgacaaaagactaatatgagttggagctccaacaactcatcagcaaataaataaataatctgatcaaaaatgggcaaaaggctgtaatagataattctcaaaagaagatataataatggctgacagatatatagaaaaatgctaacca

SEQ ID NO: 784971 - DNA, 548 bp, Homo sapiens
catctccagccaactaattgacaaagatgctaagaacacaccttggagaaagaatagtctcttcagtaaatggtaatgagaaaattggacatccacatacagaagaataaatctggacccttatctttcaccatatacaaaaatcagatcaaaacagatgaaagacttaagtgtaagatctgaaattatgaaattatttcaagtaaatataggagaaatgcttcataacattgaattgggcaaggactttttttaataagacctcaaaagcacaggcaactaaagcaaaagtagacaaatgagattacawcaaactaaaaagttctacacagcgaagaaaataatcaacaaagtgaagaaaaaactcagaataggaggaaatatttgcaaactattcatctgacaaaagactaatatgagttggagctccaacaactcatcagcaaataaataaataatctgatcaaaaatgggcaaaaggctgtaatagataattctcaaaagaagatataataatggctgacagatatatagaaaaatgctaacca

SEQ ID NO: 784972 - DNA, 552 bp, Homo sapiens
ctgtgctggcagtgagaatttcaagccagtggatcctagcttgctgggctccgtaggggttggatctgctgagctagaccacttagctccatggcttcagccccctttccaggggagtgaatggttctgtctcactggtgttccaggtgccactgcagtataraaaaaaaaactcctgcagctagcttggtgtccgcccaaatggccacccagttttgtgcttgaaacccagagccctggtggtgcaggcacccgagggaatctcctggtctgtgagttgcgaagaccataggaaaagtgtagtatctgggccagaatgcaccattcctcatggcacagtccctcacagcttcccttggctaggcagggaagttttccgaccccttgtgcttccgaggtgaggcaacaccccaccctgcttctgctcgccctccgtgggctgcacccactgtctaaccagtcccaatgagatgagctgggtacctcagttggaaatgcagaaatcacccgccttctgcattgatttcactgggagctgcagactggagctgt

SEQ ID NO: 784973 - DNA, 451 bp, Homo sapiens
tgcagtgaggatgcagtggatggatctgttgtttccataaatttcttcactttttcattcatggcatttatactgctctgacgacctgcaatatcctgttccaacatctaaaataaaccaaatattgcatatcttttattatgatgyttataaataatgtgacagaatttttttaaatgactattcctaacaacataagcttgcacaacctgtgcctaggaaggttaacagttgaaactgaatgacaagtttggtctgtcccttgaggaatgccatcttaaatctctctgagagagtgaagaacagctggctagttggtcgaaagaggcaggaggctgctgctactcagcaacccctagaatctaatggagcctggggattagccatggtcctaattcttaaaagactagacaagactgatctgattaacctcatgtgcagctggctgaaa

SEQ ID NO: 784974 - DNA, 506 bp, Homo sapiens
ttaaagttaagattatgcttctaaaatatacactaattgaatttatttaaaagtttaacagcagacaaaagagaaaaataaacaggctaacctatctcatatgaggataaactttatcttcaattctaaagattcaagatgctaaaaaaaaaaaccctttctcgtccagttttcacttgactaaagccctacatgttaacatcctacattctatattgtagaccaatgaaaagtttgaacaatggtttttaatgtattcatctctttctctctggaaaatgatgttttaaatttatttatcacttattgkccgagaatttgaaaaatattttaattatttctgaatgctttagtcttatacattgtagaacgcttcagtagggacaagctgtgtcctgaaacatctctaacatcttactgacttgtatttggcccatgaaacataatctatacaacaaaataatataattgttctaatgctacaacatgagaaaacatcttgaaaa

SEQ ID NO: 784975 - DNA, 480 bp, Homo sapiens
aaagaaattgataacaataaagactgaaacactcaggtaaagtaaacatttttttacctgcatctcatcaacccaattcaaaagatcctgaacaaatttcatattgatttcttcttctgttaaattttgatccagcaaagaagactttagaaggggttttcggatctgcatcaacttcaragtttgcaatgaatttggctctactcctgaactgaaatttggaactaatcctgatgggaaaccaggtgtataagctggagtgacagatggagtcaggcgggaagtcatccctgatgacaggccagaagtcatactagaagaggttagggaaggtgttaaactctgggtcagccctgaggtcagactagggtgtaaggtctgtgcaaatcctgagtttaaactttgagtgattcctgatatcatgagctttgtctgttctgttgtcagtatgcgtcctttgctgtacacagaagaacattc

SEQ ID NO: 784976 - DNA, 485 bp, Homo sapiens
tttttatttctcccctgcctttgccactattttgattccagaaattttttatttttaagacggagtctcaccctgtcgcccaggctggagtgcagtggcccgatctcggctcactgcaagctctgcctcctgggttcacgatgttctcctgcctcagcctccctagtaactgggactacaggcgcccgccaccacacccggctaattttttgtatttttttagcagaggcagggtttcaccgtgttagccagggtggtctcaatctcatgacckcgtgatccactcgcctcggcctcccaaagcgctgggattacaggcctgagtcaccaggcccagcccccagaaaaattttttaatgaaactgagcttaaataaattatttttaaagttcacttttccagttctaaattgcagatgctgcccttactaatagcaggtgttcaattagcaccaaaggtatataggagttaaaagctaataaatt

SEQ ID NO: 784977 - DNA, 605 bp, Homo sapiens
tgatgttctgcatatatactcctaaattatttttacttttattgttgtattccctaatcaggcattgacatttggttttttgtaactccaaggacaatcaaattgcctctttggtatgaatatatatacccacactgcttggtgctggaacagcattctcccaacccagaaatagagccctgaaggaggaaatagtcacagggaagagtgtgagcaaaagaatcaaggaaacgcatctttacaatctcctgaggacattcccaagctctaccctttcttcctggtggccagattattttggcttttattttaagatgggagaggtcccatygttctggctaatggatagacagtctatgcatattttcccctttaatggaagtaaaatgaaaatcagaaagctcttatgccattcttaagtacaatttttcaggtatccacttaaaacattcacatgacaccaaattacaaggcatttcttttttatctctggtaatcaagcgaagtttgtttgtacttgaatgtttacaatttaaaacactcaaggaatatgagagagcacaagtaacgtatgaatagggaatggcgcctatgagactgacaat

SEQ ID NO: 784978 - DNA, 544 bp, Homo sapiens
gaggtcttccaatgtctcttctactagtgtgggtaattcttacatactataggcaattatcaagtatctttcaggttttcaaagcaagcctttccgtattcagtgttacttagttctttgcttcttggttggcatttttaccagcctggatggtggctcacgccttgtaattccagcattttgagaggcagaagcagaaagaattgcttgaggccaggggttcgagaccagtcctgggcaacaaagcaagaccccatctctacaaaaaattatgagaaaaaaaattagccaggtgtggtggtgcatgattgcagccccagctacttgggaggctgaggcaggaggactgcttgagcccrgggagtagaggttgcagtgagctatgatcatgccactgcactctagcctgggtgacagagtgagaccctgtctcttaaaaagttaaaataaaaaaaatttaaaagatgactgtagcctgctagatgaaatggtcattcaggaaaaattggggagaataaagtttgagttcccatattgtattcag

SEQ ID NO: 784979 - DNA, 504 bp, Homo sapiens
gtgaaacaactcagaagcagaaagtcaaatattgcatgttctcatttataagtggaagctaaatagtatgtgcacatggacatagagtgtgaagggacaggcatttaagacttggaagggtaaggagcagaaaggggaaggtgatgatgagaaattacctaatgagtacaagatacattatttgggtgatggatgctaaaagtcaagacttcaccactaggcaatgtatccatgtaacaaaattgcacttgtgccccttaaatttatacaagagaatgtagtttaggtgctgtgctagggggcaaaaaggacaaatataggtgagatagttgcaggaaaggggaagatatcaaaraagatttttgcaacatttcatgacaacgtgaggtgggaaattaaagaaaaaattgaaagagaaataagcttttctgtattaggctgacttgacccagaggcggcaacaagcacaggccagacccaggaaaagtcttaataatattatct

SEQ ID NO: 784980 - DNA, 450 bp, Homo sapiens
cagcatcagagaaaataatttatcgcctgaaaaaaaaaatcctccgggcttcacctattcagtcccactcccacctaccgtacctcacttgttttatttaactaagtatcctggagattactccataacagtatatatatacatatttctcctttctttctctctctctctytttttttttttttttttttttgagacggagtcttactctgtcaccaggctggagtgcaatggcatgatcttggctcactgcaacctctgcctcccaggttcaagcgattctcctgcctcagcctcctgagtagctgggattacaggcatgcgccaccatgcccagctaagttttgtatttttagtagagacggggtttcactatgttggccaggctggtctcaaaactcctgaccttgtgatccgcctgccttgggctcccaaagtgctaggattaca

SEQ ID NO: 784981 - DNA, 623 bp, Homo sapiens
gacaaagtacccatatccaggatatataaaaactcctatagctaacattacaaatagcccactttaaaagtggacagaaggttcagatagacactgcacagcagaagatattctgatggccaacaaacacttgaaaaagtactcaaccttattagtcatcaaggaaattcaaattaaaaccacaaacaaggtactactrcacgccctccttaatggctaaaaatgaaagaactgacaacactaagtgctgacaagtatgtggctcagccagaagccccaggcacagctgatgggaatgttaagtggtaccaccactttggaaaactggcactttcttataaaactaaacaaactccattcctaggtatgtgcatgagaactgaacatttatgtccacaaaaaagtacttgtaccagaatgttcatagcagctttattcataccagccaaaacctggaaacaatgcaaatatatgtcagcaagggaatggattaacaaattcataccgagcagtgctcttcaatgacaacgtggatgaatctcagaaacattttaaccagcaagagaaaactgcaagagaaaacataccgcctgatttcacttacgctaagttctagaactgac

SEQ ID NO: 784982 - DNA, 623 bp, Homo sapiens
gacaaagtacccatatccaggatatataaaaactcctatagctaacattacaaatagcccactttaaaagtggacagaaggttcagatagacactgcacagcagaagatattctgatggccaacaaacacttgaaaaagtactcaaccttattagtcatcaaggaaattcaaattaaaaccacaaacaaggtactactacacgccctccttaatggctaaaaatgaaagaactgacaacactaagtgctgacaagtatgtggctcagccagaagccccaggcacagctgatgggaatgttaagtggtaccaccactttggaaaactggcactttcttataaaactaaacaaactccattcctaggtatgtgcatgagaactgaacatttatgtccacaaaaaagtacttgtaccagaatgttcatagcagctttattcataccagccaaaacctrgaaacaatgcaaatatatgtcagcaagggaatggattaacaaattcataccgagcagtgctcttcaatgacaacgtggatgaatctcagaaacattttaaccagcaagagaaaactgcaagagaaaacataccgcctgatttcacttacgctaagttctagaactgac

SEQ ID NO: 784983 - DNA, 611 bp, Homo sapiens
tcctgcttccttccgatccaccttccagaatgcagccagagagagctttctagaatgtgcgcttgatcccttcatgcttctgcctgtagcccttcagcagccagctctgccgtgggaccatgggcacatgcccgctgctacctggctgcttacctgcccggccttagtccctgcaccgccccgccctgctgtctctggcctgcaacccaaactgactcctgcctccgaccccacaggacatgagctgcctccttgcctgggtcctgcttctccccagtgcgagtggcctttcttcctcttccctggccgtgttgggagtcctgtcctgrctcctgacctctcattgtctgccacggttgctgtgccttgtcccgggggaggctgtgatggccccaccttgtacagcaggttgggaggtgcaggttcctgctcccacatcacgttggcttgaaggcgggctgtttgctggggatgcaggaaactcccgagtgtccgcggaaacgccatgtgatctaaatggcaccttgaaacataaactgagccattggatttcagttcgaaccagggccttgaactccctggggtggacatggagttcatttggagatttc

SEQ ID NO: 784984 - DNA, 613 bp, Homo sapiens
ttaatagtaatactaaaagaatgactgcaatgttagtaacggtagaaagaatacaggactggaggtcaggagagcaaggctataatcctgtgtctgccactgactgttttttaaaaatcatgttattttttatttttttgagacaggatctcactctgttgtccaggctggagtgcaatggcacaatcgcagctcactgcaatcttgacctcctgggctcaagcaatcctcctacctcagcctccggagtagctgggactacaggtgcacaccatcaggccctgataatttttgtattttttgtagagacggggttttgccatgttacccagggtggtcttgaacccctgggctccagcgatcctcacacctcagcctccyaaatttctgggattacaggcatgagccagtgctcctggcctaaaattactttaatcatgtctctctctctctctctcagattcaatttcttctactcctcctcctttatcatcatcaacctcatcattatcattatcatctactaagcatcagtacaacaatacaaacgcggcatttgtcatcgtgagcacttagtaagcactagcactctctaagcactgtgattatgtgt

SEQ ID NO: 784985 - DNA, 438 bp, Homo sapiens
cccgcctcagcctcccaaagtgctgggatgataggcgtgagccactgcgcacggccaggcctagttcaattctaagtctgcccagcacaaggggaagagggtgcaaataccaccatgataaaagtctccccacagctgcgcatgccgggctkcaggcagacgtagcaccccatgcacaatgagccgttatggcctcttgcctgacagccttatctccgaggaatgccgggggagtcagggccagccagggagagcttgaccaaggggcttgagctcttctgcccccaaggccagctatgctctttgataactagcttggtgcttgtgatgtagctggggcaggtcatggcgacagtgacaatgggctttgtgcaggacttcacagtttgccagactcagtcacacccatcagcttgtttgatcctcacagtcaaaggc

SEQ ID NO: 784986 - DNA, 641 bp, Homo sapiens
ccggcacatagtaggtgttcaatacacaaacatatctctatactaccactactaattcttcttcctgtcattgctatttgtttgcctggtggattcattgtccattggtgcaaaataaattagcacaatacttggaggcttacagcaaaacacatttatgatctcctggtctctgtggggcaggaggctgcaccgtgtcwtcaggtcctttgctctagggtctttttttttttttttttttttttgagacagagtcttgctctgtcacccaggctggagtgcagtggtgtgatcttggcttactgcaacttctgcctcctgggttcaagcgattctcctgtctcatcttcctgagtagctgggattacaggtacatgccaccatgcctggctaatttttgtatttttaatagagacagggtttcaccatgttggccaggctggtcttgaactcctgacctcatgtgatctgcccaccccagcctcccaaagtgctggaattacaggtgtgaaccactgcacccggccaagctctagggtctttgacaaggctacaatcagggtgggagaacagggtctgcaatctcacctgaaagcaccaccggggaaggatctgcttcctaactcacatggttctggcag

SEQ ID NO: 784987 - DNA, 629 bp, Homo sapiens
gttagctacattaatctcatttgtttttcaatagggttaataggctaataaatgaggacaatgccataaacatcacatatatccaaattttttagcaaagcatgtgtcaaggttaaaaggcttccgtacccaaaggactaattaattaatggatcagcggtagcctggaaaaaggtttttgtggtatgtcactggattcagtatcccactctatcctgctaacattttattaaccaaaaatgagttctggaaaaaatgtttgtcccaactactcacaacagcaaagctgggagggataattaccacactggaagacaaatacagcgcttgcatagctttcaacaggtggcaacaaggagcctaaattggctggtgtttcccaaaatgtgttctytggaacactagtcataaaagaagtttcttgggggaaaaggttctagttgcgcaaatgggaaatgctaccctccgcagctagtcaccacttggggatttaagattgcacacaagcatattcagggttctgaaaaatcccacagaaaagataagtggagcctccttttgctgattgaaatgttacagatgcagccgtgttggtggaacgcataaatgagggaggtggcagcgcatag

SEQ ID NO: 784988 - DNA, 629 bp, Homo sapiens
gttagctacattaatctcatttgtttttcaatagggttaataggctaataaatgaggacaatgccataaacatcacatatatccaaattttttagcaaagcatgtgtcaaggttaaaaggcttccgtacccaaaggactaattaattaatggatcagcggtagcctggaaaaaggtttttgtggtatgtcactggattcagtatcccactctatcctgctaacattttattaaccaaaaatgagttctggaaaaaatgtttgtcccaactactcacaacagcaaagctgggagggataattaccacactggaagacaaatacagcgcttgcatagctttcaacaggtggcaacaaggagcctaaattggctggtgtttcccaaaatgtgttctctggaacactagtcataaaagaagtttyttgggggaaaaggttctagttgcgcaaatgggaaatgctaccctccgcagctagtcaccacttggggatttaagattgcacacaagcatattcagggttctgaaaaatcccacagaaaagataagtggagcctccttttgctgattgaaatgttacagatgcagccgtgttggtggaacgcataaatgagggaggtggcagcgcatag

SEQ ID NO: 784989 - DNA, 550 bp, Homo sapiens
cttttaagagctaacattttatgtcttaagccacccatcttttcacattaacatctatgaaatcagtttgcattttttttttttgaggcggagtctcactctgtcacctaggctggagtgcagtggcacaatctcagctcactgcagcctctgcctcccgggttcaagcgattctcctgcctcagccttcaragtagctgaactacaggcgcgtgccaccacacccggctaatttttgtatttttagtagagacggggtttcaccatgttggctaggctggcctagaacccctgacctcaagtgacccgctcgcctcggcctcccaaagtgctgggattacaggcgtgagccaccacgcccagcccagtttgcatattataatcaatggtgagtgatttaataggtagcattttccttcactatttggtaaacgatgcatcttacaatcaacggggtcttagatttgatgaaatatactagttcatttaaactagataatataaaggccactttctgtgggagttttactcttctttctgaacggtgggc

SEQ ID NO: 784990 - DNA, 618 bp, Homo sapiens
acctgatgtaaacttctattgaaagtccccccaccccacaacaggccccggtgtgtgatgtgagattatttctaagacttattaatcctttgtgtctcctcttttgagaattttctgtccagaatcgttgcccttttatcttcctagtgtttttcttgattgccttctatgctgagaattggctggaaaatactaagttatttattttgtattcttcccattctggtatgtaaaaaaaagttctattttgtttaaaataatcttacaggataaaaatcttgggctgggcacagtggctcatgcctataatcccagcactttgggaggctaaggtgggcaacattgcttgagcccaggggttcgaaacmagcctaagcaatatggtgaaaccccgcctatacaaaaaatacaaaaattagccaggcatggtggcacaaggtgtggtgccagctacttgggaggctgaggcaggaggatcatctgagtcaaggaggctgaggttacagtgacccacaattgcaccactgcactccagcctgggcaacagagtgagacaccgtctagaaaaagcagaaacgtctctagtgactatacttgaatcattctcaaacttacttc

SEQ ID NO: 784991 - DNA, 634 bp, Homo sapiens
agaatcaaatcaagaactcaaccctgtttacaatagctgcaaaaaaataataattaggaatatacctaacaaaggaagtaaaagacctctacaaggaaaactacaaaacactgttgaaagaaatcacagatgacatgaacaaatggaaacacactccatgctcatggatgggtagaataagtattatgaaattgaccatactgccaaaagcaatctacaaattcagtgcaattcccatcgaaatgccaccatcattcttcacagaattagaaaaaacaattccaaaatgtatatggagccaaaaaagagcctgcatagccaaagcaagactaagcgaaaagaacagatttggaggcatcaactacctgatttcaaactatacttaaaaggccatcgtcaccaaaacagcatggtactggtataaaaataggcagatagaccaatggaacagaatagagaactcagaaataaactcaaatacwtacagtgaacagatcttcaacaaatcaatgaaaatataaagtggagaaaggacacccttttaaacaaatggtgctgggataattgactagccacatgtagaagaatgaagctggatcgtcatctctcaccttaaaaatcagctcaagatgga

SEQ ID NO: 784992 - DNA, 472 bp, Homo sapiens
ggaatacctcaattatagcagtagcaatgaaataaataagagaaaaatattgtacaaattaatgcagactagaattgtggggtcatgaagctcatttggcttgggggccaagaaagagaaaaaagtaaaacataattccaactttctcagtctgggtaattgaaaggatattgacatcttaaataaacatatagattcacaaacatattgttttatttatttttagaagtaatgatatgttcacagtgaagattgttaattttacttcaaacttsaacttgcaatgccagtggaacattcaggtaaaatattgcataggcctttaaaaattctgtttaaaattctgttatttttcataataccagatatataacacagccttttgtaatatgatttctataaagaattaaaatttagttttatatcatattgttctcttcaggatattacagaaaatttgactatcatttta

SEQ ID NO: 784993 - DNA, 472 bp, Homo sapiens
ggaatacctcaattatagcagtagcaatgaaataaataagagaaaaatattgtacaaattaatgcagactagaattgtggggtcatgaagctcatttggcttgggggccaagaaagagaaaaaagtaaaacataattccaactttctcagtctgggtaattgaaaggatattgacatcttaaataaacatatagattcacaaacatattgttttatttatttttagaagtaatgatatgttcacagtgaagattgttaattttacttcaaacttgaacttgcaatgccagtggaacattcaggtaaaatattgcataggcctttaaamattctgtttaaaattctgttatttttcataataccagatatataacacagccttttgtaatatgatttctataaagaattaaaatttagttttatatcatattgttctcttcaggatattacagaaaatttgactatcatttta

SEQ ID NO: 784994 - DNA, 626 bp, Homo sapiens
tatttcctggctactgctaatgtttattcatgtcgcaagggctctgtagtcagcagatgataagtcttgtcaggactggctctttcccttcattgcagcaggttcccttctggcccagggtgggtctagaaatgccatccagaagctagggcctgggatcagaggttttagsaatctgcttggtgctttattttcctggggctgtactggtatccagactgcaaaacaaagtcctctttacttttccttctattttcctcaagcagaatgaatatcttcccatggccaccgcagctgagatggcagttgccgattggttattgctgatgtttattcaaaacccaatggctctttagtcagcagatggtaaattctgccaggcattggttcttcccttcaggactatgggttcccttctggcccaggtgggtcttgaaatattgtccgtgagctatggccttgaatggggtctttgagctctggttgatgcattattttactgtctgagctagtatcctagttgcaagagaaagtcatctttactcttcccttttctcccagagctgtgaccttcagtgcttaagagttggaggcagagtaatgcatgcattccttttgtcactggg

SEQ ID NO: 784995 - DNA, 626 bp, Homo sapiens
tatttcctggctactgctaatgtttattcatgtcgcaagggctctgtagtcagcagatgataagtcttgtcaggactggctctttcccttcattgcagcaggttcccttctggcccagggtgggtctagaaatgccatccagaagctagggcctgggatcagaggttttagcaatctgcttggtgctttattttcctggggctgtactggtatccagactgcaaaacaaagtcctctttacttttccttctattttcctcaagcagaatgaatatcttcccatggccaccgcagctgagatggcagttgccgattggttattgctgatgtttattcaaaacccaatggctctttagtcagcagatggtaaattctgccaggcattggttyttcccttcaggactatgggttcccttctggcccaggtgggtcttgaaatattgtccgtgagctatggccttgaatggggtctttgagctctggttgatgcattattttactgtctgagctagtatcctagttgcaagagaaagtcatctttactcttcccttttctcccagagctgtgaccttcagtgcttaagagttggaggcagagtaatgcatgcattccttttgtcactggg

SEQ ID NO: 784996 - DNA, 626 bp, Homo sapiens
tatttcctggctactgctaatgtttattcatgtcgcaagggctctgtagtcagcagatgataagtcttgtcaggactggctctttcccttcattgcagcaggttcccttctggcccagggtgggtctagaaatgccatccagaagctagggcctgggatcagaggttttagcaatctgcttggtgctttattttcctggggctgtactggtatccagactgcaaaacaaagtcctctttacttttccttctattttcctcaagcagaatgaatatcttcccatggccaccgcagctgagatggcagttgccgattggttattgctgatgtttattcaaaacccaatggctctttagtcagcagatggtaaattctgccaggcattggttcttcccttcaggactatgggttcccttctggcccaggtgggtcttgaaatrttgtccgtgagctatggccttgaatggggtctttgagctctggttgatgcattattttactgtctgagctagtatcctagttgcaagagaaagtcatctttactcttcccttttctcccagagctgtgaccttcagtgcttaagagttggaggcagagtaatgcatgcattccttttgtcactggg

SEQ ID NO: 784997 - DNA, 569 bp, Homo sapiens
aaacctaaacaaagtagaagggaaatagctaaaataataacaagaataattgaaatagaaaacaaaagttcaataaagaaaagtcaacaaagtcaaaatttagtcatttgaaaagattaatgaaagttatcaactcagtaaaattgttaaaagagagagagaatacaaattttaagctagtatcactacagatactatcaacgtcaaacattgtaaaaggtcgttatgarcgacttcatgcccaagaatttggcaatttaaataaaattttaaaattacttaaaccaaaagtaacttaccaaaattgacagtagaagaaagacaatttcaatagtttgatatttatataggaaagtgtagttcttattcaaaatttttccagaaaggaaacaccaagtccagattttactggtgaattctaccaaataattaaggaagaaataataacttacacaaatactttcaaaacaatgaaaaaggagcacttctatatttcttttataaggttagcacaactttgataccaacactttaaaaagaactcaacagaggccaggcgcggtggctca

SEQ ID NO: 784998 - DNA, 569 bp, Homo sapiens
aaacctaaacaaagtagaagggaaatagctaaaataataacaagaataattgaaatagaaaacaaaagttcaataaagaaaagtcaacaaagtcaaaatttagtcatttgaaaagattaatgaaagttatcaactcagtaaaattgttaaaagagagagagaatacaaattttaagctagtatcactacagatactatcaacgtcaaacattgtaaaaggtcgttatgaacgacttcatgcccaagaatttggcaatttaaataaaattttaaaattacttaaaccaaaagtaacttaccaaaattgacagtagaagaargacaatttcaatagtttgatatttatataggaaagtgtagttcttattcaaaatttttccagaaaggaaacaccaagtccagattttactggtgaattctaccaaataattaaggaagaaataataacttacacaaatactttcaaaacaatgaaaaaggagcacttctatatttcttttataaggttagcacaactttgataccaacactttaaaaagaactcaacagaggccaggcgcggtggctca

SEQ ID NO: 784999 - DNA, 554 bp, Homo sapiens
tataaatagaatagagaagaaaaattatatgatcgtattaattgaggcaaaaaacaaatttgataaaatccaacacccgtttatgataaaaactctcagcaagctaggaatagagagaaattgtgtcaactcaataaagatcatccataaaaatcttccaggtaaatgytttccttctaagattaggaataaagcgtggatgtctgctctcaccacttgtagtaggcaagaaaaagaaataaatgacacatatattgaaaagtaataaatacaaatgtacttattttcagatgtcattatctatgtagaaaactccctggattccacataaaaattcctatagctaatacatgagttcagcaaagtgacaggatacaagattaacacaaaaaattaaatatttttaataaactatgaatatgtgaaaaccaaaattaaaacacaatttaatttataatctctcaaaatatggaaatatctggctgtaaatctaaaaaaaatgtttaggagttgtatgctaaaaacttcaagcacagatgaaagaaataacaaaa

SEQ ID NO: 785000 - DNA, 537 bp, Homo sapiens
ttccttttaacagttacctagcgttttagtttgtcttttcttttataaccttacctccacattagtcactgctaactaatattttttaaaactaatggtcaaaaaatattttttaaatgatcaattcttgagtgttcaatttgttctttcttaaataggttcatgtactgcacatgaataaaattcagagggatccagaaacttgcatggtaaaaaatatgcctactaaatcacattatgttttaactgyatttcaatataattattttcattcgttatcttatatattctgttttgtgcatttacaaacattattctaagaaggcttgcatagccttcaccaaatgtacaaagaggtttatggcaaaaattaaattgattctgttttagtctttttgttttatttttattttttgagatggagtcttactttgtcacccaggctggagcgcaatggcaagatctcagctcactgcaacctctgcctcccaggttcaagcgattcttctgcctcagcctcccgagtagctgggatta

SEQ ID NO: 785001 - DNA, 606 bp, Homo sapiens
agagggttaagagttgtcatcttaatcataaatcctgcaggatgggttcttcaaattttatcaagttttgctgaaatatattttgtgtttaagagaaatacatgaatatcttgtatttgaaagcagcttattaaaagtgtctgtcaagctctttgttaatcaaagccttgttaatctagctgtttaaacgttagataaaacatgcttaataaaatcgttattggtaagaaagttaaaacagttactactgaaacattatcaaagtaaaagcacaccaaagattttacgttgttgttcattttttctcatacttaatatgtttggtttttggatagccctctagagaaattcagaatctataaggaatayagactgaaagataaaagtttgatcctttgtgaaaagtgggatgagacataaatgttttggtgaaaatcaatttcattgaagtaataacaaaggatatttggaatgaaaagcatgcgctgggggagttataggtcttgttttctgagttaaggagattggtgtggaagtgatatggtgttaatgagcatccttaattttcacaggttgaatttagtattagtgacaaacagaggcctg

SEQ ID NO: 785002 - DNA, 621 bp, Homo sapiens
atgtagtagagatgaaataaaattgaaagatgtacctgcctttgttttgtagtgaatggcattactgaggaagctgatcccaccatttactctggcaaagtaattcgccccctgaggagtgttgatccaacacagactgagtaccaaggaatgattgagattgtggaggagggtaaggatcatcactatcaggctgtttgaaatttgccataacttcagatgagcacctataaagttttaaaatatggtgcttattgcagttgtttttaggtttaaaactgaattaaggaaaagtgacctctctcatgcttgctttttatttttataccccttgaaaatgaggtcagtctgggtttaaatagtgaaaacgtgactgctttgtgagcacatgactgatacatgagcaactatgagttatattragatagacttaacaacaaactctgataaccaaagcttttactgttgagtgtatgataatcaaatattcagttccttcattagtatttaaatcagtaagcattcagttctgtatttttgcttcctgtaaaagtttactgtttttttcccccctacactacacatatgtacataatctgtttcttaatagctagagttcta

SEQ ID NO: 785003 - DNA, 495 bp, Homo sapiens
cctcccgggttcaaacgattctgctgcctcagcctcccgagtggctgggattacaagtgcctgccaccatgtccagctaatttttatatttttagtagagacgaggcttcactgtctcgactggtctcgaaattctgatctcatgatttgcccgcctcggcctcccaaagtgctgggattataggtgtaagtcaccactcccagcctacatttttttttaawtgaagtacagcatacatacaataaataatatattcgagcttgatgaattcctacaaactaaatcagtacctgccttgagaaataaaacatcacagtgtccctgcagttccctttgtgcctccttacagtctactcttggccaagggtaatcactacctcaacttctagcagcataaattagttatgcccatttttgtacttcataaaaatgtaaaaatacagtacactttttgtggctggtttctttcagacaacatcaagtttatgagatta

SEQ ID NO: 785004 - DNA, 591 bp, Homo sapiens
aaatgatgcagaaatcttatgcaaacgataaaataaagccaaacaaaatacacaggcatcttttctagtaaaccattttaatgtaaaaagtacctgcttattactacaaaaaggccactttttccaagtacatctcgtatttgataatacaaaaaagccattgtttccctaatgattttattatggttttccttaaagggttaacttgtagcatccatgctgtatggaaayggaaggctgtatattctttctggcatatgctttccaattagttggatgtctgatgagctgcatgtaatcttaataatgctcagatttgatataagccattttagtagataatggctctttgaaggtaagtgaaagggataataactcttggcaatatggttgttcaggaaatttcaattttttcataggaaactgaaaatacttagaggattaaagtgactacaacgcacagatgaaatcccccatttggaagctggcttttctcacagtttctccatgttgactgttttaacaatcgccccacttagctatgaaatcttcatactacagagtgtaacattgtttaaaagatactttagc

SEQ ID NO: 785005 - DNA, 580 bp, Homo sapiens
catggtgtcatttgtaaaaactaattggtctgtgttttggaaagatgatcatcagaacatttacaatgattctttgtgtataatgattctttgtgtgtaatgatgtttctgctttgtattttctattttctttatattaaagatgagtaataaaactattttcagtgacaaaaatctgcctacttctttgaatagggagagtttatcccatttacatttgttttcacaaataatgtgttctgattcattcttcattttttatttctttattttttatattatataaattttcttcctttgaaatagttttttatatagctaatttgtaatttggcatcattcacctttaaaagcttcaagaacatcattgaatatatatgtctaccaattccaagaatacaacatcccaagattaagaactytattgaatatctttgaactagacgacacaataggctcattttatttcctgtcacctaccctttcttcctctctgtttatgttagattttggacaatatttattttcaagttactattttatgttattgtgaagtaggttcactgtgcactggttccca

SEQ ID NO: 785006 - DNA, 576 bp, Homo sapiens
ttgtttgtggcaattattacataagatatacttacatcaaaacaccatgttttacactttaattttcttttctttttttttttttttttttttgagacggagtctcactctgttgcccaggctggagtgcactggcacaagctcagctcactgtaacctctgcctcctgggttcaagcgattctccagcctgggcctcctgagtagctgggattacaggtgtgcaccaccatgcccagctaatttttgtatttttagtaaagatggggtttcaccatgttgaccaggctggtctcgaactcctgaccttgtgatctgcccgcctcggcctcccaaagtgctaggattacaggcgtgagccaccccatctggccaattttctatttttcaatcatatcttaataagcctgggggggaaaggatagtatttaraaagtggcttctatgggctgtttaccactgtctccttctatggaaccaagaatataattgtataatagaagtttaaatgctttggctttgggtgaattggccaaaggtaatgcttgtgaccacaggttagagtgtttcctctaaa

SEQ ID NO: 785007 - DNA, 583 bp, Homo sapiens
cccttcaccttccaccatcactgtaagcttcctgaagtttccccagaagctgagcagatgcccggtgccacgcttcctgtacggcctgcacaaccataagccaatacacttcttttctttataaaattacccaggatcagttatttcttcatagcaatgcaagaatggcctaatgcaaagagcctgtacacattgcttgtatatgcacatatgcattacacaatagttgccaggatatatagggaatttcaraggcctaccttcaagtgggaacattattgaattttatattttatttcttaccattctgagtcattaactgtcagtaattaaggaattctaaatgttataatggataataattttgcttacaccttattcaagaaatgtagagtaggatgatcactcttgtatgtgacattaagtatatgtatcacagccacttaatcaaaactaaaaaaaatctaatctttaaactttaatatgtgaaattacaggctctgaggaaatctagaaaaattacatctctgtttaattcttgaaactctttattcctttaattttaagatgtcactaattttaa

SEQ ID NO: 785008 - DNA, 620 bp, Homo sapiens
ttttacctcagacctcagaatccacctttggaggaaatcagtgagggctcactattactgaccacagtttctcacctgtagttggaaagactttgcatatgctaactacaagtataaccttggaaaaacttgaatgtacagagtcagagttcacccattaagcgcaaagcctcagaagacctggaacaagattctgcttctctgtgatcccaagatgtcagcccttgccccagcaatgttgaattttcttctacttggtcatcaaaaaaggagtgtaaaagaagcgaggtgcactctccatcttcttcctgaagaagagcctcctattcttctctgtcctcataaatgggcattagtgccttggacagttgaggaccactccatcctctccacagcatcccctccactccagagttgggtggcacggattttcaactggctaaccttggyttccacaactgaatttttttcagacccccattcttcatgctggaaatgagattactggacttggcagttttctttcccctcatctttcaccaggaactggactcttcatttcctcaggacagactagctgccacattatccccaccttagttctttctctctgatccctg

SEQ ID NO: 785009 - DNA, 569 bp, Homo sapiens
aacttgtataattgttaaaaccaaatctctgtaatacacaactggccacctaagatttttattttgtgacaattatcttactgtaattttattaactattttctttaaaaagacactttccaaacaaagcagcttaagtattcagatgacatgaagttttttaaaaagtgaattaacttgtggttttcttttcaaattctctataaattctattttaagggaaactattacattaaatcaacatttacagaatattttctctgaatgataaatgttagcaatataaacaatttcacaaaagtcaaaaatcaggtctatgtagagaaaattttaagcacaacacagataacctcgtacactgacttctattatggtaaaacctcacactcataaatggtgataatayttgcaatggaggctaactttcaatgcctgccaggtctcaaccaaacttttcttttttaaagttaaaaggggaaaacaattgctccaaggaatgatggaatgcacatatcctcattcatttcaagttttaaaaaaatacagtactgaccacatggtctgcagag

SEQ ID NO: 785010 - DNA, 523 bp, Homo sapiens
aacagggactgagctggatgagcaggaggacttgtaaagcctcagaggacactgtcctcaggagtgaactaggaaaacacctaaatttacccttcttcattattcaagaagagatataaaggaagaaaaacgtctcctctgggaatgcctcaacgaagccaacagtcacaggtgtttagggctgaaatccacattttgtgagtgcgtatacatacacacatgtgtgtgtgggtgcaaaagcttaaggagtagaaaagggagagacagggaatccaagatgaaaactgattttgaagtggtctgtggtttgtagtgtcacaataaacaaattggtgctgcagggaaaaaaaatcytctctgtaggactatatttgaaattaaaaaaaaaaatctcccaaaagaaagttcagaggaatgcaaacttaaaataaaaaatgactgatcacattaggaaactcgtcaccataaacttgtttcagcaaaaacaagcaacaaactataaatctggatccacaaaaaatac

SEQ ID NO: 785011 - DNA, 523 bp, Homo sapiens
aacagggactgagctggatgagcaggaggacttgtaaagcctcagaggacactgtcctcaggagtgaactaggaaaacacctaaatttacccttcttcattattcaagaagagatataaaggaagaaaaacgtctcctctgggaatgcctcaacgaagccaacagtcacaggtgtttagggctgaaatccacattttgtgagtgcgtatacatacacacatgtgtgtgtgggtgcaaaagcttaaggagtagaaaagggagagacagggaatccaagatgaaaactgattttgaagtggtctgtggtttgtagtgtcacaataaacaaattggtgctgcagggaaaaaaaatcttctctgtaggactatatttgaaattwaaaaaaaaaatctcccaaaagaaagttcagaggaatgcaaacttaaaataaaaaatgactgatcacattaggaaactcgtcaccataaacttgtttcagcaaaaacaagcaacaaactataaatctggatccacaaaaaatac

SEQ ID NO: 785012 - DNA, 523 bp, Homo sapiens
aacagggactgagctggatgagcaggaggacttgtaaagcctcagaggacactgtcctcaggagtgaactaggaaaacacctaaatttacccttcttcattattcaagaagagatataaaggaagaaaaacgtctcctctgggaatgcctcaacgaagccaacagtcacaggtgtttagggctgaaatccacattttgtgagtgcgtatacatacacacatgtgtgtgtgggtgcaaaagcttaaggagtagaaaagggagagacagggaatccaagatgaaaactgattttgaagtggtctgtggtttgtagtgtcacaataaacaaattggtgctgcagggaaaaaaaatcttctctgtaggactatatttgaaattawaaaaaaaaatctcccaaaagaaagttcagaggaatgcaaacttaaaataaaaaatgactgatcacattaggaaactcgtcaccataaacttgtttcagcaaaaacaagcaacaaactataaatctggatccacaaaaaatac

SEQ ID NO: 785013 - DNA, 530 bp, Homo sapiens
gttttttttttaattagctcccttatccttaaatgaataaaatacccaatgttaaaaagtcagcaagttattttcctgttgcatttggattttgactagtatacaatttttcttttctttttttttttttttttttttttttttgagaaagagtttcactcttgtcacccaggctggagtgcaatggtttgatcttggctcattgcaacctccacctcctgggttcaagygattatcatgcctcagtctcctgagtagctgggattacaggcatgcaccaccaagcctagttaatttcttatttttcgtagagatggggttttaccatgtcagccaggctggtctcgaacacctgacctcaggtgatctgcgtgccttagcctctaaaaatgcaggtgtgcaaaaattacagatgtgatgtaaggcaaattttgcaaattgcaaattttgcaaatgcaaaaattacaggtgtgagccagtgcgcccagccatatataacattttaaatctcagctacaaagtgttttcac

SEQ ID NO: 785014 - DNA, 589 bp, Homo sapiens
cacacactcttccttcagttcccgagtgtgcaacctctctcaaaggccttagtctagtcatttctctctgtctggaatgttttcccctcatgctctttacatggtctagctctttcttttcctacagaactcaagtattttttctcttttcttttttcttttttttttttacatttcagtagctttttgggaacaggtcgtggttggttacatgaataagctttttagtggtgattcctgagattttggtgcacccaggaccygagcagtgtacactgtacccagtgtgtagtcttttatccctcaccactcctatccttccccctgaatccacaaagtccattgtatcattcttatgcctttgcatcctcatagcttagctcccacttatgagtgagaacatactatgtttagttttccattcctgagttacttcacttagaataatggtctccaattccatccaggttgctgcaaatgccattattttgcttgtttttaaggctgagtagtattttatggtagatgtatgtgccacaatttctttacccacttgattgatgggcatgtgagctggttccatattttt

SEQ ID NO: 785015 - DNA, 611 bp, Homo sapiens
ttgtttaccatctcggggacttacgcaagttcaagctcctgccttgtccatattacatgcgttataatctctttcctgactttatatgtaatgtaatttctttgacatgtgcttcatagtaacacagttctcatttgaggcagttcgagagccatatttttgtctgcagattatttattccctttgtgtctcacctgttttttaagtcttttatttaaatgtaccccaaggttatcactgatyccgtttatgtatctcagatgctttactttatctcagtttctacctcatgtgtatcaacagtcttgttccttcatcctatgtagctcaccaggttccagttacttttattctttcttcaactacgtctgcttttattttttatactcttgagacagatagattttatgttctttccacagttgttcttatgtttcatctcccccttcaataaatgatttgtttttgctcttagtttcttgtttattttcttttcatttacttgtttttctgtattatgagctctcatatttcacatctcaatttcttcgtattcactgcctcttgtcgcctttctatctgaggagcattatgttgttctgtaatccttc

SEQ ID NO: 785016 - DNA, 653 bp, Homo sapiens
atttcacaggggaaaataagtttggttgtatgtcctgaaggctagatccctcattcagaccttgttggcttctgtctctagttcatcttggcatatcacaatgcaaatgggcaaaataatgatgacagatgggcataggaacaaccatgccaagactccagcctgcacattacatttgaatagctaataagaaatttttgctcaagaacatccatgtgacaatgttagacagtagcctgtatgtttgagttgacctagctcagaggagttaaaaaatatattaaattgtacaatttggactgacatatataataaatctaaatttttcagacaaataatagtgccaggataatcttaaataattaaaggacatgttaaatgatgccatgaaggcagacatttattaacttctacttgatggagatttgcaagatgtgcccaaatgattctgaggtttagattaatgttttgtcaagtagatcaaagagaagcaaatacaaggctgmatcacactgtgagaaacaatggagaagatcctgttttatttatttatatttttggtctggcttgtcactcaaaagttaaaagaaatttttataatgcacatactcagggatcatggcagaaaatttacataccattcacatagaaaa

SEQ ID NO: 785017 - DNA, 605 bp, Homo sapiens
aacaggattgcatggtggcaatggggcaggtcatccctgagtgcctccttatcctgaagaaggctgtgtcccattgcgggtacatagtgtgtgctggaccactgggggtgccgagcgtgtgctggaccacggggggtgcacagcgtgtgctggaccacggggggtgccgagcgtgtgctggaccacggggggtgccgagcgtgtgctggaccactgggggtgcacagtgtgtgctggaccattgggggtgcatagcgtgtgctggacagaccccgggagaacactgcagatactgcgtgtccaggcgctgtgcatcccgtgggttggccacatggcacgrcgcagatccagacagggtggagaggccagtgtagtcctgtctcacacacacgcgcacatgcagggtggggtccggctcctctctgaccaggggtccaggccctgcctcactcagaagccctggggaccctgactggccctccagaccccaatccacagctcccgcttctgctggcctggcagcccccactagggggatggtgctgccctgtctatgcgccaggtggagacgaggagtggggactggagtcacaaagacccttccg

SEQ ID NO: 785018 - DNA, 572 bp, Homo sapiens
aacttttcttgaactgcacaaaagtggattatttcaatgtggttcgttcagttcactgtttttggtttactccctctgaattttgctagtataaaaccagccaacaagaacagcatctgctctctataaggtgaacagaggcctccagatgctgaggagggcagcaagagcagcaccacgctctyggcttctccaatgctagggctttgtcaaggcagaaaggttctggcccactcacgtgctgctgggtggggctgggttcggttttgcctgagagggattgcggggggtgcatgtttactgactattaacctgaaagtacagcacgggtttttctaccttatataataatattattaaaatattctgagcacactttaaacgataaattgataaatgttaattccttaaatactatcaataattcaaagcttacccgttgattcgtttcattgattttaaaatgaatatataaacgtaaacgttgagttggacttgttggcctaaggaggtaaatgaacggatccatgcttcctacatcttctctctgccagcaagctgacacatccagg

SEQ ID NO: 785019 - DNA, 682 bp, Homo sapiens
ttagcctcctgagtattggggatcacaggcatttaccaccacacctggcaaaacatcccatccttatcttgctagtaggattataaatctcttgaagaagctatgtttgtttgttttcccttactggggtactccctaaaaacagatatggtgattcttactgttttaaatttggtaaaatttaaatcccaagggataccccaaatttgcacctaagaatgctmctgtccacatcacacagccccccacatgtgacacatacatcacagagaatgcatctccaaccaccccacatgcatcaccttcttctctacattcggccccgaagcactctttcctgttcaaagtcaaaggtcacctctgtgatgctgcctctgagtcagacgcctgtaggtgtcttctacagaaatctattcataacttctcttagcatattttattataatgatgtttgtctgtgtgtctcaccattagcctatgagttcctagaggatgaaaactgtcttctttgtacatctaacatctagcattagtacatagtaggcgctcagtaaatgcttgttgaagggaggcgtcaatcaatgaaatgcaaagcgcacaagtaggctccagggtcccccagggcagaatggatgtgtgattgcagcactgggattgaagctgcagccactggatctgcagg

SEQ ID NO: 785020 - DNA, 640 bp, Homo sapiens
gttggagtattcgataactgataaaaaaccttgcacagtattgagcaggtaacagacattcagtaaatggcagtaccattccgatgatactttagatgcttgtgtgctatactgttcaagaaccagctggaaaagacctcaggttacctccagggtagggataacatttaccttagagtttttgtttttgtttttttgagatggagtctcgctctatcacccatgctggagtgtggtggcacaatctcactgcaaggtccgcctcccaggttcactccattctcctgcctcagcctcccgagtagctgggactacaggcacccgccaccacgcccagctaattttttgtatttttaagtagagacggggtttcattgtgttagccaggatggtctcgatctcctgacctcgtgatccgcccgcctcggcctcccaaagtgctgggattacaggcataagccaccrcacccagcccttagcgttgtttttcagacagttctggctctatcacccaggctggagtgcagtgacaatcttggctcactgtaacctccgcctcctgggcttaaatgatcctcctacctcagcccccttagtagctgggactataggcacacatcaccacactcggctaattttt

SEQ ID NO: 785021 - DNA, 640 bp, Homo sapiens
gttggagtattcgataactgataaaaaaccttgcacagtattgagcaggtaacagacattcagtaaatggcagtaccattccgatgatactttagatgcttgtgtgctatactgttcaagaaccagctggaaaagacctcaggttacctccagggtagggataacatttaccttagagtttttgtttttgtttttttgagatggagtctcgctctatcacccatgctggagtgtggtggcacaatctcactgcaaggtccgcctcccaggttcactccattctcctgcctcagcctcccgagtagctgggactacaggcacccgccaccacgcccagctaattttttgtatttttaagtagagacggggtttcattgtgttagccaggatggtctcgatctcctgacctcgtgatccgcccgcctcggcctcccaaagtgctgggattacaggcataagccaccgcacccagcccttagmgttgtttttcagacagttctggctctatcacccaggctggagtgcagtgacaatcttggctcactgtaacctccgcctcctgggcttaaatgatcctcctacctcagcccccttagtagctgggactataggcacacatcaccacactcggctaattttt

SEQ ID NO: 785022 - DNA, 691 bp, Homo sapiens
agacagaagtaggcagggactagatcgtgtaatgcatcataggcatggggaggagtgtggattttattctcagcaaatggaaagctaaaggagggtttgagcaggagagtggcaggatctgctgtatgctactgtggctgctgggtgaaagaggagtgacgagagggcagggagaccagttagggatctgctgcggtggaccaggtgagatgatgctggtctgggcgagaatgtcaggaatggaggtgaggagaagtggtttgatttagagtatagtttgcaggaagagctgatgaaatgacctactagtagattgaagtgaaatctaaaggaaagagcattcaaggataattcctgggttttcacctaagcgtaaatagcagtgccattactgaggtggagaagagataaggtgggactcgggaaggaaatcagtaatttggttttggccttgctaagtttgcaatctgagtatagatgtccagtaggcagttgaatacatgcatctggagttcctgggagaggtccaggctgaagatacaaatttggaasctgccagcctgtaaatggtgtgtaatggcatgggaatgaatgagatcatctagggagcaagtgtgggtaaacaaaggaagagtactaaagacaagcctggaaagctcccagcttttagagatttggttaaaagcaagag

SEQ ID NO: 785023 - DNA, 617 bp, Homo sapiens
acagccacagctgtgtcacgctgtaggtgagattagtaaactgagaacacagaggcagcacaaactccctcagtcctgacctgattcagcagatacaaatctgtcaggtggcccaactcgaagtagcttaagcaaaaaaggggagttatttatagcttatctaattggaatgaatagygtggatctggagactcaaagtatacctgcagtttgcatctccgcttctctctttgtgttgatctcattctgcctttcctcaaataactccctccagagggtaggaccaaagaaaggaaaactggcagtaggcagttccagacttaccttgctccagctcaggatctgcaaggaaagaaagggagcgcattcaccgtcttgaaagaactctgattggaccaacttgagcctcctgtccaccatgaggaccagtcattaaagccaaggaataattggccaagcctgggccatgtgcccatttttgtagctgagggatggggcagggtacagggaaggaggcctcatcagaatctaggacacaggcatggaggagcaattctctaaaggaataaagtgtgctgtcatctaaggagagaagaaaggaaggctgggcaaacaaa

SEQ ID NO: 785024 - DNA, 470 bp, Homo sapiens
ctaaccaccttggcccaacatcaataacaacattgccccataagaagccgcgaggcatttcctcagggaaccaccagcgccagggctcaaagaccaagtccagacactaggaactcccctcaggagtgtaaaaccgagttcagaaataagaaaaacaaagtttccagcccaagtctcctccaygggagacaccctcagcgcccctcctcacagctgctaggcctcctcctcgggccggcccctcattaggaactaacagtcccagccatgccagcctccaggcctccttgttaactccttggtttcccttagtgctgccaggagaaaattaggcctcagaaatcctgagcagtactgagaggcagagagcacctaccacagatggttaatggtgtgtacattctatggtttctcttaataaaccaaattaataataattgctgccatttatagagtgcctcttatgcttt

SEQ ID NO: 785025 - DNA, 583 bp, Homo sapiens
gattctaagctaagcataaggagcacagagatgaaaattccagatatgattgtggccttcatggagttcacaaacatgcagccttgtctacgccagtcgtaagggaaagtaaacacaaatgaggctggtagtagttactgagggaatgaaggactgagcccgtgggcttgtggagaagatggacgtaccacgcctgaggacatagctgggagaagccccaggcacttcctcaccaggccttaggcattgaggcagcatgatgtgcttttccaagcattttcaagtctaataccacatggattcctcttttcaatatggggtcagtggtgtgggtctggatgytgtagaaactgaggctcaggtgtattcattacagatgggaaaaccaatggcaaagagtttaatttttcccctgcacattcaacacaagtctacagggcgggggagctgaaaaccaggtctccaaccttatggtcttgctcactcttcgctgccatgtcctcctcccattcccgtcccgcaagatccaactcaaaggtttcttctgctgtgagatcttcccagcttcctcatgcaagttggt

SEQ ID NO: 785026 - DNA, 634 bp, Homo sapiens
catcagtaaactctcggatggtaagtgctataagactctcctccaggtgacaaatccagaatgactttttgaataagagaatctgaaaaactcccaaagcacctcgttgattcgctgccaccgattcttactgaatttcgtcagcttatcctctgaagcttgatgatgcatcagatattgaccctggcatagcagagttaagcaattaataatagctaacaattaagagctcagttgttgtttatttaacaatctaggaaacctggcttctactgagtattaggccatgtagacattagggatctggagattagtaaaccattgtcccttccttcttccaaagctcacagcttctccctatgcataaccctattggctacaccctatcccagacacttctgcctctttgccctctcccwctccaattctctcactctcccttctctctcctactcctttctctctctctctctgaaaacatttaagatatgtgttttatcctcagggtttcaaatgtcacattggcatgtctaggaatagatcattcttcattcattctcctccctctgggaaaactcattcaatccaattactgacatatcttttcagcgttgcggaaaaaaaatctatctgt

SEQ ID NO: 785027 - DNA, 634 bp, Homo sapiens
catcagtaaactctcggatggtaagtgctataagactctcctccaggtgacaaatccagaatgactttttgaataagagaatctgaaaaactcccaaagcacctcgttgattcgctgccaccgattcttactgaatttcgtcagcttatcctctgaagcttgatgatgcatcagatattgaccctggcatagcagagttaagcaattaataatagctaacaattaagagctcagttgttgtttatttaacaatctaggaaacctggcttctactgagtattaggccatgtagacattagggatctggagattagtaaaccattgtcccttccttcttccaaagctcacagcttctccctatgcataaccctattggctacaccctatcccagacacttctgcctctttgccctctccctctccaattctctcactctccyttctctctcctactcctttctctctctctctctgaaaacatttaagatatgtgttttatcctcagggtttcaaatgtcacattggcatgtctaggaatagatcattcttcattcattctcctccctctgggaaaactcattcaatccaattactgacatatcttttcagcgttgcggaaaaaaaatctatctgt

SEQ ID NO: 785028 - DNA, 559 bp, Homo sapiens
ctatgagacacaccagctttccttcccttctgctaagattggaagcttcctgaggcccttaccaggagcagatgccgacaccacactttctgtacagcctgcagaatcgggggccaaaataaaacttcttttcattataaattacccagtctcaggtattcctttatagcaatgcacaaaatggcctaatatgtgcagcaaagagtgtggtgaaaatagcctttccttcgaaggggatagtcatttctatgtgtgctgcctaaaccccgatattcaacatgcagtgcatacgctctctgggtccatcatataccatggcagagaccatttaaactcatgccgtatcatatgagtttaaatgtccatacagttcaatgcagatacactgagatcttctgagagtaattttcctggacgcaggwtgcaagactcatgcacttactcaattaaaaacaacaaccaaaaaaacagcatatatgttcagataatgcaggttatctctgtttcctgtggcttctccgaataaaagttttggttaagacagactcataccctggaa

SEQ ID NO: 785029 - DNA, 655 bp, Homo sapiens
cacctgctaactgaaaagcccttggatcctgaatagtcaacagtgatacccaggtaatacatcaagagccttgagttagcttcttagacttgctagcttcagggaagacttagcacattcccagctgtagtggctatggggtgagtctactactgcttgagaaaagcagagggaaaagtaaagaggactttgtcttgcaccataggtaccagcttggccacagatggtagagaatcaaacaggttcttaaggtcttcaattcctgagcttgaatctttgatggcatttctggacctatcctgggagagaggggagcccactcgcatgaagggtgagtcccaggccagccagcatttactacaagctgactgaagagtccgtgkgaattaagaaaatgtcagcattaggacaccaggtagacttctaaggtttttgactctcatcactggctcccagacaatacctctgggcctaactggggcctggggatactggccaccctgaaaggaaggacacataccttgctggtttgtctgcctactgattgtaaagccccagggtgttgagcgaacatacaaagtagccagagagtggttacagcaggccttgagtgagttccaatacagtgctggcttcaggtctgacccagtgcagt

SEQ ID NO: 785030 - DNA, 602 bp, Homo sapiens
ctatgagctccatgggggagggatgaggcctgtgactgttggctttcttccactttcttggcagcctgtctgacgcagcagaggctcccataatccccctgggaaaataactccattggactggggagaaagagggttcatcatggcggacgggaggcaggactagattgcagctctgactcagatggacagagcagcattcagaggctcacattaagaactctagctccagattgactgcaagacaaaccagcaatcacaagaggacccacagaccctatgaaggaagtggactgcttctacaggatctgggagacaccccaaatactgtgagtgccccaacagcagtactgggaaagggagatcctcctctcctgaagacactmccacactggagaaactgaaagtctgtttataggagaagtttctgacattatctggagctaaatcaatttagagatcagagaaaagtacaggagtagaaggagcagcagaaaggtcctgggagctcgctgggtccccaagcagtaaattcctgcctagtaccagagggatccactgggagaccggacagaggagccaggggtgggggtgggggtggg

SEQ ID NO: 785031 - DNA, 600 bp, Homo sapiens
atgtgtggtgttatttctgcagtgtctgttctgtacaattggtccatgtatctgttttggtaccattaccatgctgttttggttactgtagccttgtagtatagtttgaagtcaggtagggtgatgcctcctgctttgttctttttgcttagtattgtyttgactatacaggctcttttttggttccatataaaatttaaagtagttttttctagttctgttaagaaagtcaatagtagcttgatgggaatagtgttgaatctataaattactttgggctgtatggccatttacacgatattgcttttttcaatccatgagcacggaatgtttttctgtttgtttgtatcctattttttccttgagcagtggtttgtagttatctttgaagaggtccttcatgtccagtgtaagttgtattcctaggtattttgttttctttgtagcaattgcgaatgggagttcactcatgatttggctcactgtttgtctattattaaagtataggaattcttgtgatttttgcactttgttttgtatcctgagactttgttgaagttgtttatcaggttaaggagttttggggcagagacaatgggg

SEQ ID NO: 785032 - DNA, 552 bp, Homo sapiens
ccttcatgataaaaacccttaaaaaattggtatagaaggaatatacctcaatgtaataaaagccatatatgacagttcaacagcttgtatcacactgaattttaaaaaaacaaattttttcctctaagatctggaacaagacaaaaatacccactttcacaactgttattcaacatagccctgggaattctagctacagcaatcaaacaaagaaaaaaataatcatcatctaatttggaaagcaagatgtcaaattatccttgtttgctgatgatataatcttatatttggaaaatttgaaatattatgccaaaaaactattagaactaaaaaaaaaagttaaatagagttgcgagacacaaaatcaacatacgacaatgagtagcattctggatgttaacagtgaacaaactgaagaaaaaaattttaaatagtcctatttacaatagccacaaataaatttaaatacttmggaattaacttaagtaaaaaagtcaaagattgttgtaataaaaactataaaacactgatgaaagaaataaaagaacgcac

SEQ ID NO: 785033 - DNA, 552 bp, Homo sapiens
tacatatgcacctagcaatggagcttccaaatttataaaaccattactactagacctaaaaaatgagatagcaacacaatagtgggggatgtcaatactccactgacagcactagacaggtcatcaagacagaaattcaatgaagaaacaatgaacttaatgtatgccctagaacaaatggacttactagatatttacagaacattctacccaacaaatacagaataaacattctattcctcagcacacagaacattctycaagatagaccatatgataggccacaaaactagtctcaacaaatctaagaaaattaaaattatactaagtactcttttagaccacagttgaataaaattggaaatctactctaaaagaagccctcaaaatcttgcaaatacatggaaattaaataaccacctacataatgataattgggtcaacaatgaaatcttgatagaaatttaaaaattatttgaactgaatgatgatagtgacataacctatctaaacctcttggatacagcaaaagctgatgctaagaggaaagtt

SEQ ID NO: 785034 - DNA, 592 bp, Homo sapiens
agactgaaatccagccttgaatcagtttaattcatgattgtattagggaccccatcttggctgggcacggtggctcacgcctgtaatctcagcactttgggaggctgaggtggacagatcacgaggtcaggagtttgagaccagcctggccaaaatagtgaaaccccgtctctactaaaaatacaaaaattagctgggtgtgatggcacttgcctgtagtcccagctactctggaggctgaggcaggagaatttcttgaacccaggaggcagaggttgcagtgagcygagatcatgccactgcactctagcctgggcaacagagcgagactctgtctcaaaaaaaaaaaaaaaaaaaagaccccatcttgtccccaccccacatacccaacagcttccttaaggaccaccctgaacaccccaggaattggtcagttgtgcctctttttaactaccatagcactctctatttttctattgtagcacatagtacaccataataaattggtgatttaaatgacctccccctgtaccctatccagcctctgaattcttgggcaggtactatatcttgtaaacttttatacttctat

SEQ ID NO: 785035 - DNA, 586 bp, Homo sapiens
agttacctcgtgacccagcaattctgctcctaggcatgtagcaaggaaaaatgaaaacacgcagccatacaaaagcacgtgcacccacgttcacagcagccatacaaaagcacgtgcacccacgttcacagcagccatacaaaagcacgtgcacccacgttcacagcagccatacaaaaacacgtgcacccacgttcacagcagtttcattcatgacgagccgaaacgtggagacaacccagatgtctatcctgatgaacagatcaggaaaacggggcacacccagacaaagggatgtgatagggtcacaaaaggactgatgtgcagattcatgctacaacgtcagggagcctcrcaaacgtcgtgctcagtgaataaacagacacacacgacagcatgtatcgtgtggttctgtgtgtatgacacatccagaataggcaaatccttccaaagagacagaaggtagaggcgcggtcgctgggacagatgtggggacgggcaaggtaaagcagcacagaccttcctttgggggataaaaatgttctaaagcggatcaggggtgatggctgcacgggcctgtgactat

SEQ ID NO: 785036 - DNA, 466 bp, Homo sapiens
ttaacatatgaaggggcggagaaactgaggttggcttcctaccccatgccacacaccattatgtacacatgagacttaaataacacttcttccctttcttgtgactgacacagatacttactataataaaatttcacctgaattaaacagaaggtcttagggtgagaccctgtagaatttttaatctctttactccattctgattatcacattgatgatccttaactcagaaaacatgmaatttcatttatgtgtgtttgaattgggcagaaagatatgaaattcagaaacatcattgaagggcttaaatgcaaattctgagtttcttagataaaaccttcacaaagagagtcctcctcaccccacccccaacactttactgctttcaaagtacccataacactactattactactagcaattaaaaatattgtgctcaatctgtgcagaggaaaattttgttaat

SEQ ID NO: 785037 - DNA, 627 bp, Homo sapiens
taagttgatcatgtctgaacaagtcttccccaaaaaggacataataaaatacaaagaaaggcaactttagactctcccagagttctttccttgcccagagatatgacaagatacttctgctgagtatgaaacattttctaaacaaatggcatatttgtgtctattacttttttatttttaaatattttattatatttgaataaaatttgtctccatcataatcttacatgtttaaagcatttaagaacactwttgttaagaaagagtccataggcttcagactgccaaagatgttggtggtgcaaaacatgaggaatctcttaacattagtatcgtctccgggcataaactcttcatgtgtatatgagcttgatttttgtacattgctttgtggagaataagcactacttctactgccaatctttctaaagagtctttgacttccactgccagcagaagttgggtaataaatgtaaacattgtgatcttctgcactgactggcttttctacaaatggcttttgaaaaacttcctcatttacttctacatgatcttccccttcaatcagattacattctttgggattatttgggtcacggttcaaaattgcataacaaggaagtaaaa

SEQ ID NO: 785038 - DNA, 627 bp, Homo sapiens
taagttgatcatgtctgaacaagtcttccccaaaaaggacataataaaatacaaagaaaggcaactttagactctcccagagttctttccttgcccagagatatgacaagatacttctgctgagtatgaaacattttctaaacaaatggcatatttgtgtctattacttttttatttttaaatattttattatatttgaataaaatttgtctccatcataatcttacatgtttaaagcatttaagaacacttytgttaagaaagagtccataggcttcagactgccaaagatgttggtggtgcaaaacatgaggaatctcttaacattagtatcgtctccgggcataaactcttcatgtgtatatgagcttgatttttgtacattgctttgtggagaataagcactacttctactgccaatctttctaaagagtctttgacttccactgccagcagaagttgggtaataaatgtaaacattgtgatcttctgcactgactggcttttctacaaatggcttttgaaaaacttcctcatttacttctacatgatcttccccttcaatcagattacattctttgggattatttgggtcacggttcaaaattgcataacaaggaagtaaaa

SEQ ID NO: 785039 - DNA, 627 bp, Homo sapiens
taagttgatcatgtctgaacaagtcttccccaaaaaggacataataaaatacaaagaaaggcaactttagactctcccagagttctttccttgcccagagatatgacaagatacttctgctgagtatgaaacattttctaaacaaatggcatatttgtgtctattacttttttatttttaaatattttattatatttgaataaaatttgtctccatcataatcttacatgtttaaagcatttaagaacacttttgttaaraaagagtccataggcttcagactgccaaagatgttggtggtgcaaaacatgaggaatctcttaacattagtatcgtctccgggcataaactcttcatgtgtatatgagcttgatttttgtacattgctttgtggagaataagcactacttctactgccaatctttctaaagagtctttgacttccactgccagcagaagttgggtaataaatgtaaacattgtgatcttctgcactgactggcttttctacaaatggcttttgaaaaacttcctcatttacttctacatgatcttccccttcaatcagattacattctttgggattatttgggtcacggttcaaaattgcataacaaggaagtaaaa

SEQ ID NO: 785040 - DNA, 583 bp, Homo sapiens
tgttaagtcactcacttgcatcttttcatttcatccctgcaacaaccctatgaagtaggtactattaacattttcaaataataaaagaggaaactgaggacatagagttagaagtgtgttcacctgtgagtaacagaaaaaccaacttcagggcataaacaaacaatggctgttattcttcaaaaagtaaaaaaggggattggagataggcaattcaggtctgttttacctactaagtaatttggacaaggacgggtaggctgtttcttttgctgtccccacccccacgcacagtgtactaccttcctcatagttatatgatmgctgctatatcttctggaatcacaggactccaggtaaaataaataaagaaagacgggtgatgagtacactaatagccaagacttcaccactacacaatatatatgaaaaagtgaagagaaagaagacataagggtcatactggctgaatcccctagcttcctcaggggttttacccagcaggcttttgcctatttgtcattggccagaactgtgttacatggtcacccctaactggaagatggctaggaagaaggtgatt

SEQ ID NO: 785041 - DNA, 583 bp, Homo sapiens
tgttaagtcactcacttgcatcttttcatttcatccctgcaacaaccctatgaagtaggtactattaacattttcaaataataaaagaggaaactgaggacatagagttagaagtgtgttcacctgtgagtaacagaaaaaccaacttcagggcataaacaaacaatggctgttattcttcaaaaagtaaaaaaggggattggagataggcaattcaggtctgttttacctactaagtaatttggacaaggacgggtaggctgtttcttttgctgtccccacccccacgcacagtgtactaccttcctcatagttatatgatcgctgctatatcttctggaatcacaggactccaggtaaaataaataaagaaagacgggtgatgagtacactaatagccaagacttcaccactacacaatatatatgaaaaagtgaagagaaagaagacataagggtcatactggctgaatcccctagcttcctcaggggtttyacccagcaggcttttgcctatttgtcattggccagaactgtgttacatggtcacccctaactggaagatggctaggaagaaggtgatt

SEQ ID NO: 785042 - DNA, 519 bp, Homo sapiens
gaaaatcacacaaaaagcttatgatttccagctctgtcttaaagcaaatcgtaagaactgtcttcaaaaagttatattggaaaagattcatattagcaatagagaatatagggtaaaaactgaattatactgttgaaatttaaaatctgtagcctctagcatgtaggaaaaaagaaaaaagaaaactggtgtattacccctctctacatatttagatggtgacaattcttgccatcaatgacatcaaaacacattttcaccaaatacatcagaacactgtacaaatacacactggctccttgtcacaagttgcaatatgctgatcaatatcaaatgggctagaytgacctgtgaaaacaaaaactactgtaatctactgtgctaaacccaaagaagcagtttacaggaaaattagaattgtttcttcattgggagaattaatttcaaattaagcattcttaatttatgtcgaagtgatccactggggtaaagaaagagcaaatttgattttcaagcatt

SEQ ID NO: 785043 - DNA, 624 bp, Homo sapiens
actgcagcttctacctcccaggctcaggtgatcctcccacctcagcttcccaagtagcttgggactacaggtgcatgccaacatgtccagctaatttttgtattttttgtagagacaagatttcacctcgttgcccaggctggtctcgaactcatgggctcaagttatctgccctcataggcctcacaaagtgctgggattataggtgtgagccacgaaggctgccctcaacttttcttaacaacacttaaaacattctattgaatgaattatctgttcagtagaacacaagttccttgcaggtagaattcacgtataactcattattctactctccatgaataatacctggctaayggtaaatgctcaaaataatatcagttaataggattcagattcaatataatgaaagaagtacttagttgtctgctcttccatctaatatttcattgaaattgtaataaagaacaaatttaacccatggtatctccatttgagttgctcagaagcagaccttgagataaggattctataccacaagcaatttatatgagaggtaatgccaggaaacactaatacaggagaggaaaagtgagatatgaaatgcaggagattcaataaagg

SEQ ID NO: 785044 - DNA, 616 bp, Homo sapiens
agcacacatgcttgaactctctggagtctcttaaggacaggaatcctggcagatcagggccccacactcatggcctcatctaaccttcttcaccttctgaaggccccatctccaaatccaggggtgaggctgcactgagaggatattgcatccctagcactgacctggaaagggattgggggtagccatgcccggctggtggacgcctgcctccctggctgtgggtgtgaaggtgccgggggtggggtggggcaggactggctgggacacagcaccccacagcgtcctctgccgtgggtgctgtggcaggcatgaccagcccatctcagactcctctccactgcagtcatgcaggcttcaggcagctcctccccccttgtcggaactgaggaygagaacccattcattctgcctgggatgctgtccctttgtctgtcttccagagggcccctgacctcccagacctgcctcccctgcgatgaccccagggcctgtgccctcgtggggtgaggagtgagctgttccccaggaccctgtcctctgctgcccactgctcctataggaacagccactgcctgtggtccagcggcatgattggctgaccctgtgcaaaatg

SEQ ID NO: 785045 - DNA, 549 bp, Homo sapiens
tcccattgcttgttttgtcaggcttgtcgaagatcagatggttgtagatgtgtagtgttatttctgaggcctctgttctgtttcattggtctatatatctgtttcggtaccagtaccatgctgttttggttactgtagccttgtagtatagtttgaagtcaggtaacatgatgcctccagctttgttctttctgcctaggatccacacatatgtatattgcagcactatttacaatagcaaagatgtggaaccaacccaaatgcccatcaatgatagactggataaagaaaatgtggcatatacacaccrtggaatactatgcagccataaaaaagaatgagttcatgccctttgcagggacatggatgaagttggaaaccatcatcctcagcaaactaacacaggaacagaaaaccgaacaccacgtgttctcactcataagtgggagttgaacaatgagaacacatggacaccaggaggggaacatcacacaccagggcctgttgggaggtggggggccaggggagggaaagcattaggacaaatac

SEQ ID NO: 785046 - DNA, 638 bp, Homo sapiens
taccctttcctaattggttttctacactgtcatgcacacctttgaatgatgtcttcactttaaacttttttgcatactcacaaaccaatcagcatgcactccccattctgagtccataaagggccccagatccagccacgctggggacttttctgtccttcgggtasgggaaccaccgccctgccccccctggcatcccttccctgctgagagttttcctttcgcttaacaaattctactccactcactctccagtgtccccatgcctaattcttcctggtagtgagataagaactcagacctagctgagctaaggagcagaaagaccacaacactatgtggattaaatgaactagaatacatagagtgtttagaaccatacatgtttcataatatatactctattaatgttaactgatgctggttctcagttaactttaatataacttttccatgatattttattctaacttcctggacagcgaattaatggccctcctttttgactgggatttatgtcctcttctttctttaatatacaggtattgacctctggcagtgaggtgactaatttaccagccacctaatgctattcctgccttcatcactattcctaagtaccttcccttgaattatca

SEQ ID NO: 785047 - DNA, 622 bp, Homo sapiens
ctttctgctccaaagcacactactggcaactgagtactgggtactttccaagctgttgccacctctgtacttgtgagaagtaactttggttaaggttccttttccctaccacatagttcttcaggcaattctcttcaacaaatgttgaagatctcctcatggccaaaagtagtacaattttaaagagaaattacaatgtataaggaaaatttataatttgaagaggaaagccttggtgttaaaaagattagtgcggtctttagacctgatcttaatcaagctactaggatatgaaaccacattcaatgttaggaaagtaattttacctttctgcgccctagattcattcagacagcaattccygcttacagaggaaagcaattgaaggtcaatccttcatcaagaggtttctcgcaggtgtccctgctcttgatgggacatgccaatcttcatttccctatattctttcttgtgcaaacgtttcttcatcagtccatttccagaatatttacctactctagcctcatagaaaatcagtgtcactgtcaagtaaccccaacctggcccacacagagggccttgctcccggggtatattcaagcccctgatatgttgtgcagtt

SEQ ID NO: 785048 - DNA, 650 bp, Homo sapiens
tagatattatttttccttatgctcctctggcctgtgacatattctcagactttccttatttgtgatgacattgagagttttaagaaatattggctgggtgcagtggctcacatctgtaattgcagaaatgggaggccaaggcaggcagattacttgaggccaggaatttgaaaccagcctggcaaacatggcaaaaccccgtctctactaacaaaatacaaaaattagccaggtgtgttggcacatgcctataatgacaataacagctacttgggaggctgaggcatgaggatcccctgagcccaggaggtagaggttgcagagagtggagatcacatcacttcactcctgcctgggtggcagcaaggttgtgtctccaaaaaaaaaaaaaaaaaaaaaaraaaagaaatattagaaatattagtcaggtatttatagatcatcaattttgatttgtttttaagatattttagattcttagacattttatatatttatatacatatgtatgtgtatgtatatatacatgtattcatatgtatgtatgtatgtgcatgtgtgtatgtatattcatagtcctaaatttaaaaagtataagtttcctagggaaaaaaacaggaaataaaaaccatgtgaaattgggtaggtaa

SEQ ID NO: 785049 - DNA, 615 bp, Homo sapiens
aatactgtctgggtcaaatattcatcacaaaatagaccaataaatcagaatgttttctaacattcctataggtgcttctaaaccaatttgattgtcccatctctcacaaaagggttgaaagataaatacactagagaatatcaaaaagatatttttagttctgaaatactatagagaaccaccttcctccttaccatttaagatttatacttatgtcatgtgagcttttatatcagttatttactcattcaggatttgtrataattgaagtgttttattcctaagagaaaatgttaaatttgctatgctccagtcaaaatcgaatcagctactctgattacagtgatataatcacatacatatacatgtaatgtgcacacaccttattgcatattaaagtatatcttccattttaagaaattgtaagtcaagcatataaaagtgaaaggagaagaaataaatacatcagtgttgtagtgaacagaagtaaaggaagaaaaatgaattatgatgttattgtatatcattcatgtttaagagaactttttgtaacatgaatattcaatttacaaagccttgttataaatccgccatcatcagtgagagatttatctt

SEQ ID NO: 785050 - DNA, 738 bp, Homo sapiens
gaggattgactgggaaagtgcttgagagaactttctggagtgatagaactgttttgagttgagcctttataaaaactaaatagtgtatctaaaaatctctgcatttcacatgtaaagtataactaaaaaagtccaatgcatattagaaaacattttctgtaktttagtaagtgaaaatcttataatgcaatttaatgaaattatagtttttggatttaatccacattttagttgtgtgtgtttttaaattttattatgcagtacattagaactgaaataaaagctttcacatttgctttcactcgtctagcacgttcagagttccagtgtatatggaccagttatgtggtaaatgcaattaaactggttatgctgtggactctgaatcacctcagttattattcatgaattttctctagatatttaagttgtttaatgatagcttatagtaatggaattctttcttcatgtaagtttgcctactttatccgctactaggagctgtatacataggctcacatgatgggatggtgaatttcaaagaagagatgatgtcaaattacttgacgttgtctataatgtcagttaattttctaagtgtccttcgattttactgttgatacttggttaggttttaagcatcctttatcttgtgttttttctttttgtcttttttgagatggagtcttgctctctctctcccaggctggatcccagacgcgatctcagttcactgca

SEQ ID NO: 785051 - DNA, 640 bp, Homo sapiens
cttctatattatcctgtctgggaaaaatattttttggaatgctaaaggcttgcttcagggcttctgtgcttgtctggtggaggaggtgagggaacagcacatgggaagttactctggtggttgatgaagtctttggtctgtgtagcttgaacatggaaaagatgctagtttgtttcattttggcttatggttctgcttctgttgcacttgagaatatcaggaaatgttgggaatgtagcaagtagatgtttcaaaaaatagagaagttcacaaagttaatatcttattagttgttcttatcattgtaatagaatctcgaattcgaatctgagggagcctcacatttaaagcgttcctctgtcaacataagttttgcagtctgtctttggttgaaagctagaatgaacttgattktgtttaattgacatgtcacttttttttctttttctttttgagataggttctcacgctgtcacccaggctggatggagtgcagtggtgtgatctcagctcactgcagccttgacctccctggggacctccctaggctaaggtgattctcctgcctcagcctcccacatagctgggactacaggtgggcgccaccacacctggctaattttttgtattttctgtagag

SEQ ID NO: 785052 - DNA, 628 bp, Homo sapiens
atgctgtatttggttttctgttgttgcgttagtttgctaaggataatggcttccaactccatgttcctgcaaaggacattatctcaatggttttaatggctgaatagtgttctgtggtgtatatacaccacattttatccattcttccattgatgagcatttaggttgattccatgtctttgctattgtgaatagtgctacagtgaacatatgtgtgcatgtgtctctgtaacagattgatttctgtttctttgggtatatgcccagtgatgggatttctgggtcaaatggtactgctgtttttagctcttggaggaattgccacactgctttccataatggttgaactaatttgcattccaaccaacagcgtataactgttctctttcctctgcaaccttgccagcatctgttattttttttttttactttttaacaataactattctgactagtgtggcgtgatttgcrtttctctaatgatcattgacattgagcttttttcacatgcttgttggtgacatatatgtcatcttttgaaaattgtgcatgttctttgcccactttttaatggggctgtttggtttttgcttgtaaatttttaagttccttttagatgctggatgct

SEQ ID NO: 785053 - DNA, 659 bp, Homo sapiens
catttcaacatggctgggctaacaaggccttgggcatttcctctctgctctgaaatgagtctgtcactcttaagccagcaaagcattcagttttctgcatacatcctccactgcaattagagttcaggaccactggctgtaaaggtgctgtttttggtgtcagtctcaaatcactaaagctacagctctgacagctgagtggagggtgtttggatggaagcaacccaagaaaagaagtttatagattcacaagagtttcttggtgccattcccacctaatgttgttagagtttttaaaactaaatgattarttattctccatgtgtctttgtcttttattttctgtgccctcaaatagtgtgaagggttttttttcttgagttgtatacttgttttctgcaagggagcatcattttacctcctcacattgctattgccataagccctatttcctgtggttgatttttaattttaaatttactttattttctaaatataaaggttatgtattttttattaagtgagcttcaacagtattatatttatctttcatagactttgtttcatctgggttgtcaaaattattgacatgaagttgtttttaatgttctcatctttttaattttatttattttatttttatttatttatttatttat

SEQ ID NO: 785054 - DNA, 580 bp, Homo sapiens
atccaaatatccatcaatgattgatagactggattaagaaaatgtggcacatatacactatggaatactatgcagccataaaaaaggatgaattcatgtcctttgtagggacatggatgaagctggaaaccatcattctcagcaaactattgcaaggacaaaaaaccaaataccacatgttctcactcataggtgggaattgaacaatgagaacacttggaaacaggaaggggaacatcacacaccagggcctgtcatggggtggtgggaggggggagggatagcattaggagatatacctaatgtaaatgacgagttaatgggtgcagcataccaacatggtgcatgtatacatawgtaacaaacctgcatgttgtacacatgtaccctagaacttaaagtataaaaaaaaaaaagatctcatagtaaatgtattttcctttctgaatcttgggcacaaaattgctttggatattttttctaactattcagctgacaaatactgtgcttacaaaacatttattaagtgtttttagtctttagtcactatacaatgcataaaatcaaatacaaagtgagg

SEQ ID NO: 785055 - DNA, 447 bp, Homo sapiens
aagtataaattcgtgtgggggtgggagcactgactattttaaatattttaaatggggggcagagtcatgatgcaagggagagaatgatgtaagggagagaagagcagcaggcagtagccaatataaaggctttgaggagggaataacactattaggtagagaaataccaggtactataatgaatgagctctaaaatttcagtmgcctaacaacaccctaagttttattcacattcacagtccaatgcaggcgttcctggttgatggacagctttcctccatgtggtgattcagggacctaggctgcctccaccttcaagttttgccatcacctagggctatggagtccttggcatccagagagtgagggcagcacacttgcttcctaataaccctatccaagaagcaccatgttactggtgagaattaatcttatgggttcaaagag

SEQ ID NO: 785056 - DNA, 587 bp, Homo sapiens
cacactggacaaaaggcctaaaactttggctaacgaaattaattcgaacgatggtctagagtcttaaaaagccccataatagaaagtccacattccctacctcacatgttgatggccatcttaaacaaaccagtcgaaacaggacatttctggactctgtccacccaaatgaactccctggtgtaactcatgcttataagaaagctgaacagctcacaagaaaacttgtaaaatagcctgtgatctttagggggaagaccacaagctcacccaagggtacatggaggaaaagcccagtctagcaaatgtcctctatgtaaacagctttgaagttcagacaactgtctttctaaatgcttttatttacattgtgstgtaactacagtaaaacaaatgatgataaagtgatttggatataatgagaaagtactttaggagcatatttctgttaccttaatacaaacatcatttctactaattatgagttggaaaagatacacattgttgtggtaacctctgaagagcaagagctgtgtacgtgttctgtgcctcctatagtcaccaccagccctacctgctcccatcca

SEQ ID NO: 785057 - DNA, 593 bp, Homo sapiens
tttccctatctttaaaagtttgtttgggaaaaattatgtttcatgttgacatgaggtacaacatcactgtcaccatgagaaaaaatacaagactggatcatgataagaggcagaagattcctttcagaaatacagatcagtcattcatcagggcagtaaaccctctctacaactaaaacgtttttgagattctttgttctcccagctatgttgttaaaaaatggaagtaaaatttccatgatgtaagccagyaggcaaatcacacctgatagatcaaacgatggtgggagggacttgctctccctttgaatacatcatttttctttctttagttcccagtttactttctttctttagttctttagttctttcttcagctatttagttcctttctttagttctttagttcctttctttagcttagtttctttctttagtttctttagttttctttctttagttaccaaatattagcttctataattacctctaccaataatgctataccaagacacaagggctgatgggtttattaagggcaccgattgactatccttagaaagcaacatttcatctgacaaaaaaaaaaagat

SEQ ID NO: 785058 - DNA, 593 bp, Homo sapiens
tttccctatctttaaaagtttgtttgggaaaaattatgtttcatgttgacatgaggtacaacatcactgtcaccatgagaaaaaatacaagactggatcatgataagaggcagaagattcctttcagaaatacagatcagtcattcatcagggcagtaaaccctctctacaactaaaacgtttttgagattctttgttctcccagctatgttgttaaaaaatggaagtaaaatttccatgatgtaagccagcaggcaaatcacacctgatagatcaaacgatggtgggagggacttgctctccctttgaatacatcatttttctttctttagttcccagtttactttctttctttagytctttagttctttcttcagctatttagttcctttctttagttctttagttcctttctttagcttagtttctttctttagtttctttagttttctttctttagttaccaaatattagcttctataattacctctaccaataatgctataccaagacacaagggctgatgggtttattaagggcaccgattgactatccttagaaagcaacatttcatctgacaaaaaaaaaaagat

SEQ ID NO: 785059 - DNA, 604 bp, Homo sapiens
acttactacaactttaaaaaatatgaaggatattcttccatgggaaaaaaaccatgcctttattttagcatcatataacataaagcataagctttgaatcataagggctaagcttaaatgccagtgcaaccccttacaacgaggaagttatttaatctccccgagcctggtttcttcatctgtgaaatggggataataacttgtgcctagcagggttgttaggaagattaaatgggatgtacttacgaaagcagatagcctaacacttggcctagaactaggactctttgggtttaatggcctccccttcatcactgcaggttgttttatgctagtatgtttatctagtttaaagggaggtataattctggtctaacagcctaaaatataagtcgaccctttaggttyaactcagttcttacctcctcttaataattaccatctcctgattcttaaaaacccttgtgagtgggcccagatctcttcaagctccattcctgcccatgatcctggtactgagaatgaaaatcatagatgaacagccttgaaacagtcccagactccatggcagaaatagtagatgctgtagttgctatttacacat

SEQ ID NO: 785060 - DNA, 526 bp, Homo sapiens
ccagccatcccattactgggtatatacccaaaggactataaatcatgctgctataaagacacatgcacacgtatgtttattgcggcactactcaaaatagcaacgacttggaaccaacccaaatgtccaacaatgatagactggatggattaagaaaatgtggcacatatacaccatggaatactatgccaccattaaaaaggatgagttcatgtcctttgtagggacatggatgaagctggaaaccgtcattctcagcaaactatcccaaggacaaaaaaccraacaccacgtgttctcactcacaggtgggaattgaacaatgagaacacttggacacaggaaggggaacatcacacaccggggcctgttgtggggtggggagaggggagagggatagcattaggagatatacctaatgtaaattacgagttaatggatgcagcacaccaacatggcacatgtatacacatgtaacaaacgtgcacgttgtgcacatgtaccctagaacttaaagtataaaaaa

SEQ ID NO: 785061 - DNA, 659 bp, Homo sapiens
tgaaagcagctggaaaggtggataaatgctgcaaagccacaggggtggagacgcccaagaccacggcaacccatctcttccgtcagcatgacttggatgtgagacatggagtcaaaggagatcattttggagctctaaaatttgactaccccgctggatttcagacttgcatggggactgtagtctctatgttttggccaatttctcccatttggaatgggggcatttactcaatgcctgcaccrccattgtttctaggaagtaactaacttgcttttgattttacaggctcataggtggaagggacttaccttgtctcaaatgagactttggactgttggacttttggattaaggctggaataagttaagactttgggagactgttggaagggcatgattgtgttttcaaatgtgaggacatgagatttgagaggggccgggggtggaatgatatggttggctctgtgtccccacccaaatatcaccttgaattgtaataatcccatttgtcaagggtggggccagatggagataacttaatcgctgcgtgggtgtcctcatactgttcttgtaatagtgaataagtctcatgagatgtgatgcttctataaatggaagttcccctaaacaagctctcttgcctgttatcatttaaga

SEQ ID NO: 785062 - DNA, 569 bp, Homo sapiens
catgatagactaatcttttcccattattttctacttctagtttatcacctgattctattaatgctacttcttgaatattattcatatctattttctttccatatccattgtcactgctttaggttcaggcttttatcatcttgaacttcaactacaatggactcctaacgtgtctccctgcctccattcatgcccatctcaatcccagtctatcctccacattgccatcggcattcyctttttagaatacaatttcgttcattttgttgcattgcctaaaactctttaagtggttccatatcatctatcatacaaaaccccttcatgtcctggccttcccaagttatcactacagaactatgagtatagagtttaaaaagtaaaacccaaatttgaaaacaaatatatcttgtgaaaaacctcaacctacacatttcctgatatctcttgccccaaactcagactcatttttctctttccttcatcagtgctacagaaatttgcatttacctccattattgcactcatcacctgaataatctgttgacatatatgcattccatatagag

SEQ ID NO: 785063 - DNA, 680 bp, Homo sapiens
atttctgggttctctatctgttctgttggtctgtgtgcttatttttatatcagtatcatactgttttggtgactatagccttacagtctaaagttggttaatgtgatgtctccagatttgttcgttttgcttagtcttgctttggctatgtgagcttttttggttccatatgaattttakgattgtttttgctagttctgtgaaggatgatggtggtatttggataggaattgcaaggaattttagattgcttttggcagtgtggtcattttcacaataatgactctacccacctatgagcatgggatatgtttccatttgcatcatctatgatttctttcaacagtgttttgtaattttccttgtggaggtctttcacttccatggttagctatattcctaagtattttattttagcagctattgtataaggggttgagatctatgatttctcagcttggttgttggtgtacagcagtgctaatgatttatgtacatcagttttgcatcctgaaactttactgaaatcatctattagttttaggagctttttagagatgaatttttagggttttctaggtatacgatcatattggcaaacagtgacagtttgacttcctctttacccatttggatccaagagattaaatcctttgtctttagctaccagggctggtaga

SEQ ID NO: 785064 - DNA, 680 bp, Homo sapiens
atttctgggttctctatctgttctgttggtctgtgtgcttatttttatatcagtatcatactgttttggtgactatagccttacagtctaaagttggttaatgtgatgtctccagatttgttcgttttgcttagtcttgctttggctatgtgagcttttttggttccatatgaattttatgattgtttttgctagttctgtgaaggatgatggtggtatttggataggaattgcaaggaattttagattrcttttggcagtgtggtcattttcacaataatgactctacccacctatgagcatgggatatgtttccatttgcatcatctatgatttctttcaacagtgttttgtaattttccttgtggaggtctttcacttccatggttagctatattcctaagtattttattttagcagctattgtataaggggttgagatctatgatttctcagcttggttgttggtgtacagcagtgctaatgatttatgtacatcagttttgcatcctgaaactttactgaaatcatctattagttttaggagctttttagagatgaatttttagggttttctaggtatacgatcatattggcaaacagtgacagtttgacttcctctttacccatttggatccaagagattaaatcctttgtctttagctaccagggctggtaga

SEQ ID NO: 785065 - DNA, 680 bp, Homo sapiens
atttctgggttctctatctgttctgttggtctgtgtgcttatttttatatcagtatcatactgttttggtgactatagccttacagtctaaagttggttaatgtgatgtctccagatttgttcgttttgcttagtcttgctttggctatgtgagcttttttggttccatatgaattttatgattgtttttgctagttctgtgaaggatgatggtggtatttggataggaattgcaaggaattttagattgcttttggcagtgtggtcattttcacaataatgactctacccacctatgagcatgggatatgtttccatttgcatcatctatgatttctttcaacagtgttttgtaattttccttgtggaggtctttcacttccatggttagctatattcctaagtattttattttagcagctattgtataaggggttgagatctatgatttckcagcttggttgttggtgtacagcagtgctaatgatttatgtacatcagttttgcatcctgaaactttactgaaatcatctattagttttaggagctttttagagatgaatttttagggttttctaggtatacgatcatattggcaaacagtgacagtttgacttcctctttacccatttggatccaagagattaaatcctttgtctttagctaccagggctggtaga

SEQ ID NO: 785066 - DNA, 623 bp, Homo sapiens
ggagaacagcacaggaaaaacctgcccctatgattcaattacctcccaccaggttccttctataccacgtgggaatagtgggagttacaattcaagatgagatttgggtggggacacagccaaacggtatcagagcagttaccctcccccttcagagcttgaggcagaagacggtctggagacaaggagtctaaggccaatctaagggtgacttcttggaagttattcagaagagaaaccacacccctccacacccaaatgctaagggggccaaagacccttccctctacaaaactcccttttctcttatgtcacaaaggtgaaacgcctctgattggccatgggacaagacatcactcacatagggtataaccaattggaggcctctaatgagtacctagaagggttaccaaattcctttagtttaataaaaactaaggtacattacaatcagggctctcaggctgcttgcttgagcccactcccmctctagaatgtacttttgcatcaatgaatttacactttcttctgttggtttgtgtttgcccaattctttgttcaatgcgccaataacctggatgattcatagtcaagattctccatctggtaacaatcttagacat

SEQ ID NO: 785067 - DNA, 656 bp, Homo sapiens
tctgactgtgtattttcaaatagctcgtcttcaagcttactaattctttcttccacttgatcaattcaacaattaaaaggctatgatacattcttcagtgtaccagttgcatttttcagctgcagaatttccttgtgcaagggaagcagggatcggtggagccctctattctgccatcttgctccacctctccctcctgttttttaccttcttcccttagttgcttcccagcatgagtggaaattccctaaagccctcaccagaagcaaatgctagtaacatgcttcttgtacagcctgcaaaactgtgacccaaataaacttctattctttataaatcacccagcctcaggtagtccattatagcaatgcaaatggactaaaatacyattcaatgaagaaacaatagtctttttataaatggtgcttagacaactgaatattcatacgcaaaagatgaagttggatctttacctcatagtgtatacaacaattcactcaaaatggatcaatgacgtaagtgtaatgcctaaaactatgaaacagaagaaaacatagggataaatcttcataaccttgaatttggcaatgggttcttagatatgacaccagtggcataaacaacaaaagaaaaaatgggtaagttgaactttatta

SEQ ID NO: 785068 - DNA, 622 bp, Homo sapiens
aaatttcttctccgaaaactggtcaagttctttctccatttttctttgaggcattagtgtttcttttactgttttgtgtcatttatttatgtggcaaagcagaagccatttagcatcacccttaaattattctcccagtttctcccttttcttttaattttatttataatgtatttaaacatgcactattgtatttaaaaatattatgatatttttattgttatgtagttatatcaatcagccatttctgttgctggttctttcattgctttaatatttagaaaatcattttctgcccaragattaaataaatatgcacttatactttcttatagtttcaaaaattacaaatattcctttgagacttaaaaaatggcatgactaaatggagacacttaacatgcttctgtaagagaaaagtaagtatttgtcatttctcttcaaagtacagttttgtataatcctgaggatttgtgggctaatctagaaaaaaataggaaaattcataaagcaagttcttagagacctacagagagacttagactcccacacaataatagtgggagactttaacaatgcactgtcaatattagacagatcaacaagacagaaaattaacaag

SEQ ID NO: 785069 - DNA, 642 bp, Homo sapiens
tatacatcatggaatactatacagccataaaaataaacaagatcatgtcctctgcagcaatgtagatggagctagaggccattatcttaagtgagctaatgtaggaacagaaaaccaaatgtcacatgttctcatttataaatggcagctagacattgagtacacagggatacaaagaaaggaacaacagacaccagggcctacttgagggtggagagtgggaggagggtgaggatcaaaagactacctgttgggtactatccttattacccgggcaatgaaataatctgtacgccaaattcccacagcaygccatttacctatataataaacctacacatgtacacctgagcctgaaataaaaattaaaaaaaaacacagaaacctatataattgcctctaagtgttcaagtgaaaggaagagttgcacatcttcctcttaaatcaaaagttaaaaatgattaagcttggtgaagaagccatgatgaaagccaagataagtgaaaagctagacccctttcaccaaaaagttagccaagttgtgaatgcaaataaaaagtccctgaaaggaattaaaagtgctactccacagtgaatacacaaatgataagaaagtgaaacagccttattgctgttaaggag

SEQ ID NO: 785070 - DNA, 577 bp, Homo sapiens
tttcagggaaatttacagcattgaaggcatttatttgaaaagatctaaaaccagaaacaagcttctatttttgaaaattctagagaacgagcaatttaaccttaaagcactcagaaaaaaagaaataataaaaattagggcagaaaycaatgaacttgaaaacaggaacaacagagaatatcaataaaaccaaagccttggttatttgaaaagatttttataaattgataaatctctagccagactaatcaagaagaaaaaaacagaaggcatacatttaccaataccataagtgaaagaagggacatcactattaatcacatggatattaaaaggataataaaagaacactaagaacactctatgctcactaatttgataatttagataaagtggatcaattctttgaaaggcacaagctaccaaaagtcatagaaggagaaacagataatctaacaaggccaatatttattttaaaaattgaacctataattaacctttccaaaaataaagcactaggcccagatattttcactgggtgtattatacaaacatttaagaaatgacatcaattttc

SEQ ID NO: 785071 - DNA, 633 bp, Homo sapiens
cccccagatatgatggggtgagcagggcacctcatctctgtggtcttcttcccccaaacccataactccagtgtaatcatgagaaaacatcagacaaacccaaaccgatgaactttctacaaaatacctgaccaatacccctcaaaactaccaagagcatgaaaaagaaaagtctaagaaactgacgaaaaccagagaagcccatgaagacatagctaaatattaggtggtayggggtcctggatgaaaggcaccgtattagtacgtcctcatgcagctaataaagacatacccgagactaggtaatttataaagaaaacgagtttaattgactcacagttcagcatggctggagaggcctcaggaaacttacaatcatggaggaaggggaggcaaacatgtccttcttcacatggcagcaggaaggagaagtgccgtgcaaaaggagggggaaaaacccttataaaaccatcagagctcatgagaactcactatcatgagaacagcatgagggtagccacccccatgattcaattaccttgcaccgggtccctcccatgacatgtggggattatgggaactacaattcaagacgagatttgggtggggacacagccaaaccatatcaggcac

SEQ ID NO: 785072 - DNA, 633 bp, Homo sapiens
cccccagatatgatggggtgagcagggcacctcatctctgtggtcttcttcccccaaacccataactccagtgtaatcatgagaaaacatcagacaaacccaaaccgatgaactttctacaaaatacctgaccaatacccctcaaaactaccaagagcatgaaaaagaaaagtctaagaaactgacgaaaaccagagaagcccatgaagacatagctaaatattaggtggtacggggtcctggatgaaaggcaccgtattagtacgtcctcatgcagctaataaagacatacccgagactaggtaatttataaagaaaacgagtttaattgactcacagttcagcatggctggagaggcctcrggaaacttacaatcatggaggaaggggaggcaaacatgtccttcttcacatggcagcaggaaggagaagtgccgtgcaaaaggagggggaaaaacccttataaaaccatcagagctcatgagaactcactatcatgagaacagcatgagggtagccacccccatgattcaattaccttgcaccgggtccctcccatgacatgtggggattatgggaactacaattcaagacgagatttgggtggggacacagccaaaccatatcaggcac

SEQ ID NO: 785073 - DNA, 633 bp, Homo sapiens
cccccagatatgatggggtgagcagggcacctcatctctgtggtcttcttcccccaaacccataactccagtgtaatcatgagaaaacatcagacaaacccaaaccgatgaactttctacaaaatacctgaccaatacccctcaaaactaccaagagcatgaaaaagaaaagtctaagaaactgacgaaaaccagagaagcccatgaagacatagctaaatattaggtggtacggggtcctggatgaaaggcaccgtattagtacgtcctcatgcagctaataaagacatacccgagactaggtaatttataaagaaaacgagtttaattgactcacagttcagcatggctggagaggcctcaggaaacttacaatcatggaggaaggggaggcaaacatgtccttcttcacatggcagcaggaaggagaagtgccgtgcaaaaggagggggaaaaacccttataaaaccatcagakctcatgagaactcactatcatgagaacagcatgagggtagccacccccatgattcaattaccttgcaccgggtccctcccatgacatgtggggattatgggaactacaattcaagacgagatttgggtggggacacagccaaaccatatcaggcac

SEQ ID NO: 785074 - DNA, 525 bp, Homo sapiens
gtcccacagtcctgggggttggctggttctctctgggagcctctcctgccatcacggcggctggggccagagttgttctgaagatgtcttcatgcccatgtctggcggctgagcctcagctggggcagttggctggagcatccacgtgcagcctctgtgtggcttcggcttcctcacaccatggtgccagccttccttcattctaaggaactgggcagaaccggtgttgyctttcatgacccagtctcggaagtcacataaatttacctctgacatagtcagagtcctgccaaaactcaagggaagggaacaaagactccacttctcaaagggacgggtattggcgccatgctgtaagaagcacagtggcttgggaggtattgtggtcagctctggaaaagacaaccgccatattagtaaatatttattgcaaacctactgtgagccaggcactaaacactgggaatccagacgtgaaccacagacaccagtccctgcctcatggagctgacattctagtagggg

SEQ ID NO: 785075 - DNA, 569 bp, Homo sapiens
  misc_feature 555: n = A,T,C or G
cccctggagtgcacaggcccccaattacagactatttctttgtccttctcatgtttattagcataatttctatgggtttcaggggttgttacatgtgattcaaacattttcacacaggttaaacccttgggtaaccaaacatttttaaatatccacagaaaattatttgattaaaataaatacatgctcaggaacacaaacaattctcagaagcacttttatgtgcrgtgttaagttccaaacaagtgatccatgtttagcattacacatggtacaaattctaagcttgattttaacagattgaataaacaaatgctccaaagggcttaacgattccttcaagcaattcccacttccctgtggcttggtggatcatttacaaggtaacaggcctgggtcttaggtgagcttggatgctcgagtgatcatccgctggagcaatcatgtgattagtgggaccagctggacttgtatctcccaaataaacattttaagcagagagatttaataggggaagtgccgagtctcagagagactaaagcccatactgatagntaatggtggattaa

SEQ ID NO: 785076 - DNA, 585 bp, Homo sapiens
aagcccaggtctcaggctgcagggttcgggggcggggtgggagcaggcaccctgccccagccttcctgagatgcctgtctgcgcacctggacacgctaatgcctgggcctgtgaagggcagccttgagctcttcctcctgggagccaggctggggtccccctcactgttctctggcctcagctggttgtgcagcctcagccccagggccccagctgaatctgggaaactgctatgctcagaggtctcgcttcccaaaggggcctgttctggtgttgagcctccattttgccagctggagtccccagagtcccacttacgatgctttctgcttttggccccttcccctcattctccaaaatggtgtctgtcagctctcgtcctgatgcaccatgtcgtaaatacagtttcgtgggtatgtcactaaattgkcaggacacactgccagtgtcctggcaggcaggcgacaggggccacactcagacagggggattggggctgtctacagggtatgggcagggttagggctaccaacacagaatgtcgaagcaccccagggctagacaggcaccagcccctgcccttaa

SEQ ID NO: 785077 - DNA, 601 bp, Homo sapiens
tgcgttaaaaccacacagaaaacctttaaagcagcggatcccctggtccccacccccaactttatattcattaggcctgaggtggggcctgggaatctggatttataaattgctcccctatgattccaatgccagtgggttttagaccacattttgagaaacagtgctgtaaactgttttccatttgcagkgaaggaaaatgtagggtttgtgtcgtgaaactatgcagagaaattgaatagtattttagtctaatcttgcttttaaataacacggaaattttgaaagtcggctttagggagttccagaacctgtccatgaacagcaacaagaaagatccctgtgtgaaaatgaacactggttggtaaaacccttaaataggacctaaatatgaatctgacccggggagcccatccttgttttcttttgctcatttatttaatgttcactgccagcactgctagaaaatttaatctctatatctgtgatttataagggctcatctttgttccaaatgcccagttatgtgctgaacaaaagctcttaaggggaactgctgccagaaagaaccactatctctaatgtgcatatcttttgatgg

SEQ ID NO: 785078 - DNA, 601 bp, Homo sapiens
tgcgttaaaaccacacagaaaacctttaaagcagcggatcccctggtccccacccccaactttatattcattaggcctgaggtggggcctgggaatctggatttataaattgctcccctatgattccaatgccagtgggttttagaccacattttgagaaacagtgctgtaaactgttttccatttgcagtgaaggaaaatgtagggtttgtgtcgtgaaactatgcagagaaattgaatagtattttagtctaatcttgcttttaaataacacggraattttgaaagtcggctttagggagttccagaacctgtccatgaacagcaacaagaaagatccctgtgtgaaaatgaacactggttggtaaaacccttaaataggacctaaatatgaatctgacccggggagcccatccttgttttcttttgctcatttatttaatgttcactgccagcactgctagaaaatttaatctctatatctgtgatttataagggctcatctttgttccaaatgcccagttatgtgctgaacaaaagctcttaaggggaactgctgccagaaagaaccactatctctaatgtgcatatcttttgatgg

SEQ ID NO: 785079 - DNA, 491 bp, Homo sapiens
tggtacagtcacagctcactgcattctcaaactcccagctcaatggatccttcagcctcccgagtagctgggagcacaggcgtgtgccaccatacccagctcatttttgtattttttgtagtgatggggtttcaccacgttggccaggctgggctcaaactcctgagctcaagcgatccatgcrcctcggcctcccaaagtgctgggattacaggcctgagctaccgcacccggcgtgtactcctaaataataaaaattgtgttttgcctgttttaaacttttggtagaaaatggaatcagactgaatatgtccttatgctgcttgcgttcattgcttaacatcccgttcctgaggctcctccttgttgcacgcagcagtgactctttggtttgcatgaatgaatagtatttattgtgtaaatgcactaagatttccttacttagtctactgtgaatagatacgtgggttgttttcaggttttagctatta

SEQ ID NO: 785080 - DNA, 624 bp, Homo sapiens
gcctgtcgtggtcttagttctggtttatgatttggtatcttattgcacagcgagtctgttccatcagtcttatgatctctagtttaacaatggtaatgagaacagccataatcctaatattgctgagagctgccacccrctgaaggcgtacaaatatgctgggcgatctgctaagtgccttgcaaactctgacctcatttagtccttactaaacgagttagtccaactaactcccccgtttggttagtatttctcccccttatgcagataaagcatctgacactcagagtatgttgtccaagtaaacggtggagctaggattcaagcccagtctgctggggtgagcctaggactcacacccccaacctccacactccactgtcccagagagcaacgtgcccctcccctgtggccagccaggtccctccatgcagaagccaccagcagcagccagggcctgtagcacctttcaggcccctcacctacaccctgagcccccagtgtgccatctgtggccagcacaactgcagctctggccacagccagctcagcagcactgtcatcttcccaaagggagacaaaggtgggatgatgggctttccaccccagaagctgccaccacag

SEQ ID NO: 785081 - DNA, 464 bp, Homo sapiens
aggcagccagtgctactgcattcttgggtggccacagagacagcccatgccttacaagcaaacatctaagatattcagagaagagatttgctgcgtgcaaatctgggcctctctctccagcagaggagtcataatttccagtctcaggcccactctggcccttgtgtctaacacttctaagtgcacccagagcccccaccccttcccaggtcctaatgcatctgctcccaccaccagaaacttccctaccccaccaacagagagggtaagagraaagtgtgacagcttaaatagagactaatgacagcagagaagcagtgtgaatgcctagaagagaccagcctgagcggcctggcccagccccagtctcctctaaggatatggacccaaacatggctgtgagatgcatgtcacatggagatgcctctttctagaacaactgcccaagggttgtgaggtatcaa

SEQ ID NO: 785082 - DNA, 566 bp, Homo sapiens
taagaaatgagttctagaagctgtcagtgttgtgcacctctagactgcagagctagcaggtggacggaccaggcccagggatgctggagcactctgatgtgtgtgcagctgggtcttgaggctgggacaagtgtccatgcagggaactatgtggatttcctgkgatggatcgttgagtgggtttcttcattgggcagtttttcggatgttgtttggtgggggtgaggggaaggcttttctctgcagcatgagaagcttctctgggtgagtctgaatggtcttcgcggaaggtctctggatgtgtctggagaatctctgggccaaggtgggattgtttcggtcatcgggtgggactgaatcagctgtctggatggagggtttctgggtcaactggctgggactacctgggttaaggagccaccctgcctcttcctaacaggcatgatggatgggccacgttccgatgtgggccgttggggtggcaaccccttgcagccccctaccacgccatctccagagccagagccagagccagacggacgctctcgcagaggaggaggccgttc

SEQ ID NO: 785083 - DNA, 554 bp, Homo sapiens
tctgtgtagctgacttcttccatatttttctataagattttacaattaaattcttcctgatttaaatcttgttaccttgtctctatggttctaaaattaaatgcatcatcttctgtcataagccatatcccaatacccatctcgtgtattaatcccatcaatcattcaggtgtctggaatacaattctttagagtcatttaaaattacrtggtccttttataagatctaatttttcacttaaaagctctttctgtttgatttttgtttccatctccattaccctcattctggtctcgggtcttactcatttatatgtttatgtctctgtaatacatccaaccaggttttcctaccgtcatatcccctctaaagtgtagtctaaaccaagacatgacgtacaaaaccataatgtgcaggtcttcctttagcttctttttcattatattactccctaaccccagatccttcattgatttcctcattgcagattactttggcaactgtctttactgtgtgaatcagttttctcattcatgttttttaacatacagta

SEQ ID NO: 785084 - DNA, 656 bp, Homo sapiens
ttacaaaccaataatcctttttaaaaatataaggtccaagcattttgctcttgggagagcagctctaggtcttctctgagagtcttttttcactctttaaaaatttgtggtcgggtgcggtggcccacatctataatcccagcactttgggaggccgaggcaggcagatcacctgaggtcgggagttcaagaccagcctgaccaayatggagaaacccttctctactaaaaatacaaaattagccaggtgtggtggtgcatgcctgtagtcccagctacttgggaggctgagataggagaattgcttgaacctgggaggcagaggttgcagggtgagctgagattgtgccgttgcactccagcctgggcagcaagagtaaaactccatctcaaaataaataaataaataaaaatttgtattatcggccaggcacggtggctcatgcctataatcccagcactatgggaggctgaggcaggtggatcacttgaggtcaggagttcgagaccagcctgggcaacatggcaaaaccccatctctactaaaaatacaaaatgtagtcaggcgtggtggtgcccgcctgtgatgccagctactcaagaggctgaggtggggatcacctgagcccagtatgtcgaggctgcggtgagccatg

SEQ ID NO: 785085 - DNA, 487 bp, Homo sapiens
tcctgtcttctcctgcctgctagggatcccttgaggctgcagcacgtggctctcacacaaacatgtccacatccaaatatagcccattcccacataatgtatctcttctatgttccatacctcagtgtcatggcattactattctctcaactttccagaatagaaactttgaatattccttcyctctcatccccaggttcttctactaatacctcagagttatttctagactgagtttcttcctctcgatccctgcaggcattaacttggttcaggtcctcatcacctctcacttgaattgctctaactgtggcctgcagttttccctgcctccagttctccccatctcatttcatgcaccatgtagccactggcttgagcctcctaagtcacagatctaatcatgttgcaatgtagctcaagaccattccacagcttctgatattaaaacaaagcaaaaccttttaagccagagttcctggcacag

SEQ ID NO: 785086 - DNA, 487 bp, Homo sapiens
tcctgtcttctcctgcctgctagggatcccttgaggctgcagcacgtggctctcacacaaacatgtccacatccaaatatagcccattcccacataatgtatctcttctatgttccatacctcagtgtcatggcattactattctctcaactttccagaatagaaactttgaatattccttctctctcatccccaggttcttctactaatacctcagagttatttctagactgagtttcttcctctcsatccctgcaggcattaacttggttcaggtcctcatcacctctcacttgaattgctctaactgtggcctgcagttttccctgcctccagttctccccatctcatttcatgcaccatgtagccactggcttgagcctcctaagtcacagatctaatcatgttgcaatgtagctcaagaccattccacagcttctgatattaaaacaaagcaaaaccttttaagccagagttcctggcacag

SEQ ID NO: 785087 - DNA, 637 bp, Homo sapiens
gctatgttctttcatcctcatttcatttcaccctcagaacaactcaatccagtaggtgctataattaaccaaaattcagagaggttgagtaacttgctaaaggtcaaacagccagtaattgacagagcagaaatcaaccccaggtagactgactccagagcttatacccttgaccrttaggctatactttactccctgtaaataaacagcaggactcacctgaggtcaggagctcaagaccagcctgaccaacatggagaaaccccgtctctactaaatatacaaaaaaaaaaagaatagctgggtgtggtggtacatgcctgtaatcccagctactcgggaggttgaggcaggaggattgcttgaacccaggaggcagaggttgcagtgacccaagatcgcaccattgcaccccagcctgggcaacaagagcgaagctccgtctcaaacaaaaaaaagaaaaaagaaaagaaaaaaagaaacagcaggacacccagctagggaagcaacatgaagcagtggcctgctccactggggtgagaggagctgggagagcacagaaattatattttgacattaactagacagtaagaaagagagaaggactcacactgacagaaggggcattacggttata

SEQ ID NO: 785088 - DNA, 423 bp, Homo sapiens
atcaggatccatcctctccttacacccttcctggacacagtctcacctctcattttccaaagccctgccatgctgccatcccacttccccacactctgccccgggttcccttttcctaaagctgcagcttatggcttctccagtaggtggcagcacacacagagccactcataaactgcagcttctcagagcctgagagccagaaaccgtccccagaaaktccctccatagaaataaaaaaacaccagaagtcacatttcatccttttacatggttcccatctaccctcacaacacatgtcatcaccaaagacacacatacaagctccaatggcttttgccaggcaattcttcctccaggaccccatctggcccctccctcatccctccccttggactttgcccttcttactggccaggcagg

SEQ ID NO: 785089 - DNA, 647 bp, Homo sapiens
agcttgatggcttcctcccaagttttccaaatcatctgatttcctcttgtctctgccattcagggagctccttcgttggacctccacactgctgcaaggcctgggccatatgttgctgggaatttcctccacccttcgtcatgcagtggagggggctgagcagtggcagcagaagggccgcctccattcctactaaggggctctgagcttctgcccccagaatcattccaaccgacccactgcaaagactatgacagcatcaaatttcaggacctgcagacagtacaggctagataacccacccaatttccccactgtcctctgatcccctcgtgacagaacctttcagcataacgcctcacatcccaagtctatacccttacctgaagaatgctgttctttcctagccacctttctrgcctcccacttgccctgaaaggccaagatcaagatgtcccccaggcatcttgatcccagcctgactgctgctacatctaatcccctaccaatgcctcctgtccctaaactccccagcatactgatgacagccctctctgactttaccttgagatctgtcttcatacccttcccctcaaactaacaaaaacatttccaataaaaatatcaaatatttaccactaagactt

SEQ ID NO: 785090 - DNA, 610 bp, Homo sapiens
atctagcacacggctgccatggcgactacaggccagagccacatattgtccctgtatggagacaagcaaagtaggtctccctagcaaaatccacaaaagtattttggaggcttgtggagagtgaattttctgaagagtttaagggctgaattaaaatagtctaggaattacatagcctttttgagtctgaaggtacagtccagggaaagctcatattctctaaatggatgatggtggggaatcaaggcaaaagccagaaatctaacctttaggttctgcagcacacggcggcgcagcttgcgcgtcacagaggggctggtcaggatggcatcgagcacatgagagccagcgggactttgggcragggacagaagctgtggtcccgtcaaggcacccagacttcgaagtacaagaccaggagtggagaagtgcagcagatgctggagcagtagagacccaaggactgtcacatcccccaaggctctggctgcggccattgccacctggcagcgcagagataagaaattaggaggcaccaacaagccaggtggatgagcccatccccagaacactgccacctccacctggatgaagtcaccactctcacctc

SEQ ID NO: 785091 - DNA, 635 bp, Homo sapiens
aagtccctaaactgcacatggcagagggacactgggcctggcctatgaaatcattttttcctcctaggcctctgggcctgtgatgggagggggctgccacaaaggtctctgacatgccctggagacattttccctattgtcttggtgattaacattgggctccttgttacttatgcaaatttctgcagccagcttgamtttctcctcggaaaatgggcatttcttttactgcattgtcagtctgaaaaatttccaatcttttatgctctgtttcccttttaaaactgaatgcctttaacagagcccaagtcacctcctgaatgctttgctgcttagaaatttcttctgccagataccctgtatcatctctctcaagttcaaagttccacaaatctctggagcaggggcaaaatgccgccagtctctttgctaaaacataacaagagtcacctttgctccagttcccaacaagttcctcatctccatctgagaccacctcagcctggattttattgtccatatcattaccaacattttggtcaaagccatgcaacaagtctctagaagattccaaactttcctacattttcctgtcttcttctgatccctccaaactgttctctgctacccagttc

SEQ ID NO: 785092 - DNA, 699 bp, Homo sapiens
gaaattggatatccaaatgcatgaaaatgcaattggacacttatctcacagcatataaaaaaccagttcaaaatggactcaagacttaaaacctgaacctataaaatgatttgaagaaaacaggaaaaagcttcctgacattgttctgggcaaacattttttttggatctgactcccaaagcacaggcaacaagaggaaaactagacgactgttatcgcatcaacctaaaaagcttctgctcagcaaaacaaacaatcaacagagtgaagagactacttactatcataatctatacagaatatttgagttgagcgaagtgagatggagagatataggcatcttgaattagcagtgaagtggagctggtcatgagactctgatcaggacaatgatacaaaaataattacagagmcgtaggtcttaactggctatccatgctatcttattagccaagtgtggtagattttgcaagtcttggccatatagggaaataattactgtgtaatttttaaacttaatgtggtctctgtggaatatgttaacaacattagacctacatataaatagatacagtttataatatttaccagtcttcaagtcatcacaagtagatatatataatgaaaataaggaacacttacaactaagaaacccttttagagctatctgatggaccaggaaaaacctccctgagcgtt

SEQ ID NO: 785093 - DNA, 589 bp, Homo sapiens
tcactcctacatcgggtatttattgagtggttactatcaatcagatagtatttgaatcactgggaagtcagtggtggccaaaacacacacattcactattgttctcatggtacttacatattagtaacattaaagcacctaaatttctacatcataatttcaatatatattgtatcatatataagaaagtaaggtcmttttcaatgttaattaaattacacaactttattttcttaaaagtgctgatgaaaaccagatataaaaatattattgacaattcacatgtacatcacaaatataaagcacacacatacggtttcacaaaacataggttgctataaaaaagcatcataagacaagtgtcataactttggaagacagctatgttcacaattataccaccaacaccactccaacaccacttgatgtcttaattttgctttgtagttttcctagaaatatatgtctttgtatgtatgtggccatgtattcaaatatatgtacgtgtgtgtatatacgtatacacgtatatataatagtttacattatgtatctctgctttaatttgtttagtcataaatctgaacta

SEQ ID NO: 785094 - DNA, 529 bp, Homo sapiens
aaggatattcttatgaaagaactgcttcaattggtcctgacatttaaaccagaaccagaaaccaattgagcaaatgccttgagcagtttcctttgtactgacgcagggcacagtcacagcttgacacaggtgagattgttttcagctcatatttactgttrgatacattttataaggtaacattagagacctgtttctagaaaagaacgaaaagtgctcactttgcaaatattagtcatgaataaggcacttgggtcatttatgctttccttttttttttttttggcaaaatttaagatgggatatgttcccatatattcctatccttactcatctaatatcaactaactactttctatcatttctattccaagtttctttttgggggtgagaataattaaagtaattataccactaaaatgcagcttgaattatgaaaatatattatcgaataagaatacctcatatttttcacacataaatatatgtatttattttaagatatttgttaaaaagaaaaatatttccc

SEQ ID NO: 785095 - DNA, 584 bp, Homo sapiens
aatatcaactaactactttctatcatttctattccaagtttctttttgggggtgagaataattaaagtaattataccactaaaatgcagcttgaattatgaaaatatattatcgaataagaatacctcatatttttcacacataaatatatgtatttattttaagatatttgttaaaaagaaaaatatttccccattcatgatatgactacgatgtatctgaaggactctgtttttcattgatattatggagtagatgtagaaacaatacttaaaatatcaagtactaaatagactygttttccctttaataacattctgtgttttcattttatgtgacttcccactctaatggccgatagtacatgtagagttataataatacttatgttactcgagtagatgcaatcatacctcagctttgttttcagaggaatcatctcagttggtgagtttccaataacagcaacataggacaccgttcaatattataaagtttaaatcagatttatactttaggctatttgtacctttccatgccttttaattcggtgttgtcttgaggcatttcactgtatatccagt

SEQ ID NO: 785096 - DNA, 588 bp, Homo sapiens
atttctaattctaatttgcaactggcatttaaaattctaattttcctggaaatctagatatgggattgggtgagggggactcatatctgttttattcctaacacaggcaactttcctgtatctataggaaagttcactgagatacaacagatacgaagtagttaggctggtatgtaactttgtattaagccctcttctcctccaaattctagacattagctcctgtttttgttgctagtctcttgctaagttaagctgctaatgaagctgctatatgagcagaactgactgcggaatttatattttaaaaagaactccagaatgtcctgatatataagggagcactagcctcttctcttgcacctacacttttctgactgggatccaagtgctagacatgatgagaatttccagctccagagtccttttggagtttcccagtaatacmtctttccctattctttataagagcaaaaaataaatactacttggcaggcaaattcagaaagatggatgacctgtgctctcttctgtctacactataggcagcaaaattcttgtaattgaaattattctcccaataacttt

SEQ ID NO: 785097 - DNA, 599 bp, Homo sapiens
aacacgggaagattgcaattacgaattcttcttaaagtgcatttaacgtaattagtttaaattaatagctttctttgctttaaaaatcccctcttttctaaattgtactcacattgttaatgggagggaaaaagagaaggaggaagtctggtctgtagtggactctggaacacctgacgtcctagcttggtgagcaaaccacggcagtatttttcaatatttaattatgaggcactcttctttgaaggtaatttgtttccttcctctattcctgctcataaatctactatgtgggacacgaggttacaaaaaaatgagatcagaattctttgggaaaaaacaaatagaacagtaaagctactggagccactgctaagcaactccgctcttgcttgcagtaatttaagcaacagggccatgttttcccctacaaaatgtgcrtcaacacataaggacatggtgactttcaacaggtgcccatgttgggttgttcttacatatcaaagattcaaaactaaaattagtagaaaaggaaaaaaatcatgtatgtgaaagtatctttgtaattttaaaaattgcaagacatttaagtagctatt

SEQ ID NO: 785098 - DNA, 651 bp, Homo sapiens
cctgttctttttagtgtactgtgggattgaattttttaggatattgctgaaattttttgtatctgtgtccctcagagatatggcctgtagcttgcatctctctctctttccttctttctttctttctctttctttctttcttcccttccttccttccttctttctttctttttctttctctctctctttctttctttccccttccttccttccttccttccrtctttcctgcatccttgtccggtattaaaatcaaagtagtgctactcttgtaaaattaatttggaagtatttcattctgttcaattatttggaataggttgaggaaaattactattaattcttctttaaatttttggtagaattcagcagtgaacccattagaccctgagcttctctttgatggaagactttttgttaccgattcaattttcttactaatttttgttctgttcagattttgtatttctacaaaatttaatcttagcagagtgtacgtatccagaaacatatcaattttttctatgttatctaatttgttggcatatagttgttcttaatactctcacatctccttttgtatttctgtggtgtcagttgtaatgatgcatttttcacctgattttacttatttgagtcttctctcgtttt

SEQ ID NO: 785099 - DNA, 651 bp, Homo sapiens
cctgttctttttagtgtactgtgggattgaattttttaggatattgctgaaattttttgtatctgtgtccctcagagatatggcctgtagcttgcatctctctctctttccttctttctttctttctctttctttctttcttcccttccttccttccttctttctttctttttctttctctctctctttctttctttccccttccttccttccttccttccgtctttcctgcatccttgtcyggtattaaaatcaaagtagtgctactcttgtaaaattaatttggaagtatttcattctgttcaattatttggaataggttgaggaaaattactattaattcttctttaaatttttggtagaattcagcagtgaacccattagaccctgagcttctctttgatggaagactttttgttaccgattcaattttcttactaatttttgttctgttcagattttgtatttctacaaaatttaatcttagcagagtgtacgtatccagaaacatatcaattttttctatgttatctaatttgttggcatatagttgttcttaatactctcacatctccttttgtatttctgtggtgtcagttgtaatgatgcatttttcacctgattttacttatttgagtcttctctcgtttt

SEQ ID NO: 785100 - DNA, 651 bp, Homo sapiens
cctgttctttttagtgtactgtgggattgaattttttaggatattgctgaaattttttgtatctgtgtccctcagagatatggcctgtagcttgcatctctctctctttccttctttctttctttctctttctttctttcttcccttccttccttccttctttctttctttttctttctctctctctttctttctttccccttccttccttccttccttccgtctttcctgcatccttgtccggtattaaaatcaaagtagtgctactcttgtaaaattaatttggaagtatttcattctgttcaattatttggaataggttgakgaaaattactattaattcttctttaaatttttggtagaattcagcagtgaacccattagaccctgagcttctctttgatggaagactttttgttaccgattcaattttcttactaatttttgttctgttcagattttgtatttctacaaaatttaatcttagcagagtgtacgtatccagaaacatatcaattttttctatgttatctaatttgttggcatatagttgttcttaatactctcacatctccttttgtatttctgtggtgtcagttgtaatgatgcatttttcacctgattttacttatttgagtcttctctcgtttt

SEQ ID NO: 785101 - DNA, 609 bp, Homo sapiens
cccagctacttgggaagctgagggaggagaattgcttgaaccgaggaagtggaggttgcaatgagtcaagatcatgccactgcactccagccagggcaacacagtgagactctgtctcaaaacaacaacaacaacaacaacaamaaaaaaaaaacggagtttccctgcacaagctctcttctcttgtctgctgccatgtgagatgtgcctttcaccttccaccatgattgtgaggcctccccagccatatggaactgtaagttcaataaacctttttcttttgtaaattgcccagtctcgggtatgtctttatcagcagcacgaaaacagactaacacaatgtgtgtttctgcgtatatcaacagtccactcctaggctggaagcagtggctcacacatgtaatcccagcactttgggaggccaaggcaggaggaaggccagagttcgagaccagcccaagcacacagggagaccccatctctacaaaaaataaacaagttagctgggtgtggtagtgagtgcctggagtcctagctactcagtgaggtgggaggatcacccgagaccagaagtttgaggttacagtgagctatgattgcaccactgaa

SEQ ID NO: 785102 - DNA, 457 bp, Homo sapiens
aaatttggcttcttgatgcttgtttttttcggccaatgaatctgaacctactggaaggggcctttatgacacaacataattcacatagaactacttttctccaagctcaagaggcattaagtgcacaagcggattgtagataagaagttaagggggtcaaactgcacctmagtttagctgcaactctctcacctcccttgatttatctccagccatgaggcaccagctggcatcaacttatgaggccttcctggcactggtcagcccggctccacagggcaactaagtgtgagaagtgctacaacagacccaacccaagaagatgggtccctgggtccccttggacctttacgtcagagacctctatgaatgtgctttcagagccttagtgtccatagaggcaaatgaaaatacataccctacattggctcaacacattcccaaaccatccctctaa

SEQ ID NO: 785103 - DNA, 573 bp, Homo sapiens
ctaattgttcactgcctcgtgacagctattctgcgaacagtcggcattcctattaacatcttttatttctttgttccatgatgaattcttcacctgcctaactaaccttgggcaccccggcgcccctcatagtcctgcagaggaggccctgacctacctgaggaggtttcccctgggcaaattctgctctcgggcctggacgccacccatggtgaggctcagcctcttggccacatccggccttcccttgrtgaggctgccctcccgggcctggcctggggaggtgccataatgctcctccaggcaccgcagaggcaccgtcctgttgatgggctggaagatgatggcgccactctgctgggagatgggccggcggttgcccacgtagcagcgcaccaggccggggatggagtcgaagctctccatctcgaactggtactgcacgcggctgtaggcctcgctgagtcgcagaactgtccggttgattttgaagtgctgagcgaggttcttccactgacaggtcaggacaaagttcccagggctggacagagagtcacgaactaggaagtcacc

SEQ ID NO: 785104 - DNA, 540 bp, Homo sapiens
ataagcactgccctcaatgccagtttttccttgggcagccctaatactaacctgccctatttagtaaccatggaaacaggagctgcctgccagccatattcagcagacacatgcttcctgttggcagcagcccctcagctgagaagggccaagagagtgagtgcagagtccttttcccaaagcaccacggtccctgctagaagatcaggctcccagtgaggtaggccctctctccaacagggcatggagggagatggcaggagaaagatatgcctgctaggtacctgcttttcactgtttcagcacatctggaacrtaatactgcccatagccccaaaccctccccaaagcagcccagaatcagggcatcaagccttacactgaggcactcttgggctttgtcaagcggccccatggacagtgactctgcccatggctagaggacagtgactcaccccaggcttcaaggcctggcttgttcctgcccaaagggacatcggtcaggggtgaacaccagtaatcgtgatcagaacagctcaa

SEQ ID NO: 785105 - DNA, 643 bp, Homo sapiens
cagaccagcttaggcaatatgggaagacccagtcactataaataatttaaaaatgagctaggtgtggtggtacgtacctgtggtcccagctactgaggaagctgaggcaagaggattgcttgagtctgagaggtcgaggccgcagtgagctgtgattgtgtcactgcattctagcctgggcaacaaatcgagaccgtgtctcaaaaaaatcaaatcaaatcaaatcaaatcaaatcaaattcaactcttttgcaccaagscatcattttcactgtcctaaataaacccagggccaggcaccagacaactacggaaatcccttatgcttcccacctaccagaattattcaaactatcctcaagccatttaccctgctttgcctttcccaaggaaacctgtaggctgtagctgctcctgctcctgcctgctgaccaatcctggtgattcccatgtggccctgcatggtgtggcatgcccccttgtcttgggaactgtaaggaattaattatttcaatggtattagcctgtctgcgtcattactcagtcaacttcataaatttagatctgggcagacatcggtttctcagatggttttgtgtatgcctttgggggctgtcaagaggaatgtggagaggaggagcag

SEQ ID NO: 785106 - DNA, 643 bp, Homo sapiens
cagaccagcttaggcaatatgggaagacccagtcactataaataatttaaaaatgagctaggtgtggtggtacgtacctgtggtcccagctactgaggaagctgaggcaagaggattgcttgagtctgagaggtcgaggccgcagtgagctgtgattgtgtcactgcattctagcctgggcaacaaatcgagaccgtgtctcaaaaaaatcaaatcaaatcaaatcaaatcaaatcaaattcaactcttttgcaccaagccatcattttcactgtcctaaataaacccagggccaggcaccagacaactacggaaatcccttatgcttcccacctaccagaattattcaaactatcctcaagccatttaccctgctttgcctttcccaagsaaacctgtaggctgtagctgctcctgctcctgcctgctgaccaatcctggtgattcccatgtggccctgcatggtgtggcatgcccccttgtcttgggaactgtaaggaattaattatttcaatggtattagcctgtctgcgtcattactcagtcaacttcataaatttagatctgggcagacatcggtttctcagatggttttgtgtatgcctttgggggctgtcaagaggaatgtggagaggaggagcag

SEQ ID NO: 785107 - DNA, 643 bp, Homo sapiens
cagaccagcttaggcaatatgggaagacccagtcactataaataatttaaaaatgagctaggtgtggtggtacgtacctgtggtcccagctactgaggaagctgaggcaagaggattgcttgagtctgagaggtcgaggccgcagtgagctgtgattgtgtcactgcattctagcctgggcaacaaatcgagaccgtgtctcaaaaaaatcaaatcaaatcaaatcaaatcaaatcaaattcaactcttttgcaccaagccatcattttcactgtcctaaataaacccagggccaggcaccagacaactacggaaatcccttatgcttcccacctaccagaattattcaaactatcctcaagccatttaccctgctttgcctttcccaaggaaacctgtaggctgtagctgctcctgctcctgcctgctgaccaatcctggtgattcccatgtggccctgcatggtgtggcatgcccccttgtcttgggaactgtaaggaattaattatttcaatggtattagcctgtytgcgtcattactcagtcaacttcataaatttagatctgggcagacatcggtttctcagatggttttgtgtatgcctttgggggctgtcaagaggaatgtggagaggaggagcag

SEQ ID NO: 785108 - DNA, 630 bp, Homo sapiens
gatcaattgtatctattgctgctttaggggccagtaagatgaaaacagaggagtcaccatcgggtgagcagcctggaggtcattggggatttcggccaagtcagtttttgaggggtggtaggggattaagcctgattggagtgggctcaagagagaatggaggctaatgcaggcagatcacttgagtccaggagtttgagaccagcatggatgacatggtgaaaccccatctctacagaaaatacaaaaattagcaggtatggcggtgcgtgtctgtactcccagctactcaggatgctgaggtaggaggatcacttgagcccaggagttggaggttgcagtgagccgagattgtgtcactgcactccagcctggacaacagagtgagaccccrtctcaaaataataaaaaagagagaaaatggaagattcttcctcttctttttcttattcctcttatcctcttctcccctctcctctccctttctcctttccctttccttcccctctcttggaggtgccagaattaccagggactgaggaggcagcaggaccaagaaggcagcagcctggctggagaccatggatgtaggggagccatggtcatggtcatcatggttggggtattgtt

SEQ ID NO: 785109 - DNA, 630 bp, Homo sapiens
gatcaattgtatctattgctgctttaggggccagtaagatgaaaacagaggagtcaccatcgggtgagcagcctggaggtcattggggatttcggccaagtcagtttttgaggggtggtaggggattaagcctgattggagtgggctcaagagagaatggaggctaatgcaggcagatcacttgagtccaggagtttgagaccagcatggatgacatggtgaaaccccatctctacagaaaatacaaaaattagcaggtatggcggtgcgtgtctgtactcccagctactcaggatgctgaggtaggaggatcacttgagcccaggagttggaggttgcagtgagccgagattgtgtcactgcactccagcctggacaacagagtgagaccccatctcaaaataataaaaaagagagaaaatggaagattcttcctcttctttttcttmttcctcttatcctcttctcccctctcctctccctttctcctttccctttccttcccctctcttggaggtgccagaattaccagggactgaggaggcagcaggaccaagaaggcagcagcctggctggagaccatggatgtaggggagccatggtcatggtcatcatggttggggtattgtt

SEQ ID NO: 785110 - DNA, 634 bp, Homo sapiens
cattcaaaagatcttcattgaacatctactctgttccagagactttagtaggccctggagatactggagagcaaaaaaatggcatctttagggagctcatagtctagtaagggtgaagatattcatcaaatgatctgtcttcaaagacaaaggtttctgaagagaaggaactcagttctgtgygcgtgtatagcagagggactcagttcagcttggggcacttaggagggcttcccataggaggagacttttgagtgaaggtatgaagggtaagagttcactggtgaaagaagggagataattaggataggaaggagagatgtgtggctctcttcttgcttgcttttggaagtcctgctaaaaaatgtgagagagcatctctaaggcagggagtattgccttagagctgttgtcggtcatttacccttgagtataaatgacattttagttttttttccctgcaagtagtttgttgaaggggaatgaagaaaaaagcctgaggggcactgaatgctttggagaaaagccataaaatggcccaaaataagagttggggagacaagggctttgagacaaacttgctgattttgaatcttgcagccaccgctcctccctctgtcagggcctctctccc

SEQ ID NO: 785111 - DNA, 634 bp, Homo sapiens
cattcaaaagatcttcattgaacatctactctgttccagagactttagtaggccctggagatactggagagcaaaaaaatggcatctttagggagctcatagtctagtaagggtgaagatattcatcaaatgatctgtcttcaaagacaaaggtttctgaagagaaggaactcagttctgtgcgcgtgtatagcagagggactcagttcagcttggggcacttaggagggcttcccataggaggagacttttgagtgaaggtatgaagggtaagagttcactggtgaaagaagggagataattaggataggaaggagagatgtgtggctctcttcttgcttgcttttggaagtcctgctaaaaaatgtgagagagcatctctaaggcagggagtaytgccttagagctgttgtcggtcatttacccttgagtataaatgacattttagttttttttccctgcaagtagtttgttgaaggggaatgaagaaaaaagcctgaggggcactgaatgctttggagaaaagccataaaatggcccaaaataagagttggggagacaagggctttgagacaaacttgctgattttgaatcttgcagccaccgctcctccctctgtcagggcctctctccc

SEQ ID NO: 785112 - DNA, 619 bp, Homo sapiens
tgttttaatggaacttaataagctgattctaaaagtcatatggtacaggagatgggcaagaatagccaagataattttgagaaagaaaaacaagtggtggaacacagtaggggaaaaaggactggatttgccctactaggtagcatacgacaaagcaacaaaaggattaaacagtgtggcaatggcacagggatagacacactgacctacagaactgaggagctcaggatttgacctgtgtccagagggaatttgccatatactagaaagggcatttcaaatgatggacattggtcaccaggagcytgaagctccctccctgttctttagctctgaggttttttgaagaaggcccacccaggcagcctcctcatgcagaaccattttctttcctttcctgcccaacccctccaagccctcaccccttcaaaaattgcctgatgcaggtaccgtttccttaagacctagctcttatttttttcttctttttctattgtaaaaagaaatacatggatggatgagtatattgtattcattatattggttagatggtgagtatattgtattcattatgttattcttgttctcttctgcacttttgaaatatattatcatattt

SEQ ID NO: 785113 - DNA, 607 bp, Homo sapiens
actgagttgtaagcattcttgttttgctttgtttttgagacagggtttctctctgtcaccaaggctggagtggagtggcatgatcttggcctccacctccccggtcaaggtaatccttggcttcaacctctgcagttggctcaggtgatcctcctacttcaacctcctgagtarctgggactacagatgtgtgccaccacacctggctcatttttgtgtagagatgagttttgccatgttgccaggctggtcttaaactcttgggctcaagcaatccacccgcctcggcctttcagagtgctggaattacaggcatgagccactgtacctggccagaatgttctttataaattctggatatgatgtgagataagagttaagcctcattttttttccatgtggtttttcaattgttctagcagcatttcaggaaaattatcctttccttgttgaattgccttggcactcttgtcaaaagtcaattaattgactgtgtatgtgtggttttacatctggactgtctattaggttccatttaaccacaggcaataccactttatctagattactgtcggtttatagtaagtcctcaaattaggtagcataa

SEQ ID NO: 785114 - DNA, 524 bp, Homo sapiens
caaagtaaagtttataaagctttattaaacatttcaaacagctgtgcaacgaacacaccaaataaaagctctagaatagcagtccagacgtttcacaagtatggcctcacagtcccattccctagatggactgcctccagttctgttctctgcctggcccatctctctttcccctcaggcaagagagagatggatggatcagactgaaaggacaggcatgctgatctccagcaggcaggggccaggagaaagtctcgtttgccaacacttgttactgaagcgcagaaaaagcagcaagtgacagtcacaaagtcttcctgggtattcttcataaygtacagtctatatgcgcaggaacgaagaagctcctggcgggaggatgatggccactgctcccctctgtcttgtctgaaccacctcggagtccagtgtgctggtcactctgcaatccccatgctaaataaaaactgtagcggcacctaccatatatagctagctattgctaaacctcaaaatcagaccac

SEQ ID NO: 785115 - DNA, 528 bp, Homo sapiens
aattattcactttaagttttgaagacaatttgtagtgtaggaggcaagaagagatcaatactcagagcaataactaaaaactagcaaaaaacaacaaaacaaaacttctgaaaagcagagtccttctggtccaggctgcagttaactcaaatccctgccaagctgttcccatctgatgctggcaggtccttggctccttgagagagaagagcgtcctgaacracgccacagaaccctcaagattaacccagcaccacccacattccctctcccgagaagtgcaacaccctgcctctcaacaccgcactgcttcctcaagaacactgacattagtccaagaactgcagaagcacttaagggcttcccagaactttcttgactcaggtatcatcacaaagcacctccctacactctgtaaggctgtcagtgcacaaacacaaactcaggcctcctctctgcaccttgctcacaagccatctccacaaccaacactcatctctgcccagacaaatgtgacccagctccaca

SEQ ID NO: 785116 - DNA, 540 bp, Homo sapiens
ctagcttctaattcagtaattctttcttcagctatgtttcatatacttttaaacctatccattgaatccttagtcttgggtattataattttcagttctagaattttaatttttttaacaaagtttcaattccctgccaaaattctcaaaccatgtctatttccatcatgtwtttttatctctttgaacataataagcattgctgtttttttaattataaaatctgcatctgataattccaacatctagaacccctgctgtatatgcttttatgtttgttcatgttgtccagtctcatgtgtttggtttttggtgttggttttggtttgttgtgtgtatgtgtgtgttttatttgtttttttgtgagttgtttttgtttgtgtgtgtgtgtgtgtgtgtgtgtgtgtgtgtgttctggacattgcaggtgcaaagttgtttgtagaaattatctgacaccaggatgacatcttcttccagagaggatttgcaagaccctgagggcactagcaacattggatcgccttaatccaatttcag

SEQ ID NO: 785117 - DNA, 625 bp, Homo sapiens
cttagcaccacgtccagcactattgtaaatgcttaatgatattcggtgaactgaactgacctaggaagctaaaattacatttggcatcaaacgatctatcagaagttgtgtactgtcaacagaatcaaagctgtaacaatataaagcagccaatgcagaagaaataatcagaggagagctccatcacaatttgtgttagaatcaggggaccaagactcttacaggtaaagttggatttggagaccttaccagaatgtggccattagcagacccagaaatgtgggaaatrgagagcatggaacgagagcaagatgaagtgcaaatggtgacatttgaagcagctgcagtgaaaagcaaaagaagttgtttatgaccaccagcaatgacacataaccgtggagaattcaactggagtagattacaagatggtggaccctaagtataccttaatcgacatttggttgctagcgcccagaaattgtaattaggagaaagtgaaggaggcatggaacacaactgcatcaggacaaaacctgattaaaacagtatagaaagacccaggattacctcaacttgacccaaatagatgagtatccaaggcaaagggagagtaatacgtaacatt

SEQ ID NO: 785118 - DNA, 628 bp, Homo sapiens
ttatcagataaatgcaaatcaaaactacaatgacatatactgcactccagttaaaatggcttttatccagaagactagcaataacaaatgctggtgagaatatgaagaaatgagaactctcataaacttggtgggaacgtaaattagtatatctgcatggagaagagtatggaggttcctcagaaaaataaaaatagcactattttgtaacccggaagtcccaccgctaggcatacacccaaaagaaaagaaatcagtgtattgaaaagataactgctctcccgtgtttattgcagcactattcacaatagccaagatttggaatcaacctgtgtccatcaacagacaaatgtacaaagaaaacgtggaacatatatacaatgaaatagtattcagtcrtaaaacagaatgcaatcctgtcatttccaacaacatggatggaaatggaggacatgatttaagtgaaataagccagggacagaaagacaaacttcacatgttctcactcatctgtgggtgttaaaattaaaacaattgaattcgtggaggtagaaagtagaatgatagttaccagaggctgggaggggtagaggggagtgaggaatggggatggttaatgggtacaaaa

SEQ ID NO: 785119 - DNA, 614 bp, Homo sapiens
tggaggacatgatttaagtgaaataagccagggacagaaagacaaacttcacatgttctcactcatctgtgggtgttaaaattaaaacaattgaattcgtggaggtagaaagtagaatgatagttaccagaggctgggaggggtagaggggagtgaggaatggggatggttaatgggtacaaaagtatagttgatagaattaacaagatccagtatttgatagcacaacaggatgactgtagtcagaaataatttattgtacatttaaaaataaaagtgtataattagaacatttgtagtacaaagaaatgatacatgcttgaggtgatggacactccacttacactgakgtgattattacacattgtatgcctatatcataatatctcatatatcccataagcatatacatctactatgtacccataaaaattaatttaaaaaaaagtgacaaaattgctctcctaatcaagcctatgtcatgcatatgagaagctaaacatcaggcttatgtggattgttatgtttttatcagacataatttacaccacttttatgaatattgacaaggtcaattttataaatcaccaagtgatgttgaggctctataataa

SEQ ID NO: 785120 - DNA, 502 bp, Homo sapiens
atgagaatagtaagtacactaattaaaaataaattaaataatccacttgtatgttaccattaaaactcctacattatcttttaaaaatgagttttagacaagcagttttgcagaacaataaaaacaaaactagtgtcctaactttatgaagattgccttaaataaattattgatgtaccttgaaataagtttaacacctttatatgttcatggtaaaatgcacttttgtattttcacttatcactatgggttgttaagcccgtattgtgcataaataatcttgataaaaattttaagagaaaatcacattgtgtgctagtgaatcaacagaraggagattactttagtcatgccctgtaataacaactttatctttgtcaagggagaagccttgaaagttattcttcaggaaattgctctcgtatctgtatgttaataacaaaaagaagaaacataaaaattgaatgtggaaatataaacccccaaaattataacagaatta

SEQ ID NO: 785121 - DNA, 589 bp, Homo sapiens
tttaatgacacgtttatcattaccaccattaacgatgatttttttaatgacacgacactttttttcccctgggagatcctcatttccattttacactgagcctcacatattgcgtagtctgccctaggctaacaactgagtcacaagatctgtaagactccaagattcataytataaactaaaggttctcaatactcttttatttcatgccacacagagaaaatgattatatttataaggaatgctaacaccgagggaaactgaggacaccacttgtggccaaagatggccagctggagggccttcaggactgagaggatcaatatctcagcacaactggaagggcctcagtacactgcttgggtagctccgcatcaaaatttctacgtagggatgcctcaatagtacttcctcctttcaccccgattctttttgtatctagtactccaaatagttactcagttttttcaaacaatactgataatgatagtaaaaacataaaatacatatatagtttttgctttgtcccatgtatgtttctcaatacttcatatatattaaccaatttaattttgaaaacttcatgagg

SEQ ID NO: 785122 - DNA, 570 bp, Homo sapiens
acagaatgtgaagtgaaaggagattattcttcagtttaacacttactattgatttccctatttggctttgcacttatttgggaccagtggctcctttttcatattattttccttttgaaatgggaatgtctatcctmtgcctgtctccctattgtattttggaaaaacatgacttaatttcactgattcacaactagggatgaatttgccttaggatgaattgcattttgaatctcattcatctgattcagttaagatcctggactttgaacttttaaattggtactgaaatgagtttatactttggggtgttgggagggaatgaatgtattttgcatgtgagaagaccacacattttgagaaccaggggtggaatgccatggttttaatgtgtcccacaaaattcatgtccgggaaagttagtcttcattgcaacagtgctgtcagacttttgggaggtaattagatcatgagggctttgtggttattgcgggagtggattcattatcattagtgtgagtttgttataaaagcaagtacagccctttttagttctgtctctgcggtgtg

SEQ ID NO: 785123 - DNA, 606 bp, Homo sapiens
gaataccctttattctctctcttgcttgattgccctggccagaacttccaatctatgttgaataggagtggagagaggacatccttgtcttgtgtcagttttcaaagggaatgcttccagcttttgcccattcagtatgatattggctttgggtttgtcataaatacctcttattatttygagatacattccatcaatacctcatttattgagagtttttagcatgaaggggtgttgaattttattgaaggccttttcttcatctgtagagataatcatgtggtttttgtcattggttcagtttatgtgatggattacgtttattgatttgtgtacatggaaccagcctcgcatcccatggatgaagccgacttgattgtggtataagcttttctatgtgttgctggattcagtttgcctgtattttattgaggattttcacatcgatgttcatcagggatattggactgaatttttcttttgttgttgtgtctctgccagtatggtatcaggttgatgctggcctcacaaaatgagttagagaggagtccctctatctctattgtttagaatagtttcagaaggaatggtaccagctcttctttg

SEQ ID NO: 785124 - DNA, 638 bp, Homo sapiens
ccctggttactatagcaaataataataaattgcatacttgcaaaattctaagagagtagattttaaatgttctcattacaaaaaacataagtatgtgaagtaatggatatgttaattagcttgattatgtcatttcacaatgtatacacatatcaaaacataatcttgtacactgtaaaaataattttttttcagttttcaagtcaatataattttaaaaattaattaattagctatccacaaacatcccaaaacgaataagatacactagaacatttactgtaaattgggccagctcctatgcacrcccatctgtcatttggttacagatgtgccaagagtattctaccaaaatccaagtgtaaagtttgccaggtgtaaattttaaatctgattgtaatagctaagctttttccagttagacatgttttgttgtgcattgcatgcaaatgttcttactctagcattttaaaattcattattctgcttatttgcttttatatgagaccataaactttaaagtacaatatttcagttcagattatctggcaaaactatccatgggaaagtgagtagagccaagggaaagcacacaccacacatgctatccattgattagcattgaatatgtatagata

SEQ ID NO: 785125 - DNA, 630 bp, Homo sapiens
atatatatatatatataaaatcaatatatatattgattacagaatcatctatatatatagaatctacatatataatctataatctataatacatatattataatatattatatataacatatatatagaatatatatatatatatatagtaattttaagacaataagtttgggggtgggttttgctgcagcactagctaaatgatacaagtaactttccatcctactrtgtattttactctaatttttcttttacctttgcccacaagtcccttggttatctataattttctcccacgatatcttttaatatgattcttcctatttttttaatatgatttttatatgattcttcctattttttaaatatgattcttcctattctttgttgcaatatctttttttatcgattttagattgctttttttattattattatactttaagttttagggtacatgtgcacaatgtgcagatttgttacatatgtatacatgtgccatgctggtgtgctgcgcccattaactcgtcatttagcattaggtatatctcttgatgctctccctcccccctccccccaccccgcaacagtccgcagagtgtgatgttcccttgcaatatcttaaaagct

SEQ ID NO: 785126 - DNA, 484 bp, Homo sapiens
ttttttttttgagatgagagtattgttatgttgcccaggctggtctcaaactctgggactcaagcggtcctcctgcctcagtctctcaagtagctgggactacaggtgtgtgccacaatgttgggctagtgactatttttcaaatattcaaccaatgggtattgagcatctactctgtgccagacagtaaataaggtgctgggggagatgaaraaatgctgatgcgagcaatcattagtctctgcctttgaattgtgctcaacctagttgttgagctacacaaagagggaatgagaggtaaggctgcaacagaccaggctaaaggggccatctatgcgatcaacctcctccccaagacttccttccctccacacctgaggcttctacttccatgagattagcgagatgtaagcacatctcactaatctatatttcagttcacaacgctttcctcagttccaggccctagtgttgccaactgtct

SEQ ID NO: 785127 - DNA, 521 bp, Homo sapiens
aagcaaagtttggctagacacagtggctcacacctataatctcagcgctttgggagactgaggtgggaggattgcttgagcccaggagtttgagaccccatctctacaaaacataaaagtattaggtgggcacgacggcatatgcctgtagtcccaattacttgggaggctgtwgtgagcgaggatcacttgtgcccaggagtttgaagttgcagtgagctatgatgatgcagcactgtactccagcctgggtgacagagccagactgtctcaaaaaaaaaaataaaataaaaaataaaaaaaaaaagcaatgttctattatgtgtgtgttaacaagctgggcccggtgatacttccctgtagtcccagctactcaggaggttgaagtgggaggcttgcttgagcccaggagttcaaaaccagcctgggcaacatagcctgggcaacacaatgagacttatctcttaaaaaaaaaaaaaaagtgtgttggccttactaaagagaccaaatgtctttaagtc

SEQ ID NO: 785128 - DNA, 650 bp, Homo sapiens
ttatttgtactatcttcacccacaaaaatgtcagcttcctaagggaagggatatttgtgcctgttttgttcactggtgtttcccaaccccaggagcagtttgctgaaagaatgagtgaaggagagcatgtctgattattagaggttgtagacagagaggggagaatgatcagggagcatgtgattaagaaggtgacatttgagctgggtcttacagggtgagttgaaattttaagggggaaaggcatgctgtgcagaaggctcagcacatgcaaagcatggaggtaagaagaagcccagtgtgttcaacctaagtgtaaaatgtgccttcttcaacctggcttygtaacctccaagctatgcattgttgcttcagggtgcaggtctactgtgcttatatctttgttagtgaagcatagctattttcttaacacaggtaagaccaatttgaattcctgaaagacacaagatgtatgttttttcttagtctccagtgcctaatgactaatttaagctagcaaaatcatttatgaaggtgactcagccatccatctaatgagctcagtagtagactgttctcttgttattttgtttgttcattcaaattaaccttaaaaaagcctacatgtactcatttaaatactgatgtca

SEQ ID NO: 785129 - DNA, 690 bp, Homo sapiens
cagcatttgcagatttgactagtgttcttcttacaacattttcttcatgtatcctctggttttcctccaattttattacctcctctttttcaagtactggacttctcttcctcctcttcatgacctttaaagttggatcaacccagggctcaattattggccccttatagtcttattcatggttgtgaaaccttttatatattaacaatttccagatctatttctatagcatagacttatcccatgagctccagacctacatatctaattgacttctcaacttcactacatggakgttaaatggggatctcaatcttattacgcttaggtccaaaacagaatctcgatttaccccataatcctttcccaggcctcccattcagaaaaggacagctctctttcatctgcttatcccagaaaatgaagtcatccttgattttgttctttccctttagttccccacaaaggacactggcatgtgctcttaacattaccttcaaagtatatttggtatcttacacctcccagcacttccaccatttgccctggtccacatcaacttcatctctcacatggaatactgcagtcatctctttattagtttctcacttccacttttgcttcctgtgtcaaaattaatttcaactctctgcaaaaaatttaaaaagttgtaagcaagatatgtttatt

SEQ ID NO: 785130 - DNA, 690 bp, Homo sapiens
cagcatttgcagatttgactagtgttcttcttacaacattttcttcatgtatcctctggttttcctccaattttattacctcctctttttcaagtactggacttctcttcctcctcttcatgacctttaaagttggatcaacccagggctcaattattggccccttatagtcttattcatggttgtgaaaccttttatatattaacaatttccagatctatttctatagcatagacttatcccatgagctccagacctacatatctaattgacttctcaacttcactacatggaggttaaatggggatctcaatcttattacgcttaggtccaaaacagaatctcgatttaccccataatcctttcccaggcctcccattcagaaaaggacagctctctttcatctgcttatcccagaaaatgaagtcatccttgattttgttctttccctttagttccccacaaaggacactggcatgtgctcttaacattaccttcaaagtatatttggtatcttacacctcccagcacttccaycatttgccctggtccacatcaacttcatctctcacatggaatactgcagtcatctctttattagtttctcacttccacttttgcttcctgtgtcaaaattaatttcaactctctgcaaaaaatttaaaaagttgtaagcaagatatgtttatt

SEQ ID NO: 785131 - DNA, 630 bp, Homo sapiens
agttttctgctactccctgaagaactttgtcctaacacagtatgcatagggcatgtgtattcttgcaagtgtgtacatatgagtaagggatgactccaaggaatgacattgatttttaaaaagaaaataagccgggcgcggtggctcacgcctgtaatcccagcactttgggaggccgaggtgggtggatcacctgaggtcaggagtttgagaccagcctggccaacatggtgaaaccccgtctctactaaaaatacacaaaaaattagctgggcgtggtggcaggcgcctgtaatcccagctacttgggaggctgtggcaggagaatcacttgaacccgggaggcrgaggttgaagtgagccaagatcgcgccaccacactccagcctgggtgacaagagcaagactccatctcaaaaaaaaaaaaaaaaaagaaagaaagaaagaaagaaaatacaccagaatcttctggctagttttagagaaggggttttttttgtgtgtgttatattattatcattaaaatgtttgtaaagatgcagccatgggtagttggatgttgtttgctagctgtttgattctctgacttcttctaagattggttcttttgtacaaatgtaaggcaagttc

SEQ ID NO: 785132 - DNA, 627 bp, Homo sapiens
ttaactataatggcaaattattcaaacattttaactccctactaaccttctccaaatgtgaaccatttactaaatgacagatttttttttttttaggattatggcttaacttactggtctcagttatatatcttctcattttgccacaaaatgctagtaaaaactttcatttagcaagtgcttacaatatgataggtatatttccaaatattatctttactctaaacaacagctcatgtttccaaaatggcagttccagatgtcagagatttttttgactaatccatgctgtctcagcatgttttctcatatcttgaaactccttctaacttcatatattatgagaaatcatgaaaggaacctcttatctgcccagaaaatctcaccatatctttgggaaaaagaaataatatctacctcattcgtaaatgttgtgattarttggccaatgtgtaatattaataatagcaaacatctatggtgcatgctttattatgtgagatgttgtattaagtgtttcaaacatctaatttcagttttcacaacttcatacaagtattttgttatcctcactttacagatagagaaatggaaactccaaaagattaagcaagaagcccataggaa

SEQ ID NO: 785133 - DNA, 575 bp, Homo sapiens
ttactgtatgagctcatgaacggttcattccttgctccaatattgtcttttctctcatacaaaaaactcttaccaagagaaactcttacctgagaaacaaatatatattgctaacctggaagagttagaaggcagtgtcttttagcattaytcttcagtgttacagtggtcacagaatatttcacttctgtttttttctgatgttgcctctgatgtctggcatagaatgagaggtttctacataagacccaggagacatatcagggacttagacctaattgagttgacttaatcaaagtgtctggttatccagattcacataaatagaaactttttaagtgcataaaagtaagcctcatttgatactttaacctaaaatgccattgttaaattgtgtgtttttttattaagtagctttactaaaaataagactcagaaatgctcttcactttctggaaaccatcactgccttcttctgaattgtgacagtggtccctctagggatatgtggtaaaattatcaagtttttacatagatgaaaatttgacccataaggggtacgcacatgctttgtg

SEQ ID NO: 785134 - DNA, 606 bp, Homo sapiens
tagtagagaacagcacatgacagggaacttcggtggcctcctgagggtgcagcttcaaggaactaaattgtgccaacaaccaatgaaactgactatacataatctgtaccatcatttgtggacttggactttgaagttggcccagcatagcatgaattcttagctgtgtaactcagtcattgtatatgacttgggttawtttttgaagtcttcagtgaattagtgcctgcaatggaaaaaaaaaaaaagccaaccatattaatagcctaacagtgttgctctgaggactggagataatgtatgcaaaatgtctggcacacagtagattctccattacagttattgggagggggaatgagtggaggtcactggcctcttcaagcctctgcctttcatctggtaataacacccacacattgttgagaagattaaataagataacagaaaggaaaatccttaaggtctcaataagtgctcattgaacagtggctatccaatgctcatactaccttttctctcataaatatacatgtacatatacatattttcacatatgtatatatttatatacctataaatagagagacagagagagaataccaatac

SEQ ID NO: 785135 - DNA, 625 bp, Homo sapiens
aaatgttatgcatatgatataatgatctttagttcaaaaatacttactgtgcagatcttaatagaaaatctagagttttaccttcatggtgacatttgtcacttaactgggtgagaaagatgatatgaaagcattctcacatgggggtcatagtaaaataactgaaggagatacagatgaggccaataaaagcaaaaaatcccatatgatgaactgttcagatgtgtcagtaggaaagaataagttctttaaatacttatgtcagtattgttgctattttgtttttaatattaataaatattactmttttattttaatatttaattaatattaaatttttaaataatttttaaaaatttaaattatttaaatttaatttaaattatttaaaatatttttatttaaatatttaaattaatttaatttaaataattaaattaatttaattatttaaaaattttaaatacttaaattaatattaaattaatattaaatttaaaattaatattaaatttgttgaggctgcttttggaaatcaataacttgattttcattatcattttaaagaacataaggccatttattgatttaaggtgactcgatttaagtttgggccttccttcct

SEQ ID NO: 785136 - DNA, 606 bp, Homo sapiens
tagtagagaacagcacatgacagggaacttcggtggcctcctgagggtgcagcttcaaggaactaaattgtgccaacaaccaatgaaactgactatacataatctgtaccatcatttgtggacttggactttgaagttggcccagcatagcatgaattcttagctgtgtaactcagtcattgtatatgacttgggttattttttgaagtcttcagtgaattagtgcctgcaatggaaaaaaaaaaaaagccaaccatattaatagcctaacagtgttgctctgaggactggagataatgtatgcaaaatgtctrgcacacagtagattctccattacagttattgggagggggaatgagtggaggtcactggcctcttcaagcctctgcctttcatctggtaataacacccacacattgttgagaagattaaataagataacagaaaggaaaatccttaaggtctcaataagtgctcattgaacagtggctatccaatgctcatactaccttttctctcataaatatacatgtacatatacatattttcacatatgtatatatttatatacctataaatagagagacagagagagaataccaatac

SEQ ID NO: 785137 - DNA, 631 bp, Homo sapiens
cgggaagccttctatgtcccctctccccacattcacctagccttctcctctgcagccttaactgggggtgctcctgctgcaaagcctcaatgttttgcctacttatccctgtgagccatgggagagagggtccctccctgccctccaggagcttccagaacccaagtgctagaatctcccagcatacaaaggggcagggggcatgtgtacatgcctgcacatgtgtgcccccagaagcaagtgggacttctgtgtcgaggacttctgattcctgcagagaaagagacccgtctgtgggcaggggcctccttstgcacactcctgcgatataatgtgtgtctcagcctcactccttcatcttccccatctgtgtgaaggcctgagctgccttctgtctagagaaagactgatgataataaaaatactatcctatttgccggatgaggagaccgaggcttagggagactcgctcagatgggtacttttcaggctagagggacagaggctgatggtacaagccagagtggccaccgtagagaggacccctttggagcagccagtccccttcttcccaccctcccagacagcagggtgaagggagcagggggaagcagttgagaagctgtgcaga

SEQ ID NO: 785138 - DNA, 645 bp, Homo sapiens
gtcttagatagattgagattaacagaggtaagatcactcaagatcccagatggattagtgtgccgagtggcaagaggcaactcagcagccaaagatgctcttggttggcactaggaaaactatacacaggccttccattgtctggaacacccatccccttctttgtctaggtctgtcttgttatgttgcctgacatctagcaggcactcaaatatttgttcattgaatggatacattcaatacttagagcagagggtttgaaattagccataggacactcacaaaaaataagttggtgtgagtgtccaattaatattatacaccaamtatattcagataggataaagttgtctggaggttaaagggggccagtattgattatttactttgtccaggctaaggaagatagtgtccaaaaactgctaggggcatggcggggaaaaaaatctggccaagagtcaaagggatgtgaaggtgtcaaaaagatgtctcttacctctcttcctgctccggctcatgggcactgaccattgttattggttaagggtccttgcatggaattttgatggcagtgtctgaatattatctcatagcctagtggagtttgttagagattttgtaaatttgcttaatcagatatcattt

SEQ ID NO: 785139 - DNA, 645 bp, Homo sapiens
gtcttagatagattgagattaacagaggtaagatcactcaagatcccagatggattagtgtgccgagtggcaagaggcaactcagcagccaaagatgctcttggttggcactaggaaaactatacacaggccttccattgtctggaacacccatccccttctttgtctaggtctgtcttgttatgttgcctgacatctagcaggcactcaaatatttgttcattgaatggatacattcaatacttagagcagagggtttgaaattagccataggacactcacaaaaaataagttggtgtgagtgtccaattaatattatacaccaactatattcagataggataaagttgtctggaggttaaagggggccagtattgattatttactttgtccaggctaaggaagatagtgtccaaaaactgctaggggcayggcggggaaaaaaatctggccaagagtcaaagggatgtgaaggtgtcaaaaagatgtctcttacctctcttcctgctccggctcatgggcactgaccattgttattggttaagggtccttgcatggaattttgatggcagtgtctgaatattatctcatagcctagtggagtttgttagagattttgtaaatttgcttaatcagatatcattt

SEQ ID NO: 785140 - DNA, 628 bp, Homo sapiens
cctgccagatgtctccctcttctccccttgctgccacctcactaaggggtttcacctgcatctgtctctcactcagctctaggtgtgtgtgtgtgtgtgtgtgtgtgtgtgtgtgttttgttttgtttttagctctaggtgtttttattgcctatgcactccctcttctcattggcccttcttcagggcatctttgactggtgacctaattcgttcaaattattgttttaatgttgtaactcctccacaatatacatacatttatagaagcatattttgaaatatttatctatgcgttttcttatttcttttagcactttcagcattaacattagacagwgaggttgaatcttatagccccagggaaggaaggacacaaggaagcacagagagaaggaaagatttcattgagcttctaactggattaaaaatcagacaaacactagaggcaatagacagaaaatttctggattttaatggcaagtgttggtttctgcttctggtaatggtagagtagcttctgtcagaataaccctctctcaaataacgacaaactctgcataaaataaaaacacaaccttcggaaggcattagaaatcaagccaaagcaggcacatgcatatgaatt

SEQ ID NO: 785141 - DNA, 514 bp, Homo sapiens
taaatgttttctaggtctgagtgtagatgttactgaagtcacttgaagaaaaaaataggattattttaattttattgatatttgctgtatatatgtgtgcatatatatatttttgagatggtttcactctgtcacttagattggagggcagtgttgtgattgtggctcactgtatctttgaccacctgggctcagatgatcctctcacctaagcctcctaagtaactgggagtgcaggcatgtgccaccacgcctggatgattctttgtattttttgtgaagactgggtttcaccatattgcccaagctggtcttgaactcctggactcaagccatctgccgcctcargcctcccaaagtgctgagattacaggcgtgacctactgcacccagccaatatttactatatgttaaaagttatattcaccatttaggtaaacttgtatatgttaaaagtgtgaattagatattggcagtatctaaaactacatggcttttaaaagttactttgact

SEQ ID NO: 785142 - DNA, 479 bp, Homo sapiens
tgcctctggaggtcctgatgacatgcgtccaaggtggtcagagcacagttggttttataaattttcgggagacatgagacatcaatcaacatatgtaagatgtatgttggttccatccagataggtgggacagctcaagtagggaggggcttccaggtcacagataggtgagagacaggtaggtgagagacacaggtaggtgcattcttttgagtttctgattagcctttccgaaggagcaatcagatatgcrtttatcttactgagcagagggatgactttgaatagaatgggaggcaggtttgcccgaagcagtttccagcttgacttatccctttagtttaatgattttggggtcccaagacttactttcctttcacaagattaagttgcagatatgatagtcccaaccccttgaaactttgtatttcctatgaaccaggataatctcctatataaccacaatataaaactattaa

SEQ ID NO: 785143 - DNA, 653 bp, Homo sapiens
tgtgaacctgcagacccaacaccacatgtaagccaccaaagcttgggacttgcacccgctgaagcaatggcccaggctgtgccttggccccttttagccatggctggaactaaagcagctgggacacagggtaccatgtcccgaggctgcatagagcaggggtacctgggcctggaccaggaartcatttatccctcctaggcctcctggtctgtaatgggaggagctgccatgaaggtctctgacatgtcctggagacattttccccactgtcttgatgactaacattcggctcctcattacttatgaaaatttctgcagcaggcttgaatttctctgtagaaaatgggtttttcttttctactgcattgtcagactgcaaatttttcaaacttttatgctctgcttccccttgaacactttgctgcttagaaatttcatccaccagatatgctaaatgttttctctcaagttcaaagttccacagatctctagggtaggggaaaatgccaccagtatctttcctaaagtatagcaagaatcaccttcattccagttcccaacaatttcctcatctccatctgtgaccacctcagcctggacttcattgtccatatcactatcagcattttggtcaaagccattcaacaagt

SEQ ID NO: 785144 - DNA, 653 bp, Homo sapiens
tgtgaacctgcagacccaacaccacatgtaagccaccaaagcttgggacttgcacccgctgaagcaatggcccaggctgtgccttggccccttttagccatggctggaactaaagcagctgggacacagggtaccatgtcccgaggctgcatagagcaggggtacctgggcctggaccaggaaatcatttatccctcctaggcctcctggtctgtaatgggaggagctgccatgaaggtctctgacatgtcctggagacattttccccactgtcttgatgactaacattcggctcctcattacttatgaaaatttctgcagcaggcttgaatttctctgtagaaaatgggtttttcttttctactgcattgtcagactgcaaatttttcaaacttttatgctctgcttccccttgaacactttgctgcttagaaatttcatccaccagatatgctaaatgttttctctcaagttcaaagttccacagatctctagggtaggkgaaaatgccaccagtatctttcctaaagtatagcaagaatcaccttcattccagttcccaacaatttcctcatctccatctgtgaccacctcagcctggacttcattgtccatatcactatcagcattttggtcaaagccattcaacaagt

SEQ ID NO: 785145 - DNA, 576 bp, Homo sapiens
gtggtgacacggagccaaactatatcagtcctggcataacaacagacatattgactaatggaacagaagagataacccaggaagaaatacacctacagtgaacatacactggggaaaagaaagtctttacagtaagtggtgctggaaaaactgtatttccatatgcagaagaatgaaactagacccctatctctctccatatacaaaaataaaatcaaaatggaataaagacttaaatctaagacctcaaactatgaaactagtacaacaaaatattggggaaaatctccaggacttcgctctgggcaaaaagttattgagcaataccctataagtgcagrcaaccaaagcaaaatggaaaaatggcatcccctcaagttaaaaaggtcctgcacagcaaaggatgcattcaacaaagtgaagacaactcacagaatgggagaaaatatttgaaaaccatccatctgacaagggattaataataagaatatataaagaggtcaaaaactctataggaaaaaaaatctaataatccaatcaaaaatgggtaaaagattatatataccaactacataa

SEQ ID NO: 785146 - DNA, 602 bp, Homo sapiens
agaccatatatgtccattttacacaaacacttgcaagaacaggtgccataaaaccaaaggagtgcctgagagggggtcattctctttgtttttcctcattcatagattatttgtttccaactatttttttaagggaggaactgagctgtggcctaggattttagtgcagtgagtagaagtgtgctggttatgggtsgaactccacagagtgtcaccactgagtcatttccaccctctcacatgtctcagtttctctatccggaggtctagacctgcgagagggctcaaaatgcagagtgaccagctcctatatgctcttcttggtcgagccttttacagttaattttgttgggggtttcctgaagggccactgacccccagacactcccacttggcccccagtcacccagggctgccttttggctgggatgagcaaaatgcccattctcctcagagctgaggaaactcagtgtctcatttatttatgaaaacaacagttcagttcctcatacaaatgtgcagacaacaatcgagattaatttcaggagaaaaaaggcagtggagaagactctttagaatgcccttctgaactagtatcagaa

SEQ ID NO: 785147 - DNA, 658 bp, Homo sapiens
ccacatggtccctgccacctcaggatccaattattcccattgtatttaaatattgtagttcagttgctgcggttctcactgttagatcggacatacagagaaaagcaattacggggctcttcaaagatgcaggtgctgccctygtaaatctattttgcaaaacattggtcaagggcatatcttctggacccttccagctgtgattggtacgtctagaatgactaatttgcaccaccatcacaatctcctcaagccactatcctcctcaaactaacacaggaacataaaaccaaaaatcaaataccagagaaccagataagaggttctcacttataagtgggagctaaatgatgagaaaacatgaacacatcgaggggaacaacacacactgggacctacttgagggaggttaggaggaggtagagtatcaggaaaaatgactaatggatactaggcttaatacctgggtgatgaaataatctacaaaacaaaccctcatgacacatgtttaccatgtaacaaccctgtacatgtacccctgaacttagaataaacatttttttaaaaaattgtgatactgtcagtttattgtaaatctcatttatcaggtgtagaaagtttttgtctatcctaattttattacatattcttatcataa

SEQ ID NO: 785148 - DNA, 570 bp, Homo sapiens
acataaatttaatttcctcagcaaggccatttttactttctgcagaaagggtacacttgccagcagttttgccatgaaagtacactgaacaaaggagacagggtcatttataacctgacacgtccaccctactgctgcgtctggtttccgctggctggaackggacctcacattctgtatttgtcccgattggctagcaagttagaactttttaaaagcgtcgaagtcagaggagagcaaaggaaggaggaagtaacttgtggaatgctgagaaaggtaaaaacaccttcaaataaggaagaggaacaggctatgacctaatgcttgcttggaccagtataagcatgtcagggcaaatatctaggctaaattcgggagctaagaacataaagtacgttgatttctttattacggctagcagatatttaagaatgttaccacaggtctttgaatgcattttgcttctaagaggagttactatttatttcttattagatgaggaggaaagtctttgaagaggaacctctactttattttttacactattaagatgtaataatgatttactgc

SEQ ID NO: 785149 - DNA, 605 bp, Homo sapiens
catgaaatttcagttccctggaaacaatgagaacatccagtcgtttccaaagagaaagaaaatgtttgcatacaaaagaacaaagatcaatttcaaacttctccttggcaacatcgaaaactagaaaacaaatggaaagtgctttcaagtctaaagaaaaatggtttccaaactagaattcagccaaaccctcaatcaagaactggggtagaatatagacatttaaagttattcaaggcctcaaaaatgtaccttccataacctcccttatattccagaagctattgtggaatctgcttcaaaacaagggagtaaaccaagaaagagaaatcacgtgagacargagacaggagctgcaacatacaagtgaagtaagagaaccctgaggtgattgaaaagccggatcccaagaggacagctgtgctacaggcatatggggtgctggccaggttggagtgggtctgctttgggagagacttcttcaggaaagggaaactgataccatattttgtgtgaatgaaacaattgaggggtgtttagacaattggaggagagtttggggttcagttattaaaaagtatttgaggctgggagcagtggctcac

SEQ ID NO: 785150 - DNA, 569 bp, Homo sapiens
tggtgtgtgcctgtggtcccacctactcaagaggctgagctgggagggtcacttgagcctgggacgtcaagactgtagtgagctgtgatctcaccactgcactccagcctgggcaacagcttgtctcaaaaaaaaaaaaaaaaaaaatcaaaaaattagctgggcatggtggtgcatgcatgcctatggtcccagctacacaggaagctggggtgggaggatcgcttgagcccaggaggttgaggctatagtgagctatgatcacaccacaccactccaaccctgggagacaaagtgagattctgtctccaaaaaaaaaaaaaaaaggaatttgaaacaaacaaaaaggcaacttcttatacaataaaaagttgtacaggaaagraattgtaatcatagtttattacatgccccagctctaattagtacacatatcatacaatgtaaatcttgagtactaagctaactaaaatgatcatgtaactatactgggaaactgaaggggcggggatgtagactggagaagaattaggaaatggactaaaacctcaccttcctgagtgggagtc

SEQ ID NO: 785151 - DNA, 569 bp, Homo sapiens
tggtgtgtgcctgtggtcccacctactcaagaggctgagctgggagggtcacttgagcctgggacgtcaagactgtagtgagctgtgatctcaccactgcactccagcctgggcaacagcttgtctcaaaaaaaaaaaaaaaaaaaatcaaaaaattagctgggcatggtggtgcatgcatgcctatggtcccagctacacaggaagctggggtgggaggatcgcttgagcccaggaggttgaggctatagtgagctatgatcacaccacaccactccaaccctgggagacaaagtgagattctgtctccaaaaaaaaaaaaaaaaggaatttgaaacaaacaaaaaggcaacttcttatacaataaaaagttgtacaggaaagaaattgtaatcatagtttatyacatgccccagctctaattagtacacatatcatacaatgtaaatcttgagtactaagctaactaaaatgatcatgtaactatactgggaaactgaaggggcggggatgtagactggagaagaattaggaaatggactaaaacctcaccttcctgagtgggagtc

SEQ ID NO: 785152 - DNA, 582 bp, Homo sapiens
gatctttgaaatttgtcacacaacctctgattcaaaatacttccagtcctttggacctcctataaaagaggtctccatctggaaaggactttgtgtcatttctgttttttctcatcaaacatccagaggacccctagtgtaagtaatgccctgagtcaagggactaagtgtctatgggtattgtcatgaaaggaagaccttcctggactacctagataacacacttttctcccaataccttctctctcattcataattgacctttggatttattttctgccttarcttcatacctttgaggtctccacatatcttctccgcaattttattaacaccacccaataacagggtattcaatgagcagaagatgaagaatcttagaagaaatcccagcttggcagacttcatggtgcagcaagcagcaggcaggatagttgtggtatcacctgatgttatattttgggcttgatacttgagacggttgagctcacctaccccaagggccaggactggacattactaggtgttgagttgaacagtgagtgcttgggtacccagccatgaagctgaaggccccaaact

SEQ ID NO: 785153 - DNA, 605 bp, Homo sapiens
tttaccgtggattggcttctgtgaaggaaagaagtgaatattagtagatatttggaaaaaagaaagatagttgatgcagtgattattattctgttcctttgtaagttaccattagcctctcttgcttaagaaatattttgagcttttttggggaggggttgtggttaatgatgtgaaattaatcttcaggaaatttatcataagcagacttgccttttcagatattggtatattttaattctctacctgaatacatacatgacagttattttaccatgctggtttaaaaaacatcaatttgaaaatactagaaggtggggtgaacactgataagttactgttaacaaataagaaaataatgctttgccatctgtggtggttttaaaatctatccacaaatttttgatatgcttctctttaagacrggacacttcattcccctctaagtacaggctgagtttagtgattcccttccaacaaatagatggtgtgtcacttctgagactaggtaataaaaggcattgcatcctccttactctctcttggatccttcactctagggaaagccagcagccatattgtaaggccactcaactccatggaga

SEQ ID NO: 785154 - DNA, 622 bp, Homo sapiens
ccaagcaaggacataaggttcccagcatggaatccccaagaaagcagcaaaagtgcttcatgggagtcgacacagtgaacttctatgctcagcgggcacctttattggataacttatgtgccagcttagtgaaatctttcctattccttaaaccaccctctcaccaccctcactcccttcaaccatggaggaggcagaggcaggtagggtgggaagaggggaggaaacagggcagaactaaccatgtcccacactcctgtcccccatcactcagggtcccaggctgaagcaggtcccggctgcagcctacttactgcattcagttctttcaacacacggcatgcattcatcagcccatttactctgctcgcatctgcgtttcttctagaggcggaaactgttcatcagctagcatmgatactacgatcctgcttttaaatatcctctgctgacggttacactgttctgaagaagtaatcagatggttgcatggcatgtctataaaatgagaagaagaatcttacctcacagaatgcctgggtggatgcagtgagctagctccaggaaagtgactggcacagagtagatgccctaataatggaggcttctctcttctacagca

SEQ ID NO: 785155 - DNA, 617 bp, Homo sapiens
caaaggagttaataacactactcacaattcatgtcttcattcaataaatattattctttacttcatatgttccacgctctggttgttttgtggggagcaaaagagaagttcccatttctgtttatgttagaaacaaaacaagacaaaaaacaaattaacaagcaaatacatactgattataaaataatgtgatgtgaagaaaaaaactgctaagaaagaataatgaggtaggagggggctacttgagatcaggtggtcacgctgagagttgagagtggaaaggagcagctgggaaggtgtctgggagaaggctgttctaggaggcagaaacaacatgaaccagaagcttgaggaaagactgttcactagaggaacagaaggaaaaccagggaggctggacaagaayagggatgggaagctgactagagtgtagagagaaaactaggaagacctcatagggccttgtgggtttgagtgtaattcaaccaaagaagccactgttcttgcctcctctctcatagaaagagaactcctgatttacttatttttattatttttttaaacggttaacttttattttagatacaggggctacatgtacagatttgttacatggg

SEQ ID NO: 785156 - DNA, 617 bp, Homo sapiens
caaaggagttaataacactactcacaattcatgtcttcattcaataaatattattctttacttcatatgttccacgctctggttgttttgtggggagcaaaagagaagttcccatttctgtttatgttagaaacaaaacaagacaaaaaacaaattaacaagcaaatacatactgattataaaataatgtgatgtgaagaaaaaaactgctaagaaagaataatgaggtaggagggggctacttgagatcaggtggtcacgctgagagttgagagtggaaaggagcagctgggaaggtgtctgggagaaggctgttctaggaggcagaaacaacatgaaccagaagcttgaggaaagactgttcactagaggaacagaaggaaaaccagggaggctggacaagaacagggatgggaagctgactagagtgtagagagaaaactaggaagacctsatagggccttgtgggtttgagtgtaattcaaccaaagaagccactgttcttgcctcctctctcatagaaagagaactcctgatttacttatttttattatttttttaaacggttaacttttattttagatacaggggctacatgtacagatttgttacatggg

SEQ ID NO: 785157 - DNA, 570 bp, Homo sapiens
attatgcagttgccccggcactgtttgttgaagagactattctttccccattgagttgtgctgaacacttattgaaaatcaattagccatagatatttatttctaggctgtcaattatattccactggtgtatatgtctgtccttatgtcagtaccacactggtttgattatagaagtttggagcatgtttggaaatctggaagcatgagccctgaaactttgtgtttctttttctttcttttttggtgtgtttctttttcaatagtattttgactacttggggttcattccagttccacataaatttgaggattagtttttcyatttccttaggaaatgccattggaattttgataggggttgcattgaatctgtggatcatttgcaattaatattccaatacatcaacatgtgttgtcttccatttatttaggtcttctttaatttctttcagcaatgttttgtagttttcagcatagaagtctttctccttggtttaagtattttactcttttggatgctgttataaatggaattgttacttaatttcattttcagactgttcattg

SEQ ID NO: 785158 - DNA, 673 bp, Homo sapiens
gtaataacaatagaaataaaatgcacaataaatgtaaatgtgcttgaatcatcccgaaaccatccgccctactccctaagtctgtggaaaaattgtcttccacgaaacctgtccctgatgccaaaaagattggggactgctgccctagagaaaggaaaattttgttcacagaaaaacctgtacatgaatgtttatagcagctctatttctaattgccccaaactggcaacaacccaaatatcctctaatggttgaacagatagacagattkttgcacattcatatcatggactattacttggcaatgaaaaaacaatgaactttccataagcacaacatatgaaaattgttcctccagatgaatctcagaggaattatgctaagaggccagtctccaaaggttaaatgctgtatgcttccatttacatgatgttctggaaaagacaaaaccacaatgatgaagaagagatcagtggctgtcagggattgggtttgaggggtagtgtgactatcaaggcattgcatgagggaggttctgggatgatggaattgttttgtgtcctgattgtagtggtggttacatgaatctatacgtgtgctgaaatctgtataattatatacaacatagttaattttactgtatgataattttaaaaattaaatgaattagaaa

SEQ ID NO: 785159 - DNA, 673 bp, Homo sapiens
gtaataacaatagaaataaaatgcacaataaatgtaaatgtgcttgaatcatcccgaaaccatccgccctactccctaagtctgtggaaaaattgtcttccacgaaacctgtccctgatgccaaaaagattggggactgctgccctagagaaaggaaaattttgttcacagaaaaacctgtacatgaatgtttatagcagctctatttctaattgccccaaactggcaacaacccaaatatcctctaatggttgaacagatagacagattgttgcacattcatatcatggactattacttggcaatgaaaaaacaatgaactttccataagcacaacatatgaaaattgttcctccrgatgaatctcagaggaattatgctaagaggccagtctccaaaggttaaatgctgtatgcttccatttacatgatgttctggaaaagacaaaaccacaatgatgaagaagagatcagtggctgtcagggattgggtttgaggggtagtgtgactatcaaggcattgcatgagggaggttctgggatgatggaattgttttgtgtcctgattgtagtggtggttacatgaatctatacgtgtgctgaaatctgtataattatatacaacatagttaattttactgtatgataattttaaaaattaaatgaattagaaa

SEQ ID NO: 785160 - DNA, 623 bp, Homo sapiens
gcaaaagggtttacaaaacaagacggtgcagagagtctcaagtctgtctactccacagcagcctgctctttcctgttgcttttcaaggaatcagcagagggagacctggccagcagctcctgggcagcaaagtatccccagactgtgttcctggtggttggctcaagccactgaagcggtggttaagactcaagaccaggacctggagatkcacaaggaccactgggatactatttcactaataacccaatagaaatggagtcacttccaaggcactctgctttggggaagggcagagtgccatataccttctactgggtaacaggactgaagaaggcacctctacagacttatggcttcactacttgtagtgaaagctcatgactcacaatgcagtttatagttgctcatgaatctttgcaggagtgtttcctataggcagcattttacagggacaaaatatgggaagttttaagattaaaaaaaaaaaaatgactaaactaaaccaaaaatcaaacataacaaaaaaccagaatatcctaagccccaaaccttcaaaataaaataaagtccttgccatttacagtttggagagggaaaaggatttctactttcaacacgca

SEQ ID NO: 785161 - DNA, 582 bp, Homo sapiens
gcaatagcatcctaaatatcctcttatttttattcttgtccactatagtacattctcaacatataaataggaaccctctgttcaagaccctgcaatttttccccattgtttttcagagtaaaatgcccttcaatatcctgcattatctctgcccccattacctatctgacctcatatcctaacaccctcctttgtgcactctactctagtcacacagacttccttgctgttcctaaacctgcaagacatgctcctaccttggaggcttagctctagttggtccctcttcctagaatgctctaacttcccctatgtccttccagtctcttctcaactcaacctccctaataaagagtaccttgacaaaccagcttgaaaaaaatgccacctgcccccaaattacttgattcccactctcctcacttwccttaatttttctttcttccatgttattttcaccatttagcccaccatacaacctatttattatgtttattttcacttatctgtttccctgtctgaaacatgaagatacaaatctttgtcagttttatacactaatacactccaactgcttcaaac

SEQ ID NO: 785162 - DNA, 434 bp, Homo sapiens
gaagctgacttattgcctcttgtttcagagttggggaatgttagccaggtatttttgatgttgaagctctggggcgtgatccagcaggtggcatgtaggcttattgatcagttggtagactctttcttggctgtgtgtctcccccacatttcctcacagttgcatcctgaatgtcacctcagatggaaagggagggtgttgcaacagcagaggaratgcaacaacaatggtttccctttcggcgcctgcaccttttgattagaagcagcgatgagtgatcaggcaacagatcaccaatatttagaggaaagggttctttttgcctgctgtggctgttgcaatctatgtgcgggctgctccaggagcacacacacaactgtctaccaagaggatagggatagggaatgggttgctgctgtgctaaaagctgaaat

SEQ ID NO: 785163 - DNA, 434 bp, Homo sapiens
gaagctgacttattgcctcttgtttcagagttggggaatgttagccaggtatttttgatgttgaagctctggggcgtgatccagcaggtggcatgtaggcttattgatcagttggtagactctttcttggctgtgtgtctcccccacatttcctcacagttgcatcctgaatgtcacctcagatggaaagggagggtgttgcaacagcagaggaaatgcaacaacaatggtttccctttcggcgcckgcaccttttgattagaagcagcgatgagtgatcaggcaacagatcaccaatatttagaggaaagggttctttttgcctgctgtggctgttgcaatctatgtgcgggctgctccaggagcacacacacaactgtctaccaagaggatagggatagggaatgggttgctgctgtgctaaaagctgaaat

SEQ ID NO: 785164 - DNA, 601 bp, Homo sapiens
ctatgaaagatgaaaatttaatgttgactacctttcctcccttcttttcccagtgtttgatattcatgttattattagttattttattgattacatatgtaattttcagtaacagacttaaacctctatttcttgctccacctactttcaacaatctgttgactacctactttrtaagaagacagatattaacacttctgtctttgccctctcaattctatcttttgtcaactacatgtttatgttgtcaaagttgtaacatttacattcttttctttagccaaattaatcttccatgctcttccttccataattttttattctacaattaacattttgatgtgtttgctttagtacagtattaatttatcaatccttttttaaacagtggtaaaatgtacataacataatatttataattttaaccattgtaaaatatacaaattttaaccatttataattttaaccaaatgtacacatttggttacagcattcataatgtacataatgtacagcattcataatgctgtatacctatcaccactatctataccccaaatttttcatcatcctcaacataaactctgtacccactaaacaa

SEQ ID NO: 785165 - DNA, 639 bp, Homo sapiens
cttctcaacaaactgtggctcagacctaagtccccaaagcattctgcatgtatgattttgcagatgtgtgaagttgttgatgaaaaacttttcttggatgtgttgggtgcaataacacatatgaccagtagatagagcacaaacctcactgattgaggaaatggtagcaaaaccagttcatatgcacagataaggaatgcttcttttgacatgtcactgcatacctgtcttctcctctccttttcctcccattttgcctctctcagactccactagagcatcagccccccaagtagcttccctgctgctcatccccctcctctttgcacaatctgtcctgcactcagatcctgcaatggccagtccccttgcctagggctgggggtgcacagatgagcargcagtaggaatccattaggcagccctgggcagaaggcatcctagtggaaagaacagtgagtgcaaaggcagggagatgtgaaagagcaagcttcctaaattcaagtacctatccacaaagtgggagaactttagtccagaaatccaagttagggaaccttcgattatgaagcaaagatctaaaaaagggccccttaaccttatgtaaactacaaatctccagcctatggaaaaccaaaa

SEQ ID NO: 785166 - DNA, 634 bp, Homo sapiens
agatcagagaagaactgaatgagaaagagacatgaaaaacccttcaaaaaaatgaatgactccaggaactggattattgaaaagatcagctaaatagacagaaggctggccagactaatatagaagaaaaaagagaagaatcaaacagacacaataaaaaatgataaagtggatgtcaccactgatctcacagaaatacaaataccatcagagaataatactataaacacctctaygcaaataaactagaaaatgtagaagaaatggataaattcctggacacagacaccttcccaagactaaatcagaaagaagtcgaatccctgaatagaccaataataagttctgaaattgaggcagcaattaatagcctaccaataaaaaaaaagcccaggaccagactgattcacagctgaattctaccagaggtacaaagaggagctggtaccattacctctgaaacgattccaaacaatagaaaaagagggactcctccataactcattttatgagtccagcatcatcctgataccaaaacctggcagaggcacaacaaaaaaagaaaatttcaggccaatatcctaaataaactgctaaatcaaatccagcagcacatcaaaaagcttatctgcca

SEQ ID NO: 785167 - DNA, 618 bp, Homo sapiens
aaatgtgatttaatcctcaaagaattcctatgcaattttgtagctgaagaaaccaaggctcagagtggccaaatggtttgttatttgtggcagagaatttagatgcccatctaggtgagcctcggactctaaaaccttcctacaatgctgatgtraggctttaaagaagaatacatctcatcgagtgagaatactattgaaggctttctaaagacggttgggtttgagctaggcaggaagaataaatggggttttgttaaaaaagaagagaagatagggtccaagcagagggacagtatcagtcaatgagtaagaaatgctgggagcatgttcaacacattatcatggtatttaaccaaaatttgaggagggacatgtctctcctttgtaatgggcttggctgggtccaagaagaggcgactggtgcctgactagagggaatctgtatttgtaggaaaatagagagagcctggtctgcagaagagtatcactgaaaccactagtctgggagaaagattatggtgcccccataggaactggagagctgcagagccaagaaaggaggggcaggaggggcagaagggaatggggctccctttgagatgggtaaataaatgg

SEQ ID NO: 785168 - DNA, 620 bp, Homo sapiens
gcaaactttattcctttttttttctttttttttttagatagactcttgctcccaaacccaggctggatgcagtggtgtgatcttggctcatagcaacctccacctcctgggttcaagcaattctcctgcctcagtctcctaagtagctgggattgcaggtgcccaccactacgcccagctaatttttttttttttttttttgtatttttagtagagatgggattttgccatgttggccagccttgtctcaaactcctgacctcaggtgatctgcctgcctcccaaagtgctgggattacaggcatgagccactgcatatatggggatctttataagaggacaaagacctgaaggagtgactggaacagaaagcttttatatcatttaaataaagaaatgatrctgtagggaaagctcactgaaaaatcaccgacatgagacagcttaataggataaaatgcacacaaatttaagaagtgaactgccttcatgcaacatgcacagaaagtgcacatggagggaattacagggtgactactcacttgcaatggggttaagaagcttatgtaacatcctgacaacaggttatgggagtggtgagaagaggaattccattgagg

SEQ ID NO: 785169 - DNA, 557 bp, Homo sapiens
aaagcagctggcacatagtgtacatttatatagtgcttactattcttcaagtttttgctcctgaaattaactttttaaactgtctcttgatatataccctttctcaatttccatgttacttttcctctgcctgaaactgatcagcagtgttcccaacctctctccttcctgcttcttctcccatatgccttagtatttttaggcatctctttgtacctgtttctggaatgyatcaagactaaatctgacactgaatataatctccctgatcacaggcttcagattttccaagttagcagcatttcttataccttatattctacacgttccaataaattaaaacaatgaaaaaagcatggggtttaaagtcagaagacctgggacataccacctactgtgcctgactttcagctttcacaactgtaaaatgggaataattacactatttcgtgagattgttgtgattcatgatcaggtgggataacgcatatgaaagcacttcgtaaactgaagcattgttatttttgttcccaatcaaattcaaagaggatgaaaaa

SEQ ID NO: 785170 - DNA, 557 bp, Homo sapiens
gtatgtagataaaaagtgataattattctattgataggcacaaactgatattctgttttaattgaaaaaagatcattaccaaagagataaactgacatacatattagtgtgaccatactatctgtctgctgacttttgccaaaccactaagagcgacaataatgttgtattttgtttttccctatggtccaaagaacagagtaggcctgacatttacattgtcagagcacaacatgagctagcaaatgaagtcaaaggaccactctctcatttcaccaagggatgaagakgtgccaaagttgtcttcagggaaaaaaaagtttataacactttgaatttctgataaatatcaagaaaaattttagcagagtaaatttaaattgtgaagtcattatttgaagtatttttgttattattttggattattttgattctatcatttgacaaaatattgttgtgcaagtaaaagtactttgatagctctggggtcttcatctgggcctggttttacatttcttttgtttattttttgtagaggaattttacaaccactatct

SEQ ID NO: 785171 - DNA, 583 bp, Homo sapiens
aaaactgttgcaatgcctataatgtataaggttttatgatgagtactttcacatacattgtatcttgaaataattacaactttttgtaactgttttcattttgaaagagaaaaatggtcacagttgtgatttcagccttggtctagaagactttaaagtcctacctttgttgattttaaggctcttaccaatgtatatgttcaggcaattgatgaacacttagtaaagatatcctagaggataagaaagtatcatttggtkctggaggaggtaatgattctcacttttaaatacatattttctaataacttctagagctttgcccattttttctaagttctttctgagtttagtattggcaccttatgtggtttggctttgtcctcacccaaatctcatcttgaattgtagcttcagtaatgcccatgtgtcgtgtcgtgggagggacatggtgggaaggaattgaatcatgggtgcaggtctttccaaagctgttctggtgatagtgaataagtctcataagatgtaatgattttataaaggggagttcccctgcatatgctctcttgcctgccgccatgta

SEQ ID NO: 785172 - DNA, 583 bp, Homo sapiens
aaaactgttgcaatgcctataatgtataaggttttatgatgagtactttcacatacattgtatcttgaaataattacaactttttgtaactgttttcattttgaaagagaaaaatggtcacagttgtgatttcagccttggtctagaagactttaaagtcctacctttgttgattttaaggctcttaccaatgtatatgttcaggcaattgatgaacacttagtaaagatatcctagaggataagaaagtatcatttggtgctggaggaggtawtgattctcacttttaaatacatattttctaataacttctagagctttgcccattttttctaagttctttctgagtttagtattggcaccttatgtggtttggctttgtcctcacccaaatctcatcttgaattgtagcttcagtaatgcccatgtgtcgtgtcgtgggagggacatggtgggaaggaattgaatcatgggtgcaggtctttccaaagctgttctggtgatagtgaataagtctcataagatgtaatgattttataaaggggagttcccctgcatatgctctcttgcctgccgccatgta

SEQ ID NO: 785173 - DNA, 620 bp, Homo sapiens
catttacaataggtacaaatggcataaaatacttaggagtaaacttaaccagagaagtgaaacacctttacaattaaaactataaaacattgattaatgaaactgaagaagatatacaaaaatagagagatattctctgctcatagatgtgaagaatcagtattattaaaatgtccatactgcccaaggtaatctatagattcagtgcaatcccaatcaaaataccaatgttattcttcacagaaatagaaaaaacaatccccaaaattaygtggaacctcagaagacccagaatatccaaagctgtcatgaacagaaagaataaaactggtggaatcatattacttgacttcaaattatactacacagctatagtatcccacacaacatagtgcagagacataaagcaatggaacagaatagagaatccagaaacaatttcatacatctacagtgaactattttcgaccaaggtgccaggaacatacaatgaggaaaggacagtcttttcaataaatgttgcctggaaacctgggtatccgtatacagaaaagtgaaagtagacccctatctcttgctgtattattccattttcacaccgctataaagagctgtaaaag

SEQ ID NO: 785174 - DNA, 557 bp, Homo sapiens
ctaacccctttatttttaaatgacaggattctgggtatagaattctttgtcagaagttgttttcttttttctttcatcttttggaatatatcattcaattctcttctggcctgcaagctttctgctgaaaaatccagtgacagtcttttcaagatcccgttttatacattaagtagctttcgtctgatagctttcasagtccagattgctcatcattacattatggaatctctgatagctttcaatattctccctttaacttttagcaatttatttataatgtgtcttaatgtaggttgttttatattcaaactgttatatgttcactgagctttataaatctgtgtttctaacttcttacccaggcaagggaaattttctgaactactatttacaacaaatgaatctaacaggtattatagaacagttcatctaacagcagtgaaatacatattcttctcaagtatgcacggaacattctcttctatagatcacatgttagtctacaagtcaattcttaacaaatttaagaagaatgaatttatattgaatatcat

SEQ ID NO: 785175 - DNA, 488 bp, Homo sapiens
atttcctctttaaggagattctattttggtgtgtttccaaaatttgtttcaatatttagagctacttgtatcagttcttgtggtgctggcttggtagtggcaaattctctcagcatttgtctgtctgaaaaagactatatttttccttcatttatgaagcttagtttttctggatataaaattcttggctgataattgttttatttacggaggctaaagataagatcccaaccccttctaggtggcaggatttctgctgagaaatctgctgttaatctgacaggttattattttttatasgttacttaattattttacttcacagttcttaagattctttccttcatcttgactttatataaccatgatgactatttttgcaataaatttcccaggtgttctttgagtttcttgtatttggatgtctagctctctagcaaagctggggaagttttcctcaattattcccttgaatatgttttccttac

SEQ ID NO: 785176 - DNA, 672 bp, Homo sapiens
tttccatcctgcctgtttaataatcagaattccctctgagggcaagtccagcccaaaatggaaacaatggaatatgtgtgttggggagtgggggtgggggtgtctgcagtggaaaaagtgtgggccttacaggaaacagggaagttcctgcatctcagctctgccacctgccagctgtattagttgtttattgctgcstaacaaattgttccaaatttaacagcttcaaacaacacctgtttatcatctcacggcttctgtaggtgagaaatgtggacacagcttagctgggctctctgctcagggtctcacgaggctgaaatcgaggtgccttcgaagccctgttctcatttgtaggctcaaatagggaaagatctgcttccaatttcattcaggttgttgacagaattcatttccttgtgattgtaaaatgcatggcagcttgcttcaaagccagtgttgaagaaagtctctatagcgctccgtgtctgaccttctttaaaaggactcacctgattagctctgacccacccagtataacctcccctttgattgatttaaagtccactcattaagagctttgattacatctgcaaaatcccttcaccttgaccacattcaatcagtaaaggaagttatacatcctgtcaacactcaaggaaaaggaattat

SEQ ID NO: 785177 - DNA, 595 bp, Homo sapiens
ctttgggctctagggttacttgtaacagcaaacatttgagaacaaccaaatcaacccaacagaagggattcatttaattaaactcagcctcatccacttggcagagtgttccacagtgaataaaaacagtgattacactcatgrcaacatggcgattgcctaatgccataatgttgagttaaaaatgcaaaaacaaaaaaaacacaccagcatgtttaattatacatacagatcaataatacctgtgtcgaaagagccaaaaagaaagaatgctcaaagcaatgaagctgaaatgtcaaacacagttgttttcagagtgttgaaaatataaagtttttgttgtatttttccttttataaaacagatcttatgatttagagcagctttagatttaccaaaaatcaagaggataatacaaagaatcaccatatagtttgcacctgatttcccctattactaacatctaatactgttagggtatatttattaaaaagtaatgagtcaatatatgcatgttattatcaacagaagttcatactttattcagcttcctttggtttttacctatttcctttttctgttacaggatcctatg

SEQ ID NO: 785178 - DNA, 617 bp, Homo sapiens
ccaaacctgccaagggtgggccaggcatggagcagtgaggggtgtatgagccagcaggcatggggtctggccactgtgcacagtcacgcatggtggctgctgcagtgggcaggcagctccaggtgctggcataggcgccgactctatgtgaggctgcagctggaccaggcacaccgcaagcagcttccctgtctggtatcaggaaatgcagtggtgcccagaagctcagagacaccaggaaccacagagcctcaaagagggagccacagccctggctcagggagctcccagctctggggtccccagagggccacagcacttctctccctctcttcacctgaaatgtggtgagcaakggggtatgtttcggtgctgtttgtattacagctcttctagccttgccatttggcagcccctgagttcttgtcctgctatccggaagaatgaggtatgcagacaagtggaggatgagcaagatgaagaggagatttatttagaagtaaaacagctcagagacccactgtgggtagctcctttctgcagttagggtgtcctgatgagtgttcagccctcagtagagaggaggaggtcctggggtgggtggcttctctctgcag

SEQ ID NO: 785179 - DNA, 576 bp, Homo sapiens
agctagaaagccacttaccagataaggtagagggtggggtgtagggggagggaggggggcatcacacagaactataccgagacaaggcctgaccctctgagggagctgagagggtctcagagatcccttagttaatatctcttattctaagatgtgcagaccaaactcagagaagscaagtggcttgtcctgtgtcacacagtgactcagaagcagggtgaggcccagaacccaatccccgtacttctccttggccataatattccccaaaggtcagctctgcatcctgtccagtccctcccacccctcacttttccacttccctgagattctccagagttagtcctgtggccacagccccacagcatgtcctgaagtctctgagaccttgccccactgggctccctagctcttctccaagtgccatcccttcttccatcacagcaagccctccagggtgagtgccatggggacctgctaggacttgggggcctccttctgagctgggctctgaactcaggctctgtgccttttctcccatctcagggatgccctgcttcacccccagtcaggatc

SEQ ID NO: 785180 - DNA, 576 bp, Homo sapiens
agctagaaagccacttaccagataaggtagagggtggggtgtagggggagggaggggggcatcacacagaactataccgagacaaggcctgaccctctgagggagctgagagggtctcagagatcccttagttaatatctcttattctaagatgtgcagaccaaactcagagaagccaagtggcttgtcctgtgtcacacagtgactcagaagcagggtgaggcccagaacccaatccccgtacttctccttggccataatattccccaaaggtcagctctgcatcctgtccagwccctcccacccctcacttttccacttccctgagattctccagagttagtcctgtggccacagccccacagcatgtcctgaagtctctgagaccttgccccactgggctccctagctcttctccaagtgccatcccttcttccatcacagcaagccctccagggtgagtgccatggggacctgctaggacttgggggcctccttctgagctgggctctgaactcaggctctgtgccttttctcccatctcagggatgccctgcttcacccccagtcaggatc

SEQ ID NO: 785181 - DNA, 619 bp, Homo sapiens
cataggcctgacagcttaggaatctctttgggaggggattggcaagagcagcccaggtgttctagcagagggacctggagtattgggacaatacctataacagcatgaacaggaccaaaacaggcaccaaggcagagccctgttaccagaccaagacccaaggctgaggatggatccttagtcaagatgactcaaagctgggccccagaatgtgaggctgaggatggaggtaggaakaagtgtctgtgagaggaagatggggtaagaaaagtagattttacaactcggctgcagacagaccttagctgcacggttttactatctttttacagtttgatattccagaagagctgattacacactcccaactctgtgtttgtatcactttttaaaaactgtcttctcattacttttctgtttattttaaaaatgatattcagcacattttttttcaaagaattcacaccatgtgccacatctggggaacagtgaacaaacacctcccatgtgctaggtcatgagctcacatcgctgtgaggcaggtattatttctcccattttatacgcagggaaataaggttcagagaagtcagctaactaacataagtttacccagtaa

SEQ ID NO: 785182 - DNA, 603 bp, Homo sapiens
cactaaggaggacatatagaagctagagtggtacacgctaagagtagtggccttgggacccacagcagagaatctcagcctaagcttggttcagagggaatggagcagatttaattttatttagagacagaaaaaatcacaagaaaccaccacaacaaaccagtaagatatttcttataccttatatttataccttagtgcaataaatcacrcatgctacacgtaaattcctcgaggatggcaaccatgccttttcatctcacctggccgacagccatctgtttattacctgaaggactgactcactggcttgtgaatttatgggaaacaacacatcagtatctgtgtgtcaatcagcatcagagcagactggtgattagaagataaatagaaaaaaaggagagtgcactttgctaattgtggtttttttcaacccatcacatcaaacttcaaactgcagtggaagttttacaatagttgataacttctaaattaataagctcttctaaattaataaactgcttcagctgtcctgtaaatcaggcattcaccaacaaacatttattgagcattaagtttcagagattcgtctaggttttctca

SEQ ID NO: 785183 - DNA, 563 bp, Homo sapiens
atacattctctccaatcccgaccctacatccggtcctgtgtgccctgccttccctcccaacactctagatggtccgtcctgctgccacctgaggtcagttctgccacggatggtctagacttcctctgccactttgcaaggacacaagtggagtaattgacacmttctctcctatactatctaatttcccctttccctttcccatcaacatgtgaacacattgtgtctttcctacctttacaaaacctggacttgactcttcatgcccctccagccactaccccctttctctgctcccctttatagaaaaactcctcaaacaagtttctgtcttctccctgtctcaccttcctccctctgatttcacctgaaccctctccagtcatgtttccaccccacattccatggaaacaactttgttgaggtcaccaatgacctccatgttgctaaactcaatagtcaattgcttctacctaacagcagcttttgacacagttgattactctttccttcttgatactctttcttaattcagcttccaacattttattgattcccctcct

SEQ ID NO: 785184 - DNA, 535 bp, Homo sapiens
acatgtgaacacattgtgtctttcctacctttacaaaacctggacttgactcttcatgcccctccagccactaccccctttctctgctcccctttatagaaaaactcctcaaacaagtttctgtcttctccctgtctcaccttcctccctctgatttcacmtgaaccctctccagtcatgtttccaccccacattccatggaaacaactttgttgaggtcaccaatgacctccatgttgctaaactcaatagtcaattgcttctacctaacagcagcttttgacacagttgattactctttccttcttgatactctttcttaattcagcttccaacattttattgattcccctcctctgtcattgatgcctccttttcagtctcttctgatggttccttctcttctccctttctcctaaagttggagggctagagggctcttcaaatctcttctcttctgtctcggatggatggatggatggacggatggatggatggatgaatggatggctggatggatagatgtaaaaactgg

SEQ ID NO: 785185 - DNA, 481 bp, Homo sapiens
gcttgcagacactgaccggtcagtgacacccagggttctggggctgccacaccctccttcccctcccaggtctgcaagcctcctcagtcttcttttggatgtcccccagcttcacctgcacacttcccgtgaggcagctctatagagggagtgatcagaaggaagacctttgtggtatatggaccagatytcccaacctgcccccacttgccagtgccatgacattgagtaagttacttcacctctccgtgctcagttacctcctctctaaaatggagatagtaatagatccacctcttaggtgtgccatgggcattaaatgagataaagctggtcaattacttagcctggcacatgattgttcataaatattagtctcctttccctcattcctccactcctctgggaagacaggcttcacgtctgtatgtcccacataaatatcaaattctagaaggtgcacctgtgaccttggcacatc

SEQ ID NO: 785186 - DNA, 481 bp, Homo sapiens
gcttgcagacactgaccggtcagtgacacccagggttctggggctgccacaccctccttcccctcccaggtctgcaagcctcctcagtcttcttttggatgtcccccagcttcacctgcacacttcccgtgaggcagctctatagagggagtgatcagaaggaagacctttgtggtatatggaccagatttcccaacctgcccccacttgccagtgccatgacattgagtaagttacttcacctctccgtgctcagttacctcctctctaaaatggagayagtaatagatccacctcttaggtgtgccatgggcattaaatgagataaagctggtcaattacttagcctggcacatgattgttcataaatattagtctcctttccctcattcctccactcctctgggaagacaggcttcacgtctgtatgtcccacataaatatcaaattctagaaggtgcacctgtgaccttggcacatc

SEQ ID NO: 785187 - DNA, 399 bp, Homo sapiens
cttccagggaaacttgaagcttaaaccaaacttgagggaatagtgcatgtgacttccagactccaaaggtgatgtgccctgtttccccctgtactgaccgagcaagctactgactgctgatttctgtttccaaacttcccaatcccacctctcagagctgctatggacagcatggcagagcctgcactgaygttggctttgcaacttgggttcatgccctccactggcatcactcaattccattcagttattcttctcatttctatatagttttagatttgctgtttctgtttattgtttccactttccactcatgtcctagtaggagtcattagactcagattcaagtcctagtgctgctgccaagatgccaataacacagatgctagagatacaatg

SEQ ID NO: 785188 - DNA, 562 bp, Homo sapiens
attgttgctcagctcaaccagtttgtaacaggtataaaagtcatgttaggctcggcgcgatggctcacgcttgtaatcccagcactttgggaggctgaggtgggcggatcccttaaggtcaggagttccaagaccagcctgaccaacaaggtgaaaccccatctctactgaaaatacaaaaattagccaggtgtggtggcaggcgcctgtaaccccagccactcaggaagctgaggcaggagaatcacttgaacttgggaggcagaagttgcaatgagcagagatcatgccactgcactccagcctgggcaacagagagagactttgtctctcaaaaaaaaaaaaaaagtcatcttaaacaaccagaaaacacrttgaaattaatgtgtattatattcgtatcatagctcataaaaagtacagactgtgacttcattgaagaactgaaaaaatcaactgtggttttagtcattgatttgttgagggtaagcctatgaaaaagatgctaacattgtgggtaaaggaagggatatacaaccagaattcagaagtattcctatgg

SEQ ID NO: 785189 - DNA, 618 bp, Homo sapiens
acaagggatggacttgtgatggttaatactgagtgtcaacttgattggattgaaggatgcaaagtattgttcctgggtgtgtctgtgagagtgtcgccaaaggagattaacatttgaatcagtgggctggggaaggcagacccacccttaatstggtaggcaccatctaataagctgccagcaaacatacagcagacagaaaaacgtgaaaagacgagactggcctagccttccagcctacatcattctcctgtgctggatgtttcctgtcctcaaacatcggactccaagttcttcagttttgagactcgaattggctctccttgctcctcaagcttgcagacagcctgttgttggaccatgtgattgtgtaagttaatacttaataaatatatatatatacactattagttctgtccctctagggaaccctgactaatacatacacctataaaatgaggctgcagcagtagatggagccaggctttacaaggcattgaggactatgcaaacaatttgggtctttatgctaagagccatgcttaagagaggaggtggaaaagatgaaaagaaaaaatatgatcagatttgcattgtgaaaatatcactgtggatgat

SEQ ID NO: 785190 - DNA, 487 bp, Homo sapiens
gtccccagaaaattcccatgtggcccttccttcccttatcatgcctaataaccattaatttgatttctattactctagatcaattttacctgctctagaactttatataaatactcatgttatgtactcctttgtatctggtttcttttgctcagcataatagctgtgagattcatctatgttayttcatatatcagtaacttttttttggccaagagtatttcattgtatgaatatatcacaatttggttatcactttacctgttgaagaacatttgggtaatttgcaaattagagtaattataaatgaagctgtcacaaacattgaagtacagccctttcatggacagacagatgttttcatttctcttcttgtgtgtaaatacctaggaagctgaattgctggctcatagggttgatgtatgttaccttttcaagaaactgccaaatggttttctggaggggttgccccatttcatattcacac

SEQ ID NO: 785191 - DNA, 572 bp, Homo sapiens
tcaaaagaagacatacaaatggcaaacaggcatataaaaaggtgcccaaaggctggaaacagtggctcacacctgtaatctcagcactttgggaggccgaggtgggcagatcacctgagatcaggagttcaagaccagcctggacaacatggctaaaccccatctctactaaaaatacaaaattagccaagtgtgatggcacatgcctataatcccagctacaagggagactgaggcaggagaattgcttcagccagggagatggaggttgcagtgagctgggatcttgccactccactccagtctgggcaacagagcgagattacgtctcaaccaaaaaaaaaaaaaaaaaaaaaggtctaaacgtcattgatcatcagagaaatgaaaatcaaaactacaatgagatgtcatctcaccccagttaattggmttttatccaaacaacaggcaataacaaatgctggtgaagatgtagagaaaagggaactctcatacactgttggtgagaatgtaaattattacaggcactatggagaacagtatggaggttcctcaaaaaactcaaaata

SEQ ID NO: 785192 - DNA, 610 bp, Homo sapiens
agaagatgtgagggcatagtgagaaggaggccatctatgagctagatgttgtgggaagtcagggaccccgaatggagggaccagctgcagccaaggcagaagaacataaattgtgaagatttcatggacatttatcagttccccaaattaatacttttataatttcttacacctgtctttactgcaatctctgaacataaattgtgaagatttcatggacttttatcacttccccaatcaatactcttatagtttcttatgcctgtctttaatctcttaatcctkttatctttgtaagctgagaatgtacatcacctcaggaccactattatataaactgattgtaaaattgcgtgtttgaacaataccaaatcagtggatttcatcacccgatttgtgcatgatatctctgcttatactgaaaaagaacagagtaacagattttcagggaacaagggaagacaaccataagatctgactgcctgcagggtcgggcagaatacagccatatttttcttcttgcagagatcctatagacagatgtgtgagtaggagaaatatcgctgaattctttttcgaaaggaatattaataattgataaccctgggga

SEQ ID NO: 785193 - DNA, 637 bp, Homo sapiens
acattacctgatttcacattgtactacagagctatagtaaccaaaacagcatggtactggtataaaaacagactcatagaccaatagaacagaatagagatcccagatataaattcatgcatttacaaccaactcgtttttgacaaagtttccaagaatatgcaatggggaattgctagtctcttcaagtgatcatagctcactgcagcctcaaactcctgggctcaagtgatcctccygcctcagtctcccaagtagctgagataacaggtgcacaccgccacacccggttaattttttttttgtacaaacggggtctcactatgttgaccaggctggtcttgaattcctggcctcaagctgtcgtcccacctcgaccccccaaaatgctgggattataagcatgcgccaccacgccgagccttgggcaaagattttttgtgtaagacctcaaaagcataggcaaccaaagtgaaaatagacaaatgggattacatcaagctaaaaagcgtctgcacagaaaaaagcttcaacaaagcaaagaggcaacccatgggatgggagagaatatttgcaaactacccatctgacaagggattaataagaagaatatatgaagcatttaacccaataacaa

SEQ ID NO: 785194 - DNA, 679 bp, Homo sapiens
gtgaatgttgctttgttgggtactgtatatttttgtattcctataaatattcttgaactttgttctgggacactttcaaattacttggaaacagtatcatccttttgggtcctgtttttatgatttgctggagaggtccagagtactgcttagtctaggactaattctttcccattgttgaggcaagacccttctgaatactctacccaatgccctgcgaattatgaggctttccagtctggctggttgagaacaggcaccatcctcgccctgtgtgagaaccaatcgctattacttctaattctttcagctggttctttctatggtctttgttaatttcctgacatgcaagtgctgatcagtacactaactgctaggtaatcaagagagaccctctgcagatattcagttcctccctgccccactgcccctccaacytctctgaagctctctcctctccactacactggcctgctaccttggtctcccaggactctaagctccataaccttaattcagggaatctgccaggctctggctgcactctccctcctggcaccatctggaaatgctctcatggcactgagctagagcagtcatatggcccatctcacttgtctgccatcttgcaaggatccctgtcctttgttgcctgatgccctttgttgtgcaaagcact

SEQ ID NO: 785195 - DNA, 608 bp, Homo sapiens
ctactctatggcatatattaatacttcattcttttctatggctgaataacatttcattgtatgtatatatcgtgttttatttatctaccacttataaagatttgatgttatgtttgaaaaagaaaattctaaagctgaaagagtcctcaatggttcacctattattttatctacctcaatcatgcaacagttattgggtttgtcatacttttttctaagggctccagggaacatgcatcctgaaactcgactagtattacttcataatttctggtaagctttgactttgtggaaccattttkattaatcagattttgtttgggcctatatggaggtggaggacctaaacctgttaagtatctgtcaattgaagaacaatgacagaacagtcgagcaacgagtgagatttcagtaaatccactagatgttggctttacttcatgccacttttactagtttggttttcatcgaattgcctggttgttttagcatcatatagtctaatttagcatattaggttgtatctaaaatgacagatggaacagcccgttaaaaagcaaaataaatttatggccattcacatggcatcataactgtttgattttaaa

SEQ ID NO: 785196 - DNA, 645 bp, Homo sapiens
atattaaatttgtgaaatttttagtcatttgttatttaaatatacttcccaattctttctgtctctcctttctttctggtattttcattatgtatacattggtttatttatcgctgttccacatttctgaggtgctgtttatgtttccttatttttttctctctccttcagacagcataatttctattgatgtgtattcaagttggctgattcctttttctgccagstcaaatctattgtggaactactctattaaattttctatattgattgttgtactttttagctccagcattgtcatttgattcctttttgtaatttctatgactttattgatgttctctacttcataagaaattgtcatcatacctcctttttaattctttcagcatgactgtgttgggctatttcagtgaaatctatttctctcacagtatcaagtctctgatgctgctccttacaggccacagccttgtgcattcatataatctctgaaaatcagatattactggttttagatgggctctttttaactgctatttccttgaccattttaagttttcagctatctgctctattagaatcatatgtatctgttagctttatcttgttggtaggtaaattgctctattgctttcaaccttt

SEQ ID NO: 785197 - DNA, 625 bp, Homo sapiens
gtgcatgcctgtagtcccagctcctcaggaggctgaggtgggagtgaagcaggatatttccctgaccccttcatgggcctcgtgacgaggtgccttgcttactcagcccgcagcactccacttgcaggagggagaatgcaggtgagtgggtgcaggagccagggtgattgcttttgggcaccaacaagagcaaactccttgyggggccccatggcagcatctagtagggtgaccatgacccctgaggccccagagggagtgttacagtcagtattcttttagctctgccatccgtggacagcttaagtgttaatagctcagtgggcccccttgtatccacactcatggctctgagctcttgtccagcatccaggaaaaatgaggtcacatgaacaaactgaatatggtaaatggggagattttattgccgatacaagtggctctcagtgggatggggagttaaaaaggggatggggcaggaaagcaatcctcccctgaagtccagccatcccctgtcatactcctcttcaaagctatgctgtcaagctgtccctctgaagtcaagctgcttctgtccgacatccaaccatagtctctgacgtccagcagcttatcctctctctgc

SEQ ID NO: 785198 - DNA, 620 bp, Homo sapiens
cagaatttcatatccagctaaactaagctttataagcgaaggagaaataaattcctttacagacaagcaaatgctgagagattttgtcaccaccaggcctgccttgtaagagctcctgaaggaagcactaaacatggaaaggaacaaccagtataagacaytgcaaaaacatgccaaattgtaaagaccatcaacgctatgaagaaactgcatcaactaatgggcaaaataaccagctagaatcataatgacaggatcaaattcaaacataacaatattaaccttaaatgtaaatgggctaaattcccccacttaaaaggcacagactggcaaattggatagaatcaagacccattggtgtgctgtattcaagagacccatctcacttgcaaagacactcataggctcaaaacaaagagatagaggaatatttaccaagcaaatggaaagcaaaaaaaagcaggagttgcaatgctaatctcggataaaacagactttaaaaccaacaaagatcaaaagagacaaagaagggcattacataatggtaaaaggatcaatgcaccaaaaagagctaactatcctaaatatatatgcacccaatacaagagcacccagattca

SEQ ID NO: 785199 - DNA, 641 bp, Homo sapiens
aagtccctgccccatccaaatcagattcaacagtggaaacagagtcatctgccatgacacaaccacttctttgacggtactgtgggcatgagtggactttttcaggaggaattatgcactcagggtaatgactgacatctgtagggcaataacaagccaacactgcttgttagattcccagtcctcttgaacatgttccatcaactccattctcatgggcttgctcactgtctaccaacatactgggctaaatttgcctccaggcttcctctcattgtccctcraattatataggcgttggctcttttctgaaaacaatatccttcatttcctactttccccatgaagcctttcccagaattccaattgtcccctaatgcctaaatcaacattttattttgtccatttacccactggtgcatggtagcaccagggttgtcttccttacttagagaataagttcctccaaatcagggagggaccatgcctcctatttcttctgtttcacttatatcatttggcacgattctgagcacgtagccagcaaaacatagctgcttctccctaatgtactgaatgaagtagataaagcttttctacagcacctatttcagtgccttaatcataggctggataagaaa

SEQ ID NO: 785200 - DNA, 641 bp, Homo sapiens
aagtccctgccccatccaaatcagattcaacagtggaaacagagtcatctgccatgacacaaccacttctttgacggtactgtgggcatgagtggactttttcaggaggaattatgcactcagggtaatgactgacatctgtagggcaataacaagccaacactgcttgttagattcccagtcctcttgaacatgttccatcaactccattctcatgggcttgctcactgtctaccaacatactgggctaaatttgcctccaggcttcctctcattgtccctcaaattatataggcgttggctcttttctgaaaacaatatccttcatttcctactttccccatgaagcctttcccagaattccaattgtcccctaatgcctaaatcaacattttattttgtccatttacccactggtgcatggtagcaccagggttgtcttccttacttagagaataagttcctccamatcagggagggaccatgcctcctatttcttctgtttcacttatatcatttggcacgattctgagcacgtagccagcaaaacatagctgcttctccctaatgtactgaatgaagtagataaagcttttctacagcacctatttcagtgccttaatcataggctggataagaaa

SEQ ID NO: 785201 - DNA, 590 bp, Homo sapiens
ctaaccaaaagaaagctgatatggcaatatgaatgtcagatggcactggatctaggccaaaaagcataaaaagagacattatgtagtgataaaaagaacagtcctggccaggcgcggtggctcacgcctgtaatcctagcactttrggaggacgagaagggcagatcacgaggtcaggagatcaagaccatcctggctaacatggtgaaaccccgtctctactaaaaatacaaaaaagtagcctggcgtagtggcgggcacctgtaatcccagctactcgggaggctgagacaggagaatggcgtgaacccgggaggcggagcctgcagtgagccgagatagcgcccctgcactccagcctggatgactgaacgagaccgtctcaaaaaaaaaaataaaataaaaaccagtcctgtatttgaatggctaagattatggcttgaaatataaaagaaaaatgctgacaaaattacaaaacaaaattgaaaaatctactatcttgtctgagattttaaaacacatatcaaaagccagcggagtcagcagaaaacaccaacttgtattaaaaagctggaaaataataaacccac

SEQ ID NO: 785202 - DNA, 590 bp, Homo sapiens
ctaaccaaaagaaagctgatatggcaatatgaatgtcagatggcactggatctaggccaaaaagcataaaaagagacattatgtagtgataaaaagaacagtcctggccaggcgcggtggctcacgcctgtaatcctagcactttgggaggacgagaagggcrgatcacgaggtcaggagatcaagaccatcctggctaacatggtgaaaccccgtctctactaaaaatacaaaaaagtagcctggcgtagtggcgggcacctgtaatcccagctactcgggaggctgagacaggagaatggcgtgaacccgggaggcggagcctgcagtgagccgagatagcgcccctgcactccagcctggatgactgaacgagaccgtctcaaaaaaaaaaataaaataaaaaccagtcctgtatttgaatggctaagattatggcttgaaatataaaagaaaaatgctgacaaaattacaaaacaaaattgaaaaatctactatcttgtctgagattttaaaacacatatcaaaagccagcggagtcagcagaaaacaccaacttgtattaaaaagctggaaaataataaacccac

SEQ ID NO: 785203 - DNA, 642 bp, Homo sapiens
cacatctcttggctcatgggaacctgactccacattcatgtctccctgtgcctgcccttcaaacaccatctccttctctggcatctccccactcagggagcagcagcatctactcagatacctaatccagaaactagggacttaatggagattccactgttcccaccttgcctcacatctaagcagccacaagctctgtaattctacagcctcagtatttcctaattatccccttcccttcattcgcagacattgtctgagttcattcacatcttgtcatttcttacctggaactgtgcactgacttcctaaccattccctaaacccaacctcagcccttcggccctccatccctaaaccattctccatgtgmccacaagccatcttgcagtatagagcacacatttttttctccttttttgttttttaagggataggttcttactatgttgtctaggctagtctcaaactcctggcctcaagccatcttcccgcctcatcctcctgagtagctggaactgcaggtacatgccaccatgcccggcccacaaattcttcagagagtttctctaataatgaataaattcaagttttagacagtaatctgatttatatcagcatttgtactctgagcatgggaca

SEQ ID NO: 785204 - DNA, 642 bp, Homo sapiens
cacatctcttggctcatgggaacctgactccacattcatgtctccctgtgcctgcccttcaaacaccatctccttctctggcatctccccactcagggagcagcagcatctactcagatacctaatccagaaactagggacttaatggagattccactgttcccaccttgcctcacatctaagcagccacaagctctgtaattctacagcctcagtatttcctaattatccccttcccttcattcgcagacattgtctgagttcattcacatcttgtcatttcttacctggaactgtgcactgacttcctaaccattccctaaacccaacctcagcccttcggccctccatccctaaaccattctccatgtgcccacaagccatcttgcagtatagagcacacatttttttctccttttttgttttttaagggatrggttcttactatgttgtctaggctagtctcaaactcctggcctcaagccatcttcccgcctcatcctcctgagtagctggaactgcaggtacatgccaccatgcccggcccacaaattcttcagagagtttctctaataatgaataaattcaagttttagacagtaatctgatttatatcagcatttgtactctgagcatgggaca

SEQ ID NO: 785205 - DNA, 590 bp, Homo sapiens
tctatgtatatagataattatattatctataatataattatatagataattatattatctataatataattatatagataatataattgcagataataatatagacaatataattatatctgcatacagatataacagatatctatataggtataattcaattatgtaattgaattacatatagaattatatatatacaatttatttttttgcctgattataaaaactaggctatggggaatgatggtcttcacagggggtatttcgtataggtaaactatccagattatttggcttttaaaaactgtataggacatatatgcccaatctcaaccatggctgcataataaaatcacccagcaagctatttaaaaataatagattttggttctagggtaaagccctracatggagattttaaaaacatcaccaagtgattgtaatgtgtggctagaattgaaaactactgccctagtttctcaatcattgaattatattagtctgatcatttggtttgttcttggcactgatgaccatgaagtatcttatcttagtttgttttgtgttgttatgacagaatacttgagact

SEQ ID NO: 785206 - DNA, 508 bp, Homo sapiens
gactttgacactttttctctagcaaagtgactaaagagaagcaggtttttaactgggtttttatttctgttgtgtctctagccaaagccatgctgatgtttgatagtttttttttttctttttttaagagatggggtttcaccatgttggccatgctggtcgtgaactcctgacctcaatggcctcccaaactgttgggattacagacgtgagccaccacgcccagccagaattttttttcctaaagaatagaacaacattataaaattttakgcattaaggacaaattttattttatgattttcatttcggtgagtcacaagatattcaacacaaaatgaaacttcacaaaatttcacaaaatgaaaaattcatttcagattcaatatccacctccatcatccatattcattcttccaatgtctcaggccagaaatttggagtatgtggcttctccacctcacacaatttgccctaactttaatatatactcagaaattactggctt

SEQ ID NO: 785207 - DNA, 652 bp, Homo sapiens
ggatgccaagacaattcaatggggaaagaatagttttttttcaatgaatggataaataaaatgacatgtccaaacaaagaaatatatttggaaataaaaataaatgaagtactgatacatgctacaacatgggtggcctttgaaaacattatactgtgtgaagaaatcaatcacaaagaaccacatattatatgatcccatttatatgaaatgcccagagtagccaaatctagagrgacagaaagtagattagtgactgcctagggctaaaagtgatgaaaggagtggggatgatgactaaatgaaaaagtcataaacttgattatagtggaaaatgcacaactctatgaatatactaaaagccattttaaatgggtgaattgtatgatatgtgaactatatctcagtaagttgttttttacaaaaagaaaagaaaaccatgccaagagacacatcataaaaattgctgagagccagtaatatagaaaataaatatcagaagtagctcagggataggggaaagacataaagtaaaaacacaagccacaaatttgggagataggtttgctattccagaattataaaaagtgattacaaataaataaggaagagacaatccaaaagaaaaatgggcaaggcatataaacaggtg

SEQ ID NO: 785208 - DNA, 566 bp, Homo sapiens
cttgggcctgagcccctagggggaggtgtggccacagtctccccagaccagtagacttagtttttccttctgctagttctgagaaatccagacagctcagacaaatgggcttcccccagtgaagggacactaagggacatccaaagtgctttgttaaatgggtcctgctccccatgccacccaactgggtgagactctccaacaggggttgtcagacacactatataggagcatttatactggcatcagatcaatgcccctcaaggtcagagatcccagaggaaggagcaggcacccatctttgctgctctccagcctccttgagtgacatctccatgtgtgggagtgaaccagatgaatagggcytgaagcgaacccccagaaaaccacaggagccttacagaagagggacctgaccattgcaagagaaacaacaaacagaaagcaacaacagaatcaacaacaacaacaacaacaaaaagtccccacaaaaaccccattcaagggtcagcagcctcaaagaccactactcgacaaactcatgaagatgagaaataatcaatgaa

SEQ ID NO: 785209 - DNA, 566 bp, Homo sapiens
cttgggcctgagcccctagggggaggtgtggccacagtctccccagaccagtagacttagtttttccttctgctagttctgagaaatccagacagctcagacaaatgggcttcccccagtgaagggacactaagggacatccaaagtgctttgttaaatgggtcctgctccccatgccacccaactgggtgagactctccaacaggggttgtcagacacactatataggagcatttatactggcatcagatcaatgcccctcaaggtcagagatcccagaggaaggagcaggcacccatctttgctgctctccagcctccttgagtgacatctccatgtgtgggagtgaaccagatgaatagggcctgaagcgaacccccagaaaaccacaggagcyttacagaagagggacctgaccattgcaagagaaacaacaaacagaaagcaacaacagaatcaacaacaacaacaacaacaaaaagtccccacaaaaaccccattcaagggtcagcagcctcaaagaccactactcgacaaactcatgaagatgagaaataatcaatgaa

SEQ ID NO: 785210 - DNA, 640 bp, Homo sapiens
ctataaatattgccataaacacactataaagaaagtgtcactatataggcaatgtgattttagtttgttatcagttaaatcttaaatatctttttataatggccagtggtatcttctaattttcataaagaatatcttacaaaaaaattttgttttttggagacagggtctcactctgtcgcccaggatggagtgcagtgacacaatcatgggcttgatctcccaggcytcctacctcagcctcctgagtcactgggaccacagatgggcactaccatgcctggataattattttacttttttatggaaacggggtctcactatgttgccaagactcatctctaagtttcttactacagcatttagggctttaatgagaatataagtagttttgtaaacttacttctgccaaatcttcaaaacagctgccagctaagggatgaggactgctttcatcagtcatttcaactgtgtcttcaatcaaacctaaaagtttcacagtcaattcatgtatatctgaaatgttactaaaaatcttttcgatatcctgaaaaaagagaaggaaggttaagaaatgtgagattgagaattctgctaaaaaattactaaatataaagagcaatataggctactcgaggca

SEQ ID NO: 785211 - DNA, 583 bp, Homo sapiens
ggattacaggcatgagccactgcgcccagcccatctctgtgtttctatgtaatgcaatgaatacttgagattggttttttaaaaatcccttgaattttcaatgttgacaatggtgactttgtcaaatacatatatatatggatctatatatgggtatatatggatatatacatggatatagacatagatatccagttttcataaaaactagccaaaactggaaaataagcaaaagaatactggctgtgtttcagtacagtgctatgcttgaatcttttattaatttctaytgactattttacacatctataagattaagttacagcttttcagcagatagagatgcaagtaattttttttttttttttgagatggagtctcgctctgtcgcccaggatggagtgcagtggtgtgatctcggctcactgcaacctctgcctagcaggttcaagtgattctcctgcctcagcctcctgagcagctgggattacaggcacacaccaccacacccagctaatttttggtattttttagtagagacggggtttcaccatgctggccaggctggtcacgaactcctaaa

SEQ ID NO: 785212 - DNA, 633 bp, Homo sapiens
ccactaagagagtaatttcaaaataattatgatccacagagaactgccacaccatgagtctagccattgctgctgccacataaaactagtgactgaaaaaaagcatcattcaaatttttgttatttatgttatcgcaatagaatccttcaaattcctgacagttaatgaagttgagctgtcaacaacgaacgtattcgtaatctgttcagtatagctcccagtctatcagatacactagagtgagatataraaggcagaagtgagcccaggcacggtggctcacgcctgtaatcccagcactttgggaggctgaggtggatggatcacctgaggttaggagttcaagaccagcctggccaacatggcgaaactctgcctactaaaagtacaaaaattagccgggcgtggtgatgggcgcctgtaatcccagcgactcaggaggctgaggcaggagaatagcttgaacccaggaggtggaggttgcagtgagccgagatcacaccactgcaacccagcctgggtgacaagagcgagactccctctcaaaaaaaaaaaaaaaaaaaaaaaagaagaaggcagaagtgagttggaagccgcaactctgatatttctgttagcaagcaccattcagt

SEQ ID NO: 785213 - DNA, 605 bp, Homo sapiens
gaatgggaggattacttgagcctcaggagctcgaggttacagtgagctatgatcactccactgcactacaacatgtgtgacagagcaagacccctatcttaaaacaaaaacaaacaaacaaaaacccctctgtaactaatgattgggtaagctcctgttaactaaaccatgtactgattttggtttccagaaaaaggattcagatgactgcattttggagttctcatgggaaacaaatggaatcaacyttactcttaaaagtttaattttatttaatctaatttgggatttaaataatcaacgatttccctacaaaagttaaatctgaccctaacttggttcaatgctaattatttttaaaataatcgatgcccacaacactatacaaactgatgttttttttttttttttttttttttgagacagagttttgctcttgttgcccaggctggaatgcaatggcatgatttcggctcactgcaacctccgcctcccaggttcaagcgattctcctgcctcagactcccaaatagctaggattacagacatgcaccaccacgcctggctaattttgtatttttagtagagacagggttttgccatgt

SEQ ID NO: 785214 - DNA, 499 bp, Homo sapiens
tttcaccaagtgcaaattgtgttaaatctattctgaccaaatattttaatatttgattataaatatttaatgccaagtatcttaggtgattattaataaattaattttaagccaattttggttaataagtctataggcttataaactaattctgttttttcagagactgtaatttagatagaaaaataattacttctcattcatgaacaataaaaaagtttttagtccctttttcatgcgtaattgctgattcatttaaattggtggttctcagctggggacaatttagtcccccaggggatatttaggaatgtctagagrcatttttggttaccacaactccagggtgctattggagtgtaatgaatagaggccaggatgctgctacagatcctattacgcacacgacagcccatcacaacaaagaattatttggcccaaaataccaaaattgttgaagttgacaaaacttgatttaaatcattcaatttcaatcata

SEQ ID NO: 785215 - DNA, 499 bp, Homo sapiens
tttcaccaagtgcaaattgtgttaaatctattctgaccaaatattttaatatttgattataaatatttaatgccaagtatcttaggtgattattaataaattaattttaagccaattttggttaataagtctataggcttataaactaattctgttttttcagagactgtaatttagatagaaaaataattacttctcattcatgaacaataaaaaagtttttagtccctttttcatgcgtaattgctgattcatttaaattggtggttctcagctggggacaatttagtcccccaggggatatttaggaatgtctagagacatttttggttaccacaactccagggtgctaytggagtgtaatgaatagaggccaggatgctgctacagatcctattacgcacacgacagcccatcacaacaaagaattatttggcccaaaataccaaaattgttgaagttgacaaaacttgatttaaatcattcaatttcaatcata

SEQ ID NO: 785216 - DNA, 638 bp, Homo sapiens
agaatacaacttgaaaatgtagtattatgacaatttcaaggcacacataaaaatgtatcataaacatctcaaagtagaaacaaaggaataacattcttaactttaaataatattccccttaaagaacaagtagaacacgaaataagttacacttgttatagtatttgtaatgccctataatgtcagataaaacataaatgttcttgattcaataatatacatttgatgacacatttgtttaaatgttcatggcctagggtttcatttcttgggctatgattctgaaacttaaartagaaaactcctctctttcagatttcagaaatataccaaaaacatttccagaagatgtaaatattataagaaagctgttaatcattaaaagaataagattaaagaaagaaaacataaaattacacatatttttattcagttgaagaaatggcaaccttgcaatgagataaaattaaatagcttaaatttattaaaaagaactttcgacttctttaaaagaaatattctcctcaaaaacttgaaaaggcaaagttctgagacctcagatgattggtctaaacatatgtgagtttcttgctgtctataaaaaacattccaaatgttatttcagctttttaaaaatg

SEQ ID NO: 785217 - DNA, 629 bp, Homo sapiens
agggaggaaggagtgatgtttacttcatctgcccttatctaaggaaaacaaaaacttttacaaagatgcccctctttcctcctcccctactgctgcagattcgcttttatgactcactggtaaaaagaaaagctgagaaagtatttaacttttccagtgtctatagcagagtcatgcaaaggagagtatgactggaaataaatgttgagttataaagtcaatagtgtttgactcaggtcctgactccttcccgggtagaaggcttacagagtcaaattaggcatttggtttcaaatttgctgtggttragcagacattaagatattcaagtggaagagcagacatagagtcattaggacaaaaatgataggtgatgccataggaaaagattaaattgagaagactacaaaaaagaaacatcaactgctggtgagaatatggagcaacagaagctctcattcattactggtgggaaagcaaaatggtacaactatcttggaagacaattggcagtttcctataaaactaaacatatttttacgtatgatccagaaattgcactccttagtacatactcaaatgagctgaaaacacctgggtccatacaaacaaaatgcacatgggtgttt

SEQ ID NO: 785218 - DNA, 626 bp, Homo sapiens
tctcataaaacataaccataaatatagtgcggtggtatttatacataacaacttgtcagcaaatattaccaaatgttaacttcttatttatttatccttttataccatgaaagtcagtggagggagaaaagataggaagagggaatgagtggcagtcaatttaattatgctctatgtgcttattttagttaacttacttccatgtctagacagcatggaatcatttgtggtgaacgaatgcttcattcaagaacaagaaaagccagatttaatgcaaaamtcatctgcctaaaggtatcagagggctgttgctgcaataatggcttgagtgtctaagattctgaagaggagttaactggagaggaaggactggagtatctgcagttattttttccccctgagagtgtcatattctaggtatggggaaaacactgagaaatcaggctttaactaggcaaagagctcctgctggaagacagagaaaccacccaagcttttgacagctattcagggctgaagtgacaaaatggagatttgagacttgtttctgaaccaaatcatttgccaaattccaaacttctacaggtctttaagttaaaaagctaagccctcaaacctctgaaaaa

SEQ ID NO: 785219 - DNA, 592 bp, Homo sapiens
gcttggacaaaaatgctgatagtggtatgaacaataaggtacaggctgaggtggtctcaaatggagaagagaaacttgttgggaactggagaaaaggtcactcctgttatgttttaataaagcgactggcagcattttgtccctgccctagagatttgtagaactttgaacttgagagacatgatttagggtatctggtggaagaaatttctaagcagcaaagcattccagaggtgacttgggtgctgttaaaggcattcagtttcagaaaggaaacagagcataaaagtttagaaaatttgcagcctgacagttcaatagaaaakaaaatcccattttctgagaagaaattgaagccagttgcagaaatttgcataagtagcttggaaccaaatgttaatccccaagacaatggagaaatgtctccaggacatgtcagaggtcttcacagcagcccctcccatcacaggcccacaggcctaggaggaaaaagtggttttgtgggccagccccagggtccccgtgctgtgtgcagcctagggacttggtgccctgcatcccagccactccagctgtggctgaaaggggccaa

SEQ ID NO: 785220 - DNA, 644 bp, Homo sapiens
ctcgaactcctgacctcaagtgatccacccatcttggcctcccaaagtattgggattacaggtgtgagccaccgtgcccagcctctagttcttataaaacagctgcaaaatccatcctgcttttcagactttttgtttgtttttaatctccaaacctgtgcagtcacagatatccataaggcactactggatgtgtacttaatgctccctcccctcagtatcaaccaaaaatctgttgtttttctttaaataccagacaatggctctccatgagtaaaaagctagaattttcagatttctgcctgcagataatcaacacatgcctacgagataaaagtggctgcaaaaataagctctcctttcaggttcttcacttcaactgttttagtctctctagtcttcttactccaatgaataaaagattctcragaatccaaaatcaagcctcagaagatagaacaataaatatataatataaaaattgacaggaaaaagagtaaagaaagtctcagattaccagaatgtcaggaaatccagctggaaaacaagagatctaatctatatcaatcatgtgattaggtgcaatattcatttacgtatataaatattatctacacatacatgttaactctgggattatcttt

SEQ ID NO: 785221 - DNA, 606 bp, Homo sapiens
gtgccaccctcaccccaccagaaacgccccaccttcctgtctcctttccgctcactgtcctcacagcctgtcctatgcccagccttgcctcagtggagatgaataagccacagtccacccctccactgtgtcacgtgggacagccctctcaagccgcagtcagcctcatcctcactgccctggggccggtggtgacctcctacctgccctccttactgtgagcgcctcccctatccagcccatcctctgagcggcctccaaaggcccccctaaaatgcctgtctcatcgtatcccttcctggcttatccaaaccccagtggaattaccaggctctgtgcccatctcacccctcctgagaccccacagaaraacaagtgagaactggttcatgccaggaaggagcttgggagggatacaggtgccaagcagtgagagacgccaaccagtttctggaccatggaaaggaatgggagtggactctcggtgaacggaagagaaacccacagcctggcgtctccacgagtggccgcaggggtgaagcagggtgggctccggactcagagcccagggacagccaaaggcaggtgtgagaggaggggctggag

SEQ ID NO: 785222 - DNA, 658 bp, Homo sapiens
aggaaccctagactgggtatcggatcccagctgtatagcctccctttgctgttccctcaccccgtgagatcctggggcaggccctcctcactgtgggcgtcgcatgccccatctgtccaaggggacaaccagacgggctctggggccttctgaggccagctcagctctggtcttcggccccgtccacagcccaccctccgctccccagctcctstgaattcttgtcactttggcttggctggcagggagggcacccccaacctgcctccagcctgcagacccccctgccacccactgtggaaggctgggcaggagaagggccacaacccaggtgtccccgtcagagttctaactgtgtggctgcttctgacacacgcaagggtgttttcttccacctctgcctccctgagacagcgtttccctggggagccctgagcactccctcactctaccaccccttcctttcaccccagggcccccagctgcctcagggccctctcacctcctgccacagtgacaaggttagggtcagggtcagggtcaccacacacaaacacacacaacacacacacacgcacaccacacacacatacacaccacacatcacacacacacacacacagcacacacaacacacactatacagcacacacacact

SEQ ID NO: 785223 - DNA, 537 bp, Homo sapiens
atgagacatcttaaaatttttcattcactgggattctgtcttctaagcattgaagttaagcaatttccatgtttgttttgccatttaaaatgattacactaaatggaatcaacaaactgtgaattggaacatctaggactcgtatagtttagaagtacagcttcatctgttggctaatacacattgtcatgttgctgatccctgtaagactaattgactggtggtggcatttcagaagcaaaaatgtgacattttactaaaggccaaaggtaatgtgtrcacttattgtaaagttagaaagggtgactcattctctctacatctatttctacaaaaatttacagaagctgaggtgattttaattgtcttgaaatcatgttttcagagccagaagggacctctgctatcttgttatacaacttcttgattctaaatgtgaattatttaagattctacatctagacagacaaatttatttttcaaactgcaggttataaactatctaatgcttaatcaaaataagcttaatgggtagtg

SEQ ID NO: 785224 - DNA, 667 bp, Homo sapiens
gatttccacttttctaatattacacttcttgtaatcaatgctgttctctggaggatttttgtttcatggactagatgttctttgtaaattctcaacatgacctaatataaaaatcaatacatctttaggtaagttcatttctattattagatctggctgtagcttcacgctaacgtgtttcgaaatataagcagctccctaccacagggcatggctttttccyggtaatgtattaaatttcattatggtagaaaccattacaacaaaaataaaatccactacagtctcccagctctagcagattgccagcaatgtgtttgctttaatgttctcattacaatatttatcttgattaaggcaaaaatgcttttgtccaggtcgtatctctattagtgatctctctccacaacaacagaacatggggttcctggcttagcaaggactgaaggaaacactttaccgtgacacttgagtgaggacagacaggtaaacgactgggagcttagagcagaaggaaggaaagccatgcacacagcactagttacaagatagattagcatgaacaatgtatttcacagactaagaaaatgatgattaattctacatttggcctattcttgaagaaacttgcccaaattgaacaaaaggtgccaaaagaagccctggg

SEQ ID NO: 785225 - DNA, 590 bp, Homo sapiens
tgtctaggccaagaatctggcttattcagtcaaatgtatgcattctaaagaaagaattggtacacagtaaatgaagtgggaagtgtgagttagcttcagagatcattttacatgttaagcactgaagcatggaaagaatgaatgtgaacttagaagcctgcgtgaaggataggacrctagcctagaactcaggaaaggtgtgctacggatggttctgccacttatttgctgtgtatatttgagaaagtgtttaagctcactgcattgcagtttcttagctgtaaagagaaccaactttaacattcccgattgtatgtttataaatgaggtttgcctttattcctttctgctatatcggaactagcaaataccaaacatacagaccaaataaatacataggaatattcaattaacatgctcatcttaactaacttataaaattctatcttgtttatatctagttgtattaatcagggttctccagagaaacagagctaaaaaagttcagagaaacagacccaataaatcatacataatgtgattaatattaatatataaaaaatcatataacatatcatgatatatattaa

SEQ ID NO: 785226 - DNA, 590 bp, Homo sapiens
tgtctaggccaagaatctggcttattcagtcaaatgtatgcattctaaagaaagaattggtacacagtaaatgaagtgggaagtgtgagttagcttcagagatcattttacatgttaagcactgaagcatggaaagaatgaatgtgaacttagaagcctgcgtgaaggataggacactagcctagaactcaggaaaggtgtgctacggatggttctgccacttatttgctgtgtatatttgagaaagtgtttaagctcactgcattgcagtttcttagctgtaaagagraccaactttaacattcccgattgtatgtttataaatgaggtttgcctttattcctttctgctatatcggaactagcaaataccaaacatacagaccaaataaatacataggaatattcaattaacatgctcatcttaactaacttataaaattctatcttgtttatatctagttgtattaatcagggttctccagagaaacagagctaaaaaagttcagagaaacagacccaataaatcatacataatgtgattaatattaatatataaaaaatcatataacatatcatgatatatattaa

SEQ ID NO: 785227 - DNA, 639 bp, Homo sapiens
cctgacatggctggagaccctgggatcctttctcctggcatggtagactaaaccacttgttggctctgttccccaccctgtgccgcctggagcaggggaagcagatggtttcaatacaggcagaaacagctgttcctcatatggggtgagctgaatcttgattgttttaggttctgctctttacattgacccctcaatggtcctagttctgaagtatataagcgggccctttaaaagactttcctaaggcctgaatgtcaaatgaatcataatctaggtagcaagattgctcctaaatggacatcacagtggctgaaaacaatcaagggatggctgatttagtagggccatgctcaartagggcaagtctctccccaaggtaaccagagacatcctcaatgcatcagcaatcttggaagctgtactcatctgaaagttcaggctttgttggacaacactcctgtccactggcacactcacacactcactgccatacaaccctttctcagactgagtccattagtagtatctacctgccgtaagcccctagaatcaaagatgctatgtggaaggcttggacccaaagacagcattggagacttggtcttaggtgagcaagggtttaatctgactaggaca

SEQ ID NO: 785228 - DNA, 616 bp, Homo sapiens
tgtgtaattaacacatcactagatgttttggatatattggtgaacaaaatagaaaaacaatgttttatcttgataggtaaattataatgggaaggagaggataaatactaaacaataaataataaataaatacagataatagaatattagaagctggcagttttggaaatagagtaaatcacagtaaagaaaatcaggggtatttgaagagggctgagaaggttacagtatttaatagggtattataattgactacattgagaatgtaaatcttaagcaaaaagatgatttgataaagaatttatgaaattatacagggatgcatttctggcakaggtaacagctggagaaaagacactaagttgaaagcatgcctgatgagtttaagtaatagcaaggggactgggagttgctggtgtgggccagttaaagagagaataataggagttgatgacagagaacattagcttgacagattatataagaccttgaggtccatcgtaaggacctaggacattcaaaattgatagattgagacaaagaggaggaaacaaaaagatactaaggaatagcaatcagtgagacaggagaaaaatgaagagaatcttgtatctta

SEQ ID NO: 785229 - DNA, 628 bp, Homo sapiens
gttctcaggcgtgtccaggcttaaccattgagagcagagctctactggcctgccttgtgtttcaatagcatgtcaaccccagctggcctgccttgtgttttacatggcatgtcagcccagcatttctgttgctagaaagctttccttttctttcatatttagagggataaggttttaactgttcagcatctgttcttaaaatggcaatatactctctgtgattattttgagaaagccattttgatcgaaatattgggttctctttgctttcatttccctgatagatctctcagctcactctccccagaactgactctgaagarctgacaaagcaataactagttgttacagaggaatttttctctattgtgggtgttatttatttattttgtttattctagtaatgatttcttgtccacttcaatttattagtttcaaaacgagtgaatatagacatagtggaatctttgctatcccttggttaaattctatcccgtgatatcccttgaaagagtaaggaggaggtctctctgtttcatgaggaatttaagcaaggtgctcagaatgaatcacctagaagagtataaagattgctgtagatttcttaagtactagtttcaaacaaata

SEQ ID NO: 785230 - DNA, 621 bp, Homo sapiens
atatttttaagatgtacattcaccttaatttgctaaaaattcaataatatcccaatcaaaatcctagggagcttttgtttggtggaattaacaaatcggttctaaaatttatatgggaatccacagtatctacaagagccgaaatactagtgaaagtgaataacagagttggagaactaacrtaactaagaacttaacataatttcaagacatactacaaagccattataatcaagactgtgttatggtttttaagatagatacatagatccatagaacagggtagaaaatgaagcaaaaaaatatatatatatatacagacatatatgaacaactgattttcaaaagagtaaaagtttttcttctagggtttttatggttttgagttttacatttaattctttaatccatcttgagataatttttgtataaggtgtaaggaaggggtccagttttagttttctgcatatggctagccagtgtgcccagctatttattgaataggagatcctttccccattgctattgcttgtttttgtttttttgaaaatcagatggttgtagatgtgtggtgttatttctgaagtctctgttccattccattagtctatatgtctgttt

SEQ ID NO: 785231 - DNA, 621 bp, Homo sapiens
atatttttaagatgtacattcaccttaatttgctaaaaattcaataatatcccaatcaaaatcctagggagcttttgtttggtggaattaacaaatcggttctaaaatttatatgggaatccacagtatctacaagagccgaaatactagtgaaagtgaataacagagttggagaactaacataactaagaacttaacataatttcaagacatactacaaagccattataatcaagactgtgttatggttkttaagatagatacatagatccatagaacagggtagaaaatgaagcaaaaaaatatatatatatatacagacatatatgaacaactgattttcaaaagagtaaaagtttttcttctagggtttttatggttttgagttttacatttaattctttaatccatcttgagataatttttgtataaggtgtaaggaaggggtccagttttagttttctgcatatggctagccagtgtgcccagctatttattgaataggagatcctttccccattgctattgcttgtttttgtttttttgaaaatcagatggttgtagatgtgtggtgttatttctgaagtctctgttccattccattagtctatatgtctgttt

SEQ ID NO: 785232 - DNA, 621 bp, Homo sapiens
atatttttaagatgtacattcaccttaatttgctaaaaattcaataatatcccaatcaaaatcctagggagcttttgtttggtggaattaacaaatcggttctaaaatttatatgggaatccacagtatctacaagagccgaaatactagtgaaagtgaataacagagttggagaactaacataactaagaacttaacataatttcaagacatactacaaagccattataatcaagactgtgttatggtttttaagatagatacatagatccatagaacagggtagaaaatgaagcaaaaaaatatatatatatatacagacatatatgaacaactgattttcaaaagagtaaaagtttttcttctagggtttttatggttttgagttttacatttaattctttaatccatcttgagataatttttgtataaggtgtaaggaaggggtccagttttagttttctgcatatggctagccagtgtkcccagctatttattgaataggagatcctttccccattgctattgcttgtttttgtttttttgaaaatcagatggttgtagatgtgtggtgttatttctgaagtctctgttccattccattagtctatatgtctgttt

SEQ ID NO: 785233 - DNA, 654 bp, Homo sapiens
tttctttatgaggtaggtacaattatctccattctacagatgaggaaacaggtgcagagaatttaagaacctagcccgtcatactattagaggggtgaacccgggtagtttaactcgtatgcctgtgtatttaatcattrcactgactgttttaatccttaattctaacccttagttctattccttctcacattgaatcaatcatctatgatctattaatgttgtcccccaaatcatctcagtccctgtgtactttggctggagtaatagattattttttaaagtagaggtttattttagagataatcttgcttatctaatttcctcatattgcagacttgctgcagttttacatccagttcactgatcaactatcaaactgaaggatagcttgtcactgcatctgcagtgactcacttgccttggggaaaaatacatgtcacacatttacattttggcttttaagtgaggaaacttcatggttttcagaacagagtaagattcttgaaaactaaaacaataaatccaatgctgattgtgatcaatgatgaataccttgtgtcacttgcaaaaatgtacagcttctggaggtgttttcctggtcttggggctggtgattgtgatcattataactactgatgagttaccaaattc

SEQ ID NO: 785234 - DNA, 617 bp, Homo sapiens
tcaatatatgcagaaaaggccttcgacaaaatttaacaccccttcatgctaaaaactctcaataaactaggtatcagtggaatgtatctcaaaataataaggctatatgacaaacccacagccaatatcatactgaatgggaaaaaactggaagcattccctttgtaaactggcacaagacaagaatggcctctctcaccagttccattcaacatagtatcggaaattctgtccagggcaatcaggcaagagaaataaataaagtgtattcaaataggaagagagaaagtcaaattgtcctgtttgcacatgacatgatacttcraaaacccatcatctcagccccaaatctccttaagctgatgagcaacttcagcaaaatctctggatacaaaatcaaagtttaataccttctaaacctgtcttatttcttctttcattgtccttttcaggaagaatggttacaataaaacaaaagttagatcactcacttctcagttaagaagtcttcaataacttcccttcttttttagagtaaaagctgaagtcagatttagctgatttctctgacccatctactaccatctctggactcaatttttccttctcgatggcag

SEQ ID NO: 785235 - DNA, 621 bp, Homo sapiens
cagaattagaaataaaaagctattccaaaattcatatgtaagcaaaaaagagcccccgaatagataaaacaatactaagcaaaaagaacaaacctggaggcatcccactacccaacttcaaaccatactataaaaacacastaaccaaaacagcttggtactgatacaaaaacccatgcatagaccaatagaatggaatggaaaaatcagaaacgaagccacacatctacaacaatctgatctttgacaaggctgacaaaaacgaacaatgaagaaataactccctagtcaataaatggtgctgggataactagctagccataggcagaaaattgaaaatgaacccctacctttcactatataaacaattaattgaaaatctattaaacatttcaatgtaagacctcaaactataaaattcctgcaagataacctaggaaccactcttctcgacattggccttggcaaggatatttgactaggtctccaagagtaattgcaacaaaaacgaaaatagataagtgggatctaattaaacaacaacaaaaaaacttctgcagagcaaaataaactaccaacagagcaaaccaacaacctacagaatgtgaaaaatattcacaa

SEQ ID NO: 785236 - DNA, 621 bp, Homo sapiens
cagaattagaaataaaaagctattccaaaattcatatgtaagcaaaaaagagcccccgaatagataaaacaatactaagcaaaaagaacaaacctggaggcatcccactacccaacttcaaaccatactataaaaacacagtaaccaaaacagcttggtactgatacaaaaacccatgcatagaccaatagaatggaatggaaaaatcagaaacgaagccacacatctacaacaatctgatctttgacaaggctgacaaaaacgaacaatgaagaaataactccctagtcaataaatggtgctgggataactagctagccataggcagaaaattgaaaatgaacccctacctttcactatataaacaattaattgaaaatctattaaacatttcaatgtaagacctcaaactataaaaytcctgcaagataacctaggaaccactcttctcgacattggccttggcaaggatatttgactaggtctccaagagtaattgcaacaaaaacgaaaatagataagtgggatctaattaaacaacaacaaaaaaacttctgcagagcaaaataaactaccaacagagcaaaccaacaacctacagaatgtgaaaaatattcacaa

SEQ ID NO: 785237 - DNA, 566 bp, Homo sapiens
tggtgggcctggcacctggttacacagaagcaagcctaaagcttcagtccatgggtatgggcctggatcctgggttcttgggagccagcctatagactaggtccatgaatatgaacctggtatctggtgctgcaagggctggtctggagcttgatctggcctgggttgagcccaaagcttaggtctgaaggggcaagctgaagtctgatgtcctaaggatggtctggcactgggtcaggcttacagcctaggactgcgaaaactggcctggcattggcatcagcctgaggcatgggtcctcaggggtaggttggaacctggtcctacaggggccaacctggagccttgggcyatggagcaagacttgcacttagttggaactgaagcctagagctgtgggggttgaactggtggctgcagcatgggaatcagctggctccagaattcactgggatgggcctggtacttgggcaaagtcaggcactcactttactgtctttcccccacaaaaagggcatttctctctaagcggcacgggcttaggggtggggtgatgccaacaatgt

SEQ ID NO: 785238 - DNA, 609 bp, Homo sapiens
ctcctaatgctatccctctccgctctgcctacccgacaacaggccccagtgtgtgatgttccccttctgatgtccaagtgttctcattgttcagttccaacctatgagtgagaacatgtgctgtttggttttttgtccttgcgatagtttgctgagaatgatggtttccagcttcatccatgtccctacaaaggacatgaactcatccttttttatgactgcatagtattccatggtgtatatgtgccayattttcctaatccagtctatcattgttggacgtttgggttggttccaagtctttgctactgtgaatagtgtcgcaataaacatatgtgtgcatgtgtctttatagcagcatgatttataatcctttgggtatatacccagtaatgggatggctgggtcaaatggtatttctagttctagatccatgaggagttcccacactgtcttccacaatggttgaactagtttacagtcacaccaacagtgtaaaagtgttgctatttctccacatcctctccagcacctgttgtttcctgactttttaatgattgccattctaactggtgtgagatggtatctcactgtaattttgatttgcat

SEQ ID NO: 785239 - DNA, 609 bp, Homo sapiens
ctcctaatgctatccctctccgctctgcctacccgacaacaggccccagtgtgtgatgttccccttctgatgtccaagtgttctcattgttcagttccaacctatgagtgagaacatgtgctgtttggttttttgtccttgcgatagtttgctgagaatgatggtttccagcttcatccatgtccctacaaaggacatgaactcatccttttttatgactgcatagtattccatggtgtatatgtgccatattttcctaatccagtctatcattgttggacgtttgggttggttccaagtctttgctactgtgaatagtgtcgcaataaacatatgtgtgcatgtgtctttatagcagcatgatttataatcctttgggtatatacccagtaatgggatggctgggtcaaatggtatttctagttctagatccatgaggagttcccacactgtcttccacaatggttgarctagtttacagtcacaccaacagtgtaaaagtgttgctatttctccacatcctctccagcacctgttgtttcctgactttttaatgattgccattctaactggtgtgagatggtatctcactgtaattttgatttgcat

SEQ ID NO: 785240 - DNA, 560 bp, Homo sapiens
tatggcctgaattatgtcccactcaaattcatatgttgaatccttaacccccaatacctggtcatgatgtattatcctttcagtgcattgcagtattcaacttcctaatattttgtttaagattgctgcatctatgcttacgagrgattaaggtctgcaattttcttttctttttctttttttttttttgagacggaatcttgctctgtcacccaggctggagggcagtgggacgatttcggctcactgcagcttccacctcctgggttcaagcaattctcccacctcagcctcccaagtagctgggattacaggcacccaccaccatgcctggctaattttcatagagatggggtttcaccatattggccaggctgttctcgaactcctggcctcaagtgatccacctgcctcttgtaacgtccatgtcaggtttcagttttggggttctgtatcctcataaaatgagttgggaggtgttttttcttcctctgttttctggaagagttggtgtaaaactggtatttcttccttaaatatttggaaaatttaccaatgaa

SEQ ID NO: 785241 - DNA, 576 bp, Homo sapiens
gagatcctgccggtgggatccagaggaagggtctggcttcctagcctcctggaaggaccttgctgccaactcttcccttctcacctgctcagtgacttgtctgaacttacataactagttactggcagagctgagtccagaccccaattatctcgagtcaggacaggtgactttttgccatcccagggtgcccacccctgtagcttgaggccatctcccctggtggagtcccagtttcctcagctgagaaagggggtgagcccttcctgtcccactggccttccagggaggcggtggacccacctgccatgtgaactgtgcaaaccagagtcaagagtgtgtgccgctaacatggtgacatcagcaccgattgtagttgaaagttttattggattaaaaaaaagasagacaatactggtcacataaatgggtgttttttttttctcttaaggtttgaggccttatttattgttttatgtacgtagttccatacttccagcagtaattcaggaaacaggagagagagataaggtaagaaaaagagagaaaggcagctgggctcccaaggggtgaact

SEQ ID NO: 785242 - DNA, 597 bp, Homo sapiens
gcaacacaggtcgtcttaaggatgctctgggagtttctcttggggaagacatagctctgcagatcaattgcctaatcccccctgacagttgagataaatttaactctttaaggcgttgcttgcgttgctcagcaggttagtttacctgctgcactgggcgctggaggcaagcttcatgtctgcgtgaggctgggacatttcctggcgttgacgcctgtacctttcctagcttgttgatgtataccaggaggaagcatgtgattgccacctctcgtatcagctttacacctgagataccttaccaaaaatattaaatagtctgtaaagcttagtgttaatttctaaaaggcaatagcattgtagtrcttgagtttccgactctagaagccccagagccttctagaactttgatgaccaatttgtccatagaattatcttcttataggattaaaagtttccaagcctaataataaaaaatcttttttgaaaacatatatacagttcaaacataaaataacatcatgagacagctgggttttcaaactattccccggcaaagttcgagttcccgtggagctgggatagcgccagactggg

SEQ ID NO: 785243 - DNA, 613 bp, Homo sapiens
aaaagcgctttacagtgttattttgcaagacttgagccctgagtggatactgagtgtggagcagcctggttttgtacatttttgccacatgttgagatgccatgggagctggtgactcacgcgccaccgacgttcacaaaagctcccggctcggagcagagcattgaagggaagggtctggctgcttggcgtatgttaaccaggctgggtactgagcgtcttaaaagccaagccacgtttgcctttcaactttactttgtggtgacgaaagaggaggtctctttcttcaggggcttactcagcgctgctggatctgaagatgcccgggaggagggtgaggggtgaaaagggcatcctaaggcaggatgggacacagcggcctctccagcttaactcagtattctctgaggcacagaatactggagatctgagacccctgaggtgcaagccctcccctcaaggatctaagcaggyggtgggctgccgctggcttctccccacagctggtggggggcagaagccctgttccacaggcgacaagtgtgggtcccagccatcatgtttagccaatggtcttgtccgtgttttctccccaaaaacgctttgagttagt

SEQ ID NO: 785244 - DNA, 591 bp, Homo sapiens
tgtcatcttttctgccatttaataagtcagacttcttagtgggggctccaaatttttagacttagagatttagcattggaacttactaactttctacagtttaattctacagtttaaatgaattaaaatacgtaaaaataacaaaaacaacactttcccacttcctagagtatgaaaacaggcaggatgtgcaaagttcccagttgatcgggtaatgcgargtttcattttattgcaagtgaaggaactttagcaaaactaacacttaattggcagccttttgtaatacataatttgcctaaaattgcgcactgagcacaagcttttgttttctaattgatttacggttttagctacttttacctcatcccctactgtcctgcgtagggtgccagcgagtacattacagtgagcgatgataaattacagtgcacttgtgatgccaatgcgtcacgagtgaaaactgcaggctacatggagcttcctgcattaaaagtggtgcggagacccggcttcagcaggatttcatttgtatctcagaaataaccatttgttcatttgatcacttactacaatctgtctatcagactg

SEQ ID NO: 785245 - DNA, 611 bp, Homo sapiens
ttacgaggactacaggttggtgtgggctgtgagtgtgtctgtgtattgagggtggtttctaagtgaagtgggatcctggaagggagggaagggcttcagtgagaagtgacctgctgtgaccgttaaagcatccaaacagagctcatctttcagaagttatcaggagcagcttggataagtatcagcattttcatagccatgtagaaattgccattracctgtcatggcaggggattagctgaggtagccaaatgctacttgagattaacattagtgttgggtggtcctatggatttttcttttcttatttaaaaaagactatgttagtgtaaaatggggactttttttgaacggagagatttaattcactgcacagtgtaataaaaaagtcacattttacatttcttacaattcatagaggatttctgatcagaaaggagttttatggtttgcttttcaatgaggcttaaaataggtgcagagtcagcatttgggcaaaagagggttgggttggggggtgtcggggagtggattttgtgagtcacgaagatccgggaaggggcctgagccctgcgcaaagccgtccttctggctctgcttcttgggaacag

SEQ ID NO: 785246 - DNA, 599 bp, Homo sapiens
aataaggtaatggagattttaacggtataatcaataacgtgtcttcttttgcgcacacaagtaaagaatgcacctcattttcaccttattttcaagcatccatgggacactgaccagaaccgaggatacactggtcatgaacatcctattgtgtcccaaaaaacgtacgttgcacagatcacattttctgatyaaaacaaaattaaacgataagtaactgtaatttttttaaaaaaatcttcttaactgctgaaacacagaggaacaaaatacaatctacagaatatttggaaagtaatgaaaataaaaacactatttcttataagaataaagccattcctcaagacagtcatagtattaaatgcattgtttaccaaaaagaaagctaaaacgtgtatgatttaaacattcaactcaataaattagaaaaggagggaaaagcaatcctaataaaattaaagaagatgaagccaaactcaatatagaagaaaacagagttgatagataaatgtgagctaatttgaaaaatgaaggaatttcaataaactggtgactctagttaaataaaaagttgcaaaatatacataacacaacaaagg

SEQ ID NO: 785247 - DNA, 616 bp, Homo sapiens
ataaagaagaggcctgaggacagattaggaaacaggttgtggacagttgggagagaggtaagaaatcagcatgcagcatacatgtctgtggataaaatgcagtctctcaatcagttaggagcactttaagacttttcatggaattattgatccatcattggtcattgaatctataaagaggcctaagtgtatgatctcaacatagattccagacttataattctctcwtggagccattactgctggcaatatggaacaaattaacgtggataggaaaggccttctttttgagagatgaaatgtctatcttaaatggcataaaacagggctggatcccaagtgccctccttttaattttataactgaataagttggttgtctttagatgacctagccacagtgcgacaagtacctctcatgtgttgatgacatgccttcctatatgatcacagaagtggctctgacaagcagttcaacccactggccaaagtatatcaggaaaagctgctaaatattattttttctaaaactgaaataattaattttggcagacacactttgatgtccagatggataatatcaaattattcggctcaactgacagccatagttagtt

SEQ ID NO: 785248 - DNA, 616 bp, Homo sapiens
ataaagaagaggcctgaggacagattaggaaacaggttgtggacagttgggagagaggtaagaaatcagcatgcagcatacatgtctgtggataaaatgcagtctctcaatcagttaggagcactttaagacttttcatggaattattgatccatcattggtcattgaatctataaagaggcctaagtgtatgatctcaacatagattccagacttataattctctcttggagccattactgctggcaatatggaacaaattaacgtggataggaaaggccttctttttgagagatgaaatgtctatcttaaatggcataaaacagggctgratcccaagtgccctccttttaattttataactgaataagttggttgtctttagatgacctagccacagtgcgacaagtacctctcatgtgttgatgacatgccttcctatatgatcacagaagtggctctgacaagcagttcaacccactggccaaagtatatcaggaaaagctgctaaatattattttttctaaaactgaaataattaattttggcagacacactttgatgtccagatggataatatcaaattattcggctcaactgacagccatagttagtt

SEQ ID NO: 785249 - DNA, 616 bp, Homo sapiens
ataaagaagaggcctgaggacagattaggaaacaggttgtggacagttgggagagaggtaagaaatcagcatgcagcatacatgtctgtggataaaatgcagtctctcaatcagttaggagcactttaagacttttcatggaattattgatccatcattggtcattgaatctataaagaggcctaagtgtatgatctcaacatagattccagacttataattctctcttggagccattactgctggcaatatggaacaaattaacgtggataggaaaggccttctttttgagagatgaaatgtctatcttaaatggcataaaacagggctggatcccaagtgccctccttttaattttataactgaataagttggttgtctttagatgacctagccacagtgygacaagtacctctcatgtgttgatgacatgccttcctatatgatcacagaagtggctctgacaagcagttcaacccactggccaaagtatatcaggaaaagctgctaaatattattttttctaaaactgaaataattaattttggcagacacactttgatgtccagatggataatatcaaattattcggctcaactgacagccatagttagtt

SEQ ID NO: 785250 - DNA, 548 bp, Homo sapiens
acagtgttgggaggtggggcctaataggaggtgtttaggccatcagggctccatcttcaagaatggattaatgctgattattaaagggtatgaaactgcaagtttgatctcttcttctctcaagctctcttgcccttccatcttctatcatgaaatcacgccgtaaagaagtccctcatgaaatgccagcaccttgatattggactttccagactccaggagtatgagaattaaatttctcttctttatagattacccagtctgtggtwttctgctatagcaacataaaactaagacagagttcctggtaagatatcttgagagaggagttcatcagacagtttgaaagattaagcagaaaataaggcaagaaatgggaagaagagatgaaaaggaatgggccatcagcagagctgctatttgacaccctaagagtggatgagatcatctagcaaggaagcctaaagggaaaagaaaacggcctggattatttccatttgtgcaattaagagttgagtgtgcattggttctgtccatcaagatagtat

SEQ ID NO: 785251 - DNA, 624 bp, Homo sapiens
gaaaataaggcaagaaatgggaagaagagatgaaaaggaatgggccatcagcagagctgctatttgacaccctaagagtggatgagatcatctagcaaggaagcctaaagggaaaagaaaacggcctggattatttccatttgtgcaattaagagttgagtgtgcattggttctgtccatcaagatagtatgctgttggagttcctctcaccccccgctccacaccaccccaagatgaagcaggacttgtgctgccgtaagaaaactcgagacacayctatgtgatacattaaggaatctttttcggcttgacaaaaagactcaacagagatttatttttaaatagtcaactttctgagtatttttctaatcaaaagaacatgttattttttagtaagaataaaaataaagtctgaacattttaatgtgaaatataattgataaagttcctcagcaaaacatttattgcataaagatacaactgtgcttaatacgtagcttgttaaaaaataattaaatggctaccatattttactccagaggtagattcatttcatttctatattggactcaaagatcactgtctataaagtagtctcaagatgcatgttccatttacaaaag

SEQ ID NO: 785252 - DNA, 645 bp, Homo sapiens
gagttaatgcagtacacagttccatactttcatctagttcattcttttctctttgcttatttggttatctctgaagacggcttctgtttccattgtttcatcctttagcattcacatatcagagcaataagtatttcattactggtttatctgtccagaggcttgagaagcggtaacaattaaccctcccttcacagtgattgatacaggctttgctttcaatttgttccactacacagatcatgaaattctgaatgcaatcatcctcattgacctacactttcaaacacacagctacaatgagactaaagtaattattaaaaggaacacaggactaccgagatctgaaacaaagtcttttaaaaatctgttagatgaccttctggtaaaagtggcaaattttgatgctaaggaaaatgatagcttagtgtccctgtctggaaatattcaatgcaagctgatcaatgtatattatggtgattgcattggctgtagcatgtacttasaaaatacagatagccattctagaactgttacaaacacacagagttaaactgttaacattgtgccttaccctgtataaaattttttcaaagaaactaaagttcctgatttctgtaaaaagtaaaatacgctgaccatagc

SEQ ID NO: 785253 - DNA, 670 bp, Homo sapiens
gggatccggttgtgccccgctgacccacctctatacgcccctttcgaccgatgaaacgaataaattagcagccaccactgagacgaactctgcaaattccaaccaccagggaaacaaaaagagaaaacacgtgcatttatttcctcgcgtctctcagttacttctccacactattacatcaatgtttctttaaggggtgaggaggtatgcctgcggtttgggtgagcctttttaagtgacgacttgcattccaactcgrctagtgggtgggggcagtgggagttgatcgtttcccctacccctgcccaggacccccgttgtcccacttcctcctctttcttccggctggcgagcctggagtggagttgcgggcggtgggcgcagcctcttcgggatgcagggcttcagctcccctcatcttgcgcgcgccaccctcgccccctttgctggtgcggctggtgcttgccccttctcgtccttttctccttcccactccctgcgcgccaaggcctgggccccgcagccgcagccaggggacgagtggccgccttgccttccgcaggaacccaagttgggatcggcgaagcgtggtgaccgcggccgcgccgccccagccctcggccaatagcgcctcgcccggagaggcacctgcttaaccctttgagcctag

SEQ ID NO: 785254 - DNA, 588 bp, Homo sapiens
gtttcaatttacagaaatagtttcaaaacaggcaagattacattatgctgttaggggacaggaatgggttactttcaaggtggaagaatgaatagcttcaggggtgctgataatattctgtttcttgatttgggtgctgattttacaagtataatttgtaaaaattcatggagctctatacctagtttttttgcgtgtacatgatatttcaataaaaggttttaaaaaatcttcccagtgtctaacacataagtaacattctgtatgagtcaatgtttttagatatatctatgtatttaccttccaggcatccatctacatttcagattaggtcagcatgcctttcygattaggacagtactttctgtacaatcaatggtttgttgcagtgtggaaaagcatgcaggttttttctcactggttgtgactggcaatgcttcctagtggacaagtgctgaactggacaccgtacaatgtttgcagtgaaccatgtgaaaacgctctgcttagagcctttccatgtgaaacttgcttaatatataccagctcaggggctaggaaaaatctgtccctgaacatcaaaacatt

SEQ ID NO: 785255 - DNA, 588 bp, Homo sapiens
gtttcaatttacagaaatagtttcaaaacaggcaagattacattatgctgttaggggacaggaatgggttactttcaaggtggaagaatgaatagcttcaggggtgctgataatattctgtttcttgatttgggtgctgattttacaagtataatttgtaaaaattcatggagctctatacctagtttttttgcgtgtacatgatatttcaataaaaggttttaaaaaatcttcccagtgtctaacacataagtaacattctgtatgagtcaatgtttttagatatatctatgtatttaccttccaggcatccatctacatttcagattaggtcagcatgcctttccgattaggacagtwctttctgtacaatcaatggtttgttgcagtgtggaaaagcatgcaggttttttctcactggttgtgactggcaatgcttcctagtggacaagtgctgaactggacaccgtacaatgtttgcagtgaaccatgtgaaaacgctctgcttagagcctttccatgtgaaacttgcttaatatataccagctcaggggctaggaaaaatctgtccctgaacatcaaaacatt

SEQ ID NO: 785256 - DNA, 616 bp, Homo sapiens
agggatggatgccaactggttgggggtcaggatggtaggacaagtggcctaccataaatcgattatcttggtctaggaaagcttagctaagttttaatccatgatctaaatgagggcatagacaccatgattatcaaatttgcttakgatgtaaaactcggaggactagagaatactaggtatggttgccacatgaaaatttaacaaaggaccaaaagtaagcaaaacaatcataacagaatttttttcttttttttttttttttgagacagagtcttgctctgtctcccacgttggagtgcatgcagtggtgctatctcagttcactgcaacctccatctcccaggttcaagcgattctcctgccttagcctccagagtagctgtgactacaggtgcgtgccacatgcctggctaattttctgtatttttagtagagacggggtttccccatgttggccaggctggtcttgaattcctgagctcaagcaatctgcctgcctcggcctcccaagtgctagaattacaggcgtgagccaccgcggccggcctcataaaagaaattgatcctttgcgctaaggaaactgttaaaccatgagtctctcaatattgatat

SEQ ID NO: 785257 - DNA, 616 bp, Homo sapiens
agggatggatgccaactggttgggggtcaggatggtaggacaagtggcctaccataaatcgattatcttggtctaggaaagcttagctaagttttaatccatgatctaaatgagggcatagacaccatgattatcaaatttgcttatgatgtaaaactcggaggactagagaatactaggtatggttgccacatgaaaatttaacaaaggaccaaaagtaagcaaaacaatcataacagaatttttttcttttttttttttttttgagacagagtcttgctctgtctcccacgttggagtgcatgcagtggtgctatctcagttcactgcaacctccatctcccaggttcaagcgattctcctgccttagcctccagagtagctgtgactacaggygcgtgccacatgcctggctaattttctgtatttttagtagagacggggtttccccatgttggccaggctggtcttgaattcctgagctcaagcaatctgcctgcctcggcctcccaagtgctagaattacaggcgtgagccaccgcggccggcctcataaaagaaattgatcctttgcgctaaggaaactgttaaaccatgagtctctcaatattgatat

SEQ ID NO: 785258 - DNA, 525 bp, Homo sapiens
cattcctcatggaagctacagttaattggcaccttgccccacttctgtggcctcaacattatgaggagtaaggatgtctgaattatttcagagagccagggcttggtaaatgctgcattagtcttgttgaaagaaggtagggaggggacattggcaagggtgtttcacagctcttcagttgtttctttcctcagtccctacttcctytattttattacctttcaggggttcttctggaaaaatgtatctttggagggagagcctcttttctttatttttttaaatttatttatttatttttgagacgaagtctcactctgttgcccaggctggagtgcagtggcacgatctcagctcactgcaacctctgcctcctgggttcaagcaattctctgcctcagcctcctgagtagctgggattacaggcgcccgccaccatgactggctaatttttttgtatttttagtagaggcaggatttcaccatcttggccaagctggtcttgaactcctgacctcatgaccc

SEQ ID NO: 785259 - DNA, 675 bp, Homo sapiens
caaggaggacagtgattagagcacagcagaaactgggaagaggcacaggatagaaggaggggccttgtaggccttggctgcaactttgctctttattctcaggtgaaactgttggaggattttgagcaggagagtgaagggatctttttttttttcttttgaaatggagtctcgctctgtagcccaggctggagtgcagtggcgctatctcggctcactgcaacctctgcctccagggttcaagcaattcccctgcctcagcctcccgagtrgctgggattacgggcatgcgccaccacgcccagctaattttttgtatttttagtagagacgggtttcagcctgttagccaggatggtctcgatctcctgacctcgtgatccgcccgcctcggcctcccaaagtgctgggattacaggcgtgagccaccgcgcccggccctaatttttgttttaaaggattcccgtggctactctatggagaatatactataggaagaaaagagtgaaagctaagtgattagttgcagcagtctgggtgagaaagaaaggctaggaatcagggtggcagtggcagaaatgacaagacgtgattgaattggcaatatatttgaaagcagagccaacaattcatgttggctctagaatcagggatccattcaaagtagaaaaacaa

SEQ ID NO: 785260 - DNA, 675 bp, Homo sapiens
caaggaggacagtgattagagcacagcagaaactgggaagaggcacaggatagaaggaggggccttgtaggccttggctgcaactttgctctttattctcaggtgaaactgttggaggattttgagcaggagagtgaagggatctttttttttttcttttgaaatggagtctcgctctgtagcccaggctggagtgcagtggcgctatctcggctcactgcaacctctgcctccagggttcaagcaattcccctgcctcagcctcccgagtggctgggattacgggcatgcgccaccacgcccagctaattttttgtatttttagtagagacgggtttcascctgttagccaggatggtctcgatctcctgacctcgtgatccgcccgcctcggcctcccaaagtgctgggattacaggcgtgagccaccgcgcccggccctaatttttgttttaaaggattcccgtggctactctatggagaatatactataggaagaaaagagtgaaagctaagtgattagttgcagcagtctgggtgagaaagaaaggctaggaatcagggtggcagtggcagaaatgacaagacgtgattgaattggcaatatatttgaaagcagagccaacaattcatgttggctctagaatcagggatccattcaaagtagaaaaacaa

SEQ ID NO: 785261 - DNA, 574 bp, Homo sapiens
tttggttgcaatctaaactttattttgctgcacaactccttttctgaaaatttacctgctttcaacaaggaaggcaagttttcctgcttccatgtcaatggaaggcaggtaattcctttatggagtttgaccttgctcccagcacggaagatgaatctgagttttttcctgcttctagggtaacagacagcagtcttcagcctgagacccatcactaggtaagtagctcaataggggttttgtcttgtctaaagttaagattaacaacaagctggtcttaatttctccttaccattagagtgctcagtaatcatataaattttgagataytttgtgtttttgcttaactttttttttttttgccgttgtttgtttctgtttttgttgttttggtctttctttcttcattgggaaactatccaacttgatcaaatctaaaggaaagttccaaattatgaggaacaaggcctctgaagtggctaaatttccacaaaaggtggggagggcttgggaggaaaaatgctcagcaaaagaaaaaacaataaagatttttgattttcagtacttaaggggc

SEQ ID NO: 785262 - DNA, 500 bp, Homo sapiens
atcacttaaacccaggaggcagaggttgcagtgagctgagatcatgccactgcactccagcctgggcaacaacagtgaaactccatttcaaaaagagaaaaaaatatacacccctgatttgaaacaagactaggatacacggtaaagaatgtttattcactaaagttttgacagactgaaggccattatttcagattggarataggaaacttgaactacatggacattgggtaaaagaacatgggttgaaatttgcctggcagtagcccaaaagtaaatggtcttcgaggtgcatgtgaaggaactgtaggagggaaatgggataattcacatctccgccaataaataaatgtagccacactagcgtgggggatttgaggtgagacatcgaaaatactaagtcatggtgagggctggaagacaaaagaatgaatcacttaataggaatggctgtggggaagggcttgaaggaatcatcctctgacttccatgtgaaccgt

SEQ ID NO: 785263 - DNA, 540 bp, Homo sapiens
gaggtcatcacgtttttgaactcttgtaataacaggggacttgaactcatttcagacagcaatcctcgtcctgtgttatcttatgctctgggaggaatctcaaagacaaggaagtaaggaagaaagaaaggaaggaagggagggaggaaggaagggagggagggaggaaaggagcagaggagagaagagaggagacgatctctaaacctaaaytggtagaaagcttcacaagtctgaatacttaacaagttaaattaagtagctaaagatgtttttgaaaatcatctgagcaaacaaaaaatgattctgaaaaatatttggtaatgtaataatgacaatgggttatttcttctatccttgatctcctacagtatattttaagccagatcatgtttttcctttgatgaaaactccagacttttcatcttgattaaaataaaatccaaattcctaataaggccgtacatgatgtgggcacctattacctctctgacattaatacttattcttctcgtgaatcactctgcttctatcacactc

SEQ ID NO: 785264 - DNA, 489 bp, Homo sapiens
ctttttttaagcgattaacagcttttaactgttaactgttaactgctaactcccatatgtatgagagttaactgttcacttttcactgtttaacttttaactgttaactcccatcaacaaaatttggaggatacttgtttctctctacctkattctctccaaaatttggaaactatctatgagtattcttaagttatggcaatatagttatttgcataaatacaacaagaatctgttttcttttgtaacgggacacgattggaaaaactggttattcttaccaaggctttaactggaatggtgtgcttttcctttaaggaatccagctttaacttataaagccaataaagcccttgaaaaactggcctcatattttgtgtacacagtccccgtacaggggttgtgatctgtggtaaacagaacatgtcactttctaacaggccaggaaccctaagttatcttgaaacatcaagaggagaggaattcacc

SEQ ID NO: 785265 - DNA, 642 bp, Homo sapiens
tgaatctgtcagtaatataacaatgcatcattttgtcccagtcctacatcttgttaatgacactagactagtacaaactgagttcaaagataagtattcatgtaattacactgcttatagaacactatgttcttcattaaatttaacaaatagttcttgagcatctgctatgtagggctatagaggacatgagcataaatttaaaaagtaacccctgccttcaagaaacatattatgtggaatattgygtccctctactatacattattcaatatttattttatttatttattgtattattagtatttactatgtcagaaactgtcctaggaattgagtaggtggcaaacaagacaagcacattctctgccctcagagagctttgtatctcaccgatgtttgtgatctattttggtgtgaggttcagctcatcttagtttacccagcgtgaaagtcatttatttgggcatccattttatgtctcccttaggagaggcatcaatggagaagaggatatttaatataaggttggaaggatttcataaaacaagaataaaaagaagacatttgagtcagtagaaaccagcatgactacagtgatggatgtatccaagatatacaaatagtcaagtctggaaggat

SEQ ID NO: 785266 - DNA, 503 bp, Homo sapiens
gacagcaaaattaaaaaaattaatatgtagattcaaaagtcaaatggacaatggaaaaatgagagaaaacgttctagagattcacataaaaagactagaagtctatgttgaccacagtacccaaatgcaccaaaattacggcatgactggcaaaaaccctaaagaaatcttaggtttatttgctcaaaaacatttgttacacacgtaccatgcatcaggaactatgttctcggctctagcaataagaacgtacatcacyagtaaagaattttaaaataataattacgccgacttcagtcattcttctttttattcttaacatgagttgacaactctaaacatgtcaaagaaataattcctcttcctgcccaagaggatcactccacaatcttcctcccatttccaaccctgagtacatgtctggactccagatctgtatgactaaaacaagttcgtgttcttttcattagagtggtgtctttcaaacttttttgaccacagcc

SEQ ID NO: 785267 - DNA, 551 bp, Homo sapiens
aataaaattttattaaaaattgcaacctctgcctcctgggttcaagcgattcttgtgcctcagcctcctgagtagctggaatttacaggtgtgcaccacgactaaatttttgtattttttagtagagatggattttcgccacgttggtcaggctggtctcgaattcctggcctcaagcctgaccaatccaccagtctctgcctccgaaagtgctgggattacaggcatgagccactgtgcccggccccatttttttttttttttaaagacaagctctggttctgtcgcccaggctggaatgcagtgacaccatctcggttcastgcaaactccgccccccaggctcaagccatcctcccacctcagcctcctgcaccaccacacccagctaatttttgtatttttcgtagagccggggtttctcatgttgctcagactggtctcgaatttatgagctcaagccatccacctgccttggcctctcaaagtgctgtgattataggcgtgagccaccacacctggccttaacagcctcgtgttaacctaagcac

SEQ ID NO: 785268 - DNA, 639 bp, Homo sapiens
tgcaagcaggtagggggaaagggggacggagtgttatccttggcccctaccgggcaccatatactgatggggggaagggcatgtttgcaaagcccgtctcttcctcctccattcgctgtacccaacctggccgtcccctcacagtcacccgcacccccaccccactcacagcggcgcccctaactcccactcctccaggggattctccgcggacgctcgggtggagttgcagagcctctggaaccatttctsccccacaccctgcgcccatatgtggtggtctgaggttcaagcacctgaagcccctcacgtccctcccccgaccctgcagacaggccttgggacccggggcagggctggaggctgggcgaggctggagggggcgcagggctgagggtgcgaggccgcccacgagtgtgtgcccgcgctcgccgccgcaggagaccgctacgtggtggccgactgcggcggaggcaccgtggacctgacggtgcaccagctggagcagccccatggcaccctcaaggagctctacaaggcatctggtgagtagccaggcggcgccccggtacccagcgcgacccgggctccggccccgccactgccccctggcggcccggcgagcgctgacgccctctt

SEQ ID NO: 785269 - DNA, 507 bp, Homo sapiens
ggcgtggtgcgggtccgccgctcgccgctcacctatggcgtgggcgtgctcaaccgctttgtgcctgggcgccacccgcccgaaaagctgctggttcgcgacggccgccgctggtgcaccgacgtcttcgagcgcttcgtggccgccgagcagtcggtggccctgggcgaggaggtgcggcgcagctactgcccggcgcgtcccggccagcggcgcgtactcatcaacctgtactgctgcgcggcagaggatgcgcgcttcatcaccgaccccggcgtgcgcaaatgyggcgcgctcagcctcgagcttgagcccgccgactgcggccaggacaccgccggcgcgcctcccggccgccgcgagatccgcgccgccatgcagtttggcgacaccgaaattaaggtcaccgccgtcgacgtcagcaccaatcgctccgtgcgcgcgtccatcgactttctttccaactgagggcgcgccggcgcggtgccagcgccgtctgcccggccc

SEQ ID NO: 785270 - DNA, 614 bp, Homo sapiens
tttgagaatttgttaggatgggatttcatttgtggtaaagactttttagggtgagttggcagcatcccatatatactctttcgttgcattttttatatgtatatattttaaaggaaattcctatgagtaaatagataatggatgggaacctttaaaggtgaacccgaagtattttgccatatattctagcatattaccattttaaagcattaacattaatttaaccagcataagcagttgatttagcacccaaagtttctgagagctttacttttcaaaaagggtgggggttgagggaggctcaatattgcatttaccttattaggaacctcatatttagcttcaggaaatgggctttgaatcagggccccagtgttaggctcacagccctagcacttacgagtctgttgggcaagtgacrgaagctcctgagtgtccattttcttgactgcggatgtggtgtatggtagtgtctgcctcacagggacactgggaggaggtgtgggagtgaaggatgtgagtttcacactgagcctggccctaggaggtgccctgtgctcactggcactcaccctcggggtaatgcggccccaaaactgtaactgcaggtgctg

SEQ ID NO: 785271 - DNA, 620 bp, Homo sapiens
gtttagtttttcaaaatgttttggatccatttttactcccacatttggcaaataatttattcatgaacaatgcaaatgaaaattttttctcagttgagctgttgtgaaattattacacaaaacattttgaaggttatcaattgtaatgtgagagccaaaaccacgtgtgtgcaggcccatctttctggttggggattatactatttgatataaatyacctcaagaaatagccgtagatgagagaaataaacattttaattgttcttataatgaatgataagtgaagggaactataacctcaattgcaaatgttaacatttacaagatgacctgtttataaatgtagctctgccttatacatgtgctcacatccattttgaagtatccaaccagagcgctgatagattagtagttttgtgagctctagctgacaatccctgagcaaatctggtgaatttatcagcagccttgcaggacagaaagaaggaaaaaagataacagatgactgtgctaaacagacgtaatacataccaagggtggtagtctcttgggcagacatctttgtgattacttaccatgtccacttccatcacaaagttctgtcatccagatatagttgg

SEQ ID NO: 785272 - DNA, 618 bp, Homo sapiens
ctgcaacatacatattagtgcaaattggggtaaagggtggggctgatagaatgtagagtgtaatttaggaaccagcctatggtgagatcttgcaactgctggcaaagtccgagccactatcctttgagcaatccattcacaatggaaccagaaaaacaatgtctatttagycagaaaaaatttgaatggacaagagtgatgtctctttaccaatacaagagagataagattactaggaatagaagagttacatggtttctctgactgccttcacaaagttcagggtggctggaggtctctgaagaaaagcctggacatcagtgatgaatcaatctctcaaagcctcctgtagcaaacattgccaagggcctactggtaacctgtcagcattgaccttttcagtgcactcaattgcaatctgaaactgccagcagctccttgcttcacctggagctttctctcactgccagatccagatgtggcaagctggaagtgctgggatgtagcagctccactcccgttcccactcacagcagcctcagtcatgacagaaaggggctgaggtatacacgcctcagctccctcacctgcagagagaataaatttcaaacacttccc

SEQ ID NO: 785273 - DNA, 513 bp, Homo sapiens
gtcaattaacaggacagagaatagcaggcacttcatttgtaacaggagaaggtatcactgggtttcacagagctcgtaacagaaacgacactgccagctactttagggcaggtggtaggagatgacagccaggttcttcccataggccacaaaatgacaattgctgtctctaaaatggccaacttgagtggactcttctccctcattcctcatagtaagtgaaaacttcatttcttttctttctttctttcttttttctggtggtagtggtggttgtaggacctctgaggggcgattcttttttttttcttttctttttttttatgagatggagtcttgctctgttgcccagactggagtgcagtggcatgatcttgrctcagggcaacctccgcctcccaggttcaaatgattctcctgcctcagcctcccaagtagctgggattacaggcatgcacaaccatgcctggctaatttttgtatttttagtagagacagggtttcaccatgttg

SEQ ID NO: 785274 - DNA, 636 bp, Homo sapiens
gtattttcttccagtagttttatagcttcaggtcttacatttaagtctttaatccattttcaggtgattgttgtgtatggtgagagacagaggtcgtttcattcttctgcatatggatatccaattattctggcaccatttattgataagatatcctttctctgatgtatgttttaggggcctttattgaatgtcaggtgaatacacagatttatttctgggttttctattctgtttcattttttttatgtgtctatataccaataccatgctgtcttggtaactgcagctttatagtatgttttgaagtaaggtagtgtgatacctctagctttgttttttttgctcagcattgctttgactatttrggatctttcgtggttccatacaaattttaggattttttttttctgtctgtgaagaatataattggtattttgatagggattgcattgcatctgtggattgttttgggtagtatgatcattttaacaatatcagttcttataatccatgagcacaggatgtttttccattattttgtattctcttaaatttctttcatcagtattttgtagtttttattgtggaggtttttcacctccttggttaactgtattcctagatattttattt

SEQ ID NO: 785275 - DNA, 638 bp, Homo sapiens
tgtagtaggggccaataggggaggtgtccctgggtagggactagttgtggctacagcagatgggcaaatgcgatacccaatggtgggcagaggtcccagttttgacagaggttcttggaggagctctcagtgagttgcactgaggtcttatcagaaggaagggttgaagccaccttagctcccctgccaggtcagcaggaaatttattcacctctcagacacactccagtcctagtactccagcattcagatcagacaggcacctcttcatgggtaggaatgttgatgttcaagtagagaggaattgtgactctgtctctcatgcaagccggcacctggaggatgctcctcctgtggggatgccatcaccctgacgtgttccagaaagggcgtctatagtttaacccacacttaactcccatgggaaaagccctaaccrtgcctgtggtggtggacaagggagaaaagatatttccttatccaaagcccttcatgggcaccaaggctgtctgactgttgggctagagctgaagattttccctgctgaggccagcactacaattgtgcctctgttaacttcccaccagtggaaatatctgatgctcaagtcctgttgtctggattcctttgtctcacag

SEQ ID NO: 785276 - DNA, 506 bp, Homo sapiens
accccaggaagtgtgtgggtgctgcaggaggtgggctaccataagggtgttcaaaggtgtccacagcaccctaggggcccataggggaggtggggagagggggctgaatgagggccaactctgtaggtggtcccttgcaggccatctctcaattatttgatgctgtactccgtggcatctaaggaatccccactgtagagtactgttgagacgcctcaagtgggctgctcttagtgctctcaggctctcagcgcctgagtgggagggatgagggaaagggcatcaggacttgggaggagggctgagcaggtgaaattctatctcagggctccctgtccacccayaataggcatcccaagaggaagaccagcactgaggacatagcagagtctcaggaatcatttcttgaaggatgagcagatgactaaatgtggatgtgtttcccacagctcctttcctcctcccctgccatgtgggaccctcagtctgtgctgcctccttccttc

SEQ ID NO: 785277 - DNA, 616 bp, Homo sapiens
gaaatcacacagcatatccaaaataggaagacctcaagtcaaatcacaaaaggtcatcaatggatgccagcaccaaggtgacagagatgttagaattatctggaaaaaatattttaaacattttatgttatttatttatttatttttataaacagagacagggtctcactatattgatcaggctgctctcagattcctgacctcaagtgatcatcttgcctcagcctcccaaagtgctggggttacaggctggagccactgcactgaaccaaacaaagattttctaaagcaaccatcataaacatgcttcagtgagcaattacaaacaggcttgaaacaaatgaaaaatagactcttcaaagaatagaatgtttyagcaaaggaatagaagatacaaagaaggactaaatggaaattttagaagtgaaaaatgcaataaccactatataatgtaaaaaaacacagtggatggtcacactagcagaacagagggaacagaggagaggatcagtgaacaggaagacagaaacatagaaattatgaaatctaaaccactggaaaaagggaacagagcctcaaggacctgcaggatcctaacaaaagatctaacattcat

SEQ ID NO: 785278 - DNA, 587 bp, Homo sapiens
aatacatacatgtactatatacccacaaaaattaaaattaaaaaacacaaaacaaaaatacagaaaacaagtattggtgaggatgtggaggaactggaactctggcacactcttgatggtgcaactgctgtggaaaagagtatggcaggtcctcaaaatgttaaacagaattaccatctgatccatcagttcctcttctaagaatataccccctcagaatggaaagcagtgtctcaaacagatgcttatatgccatgttcatagtagcattattcaaagtagccaaaaggggccgggcgcagtggctccacctgtaatcccagccctttgggaagctgaggcgggmagatcacttaaagtcaggagttcgagaccagcctggccaacatagtgaaaccctgtctctaccgaaaatataaaaaattagctgggtgtggtggtgcacgcttgtaatcccagctactcgggaggctgaggcagggaaatcgcttgaacccaggaggcagaggttgcagtgagccaagatcgctccattgcactccagcctgggtgacaagagcaagattgtctcaaaataaataaataaa

SEQ ID NO: 785279 - DNA, 596 bp, Homo sapiens
gtgctggaagcctttgtctatgaccccttgctgaactggaggctgatggacagtgagtatcatcaagtgcctgggagctgagctcagtggctcacacctgtaatcctaacattttgggaggccaaggcagaggagttgcttgaggccaggagttcgagaccagcctgggcaacatagtaagacccctttctgcaaaaactgaaaaaattaggcatgtattagtctgttctcacgctgttataaagaactgcctgagactgggtaatttataaaggaaagaggtttaattgactcacagttctgcttggctggggagaactcaggaaacttacaatcatggtgggaggggaagcaaacacwtccttcttcacttgggggcagaagagagaagtacagagtgaaggggagaaaagccccttataaaaccaccagatctcatgagaactcagtcactatcacgagaacagcatggaggaaccatccccatgatctaatcacctcccatgaggtccctcccacaacacatggggattacaattcgaattgcagttcaagatgagattttgggtggggacacagccaaaccatattaaggt

SEQ ID NO: 785280 - DNA, 484 bp, Homo sapiens
gacaagatctccttctgtgtccccagatttcatggtctaatttcttcactcctccctataaatagtaagtccatgattcttctggtttaattagcacttcaggctacaaaatgactttgaggtcttcagagctgaagatggagctacccaagagtccatgaatctgtcaaaatgcttatcctttgtgactagagccattaactctctgtgtcaccttcctgggcaaggtattttcctctctgggcctcagttttttctttcttttytttttttttttttttttttttctttttgagacaggatctaactcttgcccaggctggtgcaaccttagctcactgcagcctcaatctcctcgtctcaagctatcctcctatctcagcctctcaaggagctaggactacaggcatctacccacgcctggccaatttttttcttttcttgactttttttagagatagggactcactatgttgtctaggct

SEQ ID NO: 785281 - DNA, 489 bp, Homo sapiens
agggtctactgtattttcaatccacagttgactgaatctacagagacggaacccatgaatatagagggtcaactataattgtattaagcataaaaggtctaaatacatcaattaaaagattgagattggcggagtggatttaaaaacatgatctaactacacgctgtctataagaaactcactatgcagaattatagaggctgaytgaaaatcaaaggatggaaaaagatattatcatgtaagcattaatcaaaggaaagtagaagtagctatattagcaccagataaagtagacttcagagcaaaagaaaaaaaattaccagagacagagtacaatgaataacaggtatatctactaagaacatactgcaatcttaaaatgtatatgctgtaaaatgtgtgaaacaaaaatggataaaactaaaaggagaaacaaattcacaatagatggtggtgacttcaatattcctctctcaacaatggatagga

SEQ ID NO: 785282 - DNA, 615 bp, Homo sapiens
cactgcactccagcctgggtgacaagagtgaaactccatctcaaaataaataaaatggctgagcatggtggctcatgcctgtaatcccagcaatttgggaggccgaggcaggtggatcatttgaggtcaggagtttgagaccagcctggctaacatggtgaaaccccacctctactaaaaatacaaataaattagctgggtgttgtggcacacgcctgtaatcccagctactggggaggctgaggcaggagaatcgcttgaacctgggagacacaggttgcagtgagctgagatcacaccactgyactccagcctgggcaacagagtgagactccatctcaaaaataaataaataaataaataaaataaatacaaataaaaataaaaattaggtggacatggtggcctgcagtctcagctactggggaggctgaggagggaggatggcttgagcccaggagtttgaggctgcagtgagctgtgacagtgccactgcattccagcctgggtaacagaggaagatcctgtctgtaaaaaacaagcaggctgaccatggtggctcatgcctttaattctaacactttgggaggccaaggtgggaggattgcttgagcc

SEQ ID NO: 785283 - DNA, 615 bp, Homo sapiens
cactgcactccagcctgggtgacaagagtgaaactccatctcaaaataaataaaatggctgagcatggtggctcatgcctgtaatcccagcaatttgggaggccgaggcaggtggatcatttgaggtcaggagtttgagaccagcctggctaacatggtgaaaccccacctctactaaaaatacaaataaattagctgggtgttgtggcacacgcctgtaatcccagctactggggaggctgaggcaggagaatcgcttgaacctgggagacacaggttgcagtgagctgagatcacaccactgtactccagcctgggcaacagagtgagactccatctcaaaaataaataawtaaataaataaaataaatacaaataaaaataaaaattaggtggacatggtggcctgcagtctcagctactggggaggctgaggagggaggatggcttgagcccaggagtttgaggctgcagtgagctgtgacagtgccactgcattccagcctgggtaacagaggaagatcctgtctgtaaaaaacaagcaggctgaccatggtggctcatgcctttaattctaacactttgggaggccaaggtgggaggattgcttgagcc

SEQ ID NO: 785284 - DNA, 615 bp, Homo sapiens
cactgcactccagcctgggtgacaagagtgaaactccatctcaaaataaataaaatggctgagcatggtggctcatgcctgtaatcccagcaatttgggaggccgaggcaggtggatcatttgaggtcaggagtttgagaccagcctggctaacatggtgaaaccccacctctactaaaaatacaaataaattagctgggtgttgtggcacacgcctgtaatcccagctactggggaggctgaggcaggagaatcgcttgaacctgggagacacaggttgcagtgagctgagatcacaccactgtactccagcctgggcaacagagtgagactccatctcaaaaataaataaataaataaataaaataaatacaaataaaaataaaaattaggtggacatggtggcctgcagtctcagctactggggaggctgaggagggaggatggcttgagcccaggagtttgaggctgcagtgagcwgtgacagtgccactgcattccagcctgggtaacagaggaagatcctgtctgtaaaaaacaagcaggctgaccatggtggctcatgcctttaattctaacactttgggaggccaaggtgggaggattgcttgagcc

SEQ ID NO: 785285 - DNA, 711 bp, Homo sapiens
gcagcccattggcaggctgtggaaaatttgtatgtaattcacatattcacatagtgaaattttaaatgttttgagtaaatttcttttttaaagaagaatgttggtaaatctttttctttcttttttgagaaaaatttgcccctaactataaattctcaatttatgagcttcactaacatgggatgcatccagtcgttcacagagtcaatagatcacaaatatttagcaagcaactattacctaaggttgctcttccaactccaggaacaatttgtttgtgtcacataattggaaaatcttcagctgagggtctgatctctttctttgtggcctcctctctgccctccctcacacttgctttgtccaattgctgcttctgttgagaatcatgagcatttcccggggctcagyacctgctgcttcacacataccagaagaggcagaattgctcttagtagccctcctggaacaaaaggaggcatctttcccagagttcccaagagtcatctccacccgagttatgacacattaatacacaccacaaaaacaagtccacattcctcacactgagggacaggcctgtcctcctaaaaatgcaagaccaaaaatggagaaggaataaattcccagagaaaactcttgagtgttaggaaaaaaaggagattaagaaatggttgctctcaaggcaatcaatatgcactcacaaactca

SEQ ID NO: 785286 - DNA, 626 bp, Homo sapiens
cacacttctgttaagattggcacgtaaggtatgtcctcccaccacaagttaaccacctttttttctttctctgatgagttacctgctgtagacagacatgtatgcatgcttgcacacacatgatcacttcattagagccactgcaaacccagcaaggattaacgagcaaaactgtggtcgaagtgcatatgggctgtgggctgatgttactcgtgattcacatgactagcttctcatgcctggccagcagtgtgtgctcctcatgtttctgcctcaacaaaataccaactgctccccatcctgggtctttgaggtgtctgcgagctgttgaaactgtgaatgtcaaagctatgaatgccaaggatcaactgtaatttcagaatattttaaaccacgagatctatgacaggcagaatgattgtgcaattatctaggttagtttatgagacaaataattattactctggtatractgggtttccatatcattctcatttgaaatctctaatgttatttaggatgtcatttctctcctctagaaagagtttacattttagtaatatccactgaattagaggacaaataatcagatcatttgaacaaaacatcatgcaatgttaagtttt

SEQ ID NO: 785287 - DNA, 631 bp, Homo sapiens
gttgttttatattgtattgtttcgttttgttacccaatttagatcttgcttttttattaatgctgcttgatcacaacctgtggtaattaaccaaccctttggatggggcttaattttaattaaacaatgctccaattcttaataggctaaatgtttgttwcttctccaactcttatcacaaggtaattttgtagtacttcatagattttctgagaaattgctttatcaatttttccctgcagctgtacactgaatctgacttgtattgctagctgttgctttaaattaattttctaatttttccagttctttctatttggctagttagtccttacattaaatttcttcaccttctgattaacaattaacagtacttatggctgttctatggctataaaattggccttgctgggttccacatttatcttgctttaatgatcaaatttgtttggtgtaagattttttttcctcgacatcagctttctatattctgggatctacaactcaagctgtgtccctttagcctcttacatcatcaccagcaataaagattttactgtcaggacttggctgacaaatttgcaggctctttattactggtgatgatggactataagaagcagaaaaaaca

SEQ ID NO: 785288 - DNA, 631 bp, Homo sapiens
gttgttttatattgtattgtttcgttttgttacccaatttagatcttgcttttttattaatgctgcttgatcacaacctgtggtaattaaccaaccctttggatggggcttaattttaattaaacaatgctccaattcttaataggctaaatgtttgttacttctccaactcttatcacaaggtaattttgtagtacttcatagattttctgagaaattgctttatcaatttttccctgcagctgtacactgaatctgacttgtattgctagctgttgctttaaattaattttctaatttttccagttctttctatttggctagttagtccttacattaaatttcttcaccttctgattaacaattaacagtacttatggctgttctatggctataaaattggccttgctgggttccacatttatcttgctttaatgatcaaatttgtttggtgtaagattttttttcctcgacatcagctttytatattctgggatctacaactcaagctgtgtccctttagcctcttacatcatcaccagcaataaagattttactgtcaggacttggctgacaaatttgcaggctctttattactggtgatgatggactataagaagcagaaaaaaca

SEQ ID NO: 785289 - DNA, 587 bp, Homo sapiens
tcattttaatatctttgttctatacaaatttgtctttaacttattcaaaccagttgtaacattttacagattccctaattaataacaggctaaatcaggccaggcatggtggttcaagactgtaataccagcactttgggaggttgaggcaggaggatcacatgaggtcaggagttcaagaccagcctggccaacatggtgaaaccccatctctactaaaaatacaacaaaaaattagtcgggcatcatgacgcatgcctgtattcccagctactcagcaggccgagacaggagaatcttgaacccgggaagttgtaatttgatcgcaatgtggtcatggtrgcatgcgaaagagaggcttgaacccaggaagcagaggttgcagtgagccgagattgtaccactgcactccagcctgggcaacagagtgagactccatttcaaataaataaataaataaataaataaataaataaaatctttaatgtgttcatttttcatctgtatgagaattacgatttgtatcttttttattaatattacccttcaacatacgtgtgtcggaatctctcagtcttcataacacc

SEQ ID NO: 785290 - DNA, 639 bp, Homo sapiens
gagaagttgattctaagtccatctgaaaaagtaaacgtagaaaaagcagcaaaattatcttgataaagaatttgcattaccagaatcagtatatatgatgtaaaagccacaagattttaacaatgtgaaatggatgcaggtatatggatgcaggtgtttgtgtatatatacatrtgtgtgtgtgtgtgtgtgtgtgtgtgtgtgtgcgcgcgcgcgcatgtgtgtgtattttaatttaagctagttttaaaagagtatctcatttgctcctaaaacaaaacaaacagactactacagtgttgatcaatatttggccccaagttttcatgtcatgaaattgtcttatataaatatttgatatatttcctatatagaaaaatgccagaaggtacactaagcattatatcattatgacattatttttaattgtaaaaaaaaaaatagacacaacccaaataccttcagataacgtgtatctgagcttttttagtatagctgagaaattgcctgctacgtctcaccttctctcagataacataagagctggggtaggggaagcctgaaagtactagtgtattagtctgttttcacactgctataaagaaatgcctgatactggtaatttataaagaagagatt

SEQ ID NO: 785291 - DNA, 606 bp, Homo sapiens
agacacatttaaagcagtgtctaaagggaagtttatagcactaactgcccacaagagaaagcagaaaagatctaaaatcgacaccctaacatcacaattaaaagaactagagaagcaagagcaaacaaatggaaaagctagyagaagacaagaaatacgtaagataattaattttaaaataacctttagaaaagctaatgaatattgcactgatatctacaaactgataaaaactttgctgccacctccaacatgcaatattaaaacattaaatattttaaaatcgctccaaaaataatgttaatccttgtttttttctgtaattttccaattctaaagacaatccactagtctggtgtacacttttgagctattctgtccaccacctattaagaagataatatcttaattcaaaggaggttcatacaaagagacagaaaattgactgcttaatgagtttgcaatgattcctttctaataaacttagcacatctgcattactggtcatatatatgaagagtgaagtttgaatttgttccttgaagcttatgtagaaatcagaaaagcagacattttttccagtgtcatatctgaacatacctgtgt

SEQ ID NO: 785292 - DNA, 606 bp, Homo sapiens
agacacatttaaagcagtgtctaaagggaagtttatagcactaactgcccacaagagaaagcagaaaagatctaaaatcgacaccctaacatcacaattaaaagaactagagaagcaagagcaaacaaatggaaaagctagcagaagacaagaaatamgtaagataattaattttaaaataacctttagaaaagctaatgaatattgcactgatatctacaaactgataaaaactttgctgccacctccaacatgcaatattaaaacattaaatattttaaaatcgctccaaaaataatgttaatccttgtttttttctgtaattttccaattctaaagacaatccactagtctggtgtacacttttgagctattctgtccaccacctattaagaagataatatcttaattcaaaggaggttcatacaaagagacagaaaattgactgcttaatgagtttgcaatgattcctttctaataaacttagcacatctgcattactggtcatatatatgaagagtgaagtttgaatttgttccttgaagcttatgtagaaatcagaaaagcagacattttttccagtgtcatatctgaacatacctgtgt

SEQ ID NO: 785293 - DNA, 681 bp, Homo sapiens
attacctcagtgacctgggatccactatagaacataaagcctggaggtgttaatagcaccttgcctggaagaatcagaagatttacagctctaggaagtattggttgtatccattataaaggagtttattcaaactgcgaagtctaaggcactactccccacaaatttgtcttcccttcagacaccagctgcaattttagggtccccagggacagcatcacttcatatcagctggctcgaatttaggggtcaccacaaactccctcgggctggataattcactagaatgactcacagatctcagaaaagtatacttgcattaaaattttattatagcataaagatacaaaatagaacaagctaacaaaacagacacagggagaagtctgggagggttccaaacataaagcttctgtcatcctcaggtgtgcgttaccctcccatcatcaacgtgcagcaatacacataaagtgtggttaaccaggaggytcacctgagcttcagtctccagagtttttataataatgcattatgtgtatgattaattaaatcattaacaacataactgaactaatttttcagcccctctcccttccaggagctcaagctaatcttgcatagctcaaagccccaaccatctaatcactcaagtggtcttcctggattagctagcctccatac

SEQ ID NO: 785294 - DNA, 623 bp, Homo sapiens
gccccaggcgtttatgaccagctcttctcctcagcctgctttctctttgaggtcaagttcttgatgttagaaagtgacagctgaggactacaatttcaattttgactgggaggaaaaggcccaaggcgggttctcagactactcttcttttgctgctagcagaggggagtgctagggtcacacacagtccataacccggcaccagaggcctgggtggtgcagtggagtggcggctggtttcctgatgttcagaacgtggtctctgaacagagaggatccaatcatgcgggcttgcaggctggaaaggggacagtcagggctaagttcactgtgtgytgccactttgggaattgatgtggagagtcacgttgagttcagactcacctcctgagtatcagccggggatagtgtgcagatggcaggttgaggggcctgatggaatcttccgcaggcgcttatttctaagtgggagctaaatgatgagaacacatggacatatagaggggaacaacacacactggggcctagcagatggttgggggtgggaggagggacaggagcagagaaatagctgatgattactaggcttaatgtctgggtgatgaaataatctgtacaaaaga

SEQ ID NO: 785295 - DNA, 604 bp, Homo sapiens
caaaggagaaagagggtataactatgcaaaaatgctgaaaagacatcaagaataaggctcagaaggacaaagggattgattgttaacatactgatctgtagccatgtctccacatagatgcctctaaagacaattcaaacccatgctgtctgtaaacaccctgagtctcctctccttaaaggcaagaacaaaccatgaatatccatggttatctctcatttttattgccctggaaacactggtcacttagattagacacaaaaaagaactccaatacatggaatgaaaaagataaaattatcagtattttacaagatgtaattatatatttgaaaatatccaaataattaactaaaaatacttagaaaatgtgatttttcagaatwcattggacaaagtccagaaaacaactgcttagaaaaacaaggtggttagttggcatgtcaattttataaaacctctcaaaaggataattggcaatgttgtcctaaatttaaaatgaaccacagtctgtctcattcattcccagtgtggaaatttaacatgtagatatgatcacttccctgcaaaaccaacgtacaagaatgactttgtaagagtaagt

SEQ ID NO: 785296 - DNA, 604 bp, Homo sapiens
caaaggagaaagagggtataactatgcaaaaatgctgaaaagacatcaagaataaggctcagaaggacaaagggattgattgttaacatactgatctgtagccatgtctccacatagatgcctctaaagacaattcaaacccatgctgtctgtaaacaccctgagtctcctctccttaaaggcaagaacaaaccatgaatatccatggttatctctcatttttattgccctggaaacactggtcacttagattagacacaaaaaagaactccaatacatggaatgaaaaagataaaattatcagtattttacaagatgtaattatatatttgaaaatatccaaataattaactaaaaatacttagaaaatgtgatttttcagaatacattggacaaagtccagaaaacaactgcttagaaaaayaaggtggttagttggcatgtcaattttataaaacctctcaaaaggataattggcaatgttgtcctaaatttaaaatgaaccacagtctgtctcattcattcccagtgtggaaatttaacatgtagatatgatcacttccctgcaaaaccaacgtacaagaatgactttgtaagagtaagt

SEQ ID NO: 785297 - DNA, 589 bp, Homo sapiens
aaaactaaatttaggaagttggtgaaataattttgtagctatccccatgttggacaaaactctaggcccaaagacaggttttgtctctgaatattcatagatttttcactcaatgtggaatcagtctggggtgagaataaagagctcattacatgtgaagtgatacatgttacaccagtataacaaatatgtgataaacagtcttgtccactcatctacatggtatcttcagcagccgtgtctgtactgccatcattggtgttttaatgataaacttaattttcctcttttcctttgttcttttctctatattcccaacacacacgtacacgcacgtgcacacacacacacacacacacacacacamgagagaatatgtttttcctaaggatcaaggcagctttactaactttcccttattttttcttagatgtcgtaggacaattattctttccagaaaacctatcctcagaacggtttagactttatctctctgctgtgcagaacataaattaaaagaatgagagttggtgctaggagagttgctgcaccttccagagaaggagaaggcctactaagtgatcatcaa

SEQ ID NO: 785298 - DNA, 517 bp, Homo sapiens
agaaaataaggaagtcacagaactgtgtttcatgtttgtttgttttttcccctctgtgcagggttcttgcattctttcctttacttagtcctaccatccttgtaagagtaagtaaagcagaaataaaagactccctcttggttttcccccactctgagataccttaaggcttacaggatgatactttctccattatagccagtcgctgtaaatcagctgtgtgaataagaacacctgactccttctagacctgcatgtttastaagttttacaagctgaaaagcattggctcttggggtattagggagtgttttaacattaaaacagttctgcctgatgctgtgaatacagctacaaaaacacaaaaatcagttttctccctcctttgccatggagctgcaattttccccaggagcctttgacactttctactttatgcaccaattcctctgatagtgtataatctctttcatattcttttttgaaatgtttctaatgttcaacattcatttatgtt

SEQ ID NO: 785299 - DNA, 409 bp, Homo sapiens
tgactatttttgggctacaatggcagagttgaataggtgtggcagagaccatctggcttgtaaagcataaagtatccactatttggccttgtatttttttattttcttttttatttttcacttttttcccgagatggagtttcactcttgtcgctggagtgcaatggtgcgatctcagctcactgcaacctctgcctcctgggttcaagtgattctcctgcctcaacctcatagctaggattrcaggcacacgccaccacacccagctaattttgcatttttagtagagacgaggtttcaccatgctggccaggttggtcttgaaatcctgacctcaggtgatctgcccacctcagcctcccaaagtgctgggatcacaggcgtgagccaccactcctggcccactatt

SEQ ID NO: 785300 - DNA, 498 bp, Homo sapiens
ctcggactcccaaagtgctgggattacaggcctgagccacggtgcccggccaaccatttttaaatgcagagtttgctggtgttacatatatttattttgttgtgcagcagatctccagaacatttttatcttgcaaaactgaaacatgcatccattaaagccccctcatggtttgccctctgccaaccaccattctacttcagtcactataaatttgaccactttagataccccatgcaaagggcatcatgaaacatttttctttttgcgcctggcttactttacttagaataaggtcctcaagattcatccaygttgtagcatgtgacaagatttccttttgttgttaaggctgaataatatgtaattatgtatatgtacatgccacatttcacttatccatgcatctgtcgatgggcatatggattgcttcatattgcctattgtgaattatgctgctttgaatatggatgtgcaaatacgtcttcaagattttgc

SEQ ID NO: 785301 - DNA, 634 bp, Homo sapiens
ataaggcttgttctcatcatggctgggaactaagtttttaaggtgtttctggggtccccttggcccagaggggacaagacttaggatttcatttatagtttacacttcttatgcctgacactttttcctaaatattatacttaatataaattccccaaagagaaagataacaggcccagagaagcaggagtaggagaccttaatactgtggatgcattatgaaattcctgtgctctggtgcacgtagaaaggagtggaatagtttaagataacattttctgattcactgtttttcytgaggcttacattgtatcactgtgtagaatcataagtctcctaaggcattggaatacatgtttagaggaaatgatgccttgttttcaaagtggcagctccaagaattttctactctattttaggtgatagaactttgtagtcacttgatatgtacaattctatgtagaaatcagtgctttatttatagttgcagctgatccctccttcctagctgtgagaagcatgtgtagtttgataagggaggttagtattttttatttcaatactttttgggaaacaggtggtatttggttggatagaaaagttatttagtggtaatttctgagattttggtgca

SEQ ID NO: 785302 - DNA, 584 bp, Homo sapiens
ttatatactcattctatgaggccagtaataccctgataacaaaaccagacaaagacacaccaaaaaaagaaaaccataggccaatatcactgatgaatattgatgtggaaatcttcaaaaaaacatactagcaaacaaaattcaataatatcctaaaaagatcattcatcatgagcaagtggtatttaaccttaggatgcatggattgttcaatatattaaaatcaattaatgtgataaattatgtcaacagaatgaagagcaaaattcatatgatcatttgaattgatgctgtaaaagcatttgataaaactcaatattccctcatgataaaacctcaaaaagctgggtatagaagaaacatacctccacataataaaagccatatatgacagacccataattrattaattaatgtcatacagaacggggaaatattttaaatctttcttgtaaggtcaggaacacaaggatacctccttttaccaccattattcaacacagtattgaaattccaaggtagagaaaccagacaagagaaaaaaataaagggcaccatccaaattggaaaggaataacttaaat

SEQ ID NO: 785303 - DNA, 559 bp, Homo sapiens
gatcacacaaagttaaacgctgctgcctagcaaggaaacagtaaataaagcaaagagataattcgcagactgggagacagtatttgcaaactgaccatctgacaagggattaataatcagaatatgtaagaagctcaaaccactctatagaatatgtaaggagctcaaaccactctataaatcaataaaaatttggcaaaacacctgaatagatatttctcaaaagaagacatacacatggcaaacgggcatatgaaaaagtgttcaacatcattagtcatcagagaaatgcaaatcaaaactacaatgaggtaccatctcaagcatttaaaattgcttttatcccaaagtcaggcaataacaaatgctgggaagaatrtagagaaaaggaaaccctcgtacgctgttggtgggactgtaaattagcatcaccaccatggagaatactctagtggttcctcaaaaagcaacaaatacagctaccatatgatccagaaatcccattgctaggtatacatcaaaagaaagggaatcagtgtgttgaaaagatatctgcact

SEQ ID NO: 785304 - DNA, 641 bp, Homo sapiens
cagacaggcagaacaaaacccagttaccacaagatcctttatttgccaatctcctatttggaccattggccttttggtgcttttaattcctggggtcccatgcgaaaaacagaggactctccactctcatgtgttcattaaaagtgccaaggaaaaatggagaaaaataattcagttgactgaaaaaaaccctcttttttccaccaaaacaaggtccaagaaaggaaaaacataaaggccttttaaatataactataacttggatatccacttttaattaatctgagcactccttaagaaaatccttttaactcccttatcacttgacaaacggccaatatttctggctttcraactttactaaatattcagagaaaagaaaatccaatgcagtttgtggaggggaagggaatcaacaaatagcaaaaggtcatgcagatataaaatcagaaagggcacatttctgaagtcaggattgaatccctggctgtgcagaggctaaacaaagcctagacatagggttacagtccactcccccaggacataaaacaagatggagccctgaagcgaagtttgctacagacggtacagaaagacgtgcaaaacacaccagattggctacagcttaaaaccagcctcat

SEQ ID NO: 785305 - DNA, 641 bp, Homo sapiens
cagacaggcagaacaaaacccagttaccacaagatcctttatttgccaatctcctatttggaccattggccttttggtgcttttaattcctggggtcccatgcgaaaaacagaggactctccactctcatgtgttcattaaaagtgccaaggaaaaatggagaaaaataattcagttgactgaaaaaaaccctcttttttccaccaaaacaaggtccaagaaaggaaaaacataaaggccttttaaatataactataacttggatatccacttttaattaatctgagcactccttaagaaaatccttttaactcccttatcacttgacaaacggccaatatttctggctttcgaactttactaaatattcagagaaaagaaaatccaatgcagtttgtggaggggaagggaatcaacaaatagcaaaaggtcatgcagatataaaatcagaaagggcacatttctgaagtcaggattgaatycctggctgtgcagaggctaaacaaagcctagacatagggttacagtccactcccccaggacataaaacaagatggagccctgaagcgaagtttgctacagacggtacagaaagacgtgcaaaacacaccagattggctacagcttaaaaccagcctcat

SEQ ID NO: 785306 - DNA, 656 bp, Homo sapiens
caaaacaaatctctttattttactttttgaaaatagccattctaaatggagtaagatgatatctcattgtggtttaatttccatttttgtgataattagtgacataaagcatgttttcatgcacctgatggtcatttgcatgtcttcctttgaaaaacatcttcagaatttgtgcccatttttagtagggttgtttgttttttgctgttgtgttcttggagttcctcgtgtattctggatattaacatattgtcagatgtatagcttccaaatattttctcccattatgtaggttgtctcttttctccattgtttcctttgctgtggattagtttcttaatttgatgtaatcccatttgtctcatgtttgcctttgttgcctgtgcttttgatatcttatccaaaatatccttgaccacactaacatcatgaagcatttgccctcagtttccttctattaagttcacagttctgggtctttcayttaagtctttaatccatttggggttgctttttgtttgtcgttcaagataatgttccaatttcattttcgtgtgtgtgaatattcagttttcccagcaccatttactgaagaaactgccctttccccagtgtgtgcttctggcatctttactgagaatcagttggatgcagat

SEQ ID NO: 785307 - DNA, 638 bp, Homo sapiens
ttacctatacctaattgcaaacttcatttgagaaaaaagttgatggtcctcttgtttgaagaattttatttctgttatgaagtttcactgtgggatcccaaatacaataaaataagtcaaagcatttttgtggtcatggaaaataatgtatagctgattgttcattattaaactgcaacatatattgaatgttatcatgtttcaaggctattttataattagtaagtttttgcaaaataaaaatcctagaattttatttttcayacctgcactcttcagagttcagcttcatccatatacctctttctacagtgaggtgcattggttgaactaggaaatgcagagattactctcaattaccagttattactgagttgctgtgaaaacattcaaaaaatgttgagattattatcaaagacgcaggccagaaaaaataaaaaactgtataggaccaggaagagctgtattcacactaatgtcagagttcactgtacaaatgtcttaatttgtcattataaaatgaatctggaaataccgaacaaatcaaaaaagatctgttgtgacgtggtgattttttttttgaaagctacataccaccagagagcttctgtcatccaagttattccaagacagttttc

SEQ ID NO: 785308 - DNA, 609 bp, Homo sapiens
attaaaaaaaaaaaaaaattttcatgacctgcctgcaacattgtcatggaggttctagccagtgtaataaagcaagtaaaagacattaaaagaaatgaagattaagaaggaagaagaaaactgtctttattcacagaggacaccattgtctatgtaaaaaatataatggaatctacaacatatcaattagaaataataagggagtttagccacattgcaggatgcaagatcaatataaaaaattaattatagagcacaacatcaggaacagtagcatcaagagctccatggaatctccctccagcaaaacaatcataataggtaaaaactgaaaaaacaacaaaaaccagattactttaatctcttgaaaktgttataagagcatacagaaaattttttaaagataatttattataataaatctagtaaatattggtaagaacagtgctactctgtggcatttgagccactacctgttccctccctcctttcttcctgctcagcatgacagaaacattatgtcagggcagtgcagtgaaatacacaggactccctctcaccctacttcccacttaaggactatgacaccttttggggagaatcaggcca

SEQ ID NO: 785309 - DNA, 640 bp, Homo sapiens
ttgtcccagatcacttgtgaggcttcacactagaagattccataccagatgaggcaaactaaaaaagacagaagccactggctctgtccactgtcctgctagtaaagcagatgtgttactccaagacaagtgggtcattgcccccctccaccccaccccactcaagagcagtcacaaagcccatttgcctagaaagasagtgatcagatctctatgaagaaacggattttatttggaatagcctgtgggaaagttcaagccttagggcaatttcaaaaacaatgaaggttttggtggtaggtaattaagaagatgcaggtaattccatgtaagcatctacctaaaccttagaccagctgaagtttaccagagataatacaggaaaagatacagaagagcactcctagggttgaagattcatcttaaagcctacctctgcaaagagacctgactttcttgaaaacaggctgcaaagcaatttaggtgcccagggcattgttgaaaacaatagagcaattatccatcagttcatgtaacctaacagctagatgtgaccaacaaagtcaaataacctaatagacgaatcaaggaaaaagtcaaagacagcccttctaaaaacattgtcatcccatagtgacag

SEQ ID NO: 785310 - DNA, 640 bp, Homo sapiens
ttgtcccagatcacttgtgaggcttcacactagaagattccataccagatgaggcaaactaaaaaagacagaagccactggctctgtccactgtcctgctagtaaagcagatgtgttactccaagacaagtgggtcattgcccccctccaccccaccccactcaagagcagtcacaaagcccatttgcctagaaagagagtgatcagatctctatgaagaaacggattttatttggaatagcctgtgggaaagttcaagccttagggcaatttcaaaaacaatgaaggttttggtggtaggtaattaagaagatgcaggtaattccatgtaagcatctacctaaaccttagaccagctgaagtttaccagagataatacaggaaaagatacagaagagcactcctagggttgaagattcatcttaaagsctacctctgcaaagagacctgactttcttgaaaacaggctgcaaagcaatttaggtgcccagggcattgttgaaaacaatagagcaattatccatcagttcatgtaacctaacagctagatgtgaccaacaaagtcaaataacctaatagacgaatcaaggaaaaagtcaaagacagcccttctaaaaacattgtcatcccatagtgacag

SEQ ID NO: 785311 - DNA, 632 bp, Homo sapiens
gaatttagaagtaattagactttcctattgtctaaaggcacctggttccaggcctcttttcaacttaaaatttataaatataactagaatttctatacatctctggaatgcacgcatatcaaaactcattgtgcaacctttgccaacattaaggaaccataatatctacaaatgtaatcatttattgtgcaaactacctttcacttcctgctttaaggtccataaatactcctaaggaaaaatccactgtgggcactcagtcctctctygctgtggtgcctggctgcactcttctgcagtgttctttgtatctaataaaactttccttttcaaatctatactgttgttggtaaattcttcttaccaacccatgagtcaaccacttccctatgcaggaactctgacacctcgcctgatacctaggtttacacctgaaggacctaagaaatatataaaaacaaactaaacccaaagtttgcagaagaaaataaattgtaacataaataaataaaatagagactagaaaaacaacagagagcatcaacaataccaataattggttcttcaaaaagatcaacaaaattaacaccttgtagctaagttgacaaaaaaagagagaagtttcaaagaac

SEQ ID NO: 785312 - DNA, 527 bp, Homo sapiens
gctgaaagagcaaattgtgttttatcagctttgagtatgttactcaactgacttgagatctcaacataatggtgatcatgctagctttgattaaacaatcacgtgatgactattttcctatgttaatgcatattagtctgtgcatcagtctggatgctctagattatagggctgtaacaagtaacctccagagctctgtggcttaatacaacaaatgtttatttgttgcacatggtacaagccmtatgtgttgggcagggggctttttttaccatagtcacttaggaatgcaagttgagggacacttcttcttgaagtgcacttccataattatcaaggcagaaaaaagggacatggtatattgtgcattttatgttaaaacttctataagagaggtcacaggttccttctgctcacattttgccaaccaaatataggtcattcttagattctggagaatatggcaagtgtaatctaaccataatttttgaagaaacacaatgtttgttaacaaccttctttttttt

SEQ ID NO: 785313 - DNA, 542 bp, Homo sapiens
gataaagtcaattttcgactatccatgggtggattatctgcaaatctggattttatcttcttgtgttgatcttgtcatctgttttgtttatctaagccctttaaaagcactattgttgcttctgtttactcttatttcctgcatgcagtaatgataattccctatatttgtttggcattttatggtttgtgaaatattttcacatgcattctctcattttgatgtagcctccgttaatccaaagtaggaaggggagtctttgaaaccatagcattttgtcatcaaattattttcttgggaaggtatatgctaacatgttggaagttgattaagaaacaaaacaaaacatatctgagatcatgttggtcgtttgcacaggcctrcgtggtgccagtgattataccaacatcaaatggggtaaaaggaggagataaccagatagaagatcaccaactgacagttgctcatagcactgttctactgtaaggctcaaatcctagaatatcagccacattcaaaggcaaggccaaactcacatttaa

SEQ ID NO: 785314 - DNA, 590 bp, Homo sapiens
caaatccaaatcaaaaaactttccctccttcatcactagagaaagactaagaggatagtttgtcaagaaaagactctacggagagataaaatgctgaaagttatgaacatatggtacccaagggttgaacatttttaaaaaatggccttaccattaagaaaattggcaggagaccttaccatattattacactatactttctaatattttcttcttccagattaaactctaaccaataatacaaaggtgttttatttcatatccatcctttcaataaaaatctccacaaaatttaaacatggtagccagttacgtatctaactcrttagacacattgccgttccacatagtgaaaaatgatatttttggatgtttatttcatttcagaaggagagaaatctcagaatcccaatggccccattttggtctttttttttgcaaagttccaaagtaatgaatcagtagaaatgtttgtaaagatactaaaaggttgatttcccattttaaataagtacctctattataaaaagatagagatttcaaaaaatacaaattaggagagaaaaatcaatttcatttctgggaaaatc

SEQ ID NO: 785315 - DNA, 575 bp, Homo sapiens
tatatacatatatatgtattatataaatatatatatttaacttttaagttcggggtacatgtgccggtatgttatataagtaaacttgtaccatgagggtttcttgcacagattatatcatcactcaggtattaagcctagtacccattacttattttttctgatcctctccctcctcctatgtttcaccctctgataggccccagtgtgtgttgttcccctctatgtgttcatatattagcatcatttagctcccacttataagtgagaaaatgtggtatttagttttttgtttctgtgttaccaactatataattttataaacataaggggctttgcaaactgtaaggtgatgttaaagagaacttgttgcagcttttcttgagtcaatggaaagtccrtacttaagttataattttgcaactcattagccatgaggcttcaaccagataactttgcctctttcagtctgcctcctatattaaaaagtacataagccagatgctaatattaggcattaggggaggctggatacatgggacagaggtctctgctgggtatttctttgcaaattc

SEQ ID NO: 785316 - DNA, 623 bp, Homo sapiens
ggttagatgactccaaaagattcttctagctctaaaatcctgatcatgagatgaggctctgccatcttcccatatctattgagatgaggctgggagttgagttggtccacttgccaacatgaggtcaacacactggctctgtttagttctgcaacacgaggatgcccctttgcatggcacagttcattttcctctcgctggtactcagcacagagatttatacaaacaggtacwcagcagacacatgttcaaagattttagatcatgcaattttagaaacttccacagggtggcaaggacgctattacttgatagtctttacacacataacaacctttctcctcttttttgtccccctcagtctctttcacaacatacaggtttccctatccatggctattataaatattggaaaatacagttttatagactatactatttctaatgaatgctccatattacaattaaattagaggactaatctgaagcttgagtagactaaataaaatagtgggtagggggaaatcagtgttgtaccagagaatataatttctgaaacataagaaaattagcacagaacatgaccaaggggaggaattacagcaaaatgagttgcaaggtaa

SEQ ID NO: 785317 - DNA, 599 bp, Homo sapiens
aggcatggcactgtatctggctttttattttatgacaaaatttatgttttccaaaagtctgttatatttctattttgtttaaagtttttctagcaatttttagttttaaaacataaatgctagaacatgcagcaaatgtaatttttgttaataagaaattgtaatcttttgtggatggtaatgcatgatcaatttttgtaaagatgttaagaaaaattrggaaaaagatatattttttgtttacagattatatatttccctacaaattccagcttttattttatattatttaaactatgcatttatttatctttgtgttcctcatctatcaaaggctgaaaactaatgaaggcttcttcattggttgcaattttgtccatttcatctttaaagtttttaatttatgcatttggcaagctgtgattttatgcatgccattttatgactgctaaatttacattgtgagtgtatattttaacaataaaacatgacattttaatttgaatcatccttcactcggaaagaatgtaaacttttggtaatgtactattaatattattcagaaagggtacaggattgatataatttcttaagacttg

SEQ ID NO: 785318 - DNA, 510 bp, Homo sapiens
tgtactctctccaaactgcttcaaacagggaaacctcttttttgcctttcttttctttttaatagattagcagtgctcatatatttcctttcgggaaagacaggtccttctgcaaataagaaaattctttggctagggtatcatcaacattatttcagcccaaaagcttcacaaatacactttcaaaggcaagaggaagsaaggcaaattgattatagcttcagaggaaaataattaatacaatactaagcatacagacttgttttcttggagctcgtgtgggattagactgttgcagggctgttggaaattcaggaaaggttaccttgatttctgcaggagggaagaaactggtcctatactaccaccaaggcccaggagaaaccccatacctggatgctcacagagctcagagtaggggcaagacagctctcccaatatttctagcctccgagcaaattttaaggaatgtcagatttttggcataaagcatagaatggtcaaatggca

SEQ ID NO: 785319 - DNA, 586 bp, Homo sapiens
gtattagtaagcaagaaaattaaaaagctaactattcaaattaaaaaaagacaaaacaacattaattaaagaattttttttaaataaaacctcttaaactaaaaataaaccaaaacttatttagcctgttaaggggtatcgaccaaattctgctgcaaaatcagactccatggtaaaaaatcccaagaattttytttaaagtgagcaacaagacaagaatgtccactaccagctctactatgcaacactgtattggaggtcttaataagaaaaaaaccttggccaggcttggtggttcacacttgtaatcccagtactttgggaggttgaggaaggaggattacctgcacccaggagttccagaccagcctgggcaacacagggagatcccatctctataaaaaaaaaaaaaaaaaaaaaaaaaaaaaaatcacaggtgtggtggcacatgcctgtggtcccagctactcaggtggctgaggcaggaggattgcttggccccaggaattcaaggctgcagtgagctaggatcgcgccactgcattccagagtgagacagtgcctcaaaaaaaaaaaaaagaagaag

SEQ ID NO: 785320 - DNA, 586 bp, Homo sapiens
gtattagtaagcaagaaaattaaaaagctaactattcaaattaaaaaaagacaaaacaacattaattaaagaattttttttaaataaaacctcttaaactaaaaataaaccaaaacttatttagcctgttaaggggtatcgaccaaattctgctgcaaaatcagactccatggtaaaaaatcccaagaattttctttaaagtgagcaacaagacaagaatgtccactaccagctctactatgcaacactgtattggaggtyttaataagaaaaaaaccttggccaggcttggtggttcacacttgtaatcccagtactttgggaggttgaggaaggaggattacctgcacccaggagttccagaccagcctgggcaacacagggagatcccatctctataaaaaaaaaaaaaaaaaaaaaaaaaaaaaaatcacaggtgtggtggcacatgcctgtggtcccagctactcaggtggctgaggcaggaggattgcttggccccaggaattcaaggctgcagtgagctaggatcgcgccactgcattccagagtgagacagtgcctcaaaaaaaaaaaaaagaagaag

SEQ ID NO: 785321 - DNA, 666 bp, Homo sapiens
aacatttctgttttataaaaatctccaaaccttctctttgttcttctgacataccaaagacaacctggtctgtgtgtaagccctgaattgcaattcttgattgccaaataaaatatttaaactttagagattcatctctatatgttgactttgacaccatcaatccacctgtgcattaatttattaaataaatatctatagagcactaggtaccaggtactttctagccttggaacctttgcacttaccatccctctggctggaacagcattccctaaatcttgtctggtctcagctcaactattaccccctgagaaaggccttccttcatccccttatttaaaatagcccacacgtggtcactttccattgcattatcctgttttgttttccttacagcactaatcacatgaaatkagagtcttcgtttgcttatcagttaattgcctgtggggaccccactaggacataatctccctgatagcggggccagcctccttccctgcgtcatccacggcgttctagcaactcagggagcccagagcatgctgccgccccgcgtgcaagggagcctaagttccaaaccgagcacgcgcagagggcgggacgctccgggcctccaggtctcgcaggccccgccccctcgccgcgggttcgctgttgggc

SEQ ID NO: 785322 - DNA, 642 bp, Homo sapiens
tccaaaaccgtaattactattgcaccaaccagaatatatagaatatataacataatatatatttgaaatatactatataaatattatatattatatatttcatatatattatatatttcatatataatatatatatttmatatataatataatacatattttatatatattatatattatactctatatataatatagatcatatatattccacatattatatatattatactccatatataatatatatatttcattcatcatatatatttcatatatagtatatttaggcagggtcttgctctgttgcccagggtagaatgcagtgacacaatcactgcagcctcaacctcccaggcacaggcgatcctctcacctcagcctcctgagtagctgggactacaggcacgtaccatcacacttggctaatttaaaattttttgtacagacaggatctcactatgttgcccagaccggtctcaaactccgggacccaagcaatcctcttgtcccagcatcccaaagtgctgagattataggcttgagccatcacacccaacagagggtactttttctggctgttctgcaccacagcctccttggatgggtaggagtgtgttcatttatcatctagcacacagg

SEQ ID NO: 785323 - DNA, 586 bp, Homo sapiens
ccaaaattatcaaacatgcccccccaagaccccgaaaacaaaacagaacaacaacaaccaaaaaatacccagaaaacaagacagtcaataaaaaccgaatctgactgaactcaggtgttggatttagcagacaaaggcttccaagaggatagaaagatgttcaaataattaaaggaaaatayggtataaatgaataagccgatataaaattacaatagaaaaatggaagctatttggggggacattctagagctctgaagtataataaatgaaattaaaattttactagatgggctcaaaaccatatttgagatggcagaggaaagatcaacggaaattactgatccaaaggacataaacattgaagaaaaatgtgggaaatgtagcactgattagatatttgatgatattaagaaattattcttggccaggcacagtgactcacacttgtaatctccgtactttgggaggctgaggtgggaggatcacttgaggtcaggagttcaagactagcctggccaacatgatgaaaccccaactctactaaaaatacaaaaattagctgggcatggtggtgggcacttgt

SEQ ID NO: 785324 - DNA, 670 bp, Homo sapiens
attggaagggaagaagtcaagttagccttgttcacaaacaacatgatcttatacctaaaataacccaaagatttcaccaaaaaaccattagaactgataaacaaatttggtaaatttgcaggatacaaaatcaacatccaaaagtcagtagcacttatatatgtcaatagcgaacaatctgttaaaaaaaatcaagaaagcaatcgcatttataatagctacaaagaayattaaatacctaggaatcaatctaaccaaagaagtgaaaggtctatacaaggaaaactataaaactccaatgaaaaaaatagaaaaggacatacaaaaaagtgaaaagatattccatcctcatggattgaaagaattaatagtattgaaatgacaatactatccaaagcaatttacagattcaatgcaatcgctatcagaaataccaatgacattcacagaaatagaaaaaaaaatcctaaaatttatatagaaccacaaaagactctgtattgccaaagcaatcctaagcaaaaagaacaaagttggaggcatcacactacaaacttcaaaatatattacaaagctatagtaacccaaacagcatggcactggcataaaaacagacaaatataccaatagaacagaatagaggacccagatataaatccacacattcata

SEQ ID NO: 785325 - DNA, 670 bp, Homo sapiens
attggaagggaagaagtcaagttagccttgttcacaaacaacatgatcttatacctaaaataacccaaagatttcaccaaaaaaccattagaactgataaacaaatttggtaaatttgcaggatacaaaatcaacatccaaaagtcagtagcacttatatatgtcaatagcgaacaatctgttaaaaaaaatcaagaaagcaatcgcatttataatagctacaaagaatattaaatacctaggaatcaatctaaccaaagaagtgaaaggtctatacaaggaaaactataaaacyccaatgaaaaaaatagaaaaggacatacaaaaaagtgaaaagatattccatcctcatggattgaaagaattaatagtattgaaatgacaatactatccaaagcaatttacagattcaatgcaatcgctatcagaaataccaatgacattcacagaaatagaaaaaaaaatcctaaaatttatatagaaccacaaaagactctgtattgccaaagcaatcctaagcaaaaagaacaaagttggaggcatcacactacaaacttcaaaatatattacaaagctatagtaacccaaacagcatggcactggcataaaaacagacaaatataccaatagaacagaatagaggacccagatataaatccacacattcata

SEQ ID NO: 785326 - DNA, 670 bp, Homo sapiens
attggaagggaagaagtcaagttagccttgttcacaaacaacatgatcttatacctaaaataacccaaagatttcaccaaaaaaccattagaactgataaacaaatttggtaaatttgcaggatacaaaatcaacatccaaaagtcagtagcacttatatatgtcaatagcgaacaatctgttaaaaaaaatcaagaaagcaatcgcatttataatagctacaaagaatattaaatacctaggaatcaatctaaccaaagaagtgaaaggtctatacaaggaaaactataaaactccaatgaaaaaaatagaaaaggacatacaaaaaagtgaaaagatattccatcctcatggattgaaagaattaatagtattgaaatgacaatactatccaaagcaatttacagattcaatgcaatcrctatcagaaataccaatgacattcacagaaatagaaaaaaaaatcctaaaatttatatagaaccacaaaagactctgtattgccaaagcaatcctaagcaaaaagaacaaagttggaggcatcacactacaaacttcaaaatatattacaaagctatagtaacccaaacagcatggcactggcataaaaacagacaaatataccaatagaacagaatagaggacccagatataaatccacacattcata

SEQ ID NO: 785327 - DNA, 710 bp, Homo sapiens
ggacaatactactttttaattgataaggccaaatgtcccttgtgccatcctttttaccactctttcccttgaaacaatatccaatcatcataaacctactcaatgtccataaaaaataaatccagaaaatgctaattaagacctcattaaaattttacttcacacatagcactactgctgacattaaaaaggctgacaacacaacacgttagctagaatgcagagcaacttgacatctcatatattgctagtcagactgaaaatcaaayattttgaaaaactggaagataccttacagtgttaaatacatgcctactctgtatgccaacaattgtattcctagtatttacccaagagacataaaaacatatgcctacaaaactaatcatacaagaatgtagcagagtgatgtcagcaagatggcagaacaggaaatcctagactctccttcttcatacaagcatatcgattcagccacaattgatggaagaattccctgtgtgggaaatcagaaactaattgaaaggttcctgcatcctgggagaatgcaaaaccagactcactgaagctgacagagagatatgaaacaccctctcaccagacacccttgtctcagtgtggttccctaagatcagaaagagatgcccaagctcctggtttcacccaggggaggtaagggcttggatcccatgttcagttcccttgcattt

SEQ ID NO: 785328 - DNA, 541 bp, Homo sapiens
gctttgtcaggtactgaatgaggaagaaatttctgcagtaaagaataaactgtgttcaattttaacatgtaagagaacatttccttaacttgcacaggatttaaaattccaatcacaagaatgaaggtctttaaaaatgaagatgtctttgttagaagacaaccagtatcctacaaggmagtaatgctggtagcaaccgatctttaaatccaacagaaatccaaaccaaaataaacagacaaaaagagtcccctacttctttttgtgtaggctccatacaaaggctttaaccctctctttcagcctcagcactattgatattttgggttggataattctttgttgctgtggtctatcctgtgcattgtaagatgtttagcagcatgtctgggctctattcactggatgccaggagcacctctccctacccatcccaccgctacatacattgtaacagtcaatagtcaaaagtctcctggaatgcaacattcccccacctcctcctgagaaccacagctttaacctcattctcttccagctg

SEQ ID NO: 785329 - DNA, 611 bp, Homo sapiens
gaaaagcacctaacatgtggattcctgtagatctttatttctcaatctccctaggaacaaatgcaaagacacaatttctgaggagtaagaaacaactgagaaatagttactaggtcatattttacattaaatattaacttcaaaatatttcagaattaragtaagaaatatgggaggtttcaaggagatataagataaggctctgatactcaaataatcattttttctatatgaggaaatgaatcataagttcatgcaacaactagagaacaaatctctaattctccagtagagtgttataggtcacagtgcattaggagagataaaaagtattgtaaatattcacaagaggagaagatatctgtatcttaaagctgcattgttaatgggtgttacatggcagacttgcattatttttgttttgttttgtttacagcggactgagatcatctatagctctgttcagacgccacagtgaagtgtgagaaagacaaaaatccagttgcatatatcaaatgccttgcctgccagttaaaatcaggcccttaaaagcacataaacattgatttctgtattttggttccttccttttagacaagaaaaatctgaag

SEQ ID NO: 785330 - DNA, 611 bp, Homo sapiens
gaaaagcacctaacatgtggattcctgtagatctttatttctcaatctccctaggaacaaatgcaaagacacaatttctgaggagtaagaaacaactgagaaatagttactaggtcatattttacattaaatattaacttcaaaatatttcagaattagagtaaraaatatgggaggtttcaaggagatataagataaggctctgatactcaaataatcattttttctatatgaggaaatgaatcataagttcatgcaacaactagagaacaaatctctaattctccagtagagtgttataggtcacagtgcattaggagagataaaaagtattgtaaatattcacaagaggagaagatatctgtatcttaaagctgcattgttaatgggtgttacatggcagacttgcattatttttgttttgttttgtttacagcggactgagatcatctatagctctgttcagacgccacagtgaagtgtgagaaagacaaaaatccagttgcatatatcaaatgccttgcctgccagttaaaatcaggcccttaaaagcacataaacattgatttctgtattttggttccttccttttagacaagaaaaatctgaag

SEQ ID NO: 785331 - DNA, 618 bp, Homo sapiens
tgattaatgtgagtttgaataaaatagttatgaagtggtagagtctagagtgaaatacaaaaatctaacatctagtgccccacaaaggaaagaattacagaaaaaaagtttttaatatttcctttacatccttttaaaaatcaacaggaaggaggttataaaagatgggaaatcataagaatcactaaaatacttttatagaaaattgttccttatatattttctaaacctctgatgatctctgctggttctcattagatttagagataaaaccaagcacagaaatgtgttytcaatttctcacactctgggtgagacataaataataaaatatgggcaattagaattttaagtttttaaatgccacttcaacccctgacaaaaaaacgccgaaatattttctcaggcattgattgacagtgcattggatgcacttggtgctgtgtatgataggaaaacaaaatagaaagcaattatttttatctttaggaagcctataacttacttgaggtgaaagggcatatggcatactaacatggagaacattaaactatgtaaaaagcaaaaggtaatgaaacttaaggttagcaaagtacataagtgttggcaaaactaaaa

SEQ ID NO: 785332 - DNA, 618 bp, Homo sapiens
tgattaatgtgagtttgaataaaatagttatgaagtggtagagtctagagtgaaatacaaaaatctaacatctagtgccccacaaaggaaagaattacagaaaaaaagtttttaatatttcctttacatccttttaaaaatcaacaggaaggaggttataaaagatgggaaatcataagaatcactaaaatacttttatagaaaattgttccttatatattttctaaacctctgatgatctctgctggttctcattagatttagagataaaaccaagcacagaaatgtgttctcaatttctcacactctgggtgagacataaataataaaatatgggcaattagaattttaagtttttaaatgccacttcaacccctgacaaaaaaacgccgaaatattttctcaggcattgattgacagtgcattggatgcacttggtgctgtgtatgataggaaaacaaaawagaaagcaattatttttatctttaggaagcctataacttacttgaggtgaaagggcatatggcatactaacatggagaacattaaactatgtaaaaagcaaaaggtaatgaaacttaaggttagcaaagtacataagtgttggcaaaactaaaa

SEQ ID NO: 785333 - DNA, 618 bp, Homo sapiens
tgattaatgtgagtttgaataaaatagttatgaagtggtagagtctagagtgaaatacaaaaatctaacatctagtgccccacaaaggaaagaattacagaaaaaaagtttttaatatttcctttacatccttttaaaaatcaacaggaaggaggttataaaagatgggaaatcataagaatcactaaaatacttttatagaaaattgttccttatatattttctaaacctctgatgatctctgctggttctcattagatttagagataaaaccaagcacagaaatgtgttctcaatttctcacactctgggtgagacataaataataaaatatgggcaattagaattttaagtttttaaatgccacttcaacccctgacaaaaaaacgccgaaatattttctcaggcattgattgacagtgcattggatgcacttggtgctgtgtatgataggaaaacaaaataraaagcaattatttttatctttaggaagcctataacttacttgaggtgaaagggcatatggcatactaacatggagaacattaaactatgtaaaaagcaaaaggtaatgaaacttaaggttagcaaagtacataagtgttggcaaaactaaaa

SEQ ID NO: 785334 - DNA, 611 bp, Homo sapiens
cagtcattctcaaatgttctgtgcattaactcattctagggaggaactagtacagtaaaaaaaatggcacgtattttcaattattcttagaaaggaaggtaacatatgtaactgagctcataaaatccactgcatagatcatgtctttctaatgtttttacctctatctgagaatggatagcaaattgtctcacaccaagagaaatgtcaacaacttttaaaatgaataaacatgatgcgtattataaatttatgcttttcagtcattcacagarctgtcattaactttgcaatctacatattacatattttgcataattcttaatgccataataaggatactatatgtgaaaccatagcaacattttatattatgcaaaaggaaggtctcaggggcaaagattgatgcctaatgggaacatgtgatgctatgctgtgtttcatcattctaatattctattagaaccagtttcagtttaaagagtttcagtactgccagtttccttatgaagtttgcacttctcatatgaattttacttgtgttcgctgaagctcacagctgatattttcccagattcaggtttccagtgaagaaaataaaaatagaaatt

SEQ ID NO: 785335 - DNA, 659 bp, Homo sapiens
acacacacaaggttcacaatatacaggtctttgtttcttttctttctttttttttagatggagtttcactcttgttgcccaggctagagtgcaatggtgcaatctcagcttactgcaacctctgcctcctgggttcaagggattctcctgcctcagcctctcaagtagctgggatgacaggtgtgtactaccatgccyggctaattttgtatttttagtacagacagggtttcgccatgttggtcaggctggcctcaaactcttgacctcaagtgatccacttgccttggcatctcaaagtgctgggattacagccatgagccaccgtgcccggccaggtctttgtaagaagtacaagtttcatactaagtacaatgagaatccgctgaagaggctttaatcaggatcagcctacttttaaaagatcactatatgatttaaggaaagaaaatggattagagatttttgctaccattatggaaggccaggtgattagtaacagccctcctgctgaaaacaccttaaaaggctagattgaatattttttaaagtctaaagagaatcattgacttaaaagatgataagggatccctggtcttaaatctaggagaagataagaactcagatagggaagcccaacatgccaagccactttttcc

SEQ ID NO: 785336 - DNA, 659 bp, Homo sapiens
acacacacaaggttcacaatatacaggtctttgtttcttttctttctttttttttagatggagtttcactcttgttgcccaggctagagtgcaatggtgcaatctcagcttactgcaacctctgcctcctgggttcaagggattctcctgcctcagcctctcaagtagctgggatgacaggtgtgtactaccatgcccggctaattttgtatttttagtacagacagggtttcrccatgttggtcaggctggcctcaaactcttgacctcaagtgatccacttgccttggcatctcaaagtgctgggattacagccatgagccaccgtgcccggccaggtctttgtaagaagtacaagtttcatactaagtacaatgagaatccgctgaagaggctttaatcaggatcagcctacttttaaaagatcactatatgatttaaggaaagaaaatggattagagatttttgctaccattatggaaggccaggtgattagtaacagccctcctgctgaaaacaccttaaaaggctagattgaatattttttaaagtctaaagagaatcattgacttaaaagatgataagggatccctggtcttaaatctaggagaagataagaactcagatagggaagcccaacatgccaagccactttttcc

SEQ ID NO: 785337 - DNA, 659 bp, Homo sapiens
acacacacaaggttcacaatatacaggtctttgtttcttttctttctttttttttagatggagtttcactcttgttgcccaggctagagtgcaatggtgcaatctcagcttactgcaacctctgcctcctgggttcaagggattctcctgcctcagcctctcaagtagctgggatgacaggtgtgtactaccatgcccggctaattttgtatttttagtacagacagggtttcgccatgttggtcaggctggcctcaaactcttgacctcaagtgatccacttgccttggcatctcaaagtgctgggattacagccatgagccaccgtgcccggccaggtctttgtaagaagtacaagtttcatactaagtacartgagaatccgctgaagaggctttaatcaggatcagcctacttttaaaagatcactatatgatttaaggaaagaaaatggattagagatttttgctaccattatggaaggccaggtgattagtaacagccctcctgctgaaaacaccttaaaaggctagattgaatattttttaaagtctaaagagaatcattgacttaaaagatgataagggatccctggtcttaaatctaggagaagataagaactcagatagggaagcccaacatgccaagccactttttcc

SEQ ID NO: 785338 - DNA, 705 bp, Homo sapiens
ttgtttgcatacacttaaatgggatccacgttctgcatcatttgattgataatcaagtgaagatcctgctgaattccttttgcatatgcagaatttagattaaatttcaaaacaacacaaatacaattctcaagtcytagattctgaattaatggggttttatcctaataagacacctggggtccttgtatagtatcacagtcatagaatgatattaaagaatactgagtttcttaggctgggtgcagtggctcatgcctgtaatcccagcactttgggaggccaaggcaggcggatcacctgagctcagggattgaagaccagactggccatcatggcaaaaccccgtctctactgaaaatacaaaaaatttagccaagcctggtggtgtgtgcctgtaatcccagctactcagaaggctgaggcaagagaatcgcttgaatctgggaggtggaggttgcaatgagccaagatggagccactgcactccagcctgggtgacagagtgactctgtctccagaggaaaaaaaaaaaaaggataccaaatcctcttacttcatgcaaataggagtatgtaatagactagaaaaagtgtttagaaaatagaaaggaattatattatcagtgtctctgaataagttttcagaagccaactgttttctggttgaaactcttattctctgctccccctggtggtgctacat

SEQ ID NO: 785339 - DNA, 705 bp, Homo sapiens
ttgtttgcatacacttaaatgggatccacgttctgcatcatttgattgataatcaagtgaagatcctgctgaattccttttgcatatgcagaatttagattaaatttcaaaacaacacaaatacaattctcaagtcctagattctgaattaatggggttttatcctaataagacacctggggtccttgtatagtatcacagtcatagaatgatattaaagaatactgagtttcttaggctgggtgcagtggctcatgcctgtaatcccagcactttgggaggccaaggcaggcggatcacctgagctcagggattgaagaccagactggccatcatggcaaaaccccgtctctactgaaaatacaaaaaatttagccaagcctggtggtgtgtgcctgtaatccmagctactcagaaggctgaggcaagagaatcgcttgaatctgggaggtggaggttgcaatgagccaagatggagccactgcactccagcctgggtgacagagtgactctgtctccagaggaaaaaaaaaaaaaggataccaaatcctcttacttcatgcaaataggagtatgtaatagactagaaaaagtgtttagaaaatagaaaggaattatattatcagtgtctctgaataagttttcagaagccaactgttttctggttgaaactcttattctctgctccccctggtggtgctacat

SEQ ID NO: 785340 - DNA, 623 bp, Homo sapiens
tatgcaattgaatgattgtttgataatggagagaaagagaaaaacgaaggcaacacgaaaagctcaaattctctgagaactgataatgctgattcctagctcacggactcctaaaatttcttttttattttgagatggagtctcgctcttgtcacccaggctggagtgcagtggcacgatctcagctcactgcagcctctgcctcctgggttcaagcgattcttctgcctagtctcctgagtagctgggattacaggcacgcaccaccatgcccggctaatttttgtacgtttaatagagacggggtttcgccatgttggccaggctggtctcgaactcctgacctcaggggatccacccgcctcggcctcccaaagtgctgggattagaggcrtaagccagcgtgcccacccagccagattcctaaaatttctaacttgaaagtaagtttctattaagcaagctgttcatacttgacttctaaaaaacaataacaaggaaattctcagcattgagctgaaaggaaactcagagattttctttctagaagaaaacaacacataacactataaacataaaaatatattcctattttgtgaattgtataaattgtccattctgat

SEQ ID NO: 785341 - DNA, 618 bp, Homo sapiens
aaaccatgcatgtttagaaactcctgcaagcagacagctaaggataaaacaactgaattaaaatttgagctgctgttcacgagtcattttgtattctgagtacaatcaagataattgactgctagaacaaaaacatcaataatttttgtaggacaagagagtgcagagtcttcacaatacaatagtcrcaatgcccaagatcaatccaacttgacctaaaagaaccaagaaagtgagacctagtgttaacataaaagataacccaacaagaccaagcctgaaatgacccagatattggaattaatagattttatagcagctattataactatgcttgatgggtcaggcacggcagctcatgcctgttatcccagccctttaagaggctgaggcgggtggatcacttgaggccaggagttcgagaccagcctggccaacatggtgaaaccctgtctctactaaaaatacaaaaaaagaaaaaaaaattagctgagagtggtggcacacgtctgtagtccagctactcaggaggttgagacaggagaatcgcttgaacctgggaggcagaggttgcagcaagctgagattgcgccactgcactccagcctgggtgacaga

SEQ ID NO: 785342 - DNA, 546 bp, Homo sapiens
tctataacatacaagttcaggtgaagcaaaaagtgcagatgtagaagctgcagcaagttatccagaagatctagctaagattatggatgaaggtggctacactaaacaacagatttttcttttcttttcttttttttttttttgagatggagtttcacttttgttgcccaggctggagtgcaatggcgtgatcttggctcaccgcaacctccgcctcccgggttcaagccattctcctgccttagcctcccaagtagctgggattataggcatgcgccaccatgcccagctaattttgtatttttagtagagacggggtttctccatgttggtcaggctggtctcgaactcccaacctcaggtgatctgcccgcyttggcctcccaaactgctgggattacaggcgtgagccaccgcgcccggcctcttattccttttttttttcagatggagttccactcttggtgcaatggtgcgatctcggctcacttcaaactccacctcctgggttcaagtgattcttctgcctcagtcccccaagtagct

SEQ ID NO: 785343 - DNA, 546 bp, Homo sapiens
tctataacatacaagttcaggtgaagcaaaaagtgcagatgtagaagctgcagcaagttatccagaagatctagctaagattatggatgaaggtggctacactaaacaacagatttttcttttcttttcttttttttttttttgagatggagtttcacttttgttgcccaggctggagtgcaatggcgtgatcttggctcaccgcaacctccgcctcccgggttcaagccattctcctgccttagcctcccaagtagctgggattataggcatgcgccaccatgcccagctaattttgtatttttagtagagacggggtttctccatgttggtcaggctggtctcgaactcccaacctcaggtgatctgcccgcctyggcctcccaaactgctgggattacaggcgtgagccaccgcgcccggcctcttattccttttttttttcagatggagttccactcttggtgcaatggtgcgatctcggctcacttcaaactccacctcctgggttcaagtgattcttctgcctcagtcccccaagtagct

SEQ ID NO: 785344 - DNA, 630 bp, Homo sapiens
ctccaccactacaaccttttactgttgtcttgcccatatctaattcagcagcaattttttttagcaacttgccttcaaatttcttccaagcattcaacctctttttcatagaaatatcttttttatactcatatttcacttgtttgtattatataataatttaatatgtaattaaaataacaagtatacctagcgtgaactaactactgaccctgaagcagccaacctggctggtgggagtagatgtgagtaatacacaaccagcctccagtgtgctatgcaactcagccagtttattttgaagagaagttggtatgtcacataagctggcaagtcagttaagaaagtatcacccgtatgtttctctcctttttgcctctactgattgctatgggayttttatcttagcacctgttatcataattcctctattaaactataagcttttggatggcagggcccttttcttacttatgtgtgtatctccagtgtctcctgatatagtgtctggcctatagtaggtgctcagaagtactaactagacatatatatgtcttagttcagtgctatatatttgttggtgccaaacagctctttattgaatagatggatatatgtatgtattactgc

SEQ ID NO: 785345 - DNA, 540 bp, Homo sapiens
tttttttttttttgagatggggtctcactcttgtttcccaggatggagtgcagtagtgtgatcatggcttgctgcagcctcacctacctgggttcaagcgatccttgtgcctcagcctcccaaggtgctgcgattacaggtgtgagccactatatttggtctcatttgtatttttgaaagatcactggtggcagtgaagataccagtgggttggagggagggagactagaggcaataacagtttagataatagatatttactgagcccctgctaagtgccaggcacygatccaggtgctgggaacctagggggtgagtgaataagacagtctctgccctcatggagcttacattctaatagtggtagagtagtgtggtggtaggaaagcagactatatatatatatatatatatatatatatatactatatatatacatgcaacaaatgatattttttcagatggtgataagtaatttgaaaaaataaataaatagagctatgggagttagagtgtttgggcattgggatgggtactaat

SEQ ID NO: 785346 - DNA, 614 bp, Homo sapiens
ggagcaagtaatagtcagttgagggtggagcacattctaagccatgggaaggaatctggattaattccagtggagtaagaagcactgtgattaattaaatcaggggtcagcaaactacagcccatgggtcaaatctgtcctgctgcctatttttatgaataagccatattggaacagtcatacccatgggtttgtatatcgtccatggctatttttaatgttacaagagcagagttgagtagtttcaacagagaacatatggcccagaagcytaaaatatttactatctggcctttataggaagagtttactatccctgaattaaatgatctaatttaagttttgaggagacactctggctactgttgagataattaatggtaggagacaagagtatatctgaatagttcagataagaaataactagatgttgagccaccagaaagcaaagatcacaccgtttttgttctgtttaaaaacacctaggtatgctttatactcattaaatattgttgaatgaatgatgagatgctgaataagggagtgccagtgaatatgaaggggaagtgaggttttgagaaatatttaggaggtaaaaaatcagtgcagcttat

SEQ ID NO: 785347 - DNA, 634 bp, Homo sapiens
aaagaaaacaaatcacagagtgaatttaacataatagaaacagtaaaaataatataaaataatatgacaggcttaagactaaatatatcagtaatataaatatataaatgagctgaaaatcacctaataaaaggaaaatattttcagattgactttcaagcaaaaccaattcattgctctgtagaagagacatacctaaaacaaaaggattcagaaaggataaaactagtaggatgacttaaaggcatacaaagatgctcttagcagtgttaattataagacccaaataactaccaaaatgctcttcagaagtagaatgaataaacaaagtgtggtgtattcrtacagtggaatactacgtatataatgagagtatgaatatgaattttacaaaacaacatggatgaatctcatagtaaggagtgaaagaggcatgaaacaagagtgcatcctatatgattccatttatatgaaattttaaaagaggcaggaccaatctatggtgatagtaatccgtatcatggtcacccttatggaagggtaatgactggaagggaagccaaaggggctttcagagcactagcgatgctctattttttatctgggtgctggttgcatgattttgttaactttg

SEQ ID NO: 785348 - DNA, 572 bp, Homo sapiens
ggtttccttttttaatttttaaaggaataactcttgcttatttttttaaaaaagtaaatactcgttataaaaaattcaagcaaaactgaaaagtaaaaagaagccagcaataaattgttccaaatcccatcacccaaaaaacagctcttgattcattcattcaatgtgcctttattgagtgcttactctatgtgaggcactgtggcatcggggatcagcagggaacaaagtgaagtccctaccatcatggaacttacactctagtgggaggagaaaatgataaacacctaaatagatttacaagtggcatgaagaaaaattaaaatgaggtaagagcatagagagtgtcggggcactttcagatggagtggtcacaaaggctgctgtgagcagagagctcaatgaagtgagagagctaaccacrtgactgtggggaagtgtgcttctagcgaagggaagcatatgcaaaggccctgaggtgggtgtttgcttgccatgttctatgaccagagaggccagtgtagctgggggccagtgagtaagggtgaactgggccatgtaaggttttggaa

SEQ ID NO: 785349 - DNA, 602 bp, Homo sapiens
tctatgaccagagaggccagtgtagctgggggccagtgagtaagggtgaactgggccatgtaaggttttggaaagccgttagcttttctccactgggaagccattgaaagatgatgagcagggctgcagtgtggagagtagactgcagggaagcaagggaggaggcagcaagaccagttaggagctaccacagcaattcagaacaaaatgaggctgagttgcactgttcaaaaggtggaagggataggaagggttgaattctagactcattttgaaggtagagctgataggatttgctcatgaattggattgggaatttgtaagagaagagtcaataataactctgaagatttgtggcctggcaggtgaatggtggtacygttactggggtagggaacgtgctggggtgtggtcaggatggggtgtcaagagttcaggttcaggcatgttaagttctaggtacctgttagatggctatgagggaatggtaagtcagttggaggctggagttgactgagagatctagactgtagatacagatttgggaatcaccagacatagaatggaatgggatctgataggaagcaaggagagatagaaaa

SEQ ID NO: 785350 - DNA, 621 bp, Homo sapiens
gtgtcatgaatatatttctttagataaaactttattaatcagctttctgtttagaattggctttcccataatccagttaaccaaaggtagttgagtaatttgaaatattccccagctggagtagaatcacatttggggcttgcttcaatcagtgcacctctgtcttgcttttgcttttcagagagaccctaggtcaaycatagcctttgaaggcatgagctgaacggaaaccagatgaactctattgaattttaaatttgccacatttcctagtctagtattaaacttttcttctctagttgagcaagttaaccaaagaagtatatatatattttttctcttatagattatgctcacctaagaacttgaggttacaacacacacacacacacacacacacacccaaaaaaccaaatcgcaaaacaaattattccatactcattccattggttcttttgatggccttctgtcagtgttaatggttggtgtgaaagatttttggaaacgttttccaggagggagtaatagcatttcctgaagcaccttttatcttggtttgtggcaaatgattctttcaatgccctcaggtcacttataccctaagaccctgcatgagtttat

SEQ ID NO: 785351 - DNA, 651 bp, Homo sapiens
tttgggaattgactgtttttcttttctatcactacaaagggatacacaaaagaatgaatgttattctatttaattattcacaattttgctggagaatcttaggctggttacttcagtctactattccctcccaattgcctttcctttaaaaaacaaaaagacacaaatatatcctctaattggayatctgtcacaaattggacggttgattctgattctgtggttgaacaagtgagtggtgtctccttctttccttcctctccctctataagcatctctcgcagagctgtgaggtcaatcagatcagaaaaatgtccccaaagggatagctcttcatcagtcaggggcacacccatagcaggggctccgagtcagcccagagcagggccctggctctacctccactcagtgtatgacagtgggcagacgacatcacttgtctctgcctcacttgcgtcatctataaaacgggcatctacctcacttagttttgtggagatgaaattacataaagtatggaaagcattcagtactacgctcaatacttggaatctctcaattttcttttcttccctaaattcagggtaacactgtaagggaaggtcaaatgagggagagcaactgatttcaaagactgggatcttgggggat

SEQ ID NO: 785352 - DNA, 647 bp, Homo sapiens
cctacaaagcctaaaatatttactatctggccttttgcaaaagatgtttagtgacccctgctataagtagtcctgtcttttagattcaaattgataatccaaaaaggcccaacgtcacaaaacactgacagtcatcagagaaaaatttgatagtggtggtagtatattagggcctctgctaatctgtatggtgcgtttgtgaaaattggataaagatgctcctaagacagttgttgtaatctattgatttttaacaaaatcaataaaacttactgccatccaccagaaaattgctcaataaatatacaaaccatcaacatctacaatatgaattgcactccctgtgcaaccacatgtaggagtttcactactgtagtgtgatctggtaaaaagaacactaatttttttagacttaagttctgcttccggctctgaaactgacctgctgatamcttgagcaaactacataatgtgcctaggcctcagtttttcttacctttaaaatggaggtagcttctagttgttgttttgggaaataacaggcataaaattgctttgtaaagtctatcagctctgcaaaagaaatctccaatcatgttttggaaaatttctgtagttctggaactataataggtcctgaagagaat

SEQ ID NO: 785353 - DNA, 528 bp, Homo sapiens
ttagtctattctcacactgctataaagaaatacctggctgggtgcggtggctcacgcctgtaatgccagcactttgggaggccaaggcgggcggatcacgaggtcaggagatcaagaccatcctcgctaacacagtgaaaccccgtctctactaaaaatacaaaaaaaaattagccgggcgtggtggcacgcgcctgtaatcccagctactcgggaggctgaggcgggagaatggcgtgaacctgggaggcggagcttgcagtgagccgagatcgtgccactgcactccagcctgggtgacagagtgagactctgtctcaaaaaaaaaaaaaaaaaaaaaaaaaaaamcctgagactgggtaatttataaagaaaggaggcctaattggttcactgttctataggctgtgcaggaagcatagtggcttctggggaggcctcaggaaacttacaatcatggcagaaggggatgtgagatgtcttacatggtggagcaggagcaagagagagagcagggaggtgccacac

SEQ ID NO: 785354 - DNA, 605 bp, Homo sapiens
ggcctgttttttcattttttttttttttgcaaacctatacttcttgtttggttttctgtattattgatatttgatattataaatataaatattatagatatttgcagatcacatgtttccagttgcccagccacaaatatcagtggtggtatatgcactatctactacactcatttacgacatacatttacataacagaaaggctactgtttttgtaatttaaatacacagggctattttattctatgggagcaagcagaatttaatttaaactggcgttttctctgtagaccttggagtagaattttacccaggaatgcactattttattattttrtagtgaataatatctgtgacaagcatgcattatattactacttgctgagccatgaatactaccaagtaaatatctcaaatttataaattttaatgcaatttttatttttgaattgatcttgtgtctttgatggaatctacctaacaggcttaaagtgcacgtaactgagcagttttctttcctgtaatgatgcaaagtatatgaatagtcagtaacctgactcagcagagagacaagagttcatagccaagagatttgtgctttgagc

SEQ ID NO: 785355 - DNA, 498 bp, Homo sapiens
cctctaggaacttcaagttccttgatttcgctgastgcaaagctcagtatgggagatccaacttctcatttagtgacagcctcttatcagttattattcttttgttatggtttgacggtgagttggggaaaacaacaattggatactcaatagcacatttacaaaatgctagaattaaagattctaaaagtccgtggggaaaattccaggagaatttgtctaactatatgtttttctaaaacacacatactggtttacactaattagcccacagaatacctatttctattgttttcatcttgcgagttggaaagtttaggaaaaaactttttttgctttcaccctcttctgttcccttagccccacaattaagcttaaattacatttttctatactcatcatattaaaatttatatccaaatatatatagtagtctctaataattttgtttaattaatagactttgtttttggagcagttttaggtttacagagaagt

SEQ ID NO: 785356 - DNA, 498 bp, Homo sapiens
cctctaggaacttcaagttccttgatttcgctgagtgcaaagctcagtatgggagatccaacttctcatttagtgacagcctcttatcagttattattcttttgttatggtttgacggtgagwtggggaaaacaacaattggatactcaatagcacatttacaaaatgctagaattaaagattctaaaagtccgtggggaaaattccaggagaatttgtctaactatatgtttttctaaaacacacatactggtttacactaattagcccacagaatacctatttctattgttttcatcttgcgagttggaaagtttaggaaaaaactttttttgctttcaccctcttctgttcccttagccccacaattaagcttaaattacatttttctatactcatcatattaaaatttatatccaaatatatatagtagtctctaataattttgtttaattaatagactttgtttttggagcagttttaggtttacagagaagt

SEQ ID NO: 785357 - DNA, 617 bp, Homo sapiens
gccacgacacctggctaacttttttttgtatttttagtaaagacagtttcaccatattggccaggctgatctcgaactcctgatctcaagtgatccggtggccttgggctcccaaagtgctgagattacaggcgtgagctaccacacccagcctttttttctccccccacattggaggaagagtttaaccttgaagggcttgtagagtcagataactgtcacttgttatttaaagttatagatagtagrcaaaagctttcaagccactgaaaaagaataatgcttgttttctttgatggattgttaggtagcatatataatgtgctgtatttaacacctgtcctttttctttccacccatccaaggcgtcaaaggccatcttaaatcccggctcctcaggaaatcatccccaaacacaccagctggaattgatatttttcttttccaaattcctatgtaaattcatgtcatttatttggaattgcttatagagagtttcagagcgttaaagaactggaaaggacctaggattcaatacaattctctcatctcgcagacgaagaaaatgaagtgcagaggagctacgcaatctacgtaagtcacatagacacacattg

SEQ ID NO: 785358 - DNA, 626 bp, Homo sapiens
cagaagtaaaatatattgtgagcatatatcatcagcatctttctgctcttaaatagtaagtgatatttctgacttgaattcaataaccttcaaggtatccatgagaattaagacagaaagaggttgaggcaatggatataagccayacagcaaactcctcatgggagcatgaactcagctcagtttttctgacacccagccgcctcctctcatggctatgtagtgagtgacattgtatgcaagagtgaggcattggcttcaaggaggaccatgtgcattaaatattagctgtgtggcctttgccacagtctccctgggcttcagtctcaccatctgcaaatgataacagtacctatcttggagggttattatgagaatttagatgaggtaacacgtgtaatgttcttaccctagtgcctggcaggtaattaaggatgccacttaacaaatgacagtgattatcagatgagacatccatctgcttagctgacatctccacttgaacctcaatcttagcctgtccaaaagtgaactcttcattttctccatcaaatgtgttcccccagtcttccttctttcaataagcagcaactccattctttcttttgttcaggtcagaaattgtg

SEQ ID NO: 785359 - DNA, 626 bp, Homo sapiens
cagaagtaaaatatattgtgagcatatatcatcagcatctttctgctcttaaatagtaagtgatatttctgacttgaattcaataaccttcaaggtatccatgagaattaagacagaaagaggttgaggcaatggatataagccatacagcaaactcctcatgggagcaygaactcagctcagtttttctgacacccagccgcctcctctcatggctatgtagtgagtgacattgtatgcaagagtgaggcattggcttcaaggaggaccatgtgcattaaatattagctgtgtggcctttgccacagtctccctgggcttcagtctcaccatctgcaaatgataacagtacctatcttggagggttattatgagaatttagatgaggtaacacgtgtaatgttcttaccctagtgcctggcaggtaattaaggatgccacttaacaaatgacagtgattatcagatgagacatccatctgcttagctgacatctccacttgaacctcaatcttagcctgtccaaaagtgaactcttcattttctccatcaaatgtgttcccccagtcttccttctttcaataagcagcaactccattctttcttttgttcaggtcagaaattgtg

SEQ ID NO: 785360 - DNA, 601 bp, Homo sapiens
cttgccctatagtcctttttacccaaatatgtttagtaatagaggttttttattggagtataataggaatattcactatgtggtttattcagaaatttattcttttattttagtacaaatattccaaaaaaaaaccccaaaaaacytgagcagtattttattagttaaagcagagccatcagttacgaaaaggcagtttagaatagtggttaagggtggggtcaggcgtggtggctcacacctgtaatcccagcactttgggaggctgaagctggtggatcacctgaggccagacattcgagaccagcctggccaacatggtgaaaccctgtctctactgaaactacaaaaattagccaggtgtggtggcaggtgcctgtagtcctagctacttgggaaactgaggcaggagaatcgcttgaacccaggaagcagaggttgcagtgagccaagatcacaccattgcactttggcttgggggatacagcgagactccgtctcaaaaaaaaaaaaaaaaaaagaatagtgcttaagagaatggatttgcccacactgttattttgaggtgactcaggttaagtattaagatgctttaaacctt

SEQ ID NO: 785361 - DNA, 491 bp, Homo sapiens
gattttttgttcttatgaagatgctttttttgggtggatagttgttcaatttggtgttcctgaaggggaagtgattgctggagccttctattaagccatcttgctctgtctccttaccctaaagtgttttgattacaagtgtgagccaccgttcctggctgagcgtaggatttgaagatatttcaggatgagcacagtggctcacgcctgtaatcccagcmctttgtatggttgaggcaggttgattgcttgagcccaggagttcgagacctgcctgggcaacacagtgagaccctgtatataaaaaaataaaaattacaaaaattacctgcatgcacctgatggtcccagctacttgggaggctgaaataggagaatgtcttgaacgtgggaggtcaaggttgcagtgagccatgattgcatcactgtgccactgcactatggcctgggtgatagaaagacccagtctcaaaaaaaaaaaaaaaagatat

SEQ ID NO: 785362 - DNA, 588 bp, Homo sapiens
tagtatatgcttcataccactggagaatctatgtgggaagacagtagtgtctctttgcctttctcagcctcttttattttgaagtcctccagctctgagtcatagaggttggaggttttagatcagaatgagcaattacccctcttcccaccaaatgcggaggtgttagctaaccctttgcattcagacataaagcagctaaatgacatgtattggaactagttcgtagtgcrtcctgtttctctttgggctttcccttcatgcttgtgttttggcctaaccagagttcacttccagatttggttgacctgtatgttgtctgctactaggtagagtgaatatggctgacataattactctaccagggcagcagcagatttacttttggcttgaagaagctatgacaggcatcgttgtgttgcagcctgcaaaacggtgccccatcccttagaacctgaatacgagcaaacatcactggagaaaagttacatgtttaaaatgtaaataaactagcttttatttttagctttttactgcgaaaaaacaagtgtttggaatgattctttaaaaatgtgtggaggatgggtg

SEQ ID NO: 785363 - DNA, 635 bp, Homo sapiens
tgatggcaccattgcacctcaacctgggtgacacagtgagcccctgtctcttgaaaaaaacaaaacaaaacaaaaaaaaaaaaacaaaaaacctcaaagcttagatcaaaggaaaaattcctgagggaagccaggaaaagaaatatcagcatggccgggcgcaatggctcacgyctgtaatcctagcactttgggaggcagaggtgggtggatcacttgaggccaggagttcgagaccaacctggccagcatagcaaaaccccatctctactaaaaatacaagaaattagcttggcatggtggcacacacctgtggtcccagcgaggctgaagcatgagaatcacttgaaccagggaggcagaggctgcagtgagccgaaatcgtgcgactgcactccagcctgggcaacagagcaagactccatctcaaaaaaaagaaaaagaaatatccaaacgtatgacaaagtcactataaacaaatcaatatggaatctgcagaggaagatagtatgaaaatgagatgagtttaaagaaatagtctggggcagagaaagaccatgtgcaaaagacacacctacaacacacaaagggtgaaaagggaatataatgaatgagtactgaagtgagccagaaat

SEQ ID NO: 785364 - DNA, 625 bp, Homo sapiens
agcctccacccctgatctccaggtaggggagaaatgctggaggttaccttaatcatcaaaggccaaatgacttaatcaatcatgcttacataatgaagtctacataaacatcctaaatgatggggttcacagaacttctgggttggtgagtgaattcacatgtcaggaagatggtatatctggcaagagcatagaagatctgagccccttcttacacataccttgccctatgcatatcttccatctgtctgaccattcctgagttgtgtcctttaaactaaactggtaaacataaacaaatgtttccctgagttctgtgagctacttttgcaaattatcaaacctgaggygaggatcatgatagatggtctgtcagaagtgcaggtgacaacctgggacttgtgactgtcatctgaaatggtggcagtcttggggattgagcccttaaccagggaggtctgacaccaggtagacagtgtcagaattgaattaaattgtaggatacccagttgttggaatagttggagaattactacatacatttggtgtcagaagtattctgtgagtgttatagggaaatagtttcccttttataggtttacatgtagagaaaaagtgcacagat

SEQ ID NO: 785365 - DNA, 636 bp, Homo sapiens
ttgctgcaccatgaccataaggtggacgcctctcatctggaaaccagggtagtaacatgaaaggctaagattatctagatgttcctgggacagaacgtggagaacgtggcccatctgagctgtagccctttccaggggcgtgagctcagcatctgcagaagacgcctgtgtcagaagggaccagtggcttttcccacccaacgtccacggggctccaggcccagtggcccctgcaatgcccctgggcaggcacctgctygagcccaggaacattccaggaagccccacaacggtggtcctgccaacagaccccagccagtcatcctcccccacaggccgccttttcctgagggaagcttccagaagccagggtaggctgcaggcccagaaagcccacgaaatgccaggcaggcaccaaggtgttcctgtggcactgtgtgagcacccatcggcggcgtgcacggccctctatgagctcacgcgtgtcagcgtctgcaaagcccatcggcggcgtgcacggccctccatgagctcacgtgtgtcagcgtctgcaaagcccatcggcggcgtgcacggccctccatgagctcacgcgtgtcagcgtctgcagagccctccacccgcacatggggtccc

SEQ ID NO: 785366 - DNA, 628 bp, Homo sapiens
acaaagaagaaaattaatccctaggcaacttgtctgaaccatgtaaagtccatacttggcccagagccctagaccaattgacaactttgaagcttcagataaaagattaacaaatcccgaagggataactgggcaagaatggcgtcmgtgtctctgttaggacccacagccagtaagaagagcgtaagattcaagtcggacgggtcacggcactgcaggtcacccaccacatcaccaaggaacactttaccctgagtttccagtttctccaacctggagtaaaaaaacccaccagccttttagaatcgttgtgaggagcagagaccgtttacaccaagcgccaactcagtgcctggcacacagtcagcaatgatgtttatcgatccagctttctcacaatgctttggaggcagaataatttttcgagaatttccatgagtcttccaaagttctgagtcctaatgtgaatttgcaaaaatgaaattaattcctggcacctcctccctgccctggggcccagcaagcctccttctcaaagccctcagcagccccaggaaaccctggggcgtctgggcaccttctcactgcaccccagtgagttcaggcagaggatgacgcaggctgcaga

SEQ ID NO: 785367 - DNA, 628 bp, Homo sapiens
acaaagaagaaaattaatccctaggcaacttgtctgaaccatgtaaagtccatacttggcccagagccctagaccaattgacaactttgaagcttcagataaaagattaacaaatcccgaagggataactgggcaagaatggcgtcagtgtctctgttaggacccacagccagtaagaagagcgtaagattcaagtcggacgggtcacggcactgcaggtcayccaccacatcaccaaggaacactttaccctgagtttccagtttctccaacctggagtaaaaaaacccaccagccttttagaatcgttgtgaggagcagagaccgtttacaccaagcgccaactcagtgcctggcacacagtcagcaatgatgtttatcgatccagctttctcacaatgctttggaggcagaataatttttcgagaatttccatgagtcttccaaagttctgagtcctaatgtgaatttgcaaaaatgaaattaattcctggcacctcctccctgccctggggcccagcaagcctccttctcaaagccctcagcagccccaggaaaccctggggcgtctgggcaccttctcactgcaccccagtgagttcaggcagaggatgacgcaggctgcaga

SEQ ID NO: 785368 - DNA, 628 bp, Homo sapiens
acaaagaagaaaattaatccctaggcaacttgtctgaaccatgtaaagtccatacttggcccagagccctagaccaattgacaactttgaagcttcagataaaagattaacaaatcccgaagggataactgggcaagaatggcgtcagtgtctctgttaggacccacagccagtaagaagagcgtaagattcaagtcggacgggtcacggcactgcaggtcacccaccacatcaccaaggaacactttaccctgagtttccagtttctccaayctggagtaaaaaaacccaccagccttttagaatcgttgtgaggagcagagaccgtttacaccaagcgccaactcagtgcctggcacacagtcagcaatgatgtttatcgatccagctttctcacaatgctttggaggcagaataatttttcgagaatttccatgagtcttccaaagttctgagtcctaatgtgaatttgcaaaaatgaaattaattcctggcacctcctccctgccctggggcccagcaagcctccttctcaaagccctcagcagccccaggaaaccctggggcgtctgggcaccttctcactgcaccccagtgagttcaggcagaggatgacgcaggctgcaga

SEQ ID NO: 785369 - DNA, 607 bp, Homo sapiens
actcccggaggtgttcggaggccaccgcagcccacaccacgcccaggtggagccaccacctgtgcctctgcagccactgatctgggagctgcccccagaggcagctgtgcagatagcagatactgctcctggttgaggaccaaaatatgaataaacgggctcttcaaggacagcgtgacaatattaaataaatgttgcataatgcaaacactgcacctaggtaaagccacttacaaaattgatttattttgatctgttttaaatttaaaggtttgtaatgtggaattaccgtgctgggtaattgcccacacaycacattctactgagccgaatgacattccatgtatacttcagagctgtatctaatttcttaaacacaaccttttttttcaaatttatgtcactccataaaaagcaactcttttcacagtgacaattgtaagtaaaaaatatgaaaatattttccgtaccttttcccaaaatttcactaaatcttgaaaacagaccttaagaatatttttcccgcacttacatatctctctcctctgccacctctgctgcaggtcttttggacttgaaggccttggttgtattgggattaataaaa

SEQ ID NO: 785370 - DNA, 607 bp, Homo sapiens
actcccggaggtgttcggaggccaccgcagcccacaccacgcccaggtggagccaccacctgtgcctctgcagccactgatctgggagctgcccccagaggcagctgtgcagatagcagatactgctcctggttgaggaccaaaatatgaataaacgggctcttcaaggacagcgtgacaatattaaataaatgttgcataatgcaaacactgcacctaggtaaagccacttacaaaattgatttattttgatctgttttaaatttaaaggtttgtaatgtggaattaccgtgctgggtaattgcccacacaccacattctactgagccgaatgacattccatgtatacttcagagctgtatctaatttcttaaacacaaccttttttttcaaatttatgtcactccataaaaagcaactcttttcacagtgacaattgtaagtamaaaatatgaaaatattttccgtaccttttcccaaaatttcactaaatcttgaaaacagaccttaagaatatttttcccgcacttacatatctctctcctctgccacctctgctgcaggtcttttggacttgaaggccttggttgtattgggattaataaaa

SEQ ID NO: 785371 - DNA, 592 bp, Homo sapiens
gcgtccagcacactcacggccagggccgcacgcaggcctgtgttgtccgcttcctgggacggtcccctgcgtccagcacactcacggccagggccgcacgcaggcctgtgttgtccgcttcctgggacggtcccctgcgtccagcacactcacggccagggccgcacrcagggctgtgttgtccgcttcctgggacggtcccctgcgtccagcacactcacggccagggccgcacgcagggctgtgttgtccgcttcctgggacggtcccctgcgtccagcacactcaaggccagggccgcacgcaggcctgtgttgtctgcttcctgggacggtcctgtctgggaaacccggacagtcgttcctgtctcttcagtcttggttttctgttagtatgacaccaatctcctacgttgagttgcctcctgtaattccctgcaggatctgtaatcacatggcgtctggtttgggtgccggccacacgtccgctcacacgtgctgtctccgactccccccagccccatgtgcagctccctcatggcatctttttgggagggccattttccacgtcatttataccatctgggtgcttt

SEQ ID NO: 785372 - DNA, 568 bp, Homo sapiens
agcaaggccacaagcatctcagggagggagggctggggatccagaggaggcttccaggaagaggcagtcacactgcctgaaggtgacagggtgaactgagggcagggctgggaggtgcggttggacccgggaggtgggaacacggcagccaatcagggtctggggtgttccacaaggcctcccacccagaacagggtgactgtggcttggtgaccaggcccagcctacatggggccagggctcagtgcagtggggcgctggctcctgggccctccagccccaacatgtgcctcatcatgcagccctggctgttgttctgagagatctccctcaaggaggcaggtgtcaggggcctctcrgaagggcaggaaactgcttcttggcccatgcctgcgtggtccctgcagcagatcagtcacctggagaaggggggaggactgcagcactcagagctcctgcagggccggggagagtgggcggctcaggccccctgcaggagagggttccagggggaggctgtgaggctcagcaggacagggaggggcctgcaggctgcagagccgtcagc

SEQ ID NO: 785373 - DNA, 568 bp, Homo sapiens
agcaaggccacaagcatctcagggagggagggctggggatccagaggaggcttccaggaagaggcagtcacactgcctgaaggtgacagggtgaactgagggcagggctgggaggtgcggttggacccgggaggtgggaacacggcagccaatcagggtctggggtgttccacaaggcctcccacccagaacagggtgactgtggcttggtgaccaggcccagcctacatggggccagggctcagtgcagtggggcgctggctcctgggccctccagccccaacatgtgcctcatcatgcagccctggctgttgttctgagagatctccctcaaggaggcaggtgtcaggggcctctcgraagggcaggaaactgcttcttggcccatgcctgcgtggtccctgcagcagatcagtcacctggagaaggggggaggactgcagcactcagagctcctgcagggccggggagagtgggcggctcaggccccctgcaggagagggttccagggggaggctgtgaggctcagcaggacagggaggggcctgcaggctgcagagccgtcagc

SEQ ID NO: 785374 - DNA, 620 bp, Homo sapiens
cggagaccgtcctgtgtcagagagcagtggacatgggcatgacgtggacgtggatgtcagcagagcagcctccctcccatggccgggtccttcagctggagccctaagctgtgcagcccagccacagcccgtgaccaccagggatgccaagaccctgagtgagcacctggagcccataggaggactgggcatgagaactgctgtagagctcttccccgagacacaacgaccccaggagacgccaggcaggcccccggcctcacgttcaaagcccactgctggaggyggcaagtggaggctgcgtgcatgtggaattcccggcaggactcttagctcacatctcctcacgagggggccgaagtcagcctggaagaggacgtcctgcacacagctggcctgtgccttccaggtgtcaggggcagcccaggagtcaggagaggctgaggaaccttccagcttgaggagccggacaagacgtggcagctgggattgggatgcagactgtcctgcagggagaggcgctgctgggaccgggtcctacgggggagggcctggggaggggccattcatcatggcccggtctcaatggcatcctgcttctggaggggatgcccttgtct

SEQ ID NO: 785375 - DNA, 612 bp, Homo sapiens
ttccacagccctgaattcctctgtgctctgcccgttcatccctcccctcctgtcagtccctggtccacggatcttattgtctcctagtttcgccttttccagaatatcatgtggttgaaattatgcagccttctcaaactggcttctctcatttaggaatatccacctgaggttcctccgtgttttttcatggcttgatggctcatttcttttcagcactgagcactattccagtgtgtggctgtgccacagtttattttatccactcacctactgaagcacatcgtggctgcttgcaagttttggcaattatgaagaaagctggtataaacatctgtgcgcaggatttcgtgtggacataaattttcagcccctttgggtaaataccaaggagcaygattgctggaccgtgtggtaagagcacgtttagttttgtaagaaaccgccagactgtcttccagcagccgcgccatgttgccttcccagcagccacggctgagggtcctgtttcttcacatcctcgccagcgttcggtgctgtccgtgttctgggttttggccgctctagtaggtgtgtgcatcttgttttaatttgcatctccctggtgacgga

SEQ ID NO: 785376 - DNA, 521 bp, Homo sapiens
cttaagcatgattatgttttacaaatgtctgtatttagctagttcttgtttttcttttgacacagctgtgaggtcactagctatgcaaggccacaagttatgctaagtcaacagttacgctatagattacgtgacctgtcactgtacgattaactgctttgttttactcttgtaagtccgcttataaaaaccctgctcagtctttgttcaatgctcagctttttggatgtgagtcctctgagccggtacgtacctaaaataaacaacaatcctcctgtactccatagtggtctctccgttcctcagtttaccrcaacattaataatggccattctggctggaataaggtggtatctcattgtggttttaatttgcatttccctaatgattagtgatgtcaagcatttttcatgtgtttcttggccatttgtttatcttcttttgagaaatgtctattcgtgtcatttgcccactttttaatgagattgtttttcttttcttgctgatttgagttccttgca

SEQ ID NO: 785377 - DNA, 551 bp, Homo sapiens
accagctgggtgaggagtagccattagggggctggctcttgtgctctgttcaagttgcatttgtttttgtcttgataatagcgaggagaacagggtgaaatggcatggagggagggtgtcccttataaaggccagggaagggctgagygcctgtgtaaagagagggcttccttgcctgccttttgactccagagggaaagagatgtgccgtgcctcttgctttagtgtaaggacagaacttccctgttcactagtcagtggagctactttacccaaaaaggtgggttctgtttaagcaggcacagcctgtgggcaatcattttcttgccaagttttgacctctggtgcttagtcacacacaagcagcatgggtgtttttagaattaggtgctgtgtttggcagcaggatcacctctgcattctgcttccctgggctcctcctgaccacgtgtgagtctgcagagcacagccagtgggatccagggcatccaatccattgcctgcaccctgaagcctgtggaggcagaacccaggcttctccctgattcgat

SEQ ID NO: 785378 - DNA, 591 bp, Homo sapiens
agggttttctacatatatgatattgattgcaagtagagaaaacttgacttcttcctttctaatttgagtggcttttcttttttcccacttttttttttttttttttttttttttgcctaattgtcctagatagagcttccagtactaatgaatcggctaaattatgtccgccttcccacattcatrtgttaaagccctaacacccaagtacttcagaacgtgactatatttggaggcagagtctacagaagtaattaagtgaaaataagatcactgtggtggactctagtgtgactgatgtccttataaattgagaagatttgaacacagacacatacagggggaagacaatgtgaagttacagggagaagatggttatctacaagctaagactagtggcgtgaaacacattttttcctccttaccctcagaaaaatatcagtcctgtcaacaacacattatttaaggcatctagctaccagaattgtgagaaaataaatttctgttgtttaaagcacctattctgtggtactttgttacagttgcccaagtaaactaatacaagtgacaagagaatacatctttgtcttg

SEQ ID NO: 785379 - DNA, 346 bp, Homo sapiens
caagagccaaaatctctatttccgataggatcagtgtttcagtatttgctacttcattgttcacagcaactttgtagaacatcattactgcaaataatgagaacaactgtatttcaaagaaagaaaaaaagattatgccraaagatgtgaagaaagctataatgacaatgtctcatcaaatgcagagtatcactaaagaaatagaaattacaagaaaaaataaccaaatagatattctagaggtgacaagaatactaactgaaataataattttataatgtatatttaccctggcagaagaatcagtgaacacgaagacagatcagttgatattatgcagtcttaa

SEQ ID NO: 785380 - DNA, 609 bp, Homo sapiens
tgggaattccacttcagaatatggagactgttcagttactctcaacacaaagttatcatttttgggctggataattcaagataatctaccagtctttaccagctttttatgaatgaagattcacatccatttcccacaataggaagtaatgttgaagagacagtggtttagtaatacatatttcctaatgtgagatactggtgtccaagaacatcttcatttttcctggacacttactatgctaactggatttgtaatagttgtcatggacggtacagaccgagagagaaaggatttctgtaactagagaagaactttataaaaagttagcacttgtgcacccaaggaaagttggaatgctgatttttgcwaataaacaaggtgctaaataatacatgcctgactgtacctgaaatctctcaagttttcaaactaacatctgttagagatgaccaagcataaacaggaatattgtgttgttactgagagggattaggctaacttaaatgtataatgttacaatttaagattagcttatttctacagattccttctcattgcctgtatgtaaagaaatgctggactttacctgaaagcagcaaacattaa

SEQ ID NO: 785381 - DNA, 405 bp, Homo sapiens
caattgtgattaaaattatcaagtgatcttttcagtgctaattgacaactgctgtgtgaaagtagtctctctagagaataatactctatgaataatatcaaataatttatccagagtatttttaggcattaaattatgtcaaatattaaaaaataaatttgagattaaaagtaacgaatatcggccgggcgcrgtggctcacgcctgtaatgccagcactttgggaggccgaggcgggcggatcacgaggtcaggagatccagaccatcctggctaacacggtgaaaccccgtctctactaaaaatacaaaaaattagccgggcgtggtggcaggagcctgtagtcccagctactcgggaggctgaggcaggaggatggtgtgaacctgggaggcggagcttgca

SEQ ID NO: 785382 - DNA, 611 bp, Homo sapiens
catctgtcttgtttcttggctccttctggggaaagccagctgccacactgtgagctgcctagggagacgcacatgtggcaaggaaccagtaggtccccagctaacaacctttgagaaactgaatcctgccagcagctgcacgaaggagctcaacactgggttttccttcagcagagctttcggatgtgacacaagtccctgacggacaccttgattgctccttgtaagaggcagaggcatcaggggagccacacctggatttctggcccgcagaaactgtgaaataataaacgttgattgttttaagctgctaaattatagggtgattcgttacacagctattgatagctaatatacayacacatggattttcatgtaaaacttgcatataatttcaagagacgttgagacatccctgaagcccattaatggacaatctgtgcatctcattaactcatttatgcctagtgttccattagtggaacgctaagcgtgtgggagtcatttatatcctactgctcaaggtcattgccgaggtctgatttttcacacaaaaaatttgcaacctccagcataaatgggttaattacccctgctcgaggaatacctta

SEQ ID NO: 785383 - DNA, 618 bp, Homo sapiens
gtgacttttttacagtttttttttttttttaatgatttgaaagttaatttagttaaaattacgtgttgcaatgcatatggccacttacctaggcacaagtaaatagcaaagtactgagagcaaacacagggttgaaagtaaataatcccttccaaccttaccatgttctggaacactggaarattcccactttgctcaggaaacctcatctatcttaagtattgcagattgagtgaaaactccaggctaatctggatataagacattggttaagcttaatttatttttaaaataaaaacatataatgacagccctatggtctaaattcctgcaggcttctactctgttgaatcatcgtaactgtataccttgtatatgtttctccatgtgacttaggcttctggtgaaccatgtgaaagaaaggaacgaaagtatttaggtaacgtaattttccctagaaaaatttgaggtgtaactcattatacctgaaaaaattctcccggagttcctttgggtatgtctaactaaatgctgctaagaagatgtgtttcacatgtataaatattcattatttctatatattagggttgaagaactcaaacatttacaggaaattaa

SEQ ID NO: 785384 - DNA, 638 bp, Homo sapiens
gatctctacccaaagggtaaggagtttgggggacatggtgagtcctgtgaaataggccagcagagtttgcacagagtaggggcccggagcccactgcttgaggttgtgaggggcagagaaggtctctagaccagagacaatgggggtgcactgcatgcatgcacagggaggtaagsttgcacagaaccccgagtctgcagctcagtaactaaggcctcgtacgaaaacggtggcttcattcattccaaatccccttgtgtggtctcttccttgccgtgactgccacttgctgttgctgccttgcctgtttcttgttcccaacctcatgacttttgcttccttgtgctttctaggccttatggcttctgctctctgtctcttcttttgaagtccttctgcctacttgctgctgtcctggctgcttcagctgctgcagactgtgacaggctctcccacaatccagcttctgagagaggatctgattggacttgaatggttgctgcacagtttagagtttccctccgaggcagagttttcttgtcccgacttgtcagaggccactggcccgctcttggttgattcagttgctgtacctcaacattggatgagttgagggaggcaagacccctgttagccga

SEQ ID NO: 785385 - DNA, 638 bp, Homo sapiens
gatctctacccaaagggtaaggagtttgggggacatggtgagtcctgtgaaataggccagcagagtttgcacagagtaggggcccggagcccactgcttgaggttgtgaggggcagagaaggtctctagaccagagacaatgggggtgcactgcatgcatgcacagggaggtaaggwtgcacagaaccccgagtctgcagctcagtaactaaggcctcgtacgaaaacggtggcttcattcattccaaatccccttgtgtggtctcttccttgccgtgactgccacttgctgttgctgccttgcctgtttcttgttcccaacctcatgacttttgcttccttgtgctttctaggccttatggcttctgctctctgtctcttcttttgaagtccttctgcctacttgctgctgtcctggctgcttcagctgctgcagactgtgacaggctctcccacaatccagcttctgagagaggatctgattggacttgaatggttgctgcacagtttagagtttccctccgaggcagagttttcttgtcccgacttgtcagaggccactggcccgctcttggttgattcagttgctgtacctcaacattggatgagttgagggaggcaagacccctgttagccga

SEQ ID NO: 785386 - DNA, 617 bp, Homo sapiens
cataattcataaaatcagatagtgttagcccttcaagtttattatattttgttcaaaatggtttgtggcttttttaggtcctttgtatttccgtatgagttttagactgagcttatcaactttaacagcaacaaaaaagtcttctgggattttgaatgggattatgttgaccctatagatcaatttggggtaaactggcatcttaacaatattgagttttacaatccatgtacatggtctgtctatttattttggtctttaatttctctcagcaatgttttgttcttttcartacatcagtcttacacatattttgccagatgcattcctaatgttttatacttcttcaagatatggggatatttatttttcatttcagtatctaaatgttcttgccaatattgagaaatataaatgatttctgtatcttgatcttgtattctgaaactctgctaaacttccttatcagttctttttggtagaatccatcacattttctgcatgtatgatcatgtcacttgtgataaattcagttttactttgcctggtgttcaatatactgacaacacttatttaatatgcttttgtccagtgttttggttgtcttaggcatgagt

SEQ ID NO: 785387 - DNA, 583 bp, Homo sapiens
ttcttagatgatttctaaatgcaatagtataaatgttagctttctataaattcaagtcatcatgtaataaagtggtaattttctaatttaccaagtagcttgggcacctttttgctttattaaagctaatcgttgtgctttccaggataaggacaatttggaggttactttccctcctagttacataaattaagatttaaaaaactcttaaagakagcttttaatatcaaatttaaaagtataaacactcaaattattactattatacacagctattcaaaacgcagaaataatgagtacctctgaaatagctaagcattgtatagctcattattacaagcctacaggaaaagctcaatattagataccttaaattgtttacaagaaatccttgatgttaagatccgctaatgggtcctttgctggaggtttcttgggactctgactggcaggtgtagggcttggagaaagctaatgggaaaaagccagccccaaagagcaggaatagaaagcagagagagaatgagacatggggggaagagggggcagggggagagagggagagggggagagagagagagag

SEQ ID NO: 785388 - DNA, 583 bp, Homo sapiens
gtataccattcaaccaatcttcccttggtgagaaagaaaaaaatagggtaactcccacattacataaatgcctaagaaaaaacacagccaacattccccttcataaataaacaatacatttttctaaaaagagaaaacattataaaagaaatgaaactaaggataaatgtttttaatggcaaggamtttgatttttcaaattatttaaatgcactatgattatgtttgaaggttctcttagtagatgctggctcaggagttgactcacttaaaatacaactctgtaaggaaagcaccctcggcccctagggaatagggttatatgtcacttctgaccttctttaccaagataagctccaaagaacaccctatcccagcatcagtcaattgaagggaggaggtaaggtattaaaggatatttatttatgaaaagctaaaagagaggtccatggcaactaagtacacagattaaattacaaataaatctttaaccaccatttattaaacattacaactaatgtggcaatatatcaagaaatttagattttaatttaaaatgctacaagctaatattgcaattagg

SEQ ID NO: 785389 - DNA, 592 bp, Homo sapiens
agcccaaatctccttaagctgataagcaacttcagcaaactctcaggatacaaaatcaatgtgcaaaaatcacaagcattcctatacactaataacagagagccatatcatgagcaaactcccattcacaattgctacaaagaaaacaaaatacctaggaatacaacttacaagggatgtgaagaayctcttcaaggagaactacaaaccactgctcaaggaaataagagaggacagaaacaaatggaaaaacattccatactcatggatacaaagaatcagtatcatgaacatggccatactgcccaaagtaatttatagattcaatgctatccccatcaagctaccatggactttcttcacagaattcagaaaaaactgctttaaatttcatatggaaccaaaaaggagaccgcatagccaagacaatcctaagcaaaaagaacaaagatggaggcatcacactgtctgacttcaaactatactacaaggctatagtaaccaaaacagcatggtactggtaacaaaacagatatatagacccatggaacagaacagaggcttcagaaataacaccacacatctacaacta

SEQ ID NO: 785390 - DNA, 592 bp, Homo sapiens
agcccaaatctccttaagctgataagcaacttcagcaaactctcaggatacaaaatcaatgtgcaaaaatcacaagcattcctatacactaataacagagagccatatcatgagcaaactcccattcacaattgctacaaagaaaacaaaatacctaggaatacaacttacaagggatgtgaagaatctcttcaaggagaactacaaaccactgctcaaggaaataagagaggacagaaacaaatggaaaaacattccatactcatggatacaaagaatcagtatcatgaacatggccatactgcccaaagtaatttatagattcaatgctatccccatcaagctaccatggactttyttcacagaattcagaaaaaactgctttaaatttcatatggaaccaaaaaggagaccgcatagccaagacaatcctaagcaaaaagaacaaagatggaggcatcacactgtctgacttcaaactatactacaaggctatagtaaccaaaacagcatggtactggtaacaaaacagatatatagacccatggaacagaacagaggcttcagaaataacaccacacatctacaacta

SEQ ID NO: 785391 - DNA, 623 bp, Homo sapiens
accactttagatgatccatttaaaaatattaatatgaacaaaagaggcatttttatgagactgactcgctgcctactgtgataagaaggcactgaaagaggcattttttaaaataaaaatattatggatccctaatactgaaatcagttcaggaaaaggtgatgtatttccattaaatggataattgtgttcaaagagacaatttaggaattcttcctcaacattgctatttttattgctctgaacttctgaaccacaatatcattagaggattaaagtgtgttacagaaatctcatcactttctgtctgcaaatattctgggagatgtagctcctacgattccgatatctaccttagaayagaaaactaagaataacttggttctatgaaagagaagagtatttagcagaaatatatcttaccagtaaaaattattttaccaagttttacttgtctgccataggagacttcagataagaatataaggcatagtaagttttctgtacttcaagcaatttaagaaatttgaatagttccatagaacttgttcaactactttaccttttctttaatacaatgagcaacttactgttactatttcccaaataaccaatatataaag

SEQ ID NO: 785392 - DNA, 519 bp, Homo sapiens
ggtgttgactggcccctaagcctctgcacagagcaccctcgggccctcctgtccaccctcaaagccctccccaggctgagggccaggtcatactaccctagagcctgggacctggccatcctctgccagattccaataggccgccctccacatggcrccacggccacttcctgctgccctggaccccgcaagcccagggacatccaagagcacccctcctgagaccccagactcagaagcagcgagaaggccaggccagccctcagccatcctagccagaccccctcagagcccccagcccccaggagagccctccacagcctgtcaataaattttttgtaggccaacacatgcagcctgcagtgtgggtgacagcaggttattccctggggtgagcacagaatgggaggtggggacagagccctggggaagcagcccctcccctcacagccatgacacccgctttgcctggcaagggcctcctagagtggggccatcctgcaggacacctgtggggag

SEQ ID NO: 785393 - DNA, 519 bp, Homo sapiens
ggtgttgactggcccctaagcctctgcacagagcaccctcgggccctcctgtccaccctcaaagccctccccaggctgagggccaggtcatactaccctagagcctgggacctggccatcctctgccagattccaataggccgccctccacatggcgccacggccacttcctgctgccctggaccccgcaagcccagggacatccaagagcacccctcctgagaccccagactcagaagcagcgagaaggccaggccagccctcagccatcctagccagaccccctcagagcccccagcccccaggagagccctccacagcctgtcaataaattttttgtaggccaacacrtgcagcctgcagtgtgggtgacagcaggttattccctggggtgagcacagaatgggaggtggggacagagccctggggaagcagcccctcccctcacagccatgacacccgctttgcctggcaagggcctcctagagtggggccatcctgcaggacacctgtggggag

SEQ ID NO: 785394 - DNA, 600 bp, Homo sapiens
agttgctcggcctcctgccgtaactggtcaagctcactcatcttccgatcttagtgctcttcaatgccaccttcaagaatgtgagatctgaaacagaaagacaagcacaatcaataaacaactgttggataatttaatgaagcaggtgagaaaagtaaattgaaagtttaaggtgggcgtggtggctcaagcctgtaatcccagcactttgggaggccgaggcgggcagatcacgaggtcaggagatcgagaccatcctggctaacacggtcaaaccccttctctactaaaaatacaaaaaaattagccaggcatggtggcaggcgcctgtagtcccagctacttgggaggctgaggcaggagaatggcrtgaacctgggaggcagagcttgcagtgagccgagatggcgccagtgcactccagcccgggcttcacagcaatactccgtctcaaaaaaaaaaaaaaggaaagtctgagaactatggtctcattacaaaccagagaacttttcttcagcattcatcagaacttatacaatggctaagtagggccaggtaaataaaatataattatgattatttattggctttgcataatat

SEQ ID NO: 785395 - DNA, 600 bp, Homo sapiens
agttgctcggcctcctgccgtaactggtcaagctcactcatcttccgatcttagtgctcttcaatgccaccttcaagaatgtgagatctgaaacagaaagacaagcacaatcaataaacaactgttggataatttaatgaagcaggtgagaaaagtaaattgaaagtttaaggtgggcgtggtggctcaagcctgtaatcccagcactttgggaggccgaggcgggcagatcacgaggtcaggagatcgagaccatcctggctaacacggtcaaaccccttctctactaaaaatacaaaaaaattagccaggcatggtggcaggcgcctgtagtcccagctacttgggaggctgaggcaggagaatggcgtgaacctgggaggcagagcttgcagtgagccgagatggcgccagtgcactccagcccgggcttcacagcaatactcygtctcaaaaaaaaaaaaaaggaaagtctgagaactatggtctcattacaaaccagagaacttttcttcagcattcatcagaacttatacaatggctaagtagggccaggtaaataaaatataattatgattatttattggctttgcataatat

SEQ ID NO: 785396 - DNA, 644 bp, Homo sapiens
gaactcctggcctcaagtgatccgtctgctttggcttcccaaagtgctaggattacaggagtgagccaccacacccagcctcaattggataagttttaacacacatatacacctatgagactatcatcataatcatgatactgaacttattcacatcctcatgccctttggaaatccctttcttctgcctggccccataccactcatctgctttttgtcacaatgagttagtttgcattttctagaagtttatataattagaagcatacagcaggtattttgtttgtttggtgtctttcacacagcacaattatttcraaattcatctgtgcttttttatgtattcattcctttttttattgcaaagtagttgaattcttttcctgtggccactctaacaaattaccacaaactaggtggcttagacagcagaaattattcttgcacatgtctagaggctagaagtccagaatccagaggtcagcaaagctggttctttctggaagctctaagggagaatctgttcccagcctctctcttggtttctggtggctgccagcaatctttggtgtttcttggcttgtagctgcatcgttagattctgcgtcatagaaatggacagtggaaaaggaaatacagagaga

SEQ ID NO: 785397 - DNA, 577 bp, Homo sapiens
gaaccataatccttgagaagattttgtcaatttctgaggttaaagtctaatttttctgctaggtatacttagctgccctgttgacttagaatgttgcaactgtattcaaagtttcaaaggacaaatatattgaaacagctgctgtgtgcagagggaaggtgagtaaagattggagaaaggtaggaggcaaggcagagcaaagtcaacacagattaaatttgtgctgactcacagctgcctcatctaagcagctctaattggcagaatgttgctaaaacatatttgttcttcaagaatatcccagaaaactggcaagtcagtatacctaatggctcaaatattgacccaattcccccagtgcagagaaattaatatccacttcagttatacacacacacacacayatatatatataaactcactattaaaatggcggatggtgtaagtattaaataccaaatgttaattacttcttaacaaaaatcttcatacttttatgtcacagactacccaggagtgatagtcagaatgtttaacatctggtatggtaaatataatatataaatctgtatatata

SEQ ID NO: 785398 - DNA, 575 bp, Homo sapiens
tatttttggtgctaatgtttgtatttttgctagggacgaggttttaccatgttggccaggctgatctcgaactcctgacctcaagtgatctgcctgcttcagcctcccaaagtgctggaattacaggtgtgagccaccaggcccagcctatcaccrgacttctttaccccatatttgcaattttaaaccttccatcagcctaggaggtgtggggtaagcatttagcaagcggaccacaaagctccacatagagctctgtggccatcctgggatttccctagtcagttcgtcttcctcagcccatttcttttgaatcctcctgacgatgccaattttttcattccaatgaacgcttggcttggaaattcccacaagggagtgccccaaatcttctcaagatggcactggttgggattctaaagaaccagcactaaacaccagagtgatcagtccaaagcatttatgagggaaacatacagtgggctgcagtaatgctcacgacagacagtgagagaaaagggctattctacctaggtatgtgtgcagcaaggagctcaggatatgaggttcaacat

SEQ ID NO: 785399 - DNA, 613 bp, Homo sapiens
caacgatggccaagaaccatcagaggcaagaaaaacaaaggagaattccctaaggccttcagagagaacaccgccctgctcacatctcaattttggattcatagcctccagaactgtgaaagaataaatttctattgttttaagtcactaagtttgcggtaattttttgtagcagtcctaggaatgggatacttatggtatacatgattttttattggagttacctatttttgtgtctctctcactaaagtaaccccattatggcttgttaatcattatttatccagctcctggaacagtgagtattttatattagataaaaatagatattgtttccytaattaaacaggaaaaatattgggtgcccgaaggaaaatggttcttaaaaaaaagcttttcaaaacacaaaaggaaaagcctatttttgtataacccaaatagtcgtatgaaaatttctacataattctttgacaagctatgtaacagttgttgtatgatgactcttttttttttaacaggtcagagtccaagtaactttctcacctgttatttaaatccaaagtgacattctaggcatgattttacatttggtcaatgccaagtaagactgcat

SEQ ID NO: 785400 - DNA, 602 bp, Homo sapiens
atttatccagctcctggaacagtgagtattttatattagataaaaatagatattgtttccttaattaaacaggaaaaatattgggtgcccgaaggaaaatggttcttaaaaaaaagcttttcaaaacacaaaaggaaaagcctatttttgtataacccaaatagtcgtatgaaaatttctacataattctttgacaagctatgtaacagttgttgtatgatgactcttttttttttaacaggtcagagtccaagtaactttctcacctgttatttaaatccaaagtgacattctaggcatgattttacatttggtcaatgccaagtaagactgcattgcaaccacatctgcatagttgagctttaactaaattagcatatactttggaaaactttattggtctcacaacaatcagaatcaacacttaggtaaatcacttcattgttgcagaactttagaaaaytggtcttgcatgtgcttggcctcgatggcttctttttcaaaccttgaaagtcttccttgcttcttctaaagctttcacatctacgggaggcctcctctggctgccaggctgcagaaacttcttcactgtggggaggttg

SEQ ID NO: 785401 - DNA, 551 bp, Homo sapiens
agtgagatcagaccacaaccttgtgtgtccccagcatgaggcatgacatgggctaatggccatcaaatattctgccaccaaggagcctctgctgtaatttgtatcgccccacttctcaggaaccctgctaagggtgacataggtygccactgttgcacagctttcacacttgcaactgtaattttctcttctgaagtacgtgagacacaatagggtaaaattctcaatttaataaaggaattagggtcccacactagcattatttttaaggaaaacctctggtttctgatgtggttttgtggcattggggaatgcttgtgtgttctagaagcctcctcccctcattttaaccacgtgtttatttctctgcatcctcatagacacgtaggctgccccagggcagggactgtgtctgtcttgttcactatctccatgaccgagtacagaacctggaattaataagtgctcaagtaaataattgctgtgaatgtagtcaatctttaataggtagtttgttacaatccactcccttccatctctcatttgtagtt

SEQ ID NO: 785402 - DNA, 391 bp, Homo sapiens
cttgcaactgtaattttctcttctgaagtacgtgagacacaatagggtaaaattctcaatttaataaaggaattagggtcccacactagcattatttttaaggaaaacctctggtttctgatgtggttttgtggcattggggaatgcttgtgtgttcyagaagcctcctcccctcattttaaccacgtgtttatttctctgcatcctcatagacacgtaggctgccccagggcagggactgtgtctgtcttgttcactatctccatgaccgagtacagaacctggaattaataagtgctcaagtaaataattgctgtgaatgtagtcaatctttaataggtagtttgttacaatccactcccttccatctctcatttgtagtttgcatttt

SEQ ID NO: 785403 - DNA, 391 bp, Homo sapiens
cttgcaactgtaattttctcttctgaagtacgtgagacacaatagggtaaaattctcaatttaataaaggaattagggtcccacactagcattatttttaaggaaaacctctggtttctgatgtggttttgtggcattggggaatgcttgtgtgttctagaagcctcctcccctcatyttaaccacgtgtttatttctctgcatcctcatagacacgtaggctgccccagggcagggactgtgtctgtcttgttcactatctccatgaccgagtacagaacctggaattaataagtgctcaagtaaataattgctgtgaatgtagtcaatctttaataggtagtttgttacaatccactcccttccatctctcatttgtagtttgcatttt

SEQ ID NO: 785404 - DNA, 623 bp, Homo sapiens
tttcaagagacagagattgtttatcccttgcttcttttggaattctgtattctaactctatggggtgcattttgttttataagctggaagaagagatgttgctgcattaattttgcaatatggaaggagctagcatttgttcaacatcagtcacacactgatcattcttctaaacttctctttgttttatcctacaaaaattacctaaggttaatgtggttgttattctcattttacatttgaggatactgaggtttttaaagtaacttgctcagagtaaatgatagatctgggatccagggtcactgctattaaaaaccaaakactgagtcttattttctatgttagtgtttctcaaatatgcatggtaatctctcagcagattgtgaaatcccattactttaaaaaataaatagaaaagaaaagaatagaaaatatcagtgagcatgacatgttgaaaggtaagtaatgtttcatgagttgttagtttcagttatttgtatactgtgtgtatggatctttgcatgtgtgcatgctcacttggtcattgtaaatggttagagactgggcttatcagtgaaatttgatagcccttgctctatgccaggctgtttgggtggtgg

SEQ ID NO: 785405 - DNA, 659 bp, Homo sapiens
agcaacaaatatgggcaaggatgtggagcaatgagcactctcatccattaccggtggggatgtagaattgtgcaagcactttgaaaactggcctggcagtttttcataaagttaaacatgcacctactctatgacctggcaaatgcacttctaggtatttactcaggagaaatgaaaacatctggamacagagaagacttgtacatgaatgtccatagcagctttattcataatactgaatactccaagaagaaaattagatttcaaaaaatgtttttcttttctcttttctcttttcccagccttggcctcaacaaaaatagcaacaaactagaaacaacccaaatgtccatcagcaggggaatgaataaacaacatggatatttacatacagcagagttctgctcggagataacaaaaacacaatagctcctgatacatacgacacatggataggcctcagtattgctataccgagtgaaaggaagtcaggcacaaaagggtacatattgtaagattccatttatatgaagttctgaaacaggcaaatgcaatctattgcaaaagaaatcaggacagtggtttcaagtggggcagggagtggacagagattgactgggatggcatgatggaaattttgggagttatggcaatattct

SEQ ID NO: 785406 - DNA, 659 bp, Homo sapiens
agcaacaaatatgggcaaggatgtggagcaatgagcactctcatccattaccggtggggatgtagaattgtgcaagcactttgaaaactggcctggcagtttttcataaagttaaacatgcacctactctatgacctggcaaatgcacttctaggtatttactcaggagaaatgaaaacatctggaaacagagaagacttgtacatgaatgtccatagcagctttattcataatactgaatactccaagaagaaaattagatttcaaaaaaygtttttcttttctcttttctcttttcccagccttggcctcaacaaaaatagcaacaaactagaaacaacccaaatgtccatcagcaggggaatgaataaacaacatggatatttacatacagcagagttctgctcggagataacaaaaacacaatagctcctgatacatacgacacatggataggcctcagtattgctataccgagtgaaaggaagtcaggcacaaaagggtacatattgtaagattccatttatatgaagttctgaaacaggcaaatgcaatctattgcaaaagaaatcaggacagtggtttcaagtggggcagggagtggacagagattgactgggatggcatgatggaaattttgggagttatggcaatattct

SEQ ID NO: 785407 - DNA, 632 bp, Homo sapiens
tcttttactgttaaagccaaatagaagagtcagtagtcatgtcatccaagacagaggctcttctggccttcaatgtacagagacatgttgcattaaattcagttaagggcaaccaatgaaaaacaagctacacacaaagattacctctcaccccatcatgcaaagtttccattcagcaacatctggagactgcacagcccatttgatttaaatagaagactcagaggcagaaaccatattcagcccagattctttgtgaacatagcttgttgctgaaccaattcactctgcttctaattcacaaatcttcagccctaagcggcatcatttggttyttatgaggcacagagccctttccccacccagggcctttgcttggtccattctcgctgcccgcattgtggctcccctggctcttggcctgctggctccctctcagacttcaggtttcaattaaaataacagcccttcccactctccttacttcagagttagtctctgacatggcagtctgttgatttctaagtcctattccagggcttgacatctcatagttgcttgttgaattaataaatgttaactccaaaaaataataataaatgctttctccagttaaaaaagtagatattaca

SEQ ID NO: 785408 - DNA, 628 bp, Homo sapiens
agagaaggcattcctggatcatgatcattttgtctgagctgcatgtggccaagtgcactgggggaagcagagtttaggaacttgttcctgtatggattaagtgggaagtgaaaagtattaaatatatgggcgggagtggtccaggaaggggagagtggacatttagtacctgtttgggcccctgcactaaatgcttcacatataaggattagaaaaacacccaaagattcttagatargcatttcagtgccattttacagaaggaaaaactaagatgcagagaggattaagcaactagaagagaccacatagtgagtaaagcgtggaacagcaaggattccaaccctgtagcgcagctttatgtctggaggaagcaagtcttagactgggactgtcaggccaggaagaaaactcagagcatggacaaaaggttcagagggagtgaggaccgatttatatgtgttgaggtaaaccaggtggatttctgttttggagaaaattgggaagtcaggcttaggtagagggtggtgtgtttggaggggataaaatattttgtgcacctgtagtttgtgtattccacctgtggtagaatcttgtggctcagaaagaaagaacctgcctcgggtaa

SEQ ID NO: 785409 - DNA, 643 bp, Homo sapiens
aagtttttaagggacagaaatttaatatttttaagagtttttaagagagaagttttaatattttttaaaagataaacagagggcctcaagtttctcttaatttgatccagtaattctatccatgagattaagcatattaccaaataaaaatttagagataacattttaaaaatttctccagaaagctggctttatatgttgaaagccataaacatgtttatttcctttgatagacattttcactttttggaatttattccaaagcagtgagatatgcacaaagactgatgttcattgcaactttatttctagtgaaaacacaatagactgaaaaattaggaacaacytaacagttcaccagtaaggagatgtttgaaaaaatgttttgtccatttaatggaatattgaatgagcattacatttttatgttttcaaaaatgatttggtggcattggaaaatcttagtgacataataaggtataaaaacaggatgaaaacaaccacatatagtgtgattaaaaaaagtttgtgtataaaaaaacaggaaggaaatatttcaagctgttagtgtttttctgtgggtgatagtgtgatgaataattgtaatgttcctctttctacttttgtgtagaattttctagtg

SEQ ID NO: 785410 - DNA, 643 bp, Homo sapiens
aagtttttaagggacagaaatttaatatttttaagagtttttaagagagaagttttaatattttttaaaagataaacagagggcctcaagtttctcttaatttgatccagtaattctatccatgagattaagcatattaccaaataaaaatttagagataacattttaaaaatttctccagaaagctggctttatatgttgaaagccataaacatgtttatttcctttgatagacattttcactttttggaatttattccaaagcagtgagatatgcacaaagactgatgttcattgcaactttatttctagtgaaaacacaatagactgaaaaattaggaacaacctaacagttcaccagtaaggagatgtttgaaaaaatgttttgtccatttaatggaatattgaatgagcattacatttttatgttttcaaaaatgatttggtggcattggaaaatcttagtgacataataaggtataaaaacaggatsaaaacaaccacatatagtgtgattaaaaaaagtttgtgtataaaaaaacaggaaggaaatatttcaagctgttagtgtttttctgtgggtgatagtgtgatgaataattgtaatgttcctctttctacttttgtgtagaattttctagtg

SEQ ID NO: 785411 - DNA, 639 bp, Homo sapiens
tggtaaacattcactctgttgtcagtatttgtatggtaaaagatcttaagttacatgctgattacaaaggaatacattatctttgaaacacttttgaaggaaacagtatggggaaaacctgggggtttagaatattcacmatttgatccagttggagctaggaactcaccaggtataattaagggaaaagtctaaccgaggaagttagggtatctgtcatctatgccaaatacataagtatcaactagataatctatgttacatgattaggctctaaaactgttgatcatgataaatatattcaaatacatgtattaaatcatttaatgagaactattgttattcaacccaaaaaggataggttaaaacagcatggcaggtgagtttgaaaaacttaactggctcttttttctttgtttttaccaagccctaacatttttcatcatcttttcctagacttactaatattataatgactgcacctggagatgaagagcattaataactaaagaaggcatccaaccctgaccaagtgcaagctttcagacagcattttacagctgttaaaaatgcagagacatgaacgctcaagtattatgtttaaaacaattttttaacttttagaatactgcttagaat

SEQ ID NO: 785412 - DNA, 551 bp, Homo sapiens
ccagcaaacttgtctttatgaccaagttatgtccttgggagcttgaccttataaccatgtggccatggtttctcttttcacaatggtggcctgggttcagagttcaactcccagcttagggaataagtcctttatcttattctgtctctctgtctctctctctctctctctmtatatatatatatataacatgtgatataaaagagctttaatcatttggcttaaaaataagtgctttaaatcaaatttttgtcagaagagtaaaaagtgtaatgacttttatttagttcatgtaacttaagtaatctttgggaaataaaggcagttttaaagattattggtaaaataaaaatatcttcaaaaatataaacatttggtctaaattatgcaggtcagatattaagtttgctaaatgctttaaggtcataaactgcttctttgacttttgaaaattgttcaatttacctactttggagcattagattctagataaggcctggggacatgtggaaagccatgccccctagctgtgctggaaagagtcagccctt

SEQ ID NO: 785413 - DNA, 660 bp, Homo sapiens
gtgtattcagtaaggaaatgtctatgcaattatggatagtattgctctggctcgttatttcagttttccatgtctggtataataggaccaatcatatttttagtttagtgccattgctaataactacaggagccactgacacctgaaacattgaaggagaaagagttggcaagctgagtcaatatgtgaaaacactcttcaggcttccctaagaaaatattagactgccagctgcttaactgaggaaarcttcggcaagtcatttgcaactgacataagtttgagcaacattttcaaaggcagcaacaaacgaatttctcttggcacaaaacgtgccaggtactagaagacatgaaagcagaataactgaaaactggtaaagaaaatgaaacagaaatgtatgataattgaacaatgtgagtgatttaaaaaatgcaatcctcaacaatttaagatatcaaattgaccaaatactaaacatagtaatttttaaacttaatgacaagtaaaaaaacgacaaaaaaaaaaacaaaaaaaacttaatgacaagtagctcaaatgcactttatcaaatgaacttgttccctgaaaacaaatataaaatgatgcttagtctacctatttcaaaaagtactgacttaacaacaagttttatatctg

SEQ ID NO: 785414 - DNA, 596 bp, Homo sapiens
gtaaaaaatataaatagatttaaggaatgaaaatagtaacaatttatctgtcataggatgatatccagccaaaagataggtgtcaaaattaatgaaattgtttcattcactaattatgtaagattccaaaaatcattagcaagggtaaatccttcccattttactatattgttcttgtcgtttctccaaatttctacacctattttaaatttgaagattcaagctacctgctggtttggggacttatatttaattgtrcctaaaaagggaagctagtcaatattatgttttaaatgttacttattactacgaagaaaataagatatcatatcttgcttagcaaagagcaggaaaaaatgttcatcatcaaacaggtcattacatatctaaataaattattggctttttaaactatcattatgtggataattaaccaatcttcttgtcttctaacagcccttcaaatagcatagtttatcatcctcggctctgaaacttccctgtggccattgattaaaatgaataaaatgagtgttacaaaatttggaaaatggctattcttctcaaaggctgtatttacttctgttaaattccaa

SEQ ID NO: 785415 - DNA, 596 bp, Homo sapiens
gtaaaaaatataaatagatttaaggaatgaaaatagtaacaatttatctgtcataggatgatatccagccaaaagataggtgtcaaaattaatgaaattgtttcattcactaattatgtaagattccaaaaatcattagcaagggtaaatccttcccattttactatattgttcttgtcgtttctccaaatttctacacctattttaaatttgaagattcaagctacctgctggtttggggacttatatttaattgtgcctaaaaagggaagctagtcaatattatgttttaaatgttacttattactacgaagaaawtaagatatcatatcttgcttagcaaagagcaggaaaaaatgttcatcatcaaacaggtcattacatatctaaataaattattggctttttaaactatcattatgtggataattaaccaatcttcttgtcttctaacagcccttcaaatagcatagtttatcatcctcggctctgaaacttccctgtggccattgattaaaatgaataaaatgagtgttacaaaatttggaaaatggctattcttctcaaaggctgtatttacttctgttaaattccaa

SEQ ID NO: 785416 - DNA, 626 bp, Homo sapiens
tgaaatagtcttccccaagaggcaatggtttgcccatcactgcaaatatttaaaggacagagaaggattgttactgagctttaggcataaattaggtgttcagactcaattcctccaaaatggatagtttattattctaccgtgtgaaaatttctgctattttccctcagttttctccataaaatataatattatacgtgaattaagcatggaaatatttaataattaagtaaattattgtcagaacacttgtttaaacattctttaaaaatcaatatgatctaaataaattgtttttaaatacatrgattcttactttttaaataacatgtggaattctaaattagtataaatggtggctagacttgagaatttttcactcaacatgagattttaattcatatatactgaagataaatgatcttccttcaccaggtttgtgacaaatcacaaaccaagaaaagctaaaaacactgaattaagttatttagaatgtttctaagtgtgtttcaagcaagattagagctttcggttatcagaagagttatttaaaaatatatgattcaaacaataattcaagctctaatacatcaaagtatttattaattgagcagaacaatactacc

SEQ ID NO: 785417 - DNA, 614 bp, Homo sapiens
tgggtctataaaatagatgctgtaagaatgactgatggaactaactcaaatatattcaatgagagtagcttgttaatgattacctgtaatattttaaagaacctagaaaagcacagacagcagcagatcctatactggacatttttatttctgcttcgagccaaagtatccaagggtactcagcccccccactatattccatatattcacaaatgcttcagatttttgagcccccccaaaactaccagatctagacaataaatacattgtgaagttacttgatgttattaataatactatataagtccaaaacaaagtcttaggcaatgaaaagraaaaacttcagttagtttcttaccatagtgttgcttcttttttgttttctatagatacaccaagagaatatgggaagtaaaatgtagccgtgtgtgcattaccatatcaatcttcttacttctcaaattacccttgtctcatcctcctccttccagcataccctggtgagctctcatcagctcaccttcggcagtgctgctctctcccagagccagagccggctctctcccagagctgaatgacagacactgactgttgatgtgaaaagcacatttaat

SEQ ID NO: 785418 - DNA, 610 bp, Homo sapiens
gccgggcgcggtgactcatgcctgtaatcccaacacttggggaggctgaggcgggcagatcacaaggtcaggagatcgagaccatcctggctaacatggtgaaaccccgtctctactaaaaaatacaaaagattagctgggcatggtagcgggcgcctgtagtcccagctactggggaggctgaggcaggagaatggccgccaggaggcagagcttgcagtgagccaagatcgcgccactgcactccagcctaggtgacagagcaagactctgtctcaaaataaataaataaatacataaatacaaatataaaaaacaaataaaagacataaagaggtagcrctgatcgttatgaaattgtttctttctcatttattttattagctgaggggttaagaagatactaagaatactatagttacaaaaattgaaatgttttgttcacagatattctcaattattgactaacacaaagggacacaaaaagcatacctgcaactgcgaacactggggaattttccttcgaggtggagtcaggataaatgaactctgcttcctgaccgattctaatcgtttctgcagaggagtggcacctataaagtaatcttca

SEQ ID NO: 785419 - DNA, 586 bp, Homo sapiens
ggtggatcatctggttagtggcttctgactcagaggaccttcgtcccttggggcagtgggccttccagtgattcccttgacataaggggtatggacaagggggcagcttacttctacttggacaatcttttttaaagtgtctttgtagactgcactggaagcaaggcctattaggcattcaattttcccagcttttcccttttccagagcctccgaagtccgcttkcctgagggccatgactaaagcggtagcctttttttttatcccatttgtcctgttccacctgctcctcctgatctcttttataaaaaaccaaggttgccacgttcaatagggtttctaagttttgctccgggcctatggcagacttttgaagtttttttttctaatgtctgcagctgattgagtgataaatttatcctttaagattagttggccttcaatagaatcaggtgagagaggtatgcttcctcaacgcctcccttagtctctccagaaaggcggtaggattttcttcctttccccgtgttatagtggacatcattgaataattcatagtcttcctagttttccttagtccttcta

SEQ ID NO: 785420 - DNA, 586 bp, Homo sapiens
ggtggatcatctggttagtggcttctgactcagaggaccttcgtcccttggggcagtgggccttccagtgattcccttgacataaggggtatggacaagggggcagcttacttctacttggacaatcttttttaaagtgtctttgtagactgcactggaagcaaggcctattaggcattcaattttcccagcttttcccttttccagagcctccgaagtccgcttgcctgagggccatgactaaagcggtagcctttttttttatcccatttgtccygttccacctgctcctcctgatctcttttataaaaaaccaaggttgccacgttcaatagggtttctaagttttgctccgggcctatggcagacttttgaagtttttttttctaatgtctgcagctgattgagtgataaatttatcctttaagattagttggccttcaatagaatcaggtgagagaggtatgcttcctcaacgcctcccttagtctctccagaaaggcggtaggattttcttcctttccccgtgttatagtggacatcattgaataattcatagtcttcctagttttccttagtccttcta

SEQ ID NO: 785421 - DNA, 586 bp, Homo sapiens
ggtggatcatctggttagtggcttctgactcagaggaccttcgtcccttggggcagtgggccttccagtgattcccttgacataaggggtatggacaagggggcagcttacttctacttggacaatcttttttaaagtgtctttgtagactgcactggaagcaaggcctattaggcattcaattttcccagcttttcccttttccagagcctccgaagtccgcttgcctgagggccatgactaaagcggtagcctttttttttatcccatttgtcctgttccrcctgctcctcctgatctcttttataaaaaaccaaggttgccacgttcaatagggtttctaagttttgctccgggcctatggcagacttttgaagtttttttttctaatgtctgcagctgattgagtgataaatttatcctttaagattagttggccttcaatagaatcaggtgagagaggtatgcttcctcaacgcctcccttagtctctccagaaaggcggtaggattttcttcctttccccgtgttatagtggacatcattgaataattcatagtcttcctagttttccttagtccttcta

SEQ ID NO: 785422 - DNA, 628 bp, Homo sapiens
tttggttaattgtttatttatctccttttggaccgtttgggttgaaggggggtccttattcattggggaaagagttagggggacactggggtagggaggtagactgagggcttcctgtagggcataaatcacactttttacataattgccagttgtctcttaatgaaaagaaagtttgtacatatggcacttcactccatttgcctttttcctacaaaacaggtctagctgtaagatggtgttataatttatacttccctcaggaggccaggtttctccccccttgaagagggtatagtggccaggcggtactgcagaagaatataagtcatttctttcttagcgtctgagggtcaaattggtcttaattctccagaatacatcttaggggcatttttgccttgggggaaatgtttcccatctgataaaaggacatagggatgccagcacccctagtcattttccratgagcattagtcctagagcatcctctatggtcctaatgcttattcctttctaggtgcgtaaccacccatggacctctgcttatctgattagttacactcacctatgtagcagtcctgcatctgttttacccgcctctcttgaccacaaaaaaagggatcca

SEQ ID NO: 785423 - DNA, 508 bp, Homo sapiens
aatctacgttcttctgccatggcttcagccggtccctctgtttggggtccctgacttcccacaacacctcaatatatgaataaatagttaaaattacatataaaacctcatttcaatagaaagttatgttattgtctttttatttagaaacagtaggatttaactcaaattttaaatttgtttctcaaaacaagtgctgtgcaaataaaagccaatatcaaggcaattgaattttgtaaattgggtgaagccacccagatataaaagaacccagatataaaaggtagtggtggggccctarcaaactgaaatatctgtatagatactaatatcacgttaattttctaacattgtgccagctgagcaaaacagttctgtggactatatgccatatttttgctgctcttgatataaatcaccaagttattatttttgttccagattttggcacttccaagattgtattttaaaatttctgaaattctcaaattaccttgaagtaagtcag

SEQ ID NO: 785424 - DNA, 646 bp, Homo sapiens
gatgtattagctaacttcaaaacctattgttaaaagaggcactgcagtgactaggtaacacaaaataaagttttttggtcatgcccattttaaacagcctgctatgtttatatagaataaaatctgcctacaatgtattactcagatctctactttttattataccaatcttccctttaagaatttattgaacataatttaatgttacatttataactatggttaactatgatagaggtcagctttctgtcatttctacaataaactagattatggaattcttttccctgtatgatgtaagactaaaatagaacttaaattccctcatctgatgacctgtataattatcttaatatgttccccctcaattgtcagttttaatcatagttactatgcctatctgaagcaacctyatttcttcccttttaaactattgttttgaacctatgatggctctgaaactgattaaatttatcaggattacatgcaaaataaaagcaaacagaacctgagaaaaagacttgttgattcacctgagtaaacaagtatgtgagctttaatgctttggacttcagaaatctcctctggaagctaaaacatattttctcttctttcttattccaagattcattacagagaagagagg

SEQ ID NO: 785425 - DNA, 544 bp, Homo sapiens
agtatggttttcatgccgttaaagctgtttttgtttttgtttttttgctggtttttcttcaagatatgcccctctgttgtgttcattgaaagctagaagtgtttaacaagactgtaagatattgctggccctaaactccaacttttatcttccttgcactactagactgctaatgctttacttytgtgtaatttcatactataaatacaaggttgaaagggaacaagtgcctctatagaatagggctgatcaaattgtgggctcacttctctgttcttctcttcacggacctaatctccttgaccaagctgaatgctagtgttttcttttcattcaaagaagctgctgcaaactccagctactactttctgcttatctagatgcaactacttatctggaagcaaatgggcagatgtcctggtttgaaaagcagagccctctgtagtcttaactttgcttgcttcttatctctttagctttagaagatctagtcaacttcagttgttcttgtaacaattcaacaatatatatatatatatatata

SEQ ID NO: 785426 - DNA, 544 bp, Homo sapiens
agtatggttttcatgccgttaaagctgtttttgtttttgtttttttgctggtttttcttcaagatatgcccctctgttgtgttcattgaaagctagaagtgtttaacaagactgtaagatattgctggccctaaactccaacttttatcttccttgcactactagactgctaatgctttacttctgtgtaatttcatactataaatacaaggttgaaagggaacaagtgcctctatagaatagggctgatcaaattgtgggctcacttctctgttcttctcttcacggacctaatctccttgaccaagctgaatgctagtgttttcttttcattcaaagaagctgctgcaaactccagctactactttstgcttatctagatgcaactacttatctggaagcaaatgggcagatgtcctggtttgaaaagcagagccctctgtagtcttaactttgcttgcttcttatctctttagctttagaagatctagtcaacttcagttgttcttgtaacaattcaacaatatatatatatatatatata

SEQ ID NO: 785427 - DNA, 578 bp, Homo sapiens
tctttatttcaccttcattttttgaaggatattgtcactagatttagaattctaggtttataaaataatgatgcggtcatgtttttatgatttatgttttaaaaaataatcctcatgtcgtagagacaaatactgaagtatttgttcaaaatgaaattatctgggctgggcgtggtggttcgtgcctgtaatcccagcactttgggagaaggcaggcagaacacttaaggtcaggagttcaagaccagcctggccaacrtgatgaaacccccgtctctactaaaaacacaaaaatcagttgggtgtggtggcgcacgcctgtaatgccagctactcgggaggctgatgcacaagaactgactgaacctggaaggtggaggctgcagtgagcccagattgtatcattgcactccagcctgagtgacagagcgcgaccctgtctcaaaaaacaaaaacaaaataaaagaaaaaaaaagaaattatatggcttggcaatggtggcacacgcttgtaatcgtagcactttggatggcggaggcaggaagatcacttgaggccagatatttaaaaccagcctt

SEQ ID NO: 785428 - DNA, 528 bp, Homo sapiens
tagattttcagaaaaactgcaaaggtaattcagagtttttataacccatctgtccattcttttttttttcttttctgagacaaagtctcactctgtcacccaggctggggtccagtggcaagatcttggctcactgcaacctctgcctcctggtttcaagcaattgtcctgtctcagcctcccaagtagctgggactacaggtgcacaccaccacacccggctaatttttgtatttttagtacagacagctttcaccatattggtcaggctggtcttgaactcctgacctcaggtgatctacctgcctcagcctcccaaattgctgggattacaggcgtgagccctgcaccaggcccccatctgtttattctawtccatttatcatcttaaatcacatccagccacatgaccaacttagcacactccaggggtaacagcttatgtcagtgtagcccatttgtcacaatggatggacactgttggtgcagtctgaccaactaaagtccacactctgacctccttcattt

SEQ ID NO: 785429 - DNA, 607 bp, Homo sapiens
taaagtgctcagcacagtgaatatcattacatgtaggttttcatgcaggcttaataacaactcagtggtgtaggtattctcactattcccattttactgataaggaaactgaggattaaagaagttacacgagttgctccaggactcacaataaattggaaaggcaggcttcaacaccagttttaaagccaaagctcacgtttctcatcattgggctatgtatggctcctttggatgatcaaatttgtttaaacttgaagaaaattaagaggaaatagatcccaagtgactcccaaagggctactgcccaagtgcaaagtatatgtgctttggtgtctgtacaaaacccacctgcatttggtggacagagtatagatgtcatggttgaatggtgcactactcccgccccctccaaaaaaaaaaaaaaaaaaaratacattgaagtcttaacccaggaacctggggatgtgaccttatttggaaatagggtctttgcagatgtaatcaagttacaatgagagcatactggattagggtggccctaaattcaatgacaggatttaggagagggaaatttggagacagagacagaagagatacataggga

SEQ ID NO: 785430 - DNA, 653 bp, Homo sapiens
cccactgacacacaccaccctcttaatgctaagagtctataaggattgagattctaataaccttcctcaacaatttgttcttgaatttaatttttggaacaatgagaagacaaatgactggttttgctcaagagatatgcctaaatagcaagcagaataggcaagaaagttgacatctgcctcatcttgagacagtgttgagactcagmgctcatatttagcatctttttaaatttttctttttattttttcctactctgaggaatgaatcatctttattatcttatcagctttctttcttggtagactatggtgataaaaaagattaattagtagactaagatattctcgttgtccttgataagcagatattgaaagagactacaaacgaagaggactgcttaggtccagtcttggatgattaagggctcagggacttcatataactttaactccagtagtgagtgtctcttctgagaagtcttcaagccctcgtattttaaaatgcaatgcttatgaagacaaaaatgggttcttgcagttttgattttattctcctctcccacagtcattaacctgtaaaatgtccctaaaacagctcccagctaatgaaaaatcgttgggcattacacagagcagggtatatctgaaat

SEQ ID NO: 785431 - DNA, 421 bp, Homo sapiens
tgctgggcctcatttccagtcatctgatgcagcactgctctcaggctattgctgtggttctcagagagccctttacccatgcacatatagaccctgtctcatcacaggtcctgaaagttctggcaaagaatgagaacggaatcaatgtcatgactttctgaattccttaaaatcgaagataactcactgaccctcttgtccactacttgaagagaccctgcatctggtacacccacatgaacctccggarggatagtcataatcaagtaaagctatgggcagaacctgtatggagaaataggtttccaaggagaaagcctcttcttctgttttatcagttggtaaaaagccaattcctccccagaatggcctagacacatattaaaagaaatgtctcatacgatttctctgaacacagtct

SEQ ID NO: 785432 - DNA, 621 bp, Homo sapiens
cttggacaaatcggttatctttcccgaatctcagtttcatatctgaaaatggggatacaataagaccttcctcagggtgagtgtcatacgagaacacaggtaagagcgctgtgtatgcaggaagggatgcttcaaatatgttttattaccatgctacattggatctaacaacacaaaaataaraaacagctataactcaaagagaataacgctatttaatgctctatcctggtaccacaggaagctttgagagcacataaactttaagtgaagaaatgggccttagaaatctctgcactgtctcataactaatgttccctcgggcagatgcagagttttctgggaaatgaagtcctggatcatgtgattagatttgaaaagcagtgattggaaatttctgaatttttcctaatctctattcctcctttattaactttacgaaaaggagctcatattttgctcattttaacccaatgtatttaacttttttaaaacaaagagaatctactcctaccaaggagttcatacttttgtttatttttgacaaagttcttctattttagcactgtattaaaggccctaaagagtcttgaaaagcagtatgtgacctttctcagtttg

SEQ ID NO: 785433 - DNA, 606 bp, Homo sapiens
atcacttgcagatttggatatttaactctcactgagtacccacattcaggcatcttgttgcaagtctctgtgcaccaagagttactagaatcccacgtgggtttttatagctgtcataagaaagacacaagcaaagttcagaggctgcagagatagagttcaaggacatgagggaaaacgagatcatgagagatttggaggcctggtaaagaagaatgggtggaagtttgagaggttggaaaatgaggtaaggcaatggacagcattaagaaatataccaaattagaaataggtcacaccattcagtgttgtttgggtaggacaaatatgagagttctagttggttagaacatttgatttgagtaagtgggttgagtaggataaacttccaaaagtagtgtggtcagggccaaattttggagaggtttttaatgttagattaaggaatctgactttatttggcaggcaakaaggaaccattggaaactgctcaatggaagaatagcatgcacaaaatggcttataaatccctaaataccattttatagttgtctaattctttgcagttatagaccactttcttatgcattatctcttttaatcctc

SEQ ID NO: 785434 - DNA, 563 bp, Homo sapiens
ttacatttatggaatagtcagaatacagtgagcaaacagttggcctgtataaaacaaacaaaaagcggataaaaaagtagtctcatccaaattctgttaatggcataatttgaggctcatgtcttgctagatcacacttttcaattatgcaaaattcctaagctcttttccttgcatcttgaaaattctaagttctaggttttgagagggtaagtagaggatttaaaaggataacttttctctgttcatgaaaatattaactaaattgtaatataacatgtaaaaatcttgcattatttattctccttctccctaggtcctgctttgtttcccttgaaattagacacttytatttccccttgcaccagcaacctggagcccattatgtgacagcatcaatgagtgcctggactggtaaatatagtctactgcctgcctttctccctgtcctcctgcaccacttttttttaaaagataggaatgacacaagtttcacctatctctggattaagggatttccctcctccctggatgacacatttttaacatttaatggcttttat

SEQ ID NO: 785435 - DNA, 797 bp, Homo sapiens
aacaggatcccaggacctcaagtcagaggctcagatgcgcaccccagacccactacagcagggtccacagagttggtactggggattgctgctttttaatgagccccctaagtgcctagaccctggagcccagttgcctgtatttgagccccaaatctactgctttctgtggctgtgaccttggacacattacccaacttctttgttcctgggtttccacatgttataaaaaggcatatgacagcacctcccccaataggctgatgtgcagactaagagttaacatctttcaagtcctcagaacagagtctacaacaaagtgagtattatacacgtgtttgccaaaaaaataagtctggcctgacagagactgtctacatttatgtcttcctttgtgcttatcattccayaggcctgagttcccactgccctgcaacaggaggagctgcttagagtcagaatggcctgggcagcttcttggtacctccttccccaagcagggggcatgcagagcctccatgacacgagcatgtggactggctctgccctatccatgtaaacctgcccatgggtttgcccagctcccaagctgctttctaatcttcccaggagtacgcagtggctgtgttgatggacctttcaggatgtacccaaaatcagaatctcacataatagaccccttcagcgcagtcaaactacatctttcacaattttgcaggaaaagacccttcattctgaggtaggaggccagcaggtcttgttttctggtcacaaccctgctgaccaaaacaggatct

SEQ ID NO: 785436 - DNA, 626 bp, Homo sapiens
agattaagattgtctgaacatttctgtccctcccaaaattcaggttaaaatccgaatcctccatgtgatgtactaggaggtagcatctttaagaagtaagtagaagttctcatgagtgagattagtgtctgctatggtttaaatgtgttcccccaaaaagcacgtgttggaaacttaatagccaawgcacagtgttggtaagtggggtctaatgagaggtaattaggccaagagtgtgaagtgaatgggttaatgtcattatcatgggtgtgggtgcattactgcagaagcagttccttatgaaaggacaagttcagttcttttttgtctccttgttcttttctcttgcactctctttgcccttctgccatgagatgatgcagcaagaagtcccttgccagatgctcgcccctcaatcttggactttccagcttccagagccataaaccaataaatttctgtttattgcaaattattcagtcagtgatattctgttatataatagcagcacaaaacagactaagacagtgcccttatataagaggccccagaaacctgttttttttttttccataatgtcagtacatagcaagaaggcaccacatatgggcccttgccagacactg

SEQ ID NO: 785437 - DNA, 552 bp, Homo sapiens
tccctggaaagatccaaggaggaaatatttgaaatagagcttgttctggaaaatatttgaaattgagaaggttgtggaaaccgtacatgcagcactgtgcatgcagcaggatgtgtataaagtctgatgaggacatagatgagagtgcttgtgagcccacattctcaaaccacaccaagtacacagcccctgatagcgagaccaagcttgaccatccacatttgttcattctgttgggtagaatttatcaaaccagaacatacaggtcacaagttgttccttcaatcaaggaagatcccctcgtcatctggacactagctgtgggatgtcaaagagttctcargcccctgagtaactaatgacgtacagccattaactctattatttactagaaatgacagatgcgtggtggcgggtgcctgtagtcccagctactcgggaggctgaggcaggagaatggcatgaacccgggaggcgtagattgcagtgagccaaaatggcgccattgcactccagcttgggcgacagagcaagacgtctcaaaaaaagaaa

SEQ ID NO: 785438 - DNA, 595 bp, Homo sapiens
ggctcacaccctccttgcaggtggagctctgagggcttcccagtgctgcaagcatgggtctcctttgcccctcaaacttacctgcggaatctttccatgccctccctaggtctagccccacctaggggtaggaggtcaaacttcaaagttctttccagagatttatcccagtatcttactctcttgtgctcctaagaggctctttttcctccccaaatcccgacattccttccctgctggtgctggggtcagggctaagtaaggttacaggctggctcaggaaatgttcctccgaatctgttgtgatttggccatgcccttggcctttgactctccaaaacccaaagttccrttcctctgccctcaggttcaggctcctccgtgactatctcccgtccaaacaaggaacggtcccagtggttaaaagaactggagaagggggaagaaatcaatgaagctgtcccaagattatcccaccatatgagccaatgcaacacagagtgaaaacagggacccaaagagagcacagagcagctgcaatgggaggtcagacaagaaatagaagcttcgggataatgacattcaaattgctctt

SEQ ID NO: 785439 - DNA, 522 bp, Homo sapiens
ataaattagttgccctcctaatggcctcctggctgtacattcttccctaccttcataatccatcagcatcgtgaaagcacagagggacgttgagcagagctctgtgctggcgccaccgcactctgtagcctgtaagagagcagcaaagaggaatgtgttgctcaggtatagacgggggtgggtgcatagagacttccgctgcggcatggcccttcatgtccagggtaggcatgaagcaatggactattccaggttgtgcataggaaaccacacagcactcttggagggatttttgctctaaagacaactaattcaaaataaggcrctttctacctgaaagaacagcatgaactaagaaaagagatatatagagagatctctgtgtactatgatcaggttgcacatattctgggatttatgtattcttattagttcaattccttatttattgaccacttactgtttacaatattgtattagattcttttaggattacagttgacccttgatcaatttcagggg

SEQ ID NO: 785440 - DNA, 573 bp, Homo sapiens
ttaaggactgatgggtgccagagagcagcagcaccccatgtggatccagaacccagaggctggagtagttcatgcctgctcctgcctcccaggtattcaagggaaacccaccatctccacacaccagcaaaacaccagcaaaacagaggccccaagtaatgacttctccgttctcatcttatcttgccacctgaccagctcctgggctcctcaatccaaagttggggaagagagaagggaacgtcagtggaaaccacttttgctataaacgctcatccttcagatgttctttcagwgggtacaatgcttagtgctgtgctgggtgctagggaatcaagagtaaataagaggccatctttgccctcagggagtctttggtctaacggggttggggcaatgcaggtctgtaaactggaattgtaaaagtgaagtggcccaggtcccatttgctgtagtggtgcacagagagacagtcttgagaggtgaggagacatttcccagaggaagtgacatccaagttgagacttagaagacagctggaaggatgagaaaggagaataattctgtgaagtc

SEQ ID NO: 785441 - DNA, 552 bp, Homo sapiens
gtaaatcaactggggagacaccccaaccctaatcaccagcactgtctgagctccagtccccgctctatcaagatgtccttttagaaagataaggactaaaaaatgctcactgagtttggcgatgacagtcagtagaggggtgggaagagaaatcacgccatatgtctcagcccacttgtgctgcggtaacaaagtgtcacagtcyttgatggattacccagatgacagcctgggtaacccatacaggacagaaatatatcatctcacagttctgaaggcttcaaagcccccgatcaaggtgccaattattacagtgtcctcacatggcagaaggcagagggtaggagaggatgaacattgtgtcttcacacagcaggacagtgaaagagcctgaacccactcccacaagttccctttaaaacagcattaatcggcctaaattcccaaaagtccccatctcccaacactgtttcgtgagggattaagtttgcaacatgttgggccgaggcagcggctcatgcctgtaatcccagcactttgggaggccaaagc

SEQ ID NO: 785442 - DNA, 643 bp, Homo sapiens
aacaaccagaacgtattatttctaactggaactttgaacccattgaccaacctctctcgattgtcttctccccaactacccttctcagcctctgataaccattattctactttcttattctatgagatcaagttttttttwaaaagttttattttgaaatatacaatacattattattagctatagtcaccttagtgtgtaatagaacaaccagaacttattatttctaactggaactttgaacccattgaccaacctctcttgactgtcctctccccaactctgcttctcagcctctgataaccattattctactttctaattctataagatcaagtttttctaaaaaaagttttaatcaacaaataataattgtacatattcatggtgtacatagagattttcaatacatataatgtatagtgatcaaatcagggtaattaacatatacatcatctcaaacgtttatcattttttatatatttatgttgggaatattcaacatcccccttttagatatttgaaactattcattattgtcgacatcctgcagtggtatagaacactagaacatattcctcctatcaagctgtaattttatagcctttaacaactttcttcctatccctccctgccctggatt

SEQ ID NO: 785443 - DNA, 607 bp, Homo sapiens
cgaggcggtggcaagggacaggaggagggcgcggacacggggcgctggaacggggcggagacatggacagggcgcgggtgggcggaccccctcccgcagggccaggatggtcaggccaaggccgctgggaaaggcaggacgctcgcccctgcgctgtcagctgggcttttctccttcctctcctgccctgtgttccagggcgcgaccccgctctgtccagacgctggctcccggactgatcctcaggtaggtgggtcggagcccctgagagaagtggggcttgtgggagggcatttctgtttccaagcgcaagcaccgggagcccggatgctccagcccctggaccctggattagaaactggcaggwgtaggagatgttttgcaggaggccgccctctgccttcctctgttctaacacctgctgggctcagggagtcctagcacctgtatttttgaccagaaaaaaattcgaacagcagaaaagccagtgtgatgggttacgccttcttaacatgccccattcgacgttgtaagttccttgcacagactgacctttttcgtgcaattgatgtgatcctatgtcagctatacaaaacaatttttattt

SEQ ID NO: 785444 - DNA, 573 bp, Homo sapiens
gccatttgggccacatgaccccgcagatccaatggtgcttgaggtgtcagtggcagatagggatgctgtttggagcctttggcaggcccccataggtgaatcacagtggagacctctaggattttggagcaaggccctgccacttctgcagataactactctccttttgagagacagctattggtctgttatygggctttggtggtaactgaacgtttgactgtgggtcataaagtcaccatgctacctgaacctgcctatcatgaactggttgctttctgacccatctagccatgaagtgggtcagcacagcggcatttcatcatcaaattgaagtggtgtgtatgtgatcgggcttgagcaggtcctgaaggcacaagtaagttacataaggaagtggctcaaatgcccatgttctccactcatgccaccctgccttccctcccccagcctgcaccaatggcctcatggggagttccctatgatcagttgacagaggaagggaagactaaggactggttcatagatggttctgcacgatatgcaggcaccacccgaaagtggacagctgca

SEQ ID NO: 785445 - DNA, 488 bp, Homo sapiens
aaaagaattttgaagctatgacacaggcagcctccctaatgtctcttcccagtcattctaagtcccaagaagccatgtgccccccatgaggactatgaacatcggggcctgagtccatcaggacagaagccagagctgtgaagactatacttggaggatccaaccgctcccacaatagccagkaggcaaaacagggaaagcagaggaggaagaggccatattgggcttgtagctggtggtctagactctaagaacgtgtctccagatgtcatcatggccacctatccagacccctgaatccagagactctaaaccaaagacataagctcacagtcaaatcaagtgggtatctaattatattcaactgataattttgaagacatttctattttaccaataaattaaaaactatctttatttaccagatatcacatacacataacacatatagacatacaaacaaacagaagcagatcttatagcttttg

SEQ ID NO: 785446 - DNA, 577 bp, Homo sapiens
aaatataagagtttaatttagcaaagaatgatttgtgaatcaggcagcctcctgagccagagtaggctcagagactccagcacagccacctggtagaagatttatggacagaaaaaaaggaaaatgacatgcagaaaacaggtgtgaggtacagaaacaaccaaattggttgcagctaagcgggcatttgccttatttgaacttgaacatggtttgaacagttagcccttgattgrctaaaacttggtgattggcataaaaataggcttcagtctgtttacatcttcattgaggttatagttcactatgtacagagaaacgtttaggctgaacttaaaatatgtaaaaagccagctttagtctaaacttgatttaacaacataaagacttgaggcaaagagaatcccataacttgctcaagatcacagagaaatgagaaactcagaataaccctcaagttctctggctccagactggatgctgttaacctcccctaggctctcatgtttatattgctttgggcctataacttttttatgtgtgtgcatgaaattgtgaacttcttttcagtgataat

SEQ ID NO: 785447 - DNA, 577 bp, Homo sapiens
aaatataagagtttaatttagcaaagaatgatttgtgaatcaggcagcctcctgagccagagtaggctcagagactccagcacagccacctggtagaagatttatggacagaaaaaaaggaaaatgacatgcagaaaacaggtgtgaggtacagaaacaaccaaattggttgcagctaagcgggcatttgccttatttgaacttgaacatggtttgaacagttagcccttgattggctaaaacttggtgaytggcataaaaataggcttcagtctgtttacatcttcattgaggttatagttcactatgtacagagaaacgtttaggctgaacttaaaatatgtaaaaagccagctttagtctaaacttgatttaacaacataaagacttgaggcaaagagaatcccataacttgctcaagatcacagagaaatgagaaactcagaataaccctcaagttctctggctccagactggatgctgttaacctcccctaggctctcatgtttatattgctttgggcctataacttttttatgtgtgtgcatgaaattgtgaacttcttttcagtgataat

SEQ ID NO: 785448 - DNA, 577 bp, Homo sapiens
aaatataagagtttaatttagcaaagaatgatttgtgaatcaggcagcctcctgagccagagtaggctcagagactccagcacagccacctggtagaagatttatggacagaaaaaaaggaaaatgacatgcagaaaacaggtgtgaggtacagaaacaaccaaattggttgcagctaagcgggcatttgccttatttgaacttgaacatggtttgaacagttagcccttgattggctaaaacttggtgattggcataaaaataggcttcagtctgtttacatcttcattgaggttatagttcactatgtacagagaaacgtttaggctgaacttaaaatatgtaaaaagycagctttagtctaaacttgatttaacaacataaagacttgaggcaaagagaatcccataacttgctcaagatcacagagaaatgagaaactcagaataaccctcaagttctctggctccagactggatgctgttaacctcccctaggctctcatgtttatattgctttgggcctataacttttttatgtgtgtgcatgaaattgtgaacttcttttcagtgataat

SEQ ID NO: 785449 - DNA, 492 bp, Homo sapiens
atttcaaaaataaaagaagtagaagaaccacttccttatgttccattttgggactggccagcagtgcccagaaagtgggtcccaatcccaggacgttgttgacttacatgagagtaaacgcacccacaaaccagatagtcaaattaagttaatgattctctcagagacccatgccactggctcagcagggttcaaacattaccttgaataaagggtccttacaaaatgtttgagggtggaatctgcaatagrtgctgggaagtggtgaaagcaatctcccacctcggctgctccacgctgactttattcctgctgactcctcccctcaccactacaccttcacatctcctgattagtcttgtttcctcctctctcctttcattccctttcttttggacaaaataaaatcataaaagtatctcacatttgctggtaccttccatgacgagactttctgccaagcgctgcacatccatagcctccctcaagctt

SEQ ID NO: 785450 - DNA, 646 bp, Homo sapiens
aagagtggggtctgatggagagggcagctatctcctccccagaagcagtctgctcagaagcccttttccttttttgttgcaaatccatattaagtaagcagtttccttaccaaaaagaaggcaacctaccacactgagggacatcacagtagtcgtaaagttttcttggatttgtcgtgtagcaccagggaccacctacatcaccatcagggttacggcagtactgaaaacaagaaggcatgtaagctccagctcacgtggggcaggagagggagaaggtgttccaaggctcacrcatttcatgtctatccttagaagacataaaggagtgtttctttttccttccttcttttttttttttttttttttttctgaggtggagttttgctcttgtcgcccaggctggagtgcagtggcatgatctcagctcactgcaacctccatctcctgggttcaagcgattctcctgcttcagcctcctgagtagctgcaactgcaggtgcacgccaccacacctggctaatttttttttctattttcagtagagatgaggtttcaccattttggccaggctagtctcgaactcctgacctcaggtgatctgcttgtctcagcctcccaaagtgtagggattacaggtgtgagc

SEQ ID NO: 785451 - DNA, 638 bp, Homo sapiens
aggggaagcaagcttgggccttttcacatggcagcaggagagagtgaatgagtgcaggaaaaactgccatttataaaaccaacagatcttttgagaactcacttactatcaggagaacagcatgggggaaccactcccatgatccagtaaccttccagaaggtccctcccccaacaggtggagattacaattcaagatgagatttgggtggggacacagagccagacygtatcaaccctgtaatatttcactgtttaacatgatgtttcctttaggtttctttagaagcatataaccagataaaattaatttagaacattaccaaactttaaagaaaagatccagaaatgtttttgcagcatttattgagataatcatatgtgactgcaccttcatttttccctcttaatgtggggaattacattgatgtttcaatttaaaaccgaactttcattcctgaaataaatccaacttgctctcaatgtattgtgctttttgcataatttaaatttgaattgctaatattttgttaatgatatttgcatctatatttatatgagtgataaaactataattctcctttcttgtaatacctttgtcacattttgcaggcagtatggatttggatattgttttca

SEQ ID NO: 785452 - DNA, 620 bp, Homo sapiens
ttactaggtcatatggtaggtgtatgcatgactttatgagaaccaaagtggttgtacaacttaatgtttttaccagcaatacatgagagtaacagttgctccaaaacctcaccaaaacgtggtatttttagttcttttaattttagccattctagtgrgtgtgtcatgatatcttgttggtcttccaacttgcatttccctaatgaataaatgttgggcatctttttgtgtgcttattagccattcatatatcttctttgataaagtatatattcaaatattttgtccattttaaaatttaattgtttatctttttattattgagtttaaagggttttaaaatacaatctacataaaaattccttggcagttaaatggttagcaaatattttcttccagttattggcttgacttttcattttattagtggtgtctttccaagagcaaaagtcttaaatattgaaaagtcaaatttgccaatttttttcttgtgacggtttatatttttgtgcctatctcagacaatgttgactactgaaagattataaagattttcttctatgctgtgttctggacattgtataattttagcttttacatttctgtcaatgattcatttt

SEQ ID NO: 785453 - DNA, 620 bp, Homo sapiens
ttactaggtcatatggtaggtgtatgcatgactttatgagaaccaaagtggttgtacaacttaatgtttttaccagcaatacatgagagtaacagttgctccaaaacctcaccaaaacgtggtatttttagttcttttaattttagccattctagtgagtgtgtcatgatatcttgttggtcttccaacttgcatttccctaatgaataaatgttgggcatctttttgtgtgcttattagccattcatatatcttctttgataaagtatatattcaaatrttttgtccattttaaaatttaattgtttatctttttattattgagtttaaagggttttaaaatacaatctacataaaaattccttggcagttaaatggttagcaaatattttcttccagttattggcttgacttttcattttattagtggtgtctttccaagagcaaaagtcttaaatattgaaaagtcaaatttgccaatttttttcttgtgacggtttatatttttgtgcctatctcagacaatgttgactactgaaagattataaagattttcttctatgctgtgttctggacattgtataattttagcttttacatttctgtcaatgattcatttt

SEQ ID NO: 785454 - DNA, 618 bp, Homo sapiens
attttatgtgttttatgcacctcattggtggccctgctactcaaagaaactttccatgccttttactcccttggcttgagtccatgcggcagtttcccaaactatagtatgcactacctaggcttcatgtaggtgataaaattgttagtgwttgctattgattgttcttttagataaagatcaatcctaaaggctgggcgcggtggctcacacctgtaatcccagcactttgggaggccgaggcgggcagatcacctgaggtcagcaggtcgagaccagcctggccaacatggagaaaccctgcctctactaaaaatacaaaattagcagggcgtggtggcacatgcctgtaatcccagctactcgggaggctgaggcaggagaattgcttgaatccaggaggtggaggttgcagtgagccgagatggcgccattgcattccagcctgggcaacaagagcgaaactctgtctcaaaaaaaaaaaaagaaaagaaaagaaacaaaacaaagataaagattaattctatatggagaagaccaaggaattgctgatttctgaagcaatttaagtgcctcaaatatgagcctttaaaccaattttaaattggctgcagtttt

SEQ ID NO: 785455 - DNA, 486 bp, Homo sapiens
ttacaaatgccatggcaacatcaggaagtaaccctatatggcctaagaaggggaggaatgaagaaccacattcatgcttttgtttagcatatattcatatacatgtttagcatatatgcttttgtttagcatatattcaagaaataaccataaaaatgggcaaccagggctgggcgcggtggatcgtgcctgtgatcccagcactttgggaggccgaggcgggtggatcacgaggtcagcaraggtggagcttgcagtgagccaagattgcagcactgcactccagcctgggcaacagagccagactctgtctctaaaaaaaaaaaaaaaaaaaaaaaaaaaaaaaaaaaaagggcaactagccaggcgtggtggctcatgcctgtaattccagcactttgggaggccaaggcaagtggatcacctgaggtcaggagttcgagaccagcctgatcaatatggagaaacccgtctctactaaaaata

SEQ ID NO: 785456 - DNA, 486 bp, Homo sapiens
ttacaaatgccatggcaacatcaggaagtaaccctatatggcctaagaaggggaggaatgaagaaccacattcatgcttttgtttagcatatattcatatacatgtttagcatatatgcttttgtttagcatatattcaagaaataaccataaaaatgggcaaccagggctgggcgcggtggatcgtgcctgtgatcccagcactttgggaggccgaggcgggtggatcacgaggtcagcagaggtggagcttgcagtgagccaagattgcagcactgcactccagcctgggcaacaragccagactctgtctctaaaaaaaaaaaaaaaaaaaaaaaaaaaaaaaaaaaaagggcaactagccaggcgtggtggctcatgcctgtaattccagcactttgggaggccaaggcaagtggatcacctgaggtcaggagttcgagaccagcctgatcaatatggagaaacccgtctctactaaaaata

SEQ ID NO: 785457 - DNA, 624 bp, Homo sapiens
gttaatagccaggtatcataattattattacttattacttctaggcttaaccttgacttagggctctggctaggagagaaaatattttttaacccatttttcacctcttaacagtctaaaacttcctgagatgtatctctaaatatctctgtggggattaaaagcaccttagcagtgaaactccttatacgtggctttcctaaggagccaatggtgtcctcatagccataaagtctaatctgaagatataaagraggcacgatcagggcctccttgctgtgttcccatctgggccctcaccagacactgaatctgccagtgctttggtcttggacttccccggtgtccagaagcgagagaaataaatttctggctgtttgtttgtttgtttgtttgttttgagacaaagtttcactcttgtcacctaggctggagtgcaatggcacaatctcggctcattgcaacctctgcctcccgggttcaagtgattctcctgcctcagcctcccaagtagctggaattacaggctcttgccaccacgcccggctaatttttgtatttggagacggtgtttcaccatgttggtcaggctggtctcaaactccttacctcaggtaaggatcc

SEQ ID NO: 785458 - DNA, 542 bp, Homo sapiens
ccgcctaaaattcctgggctcaagcaatcctctcacctcggcctcctgagtagctggaactacaggtgtgcaccattatgtctggctaatttttaaaattttttgtaaagacagggttttgctgtgtttgttgcccaggctggtcttgaactcctgagctcaagtatcttcccaccttggcctcccaaagtgttgggattacaggtgtgagccactgtacctggctagtcttttgctttttatttatttatgttttagagatgaggtctgtctgtgttacccaggctagcctcaaactcctggactcaagggatccagyctccttagcctcccaagtagctgggactgcaggcacacgtgaccacacccagctcattagtcttttttttttttgagacagagtctcgctctgtcgcccaggctggagtgcagtggctctatctcggctcactgcaagctccgcctcccgggttcacgccattctcctgcctcagcaggtgttagccaccacgcccggcctcattagtctttttaaaaagcaa

SEQ ID NO: 785459 - DNA, 587 bp, Homo sapiens
acaatcttggctcactgcaacctccgcctcccaggttcaagcaattctcctgcatcagcctcctgagtagctgggattacaggcccatgccaccataccaagctaatttttgtatttttagtagatacggctttcaccatgttgatcaggcttgtctcaaactcctgacttcatgatccgcccacctcagcctcccaaagtgctaggattacaggcgtgagccaagtcatttgtttttggagaaagaacctggatttgaacccagagcccaggtcatgctctgagccactttgcaatatgttcacctcacagaacatctgtgatgtgtttttcctccccccataatagtgatggccatggtatgccaaggccatcctctgtaccattctcacatttaatccacgcagcagccctgcagtcrtgaggggtggtgtcctatttcccagctcagcagctgctacagaatagggttcagtgagtatgggtctgtttgatatctttaagtaggccaaataatactaaataagtttgtattgcatttttaatgcaattgtctacatttttagaaaatattgattctttttgga

SEQ ID NO: 785460 - DNA, 544 bp, Homo sapiens
atggacgagatgggcgctaccttctagctcacagctcacagttcacaatctgtagggagaaaggcgcatccacttaagcgtggcacaacgtagtaagtgctctacttgctgtaggaacaaagtgctgtagtgtgggaatcactcccaagaagtcggcgtgattaagtctatctggggcatccaaggggagtggagccgtgcagaggggtagggggcattgaagaacagttrgtactgcagcgggaccttaaagagtagtagaatttctctagtgtgagaagaatattccaggaaaagaggaacattatgagtaaaggtatggagcgatgcaagtgccagatatgtcctgagaaagtcacagccagaggataaagttcctgagtggggcagggatagctggccatgggaccagagcaatcagctcataaattgctgccttctttaccacatctcttttttgcttgtttatttcttatttggactctataggtcacatttaatatatttttcctcctgaatatttctaatcatgtttctaatttca

SEQ ID NO: 785461 - DNA, 577 bp, Homo sapiens
tcagtgttgatgatgatagatttgtagtgtgtcaaatgctgttccagaagaatgctgaaatagatcacaaattctattagagagggcagctgatttttttttcatggtctgcaagcctgtcttctctctttgctgtactttggtctgggtgtaactagaataaagagtatattcttgagctgaacggtcttttgactcactttgcctcactttgcctcctgtcaagacttgacagacattagcaagcgtgtatgggtcactaggtcatttgccattcattaggattaatcctgtttttgaaatctttattcccatagcctttttcagaacaaaaggcaactctgagggctttcctttttaacttgagctttctctgatgtccctagtttcttgaatcctttctttataaaagtaaccataaatagttatctrtccagatctattgcagtctgtaacccaaatattccactgaatccaacaaaagcaaaaaatgacaatctttaaaaaatgtgaatttacaattctacagtttagccccaaaagcacttgttagaaggatgaaagcgccaaaaaactg

SEQ ID NO: 785462 - DNA, 449 bp, Homo sapiens
acttttccaggctcagcagggagctgctggatgagaaagagcctgaagtcttgcaggactcactgggtagatggtattcgactccttcaggttatcttgaactgcctgacttaggccagccctacagcagtgctgtttactcattggaggaacagtaccttggcttggctcttgacttggacagtgagtaccttactrtgaaggtgataagcctccacctggtcttccagataggggtgatattcctgttccaagtggcccttactgacctgagagatgtcattgccacaggcaggacctatgggcgcatataggttgtaatgaaactgtagtctcagttggaagcctagacatgaaatgggtcagtgagcaaggctctattcctagtctccagccatgcctgtggcaacctgagcccgctctcagcacattggacccaggcagatgta

SEQ ID NO: 785463 - DNA, 474 bp, Homo sapiens
caatgcataaaaggaacttccatagggctggcaggagtcaggctgttcaagacaactggaaggagttgaataacatctatccagtgagtcctgcaagacttcaggctctactacctccagcagctccctgctgagcctggaaaaggaggaaaaagtaaagaataagccaggggaaatcagacacaacagagccccaactaggtttcatgggtagcatagggaagtggttaaaaaactaaaaggatagatccattaatgaggyaacaaattattgccttcatgttgggacagaacagggccaaatggaaaagaatgaaagagaaagacagatagacacacacacacacacacacacacacacacagacacacacacagacacacacacacacagagagagaacgagctcagtgaattgtccaggtgacacactgatgagggagtaacaggacactctgagttagtgccctcagga

SEQ ID NO: 785464 - DNA, 629 bp, Homo sapiens
ttgagtttcacagattatgggttttggcaattatgtaatgtcctaaatccccaatacagcatcatgcaaaatagtttcactgctgaaaattccctgtacttcaccatttcgtgcctcctcctctcctccacccctgacaaccactcatcattttactacttctatctttttgactttccaagaatgtcctagagttggaattacagtatgtaggtttccagactggcttctttctagcattatgtactttaagttcctccacgtcttttcatgacttgacagcttgttttgtaaaatcactgaatcagatttcattgtatggctacaayacagtttgtttattcattcacttggtgaaagacgtcttgggtacttccaagttttgacaattatgataaaattgctgcaagtacttatgtgcaggattttgaatgaacttaagttgtccaaagtgactgtacacttttgatttccactagctatggagagttctggttgttcctcatctttgacagcatttggtgtgttcaccgttttgtgttttagccattctgataggtttacagtgatatctcgttgttttaatgtgcaattccctcacaacaaatgattttgagcatctttctcat

SEQ ID NO: 785465 - DNA, 775 bp, Homo sapiens
gactttccaagaatgtcctagagttggaattacagtatgtaggtttccagactggcttctttctagcattatgtactttaagttcctccacgtcttttcatgacttgacagcttgttttgtaaaatcactgaatcagatttcattgtatggctacaacacagtttgtttattcattcacttggtgaaagacgtcttgggtacttccaagttttgacaattatgataaaattgctgcaagtacttatgtgcaggattttgaatgaacttaagttktccaaagtgactgtacacttttgatttccactagctatggagagttctggttgttcctcatctttgacagcatttggtgtgttcaccgttttgtgttttagccattctgataggtttacagtgatatctcgttgttttaatgtgcaattccctcacaacaaatgattttgagcatctttctcatatgcttatttgccatctgtatatcttattaatgaggtgttgagatctttcaccttttttttttttttttttttgctttgtgttgtttagttctcagaattcttcatatattttggcagcagtttttccatcagattattttgtaaatattttctcccagtctgtgacttgctttttccattctcttaacagtgtctttcacacaacagaagtttttaattttaatgaggctcaacttaatttttttttcattagtagattgtgcttttggttttgtatctaagaagccatcattgaacccaggatccctcagatttt

SEQ ID NO: 785466 - DNA, 462 bp, Homo sapiens
cacttttgatttccactagctatggagagttctggttgttcctcatcttygacagcatttggtgtgttcaccgttttgtgttttagccattctgataggtttacagtgatatctcgttgttttaatgtgcaattccctcacaacaaatgattttgagcatctttctcatatgcttatttgccatctgtatatcttattaatgaggtgttgagatctttcaccttttttttttttttttttttgctttgtgttgtttagttctcagaattcttcatatattttggcagcagtttttccatcagattattttgtaaatattttctcccagtctgtgacttgctttttccattctcttaacagtgtctttcacacaacagaagtttttaattttaatgaggctcaacttaatttttttttcattagtagattgtgcttttggttttgtatctaagaagccatcat

SEQ ID NO: 785467 - DNA, 462 bp, Homo sapiens
cacttttgatttccactagctatggagagttctggttgttcctcatctttgacagcatttggtgtgttcaccgttttgtgttttagccattctgataggtttacagtgatatctcgttgttttaatgtgcaattccctcacaacaaatgattttgagcatctttctcatatgcttatttgccatctgtatatcttattaatgaggtgttsagatctttcaccttttttttttttttttttttgctttgtgttgtttagttctcagaattcttcatatattttggcagcagtttttccatcagattattttgtaaatattttctcccagtctgtgacttgctttttccattctcttaacagtgtctttcacacaacagaagtttttaattttaatgaggctcaacttaatttttttttcattagtagattgtgcttttggttttgtatctaagaagccatcat

SEQ ID NO: 785468 - DNA, 653 bp, Homo sapiens
atattttggcagcagtttttccatcagattattttgtaaatattttctcccagtctgtgacttgctttttccattctcttaacagtgtctttcacacaacagaagtttttaattttaatgaggctcaacttaatttttttttcattagtagattgtgcttttggttttgtatctaagaagccatcattgaacccaggatccctcagattttctcctatkttatctcttaggattcttatggttttgcaccttacatttacgtgtaagatttattttataaagggtatataacatgcatacctggatttatttattttttttgcatgtggttgtccagctgttctagcaccactagttggaaaggctatctttgctgttttaaattgtctctaaacctccatggaagatcagtggactgtatgtaggcctgcttctgggctccgtattcttttccatgcatctatatgtgtgtgttttctcttttcaccaacttcacactatttgggttactgtagcttaatgtaagtcctgaagttggtagtgccaaacctcagggagtttttctgaacttcatcatgagaacctggttgagatcattgtagtaacacttggaaatgtgtgagattcccccttagtctggtcttcaaggagtt

SEQ ID NO: 785469 - DNA, 653 bp, Homo sapiens
atattttggcagcagtttttccatcagattattttgtaaatattttctcccagtctgtgacttgctttttccattctcttaacagtgtctttcacacaacagaagtttttaattttaatgaggctcaacttaatttttttttcattagtagattgtgcttttggttttgtatctaagaagccatcattgaacccaggatccctcagattttctcctattttatctcytaggattcttatggttttgcaccttacatttacgtgtaagatttattttataaagggtatataacatgcatacctggatttatttattttttttgcatgtggttgtccagctgttctagcaccactagttggaaaggctatctttgctgttttaaattgtctctaaacctccatggaagatcagtggactgtatgtaggcctgcttctgggctccgtattcttttccatgcatctatatgtgtgtgttttctcttttcaccaacttcacactatttgggttactgtagcttaatgtaagtcctgaagttggtagtgccaaacctcagggagtttttctgaacttcatcatgagaacctggttgagatcattgtagtaacacttggaaatgtgtgagattcccccttagtctggtcttcaaggagtt

SEQ ID NO: 785470 - DNA, 599 bp, Homo sapiens
ggtgaggtccgtatttcttccctctccctccctgctctggcactgagtatctggcaatagctgcatctgtctattacttcagtggccactcttccacagacgcaattctcagtgggtcccatagcattatttacctttgttcctttagctcccatcaaggaagacccagaggcattctcctcaccaaggcattaagaaatgcatgggtgaggggaacagcggcgtgcgtgtaaaggtcctgtggcacctctcttctgcaggctggaggtcatggygggagatgctgcatggatttgtcctccctgctgtcagaacaacagggttctggaagagtagaggacaggccgtgggacttggctgtctagagacaaggcgggagggatttccttgagaggcagggacatgtggtggttactaatcattgtgaggtgtctgggatgtaatggatgggaaatctactaagaagtcaacttatgtaataattagaaaagctctagttctgaggacagagacctgttggagtcaccatagtgggaatttttgacctggcatccagttcagatacctggagcttcttgactgaggggagattggatccc

SEQ ID NO: 785471 - DNA, 617 bp, Homo sapiens
agacctaagtaaagtaagtgaatagagaggaataaattagattggttacagataatgtgtaaatgcattcaggagataaggagaattagaaacaaggacattttttgtgtatttcttaggaataaaatggtaccttctacacatctcaattattaaagtacaaatagtgattgaacgaaatttttagaagaaatgttttaattgaatcttcacactagaggttttamcattcaatcaattaggttctgagaaggatggattggtacatcttaaaagacttgtaagatagcgaaggataggcagtgctaatgaccaacagcaacactcagcaggactttgtggaccaaaaaacttcaagttagaattgtgggtaaaggctgggcatggtggccctcacctgtaatcccaacactttgggagcctgtggtaggagcatcacatgaggccaggagtttgaggtttaagttacctgcagtcataccactggactcctgcctggttaacagacgctgtctcttaaaacaaaacaaaacaaaagaattgtgggtaaagtaagagcaaattgacttttgagtgatggtccgaaaacctttgtgatgggtaaagggtagaatgtc

SEQ ID NO: 785472 - DNA, 595 bp, Homo sapiens
aactcctacagtttaataataataagacaaatcaatttctttaaagagtcaaaggatttgaaacaacaaagaaaaagaagatatggccaataaacacaaggtcctcaacaccagtcactgtggaaattcaaatctgaaatcacaatgagctctcacaatggttcccacccgtcaaatggctaaatctaaacagcttgacagtaccacatgttggtattcatgtggtgcagctggaactttcttccattgctcatgagaataaaaattatacaacccacctagaaaatttaagaaaccaatatatttgctgcttaagttaaacatacacttaccatatcaccccagcaattccactcttagattttcacccaaaagatatgacaacatatgcccacacaaatacttatacatgaatgttcacaacagctttatttataataggccwaaacaagaaatagctcatgtgcccattaatgtataacacttactgtgctatataggcatagaaagcaatactactaagcaataagatgaacaaaccactggaaaatgcaaaaacacagataaatctcagaaacaaacttgaatatccatg

SEQ ID NO: 785473 - DNA, 518 bp, Homo sapiens
aaaaacaaggtatgtctggggcagcatagtgttcccagagcagactggatgtggagaaaagggattcagagttccttgacaacaacagcaatgacatccattcaaccacgcagctgccagcaatgggctcaacagccmcaaaacagatcagcagcagagctgtgtggcacactcagggccaggggaggcctccaggccagtgcacatatagctcagggaaacatggaaaagctggaagctggaactgggcagagggaacctgtgggttctgtctctgtggcattagtttagggagaagccagcctggtggtggtcaggtgtggcattagtttagggggcagccggtctggtggtggtcaggtgtggcattagtttagggggcagccggcctggtggtggtcaggtgtggcattagtttagggggcagccggcctggtggtggtcaggtgtggcattagtttagggggcagccggcctggtggtggtcaggtgtggcattagtttagggagcagccggt

SEQ ID NO: 785474 - DNA, 603 bp, Homo sapiens
ggcagatcatgaggtcaggagaccagcctggccagcatagtgaaacctcgtctctactaaaaatacaacaacaaaaaaatagccggtagtagtgtcaggtgcctgtaattccagctactcaggaggctgaggcaggggaatcccttgaacccgggaggtggaggttgcagtgagcccagatcgtgccattgcattccagcctggcgacaacactgaaactccgtctgaagaaaaaaggttactgccacgatgaggtttagagactgttctttccgttggtgaacccctggagtgatacacgcagaagtttactcccatggccaagtgatggttgtaacaggaatctaactgttggttttggggccgctcatccaagttcgctgtgccgtgacaaggcgtttcgtgtcagcgcttccctggaaaagctcctttcttcaaggttgccccagacagtcagctgtgargcctcgctctgaggcctgtctgcggctgtctctctggcattctctgtagcttctgcagagctggggtggggtggggaccactctgcccctgtggccagcggcgccgtggcctggctgtgaggcccagcaggggtttggg

SEQ ID NO: 785475 - DNA, 503 bp, Homo sapiens
gaggggcctgggcggtggagggcgggctctgcaggtgtcccgatgcccagcccagctccagactctcagggctacaagctgagggcgccggagcgcgagcctgggccggggggctctgtcctcgcgtctctagaacgaggagccggttcagagaaacccaaagaattctttctctctggaggttttcccatcrcatgagtgtttccgtcgagctcgtcctcgtactcagcggcctagaaacaggccagagagctccacacctgcccgttcctcggaattccacagcctcgccttggaggaagcgggagtcgcgacgtccccatgaggctccttcacccccgcacaagcgcccggggccggagtgtcgcctggctcctatcgggcagcatcgacctgttcattttcctcagagaacgggcatttccatgaaggaaatctgtgcgggggtgtgagtgtgaatgtgtgaatgtgtgagagggcgtttctgttgcatgtgtgtatgc

SEQ ID NO: 785476 - DNA, 503 bp, Homo sapiens
gaggggcctgggcggtggagggcgggctctgcaggtgtcccgatgcccagcccagctccagactctcagggctacaagctgagggcgccggagcgcgagcctgggccggggggctctgtcctcgcgtctctagaacgaggagccggttcagagaaacccaaagaattctttctctctggaggttttcccatcgcatgagtgtttccgtcgagctcgtcctcgtactcagyggcctagaaacaggccagagagctccacacctgcccgttcctcggaattccacagcctcgccttggaggaagcgggagtcgcgacgtccccatgaggctccttcacccccgcacaagcgcccggggccggagtgtcgcctggctcctatcgggcagcatcgacctgttcattttcctcagagaacgggcatttccatgaaggaaatctgtgcgggggtgtgagtgtgaatgtgtgaatgtgtgagagggcgtttctgttgcatgtgtgtatgc

SEQ ID NO: 785477 - DNA, 568 bp, Homo sapiens
tgtgaatgtgtgaatgtgtgagagggcgtttctgttgcatgtgtgtatgcctgaggtgtgtgtgcgtgagtgcgaatgtgtgttcatgtgcattgtgtgcatgtgtgattgtgtatgcttgtgtgtgaatgtgtgcatgagtgtgcatgtgtgactgtgaatgtgtgaatgtgtgtattcatgtgcctgtgagtgtacatatgtgagtgtgcatgtgtgaatgtgtgtaaatgtgcatgtgtggatgtgtgagagcgtgtgtatgcttgtgtgagtgcatgtatgtgacartgcatgtatgtgtgtgaatgtgtgttcatgtgtgtgcatgtatgactgagtgcatgtgtgagtgtatgcttgtgtgggtgtgtatgtatggagagtgtgcttgtgtgtgaatgtgtatgagcgtgcatgtgtgagtgttatgcttatgtgagtgtgcatgtgtgtgaatgtgcatgtgtgtgtgttcatgtgcgtgtgtgcatgtgtgaaagcatgtatgtgcttgtgtgtgaatgcatgtttatgtgagtgcatgagtgtgcatgcgtgtgtgtgc

SEQ ID NO: 785478 - DNA, 588 bp, Homo sapiens
ctcaaactcctgacctcaagtgatctgcctgcctcagcctcccaaagtgctgagattatgggcgtgagccaccatgccaggctaagaaatataaatgtacatttttttaagccaatgtaaccatttcaggcttcagcagattaagctccatgtaaacctgtggaagaagagcatttctgtgtctcacctctcacttgccacttgcagatttccaagacttcaaatgacctgccattataattaaccagtaaaaactgagcaggcttttggtatttagtgggactgaaaataatgttttaggaaattccagtttacagaagttaccttacactataatttgrtttaagtcagccgagatgagtggagcacgaaaagatggcattgagttgatttacagacacggggcatgaagctactggactatgtttgtgtttaataccagttttctagctacatgttctttctgaggggctgaagaaacacctagttggtattttaggacattaaaaataatatttaatttattaagttttaacaatgaaatgacaatcataggatatatataatgaccactcttattgaaatttc

SEQ ID NO: 785479 - DNA, 595 bp, Homo sapiens
agtgggactgaaaataatgttttaggaaattccagtttacagaagttaccttacactataatttggtttaagtcagccgagatgagtggagcacgaaaagatggcattgagttgatttacagacacggggcatgaagctactggactatgtttgtgtttaataccagttttctagctacatgttctttctgaggggctgaagaaacacctagttggtattttaggacattaaaaataatatttaatttattaagttttaacaatgaaatgacaatcataggatrtatataatgaccactcttattgaaatttcaaatatcagaagagtgtcatttatacttaattttaatttttaaaatatacttttacttgtaatcatcttcggtagacatagacacatttatttgagaaaatgtaagtaatttttgataataatttgggtatttaaaaaaatttatctagcttgtcagtaccttttcctgtttttttattaaaaaggccaaactgaaaatgcattgctttttgtttctctgatgtttctttatatcagataaaagtagtatttttccccatgaatttgtatgaaaataatgtg

SEQ ID NO: 785480 - DNA, 630 bp, Homo sapiens
aaaaggaatcatagcctcaattcttatttctcttgcaatcgtaataggtgtactcattcttgttaggtgttgtgtcataccatgcatccgtgtgctaatacaaaggattgtacaaacagcacttactagagcctcccttagttctgctacaccttattcaagtaagcatttcttttgagaagatcaaatcgaacagcaaagccaagacatgttaaaaraaagtttgaagagaaagaatcataagaaaatttaaaagggaggaattgtaagatacaatgaatttctctgagtttttcttcaaagatttagcctgctaacttccttgtcttttgttctcaaactcagctttcctgttccttcctgcccctagttactaaaaaacagcctacccctttcccttcagcactaatcaataactcacatctgttcccttggttacctgtacccattgttcccctgaaactgcacatctcacacgctccacctttgtacttcacgtccccctccccttctatatttagaaaaatatgtataagtagccaatcgtgtcagctcagattgttcagtctgaccccagcccatgggggagtggcacagaagtagggactgcgttaaggataaaaaccccct

SEQ ID NO: 785481 - DNA, 630 bp, Homo sapiens
aaaaggaatcatagcctcaattcttatttctcttgcaatcgtaataggtgtactcattcttgttaggtgttgtgtcataccatgcatccgtgtgctaatacaaaggattgtacaaacagcacttactagagcctcccttagttctgctacaccttattcaagtaagcatttcttttgagaagatcaaatcgaacagcaaagccaagacatgttaaaaaaaagtttgaagagaaagaatcataagaaaatttaaaagggaggaattgtaagatacaatgaatttctctgagtttttcttcaaagatttagcctgctaacttccttgtcttttgttctcaaactcagctttcctgttcyttcctgcccctagttactaaaaaacagcctacccctttcccttcagcactaatcaataactcacatctgttcccttggttacctgtacccattgttcccctgaaactgcacatctcacacgctccacctttgtacttcacgtccccctccccttctatatttagaaaaatatgtataagtagccaatcgtgtcagctcagattgttcagtctgaccccagcccatgggggagtggcacagaagtagggactgcgttaaggataaaaaccccct

SEQ ID NO: 785482 - DNA, 588 bp, Homo sapiens
tttccacccatctgggcacttggcaagactagaaatctgactacatcaagcctaggagcaatgagagcttggtagccataaataccatcagcccttagattttgttctctaaacaccgtacctgtggtgtgtgtagtattcctgggaaaactgtcaaactcaaagtatcaagcacccatacataacttctagtttacaggcaggtcaagagggaggagtaggttaaacgccctcacgatgagcacccacacacccagagcacaggaggttctacgaggcagtgctgggcttttcacaaattaaggaaaaaagaggttgggtggagcggggggtctgttctaaattaagagaaacttcagagacataaaaacgaaatgcaatgtatgggccctatttaaatccctatgtaaatactccaartgtttaaaaaaaaaaaaaaaaacaagagggagatagtttggaaacaattagagaaatctgaatataggtggtattacattatattaagaatgccattaatttatattcttttgataatgacattctgattatgtttttaagatgtctttttttttttttttttttttt

SEQ ID NO: 785483 - DNA, 616 bp, Homo sapiens
tccccaatgttgggggaggggccggtgagaggtgactggaccatggggtggatttcccccttgctgttctcgtgacagcaagtgaattctcgtgagatctggttatttaaaagcgtgcagcacctccccctttactctctcctccggccacgtaaagatgtgtctgcttcccctacgtcttccgccatgagtgcaagtttcctgaggcctccccagccatgcctcctgtaccgtgagttgattaaaccccttttcttcataaattacccagtctcaggtagctyttcatagcagtgtgagaatagactaaagcagcttgacatcaatgctgtgtaaggactctgcctcctgccccctgagaacaacggcttgttccttaaaaggctcccagaggcacagactcccttaacactgccagggcaacaaggggaaggagagagggaaaggaagggcactgaggagggcttctaagggcctaactctgcattgcgacgaatgtgcacagaaagaggaaggaagaaatgaggacagacagcaaaaggaaaaactagaaattctgtgttcacccttcagcccggtccccatgagaaaaaatgtcaaattgtacatcacttct

SEQ ID NO: 785484 - DNA, 643 bp, Homo sapiens
aaactcaaagcctaattgagatatacatctcctgccaccagtttaagccctgatgctaacgcctgccacagaggataattagtgaggaaacctggcacttgtaacatacagctagtcttgccatgagaagaaggagggtttagtggttaggggcatctgttcagaaagcagagggactggatttgactcctggatctatcactttccagctgtatggcctctattaagttgtttggtcccactaaacctctctttctgcatctgtaaaatggggataataatcttaatagatacctcatggagattttgtgygaattaattgaggttaacaactgtaaaatatttgtcacagttcatgatctggtgttcaataaatgtcaagtagtattatggtaattgcttaatggtgtctatcttcatttcagattattaaatgaaaacaatgttactgctaggtagtaaatgtctgcgggtcagtgttaggagaaggagaaaaggggaattaccatttattcaatgccaacctaattctggattcaccacattaatatttacaatgattctgggagaaggcattagtattcccattttacagatgaggaaagagagtcacaaagtggtttaatcacattgctaaggtcag

SEQ ID NO: 785485 - DNA, 536 bp, Homo sapiens
ttttatttatttattttttttagatggagtctcgcactgttgtttaaaatagaaataaatactttaatgatgtcacccacctactcagatccattagcagtttccaatcactcttataattaaatacaaactttctgtgagggcctaaaacaccatcacatttggtgtcttgctgagccatccaatttcatctgacactcttcattctgctgccaggagtctttgctccagccacactggcctcctttctcttctgtgacacagccaggcttgttctcacctcagggcctttgcaccaactcttccctttgtcagctccctttgggcgctrgggggttgtcttttttttaacttctgcttgctgatctgcctgactgtagcataagctccaggaaagcagatgccttgtcttgtttatctctgtattcctgtgctttaaattgggtctggcacatagttggtgcttggtaagtatttataagaggcacaaataaatattactgatcttgggactatgtgatgaggtctgtggggtg

SEQ ID NO: 785486 - DNA, 477 bp, Homo sapiens
gctaagccaaaaattactaccatccttattatacagaaaaggagacaataattcagaagtatacagtaacttgctggaggtcacacagctaataaaaggctcattagggaccaacatgaaaacctgctgcctgcctacaaagagttatgctctttctgcctgcawagcactaagtaagagctggagatattgaattataacatattgtcttcatcttgagaattaatacttgattaagaatcaagaaacaatgaacatataatgcaagagtaaacccaattgcacactcaattacgtggtttaaaaaaagtcaacacaagctgttattaattgagcagtcacagctgaaccactttgtagtaagctcatgtgtgttacatggcaaagggttcctgaggcctaaatggatgtggcccctgtcctattggaagagcctgttcagagaggcatagactccacccctgcctcccattggcc

SEQ ID NO: 785487 - DNA, 501 bp, Homo sapiens
tcatacccgagatttatggtaacaagaaagccatgcggagacctggggcattctctcctgatttatgaggagatgcacagcatgggagaaagggccagtgagagttctgctgcggaaagaataaggccttaaggactcagcctactcctgcctgagaagagggaagagagaaactggagtcacattggaccccattgcccacaactctatgttaagacttaggaagtagttctctctaaaacacaaattaactgtgctagacaaatgctgtccaccctcacatggtttctattcactcagwttaaagctcatattgaggccaaggcactcagagttcttcataatctcttcccactggctccaccagtctcacatcccacagccatcccacatactcaacacgctggcttcatctttcttcaaaccaagactgtctttcacctgtcctgtttggtggcctggtaccctgttccttgaggctggaatcacctgttccaccct

SEQ ID NO: 785488 - DNA, 614 bp, Homo sapiens
agtacagctttgtaaaattcttttttcgcttatatatctgtatgtaggtattaaattgtgatgctaaatgcatttgttactgtaaatttaagctttgatatatgaaagagctttgtaaaatgtaaagagaggtacccaagggagcaaactagttgtccagaaatcataaatgtattttgttttccttcccccatattttcaactaaaaaaaaaaaaaaagaacagaatgcactcaacaaacatattctggtttcttcagctgcccccatggcttattgtcarcatgctacctgcttgacccccgaaacgtctgaatttgtgatatctgggtaaacggtaatatgtacatatctctaattttgcactttttgcactgaattaaaatggtttttgcaatggtctccaagcatcttaagaacaggaacatgatcttttaatgtatcctccaggctggcagtgtccttaacatagtagctgttcaataaatatttctcaaacaaaagcagagtcaagatttctggatccctgttgggctcagactttgccactggccatctggatgatattgagggagccgtttctctgctgtgtgccaacgtttccctcactggtaa

SEQ ID NO: 785489 - DNA, 507 bp, Homo sapiens
aactgtgatctgaggcaggaagagcagtacaaagagccatgccagtgtcacagaaagcatctttgagaaaatggcatctgagctgatgtctgaaggacaagtcacaagagtaactagatgaagagagggtgggaaacagaagaataagacttttggagatacttcctatctctcttccaagctttaaaacctgggccaataaatgaaaagaaaaaaagtgacaatcataccactggatagccactcttgtcacgaggacaattttaagagcataaatgagacctatggagacgtatagagaaaggaatcttyagggatgtctgggccctagatggaacagatcttggtccaacattttgaacagcctatgagaatggtaaacagcggtgctctccattgctgtgagatttttagtcagatacttatttcttgccttgctgacagaggactgtcatgcctgggtcatctcaaccagccccagttttccatggtaaaaatcagggcatg

SEQ ID NO: 785490 - DNA, 507 bp, Homo sapiens
aactgtgatctgaggcaggaagagcagtacaaagagccatgccagtgtcacagaaagcatctttgagaaaatggcatctgagctgatgtctgaaggacaagtcacaagagtaactagatgaagagagggtgggaaacagaagaataagacttttggagatacttcctatctctcttccaagctttaaaacctgggccaataaatgaaaagaaaaaaagtgacaatcataccactggatagccactcttgtcacgaggacaattttaagagcataaatgagacctatggagacgtatagagaaaggaatcttcagggatgtytgggccctagatggaacagatcttggtccaacattttgaacagcctatgagaatggtaaacagcggtgctctccattgctgtgagatttttagtcagatacttatttcttgccttgctgacagaggactgtcatgcctgggtcatctcaaccagccccagttttccatggtaaaaatcagggcatg

SEQ ID NO: 785491 - DNA, 457 bp, Homo sapiens
atgtgagagaccctgccacagtgtcccagacagaggaagagccctataaaaggtcattctctcttctctgattctgattgatgaatatatgtcaaatgattaaatgaataaatcctctttcaaaaacccttttgatatatcttaagttgagctaaaatctgccttcctataacttttacccattgtacttagccctgccatctaaagccaaacacagtaaatcaactcacccttctaaatgaaaaccyttcaaatattcctgtttaataaatggaataaatacactccactttaataaatttgccctaggcccatgggcctttgcaaggaaggccaatataaatgaagatgctgtctgcacacgaaatgctttgtggatcacatgactgccactctgccccagagacagagggaagagtgtgggggagggttattgaaaatgagccggtagtagtgg

SEQ ID NO: 785492 - DNA, 617 bp, Homo sapiens
tcagtaaacacactgtgcatgctctcccaagcactagcaggccactgtgcatgtgggcagccaaccccaagggaagaatcaggggagaagggacacctgtccccggaagtatgccaacgtataagaccccaggtcgaaaggtcaaaccccacatatctccttcaagttgcccacttgggcctcttccaagtgtactttccttccttttgttcttgctctaaasctttttaataaacattcactcctgctctacagtttgtctctgtctcttcttcggctttctgtccctcagtcaaattctttcttctaaggaggcaagaattgacattgctgaggacctgcatggatttgccactgctaacagggggagatatggtatgtgctcattttaggtagggaagttggtggaggcctctttaaggaagtgacatcttaaattgatcccacaaagatgaggaaatgccaacctcctgaatcgccaggagagaatattgcagaaggattcacaaaggtaaacaccttggccttaaaaggagcttggcatgctttagaaacctaaaggaagccgatgtgcttgacacatggtgtgaggtgagccttgtacctcacagggaaga

SEQ ID NO: 785493 - DNA, 617 bp, Homo sapiens
tcagtaaacacactgtgcatgctctcccaagcactagcaggccactgtgcatgtgggcagccaaccccaagggaagaatcaggggagaagggacacctgtccccggaagtatgccaacgtataagaccccaggtcgaaaggtcaaaccccacatatctccttcaagttgcccacttgggcctcttccaagtgtactttccttccttttgttcttgctctaaagctttttaataaacattcactcctgctctacagtttgtctctgtctcttcttcggctttctgtccctcagtcaaattctttcttctaaggaggcaagaattgacattgctgaggacctgcatggatttgccactgctaacagggggagatatggtatgtgctcattttaggtagggaagttggtggaggcctctttaaggaagtgacatcttaaaytgatcccacaaagatgaggaaatgccaacctcctgaatcgccaggagagaatattgcagaaggattcacaaaggtaaacaccttggccttaaaaggagcttggcatgctttagaaacctaaaggaagccgatgtgcttgacacatggtgtgaggtgagccttgtacctcacagggaaga

SEQ ID NO: 785494 - DNA, 623 bp, Homo sapiens
gggcatgatggctcaggtttgtaatcctagcactatgggaggctgaggcgggcaaatagcttgagcccaggagttcgagaccagcctggacaacacggtgggaccccatctctacaaaaaaatacaaaaactagctggatgtggtggcatgtgcctgtagtcttagctactcgggaggctggggagggagaatctcttgagcccagggggcagaggttgcagggagctgggatagtgccactgcactccagcytgagagatagagtaagatcctgtcacaaaaataaataaataaataaataaataaatgcattacatttttgagaatggaagtgatcacccaatgaaagaatgtagaatgaaaagaggagggtatagggcaaatcactgaagaatactaatatttaaacataaggtaaaggaagaacaggtagcaaaggagagtgaggagtggctaagaagttaggaggaaaaccaaaacattatggtgtcaagaaaggcaaaaggaaagtgtatttcaaaatgaaaggaatggtcaacagtgctgaatgctgctgagagtgtgagtaaaatgaggacagataagtgcccattcgatttggcaacacgtaggtcattggtga

SEQ ID NO: 785495 - DNA, 634 bp, Homo sapiens
tttttccatctgtgcagtttagggtagatttggcatacgctcaataccaggcaagaaagaaactatggtttaggctgcttttaaagttaaaaaaaaaaaaggcagaaaaggaaactatttccttttataagcaggaatgttaaaatagggaaagctttcatcgagcaattcactactgaatcaaaactatttgatccatattctcacctacctcccctcactccgtatttgtgttgtggttagttgtcttctagatcatggtttatatatcatggtcacttcctcactaaagttaaacaatatagattattcttaaccagccacatgtgactcagaggtcaaaagagtgttctttttgggtaatctctctcaattgctaatayttaaggacctggttttcagaaccattgattatttaaaatgtatgtctttaagattaggctccacccaagatgcctcctcagaggctaagtttgaggttgagaaactagcttaaggagaaagataaagtagcagaaatgtcatggcgggtgagctgatgactcactgccccttccttgaactgcaagaatgacaaaatggaaaaggggaaaaaaaaaggcaatgccctactgcagactagaggctccatgaa

SEQ ID NO: 785496 - DNA, 647 bp, Homo sapiens
catttatctaatacactcctctgctgagatatttaacacatcttcatctgtactctcttctatctctggcaagttgccccgaagtaggacgtttacacctgaaaataaaaagtcataaaattctttaatgcttactactgttataactcagaacacraattacgaaactttatatgttaatattcttatgtaaaccatagtgttagcagtaaaaagagtagctattgaagaatgtactgcatataaaattacctaatattatccatctaggacataaactgtatttatttattttgagagaaattctctctgtgttgcccaggctgggagtgccctgcaagatcacgggtcacaatcacagatcactgcagcctgaacctccaaggctcaagtgatcctcctacctcagcctcccaagtcacttggactacaggcgtgtactaccacacatggctaattttattttgtagatacaggttcccactatgttgcccaggctagtctcaaactcctgggctcaagcaatcctctctccttgacctcccaaactgttgggattacaggcatgagccaccatgcctggcaaacacttttttttaaagggctaggacataaacattctttaaatccttttaagcaagggcttg

SEQ ID NO: 785497 - DNA, 647 bp, Homo sapiens
catttatctaatacactcctctgctgagatatttaacacatcttcatctgtactctcttctatctctggcaagttgccccgaagtaggacgtttacacctgaaaataaaaagtcataaaattctttaatgcttactactgttataactcagaacacaaattacgaaactttatatgttaatattcttatgtaaaccatagtgttagcagtaaaaagagtagctattgaagaatgtactgcatataaaattacctaatattatccatctaggacataaactgtatttatttattttgagagaaattctctctgtgttgcccaggctgggagtgccctgcaagatcacgggtcacaatcacagatcactgcagcctgaacctccaaggctcaagtgatcctcctacctcagcctcccaagtcactkggactacaggcgtgtactaccacacatggctaattttattttgtagatacaggttcccactatgttgcccaggctagtctcaaactcctgggctcaagcaatcctctctccttgacctcccaaactgttgggattacaggcatgagccaccatgcctggcaaacacttttttttaaagggctaggacataaacattctttaaatccttttaagcaagggcttg

SEQ ID NO: 785498 - DNA, 603 bp, Homo sapiens
aatagaaagtttcatcattaccgtttcattcttttgctttagaatattacacaggctttgttacttacccaggacaagccataatttctctgagactcagttttcttatctgtaaagtgagaagagtaagatctatttcacagagtagggattaaatgataaagtgtatgtagaagaactttaaacactgagtagtgcctgctgtctgtaaggcattattacaaaactaccacagagagggataacatttgttcacatcagttacacttttgtacattttagatctctcgagaggaggatgcttctgcccatgagagactcttgaagatattaattaagctcacagatttctactttgtgtttagtgttcaggaagtccccttgaaatcacttttactttactttgacttcagtaggaagatagttcataatgacaccatcaaagtaagttttaagcgtttygggcctgcttttctcaggtttgagtttttatagtttgtaatgatttttttagtaaaataagcatatgattaaaagttttatattaactactacaacttttaagtatcagttgcttctacataaccactatatttactgttc

SEQ ID NO: 785499 - DNA, 622 bp, Homo sapiens
agcactggcaaattaatcgagtcaaaagaggaggatgtaggaatctcaacttaaagccagttggtcagaagttccagaggtccagacttctgacaggtatgtgaagtaggggcagtcttggggactgtatgatctgacactatctccaggtagagagcatcagaatgaattgaactggaggacaccaagctagcgtgtctgtagaatcgactgcttgcttggtggtggcragaaaccgccatacatttggtctcaggagtcttttgtggttgtgatgtgagaggagagtaacaacagtttttgttttttccactaagtataaaagataaaaacgtatactcctgtatagggcacttaccataaatagagtttgcaggactcaacgctgttctgggtgagtcagtgagtgagtggtgagtgaatgtgaagggctaggacattactatacactactgtggactttataaacactctatacttaggctacactaaatttaacacattttttttctttaataagaaattaatctcagcttactgtaaattttttactttataaactttataattttttaaactttttgactcttttgtaataacacttagcttaaacacaaacaca

SEQ ID NO: 785500 - DNA, 363 bp, Homo sapiens
ccactgagcaagttatttaattactcagtgcttcagtttcatcatctgaaaaaaaatgtccacaataattttacctacctcatacggttgtgacaacgattaaatgagttaatacacacaaagtgcttagaatacagtaagtacacaaagttagctattatcattcaaaataagttgatatactgtgtgttcatacattctgaagaaaataraaatattttaccccaaaataaatgtatttgccatatgtttgaaatggctgcctcaggaccagaggactgagatgggggaaatttgcatctgtagagaacctccttgaatacagccaagcttcccatttctatgccttacctggatccagga

SEQ ID NO: 785501 - DNA, 595 bp, Homo sapiens
ctaactgcttgagctgggacacctcatctcccttctcctgctctcagaccggaacttataccattggctcccctggtcctcaggtgtggactaaattatcccatgggctttcctggtcctccagcttctgtgggacttctcagcctccataagcacgtggtgaaccaattcctygtagtaatttctttttcttctgtttggttcttatcagttttcctatcggttctgtttctctggagaacttgaccaatatagcctcaatgctctattttctaaaaaaattgaaatttaaaaaagttcagtttgataattaaaagtccctctgagacagagtaggaatggggcttggcttcaactcactcccgctagagcattctttcactcatctccacgattgcaaaacctacaccactacctcactgatgtcattatctctgaaccatgccttttacttaaagaattccaggaactggccttgggagatcaccaaggttgcggagtgtcccagcttgggaaggaatgctaaacaactgatttacagacttgctgccttctgccagaccagcagggggtccattactcaggataaccccag

SEQ ID NO: 785502 - DNA, 470 bp, Homo sapiens
catgcatccacagacacattagcacaaacatgtatgtgctacacacacactcccactcgatattcagagatacatgcacacagagaaacagacacacactcagacacaccatcacacatacacacgtacacaccctggctcccacacagtacatgcacatgcacacggaratacgcttgcacacaaaattaccttcaaggcacacacagatgtgcacacacatatatacatgtggagatagacgtgcacacaccccatgtacctacacaaagatacacacatatgtgcacccagacacacatgtgcacacacgtgttgagtgacagtacaagacccacccccatcgtttggctccacaacaagtgagggtgttgcggggggcagcagccatggttttgagggttcattggcttgggagagagggaagtggagcaggtccaggccggaggactcggggggagaagagacgg

SEQ ID NO: 785503 - DNA, 576 bp, Homo sapiens
gttggatgttaccattgtcataagtgattgaactagtccaacttgaagcactgatttgcagagtgtctttatattgttgtggtcttttcaccaaaattctatgggcttttctttgatactaccgttttcaacccgtgtgcacacatgcttcccagatagtctacygtcctctctttctttgtgttcatgacgatgtgaacactggcatctgtttagtggcagtcctggctgtccttcaagctagcacagcactgttgaacaaaactttgccagcattacacctcctttccagaatcaccattcatccagtgatggctgccttctaacatccagttcctctgttcccccaaatcctttagtctgagtaccatgggttgatattgacaaatgccttccctcactctggtgcaagctactgccatctgttgccagccaaagctttttaagtggcctcctggccacccaccatgctaccctctcatccactgcctacactgcagccattgtgacctttctgaagtgaatatctgatgaagttgctcatttacttaaaatcctaatggcttcctattgctg

SEQ ID NO: 785504 - DNA, 678 bp, Homo sapiens
gagttgctctggttcacacgcctctgatactagaatgcctaggacccggttctcaacagagaagcacggtggcctgagagtcaatgaaacaatggccacagcaggctgacagcccttcctcatctgcatgcgggtagaggatagcaggctcccagcagccacctcagggtttctggcccttatcccagccctaattttaactatatttcttaactttttgggtaattatgggaaaaagtggttaagtggcascttgtgaaagcctgtttctggtttactcaaaataatacaatgagtaacaggcagagactagaacagaaaatgtgacacaataaagatgagtggtacatcatgctgtcaaaaacagaaaaagaggcgagaaaagaaaggtctgctccttggcccatgatagtcaaggactgttccctacaatgttatcacagcttctggttctgactggagctactggaagttatgccaaattaagtccacataaagcctcagcgaggataaaacagtttctgggcagaggaatgtgacacagaaccaaggaaatatgactagacctcattatcttggtgcctttgataacatactggagagcagagtggggttttgaatgggctgaaatcttccataaatggagtctaaatgcaggctacataacatccaaaaact

SEQ ID NO: 785505 - DNA, 524 bp, Homo sapiens
tataatcctttagttgtcaggctctttaatacacaacaattacgagcttgagctttggagttaaacattcaggattgaattctgagtccaccacttgataactgcctacctctaggcaatctcctttagctatctaaatcttggtttcctacggacaataatgctrtttaactaaaaggattgttgtcagccttcacacagtgcttggcacacggtaagtgctcaataaatattagcaatgtgagctatcattagtattttatcattataattggcaatcatacttctgacaaactataacgtacaaaccatttcatttttattttcttcctctaggagctatataacagccaataaacactttataggtacattattctagtctgtgaacaagtgtgaattacacatttgaatagggtgaatttagaggaagctgttatcttccctgacattattccagtaacggaagccacttcattgtgagaggaagagtctgcagaggtgaagaaatgttgtttgggttc

SEQ ID NO: 785506 - DNA, 624 bp, Homo sapiens
tctgctaggacttgaggtgtctcaaaatgcatgcctcagactcgggaaacttttatatagcaagttaaaaaataatctctggctttctattgttacttttcattttttttttctgttaagctggaatttgctgaggtcaaatgtggcctccttaattccttttctcccttttattatagttatttctgtgatgtccccatccctactagatctttacatgcagctcttttggtaagttgagatgcatatttagaggcaggtatggtagaaatgtcatcataattaggtacaaagggactttagactctttaaaaattaagtcacttggaagtaaaaatagaattaatattgaattctccctttgaatttggtgcacatgtaatrtgttggtggtgagactattttaaatttcgaagagttagtggatgggagtgagaaagaaaacaagaaaaacaagaaaccacaagagtggaaagcagagatttttatttttgtgattcattacctatcatcactgcttcctttcttctccacagaatgatagtgtagaaagtgatgagatatattctaattcttgaagccttaattaacagaaattgagataggatatattcaaagccagtc

SEQ ID NO: 785507 - DNA, 445 bp, Homo sapiens
gggctgtttaaagctcccagtggttccgtgcatcagggtgagagccactgctttagagtggacaggtttgggtccatctccccactgcatcattaccagctgtacattttgttttggtttgggttttgttttttttttttgagacggagtctccctctgtcgcccaggctggagtgcagtggcgcaatctcgactcactgcaagctccatgtcctaggttcacgccattcttccgcctcagcctcccgagtagctaggactacaggcgcccgccaccatgcccrgctaatttttttgtatttttagtagagacgagatttcaccgtgttagccaggatggtctcgatctcctgacctcatgatccacctgcctcggcctcccaaagtactgggattacaggcgtgggccactgcacctggccggttttgttttgtttttcttttt

SEQ ID NO: 785508 - DNA, 505 bp, Homo sapiens
acaacggaggaactgtgaatactaattagatatttgatatcaaggaacttcattttgtcaggtgttggtactgagattaagtgtacaaagagttcttatatctttaagagatatataatgaaatatttacaagtgaaatgatatgtctagaatttgcttcaacataactccyggacaaaggggaaggggctggggtacagatgaaacaatattggtcatatattgaccactgttgaagctggatggtggtatatataggcttattacactactttatctacttttatatatttactagaaagcttataaaaagttttgaaatggataattatatttttttctgaaattttgggttatttatgttcatttaagttttggccagaacataataaaatatcagtgatttccataaaaggaatagcctgcttttataaatcatgccagaacaagagtggttacaaggcttaatactgaacagagctcatgggaagtgggagaaggggca

SEQ ID NO: 785509 - DNA, 605 bp, Homo sapiens
agccctgggctgtagggaatttggtcatggctgcttacagtgtcctttcatgagatacttctttatcctggcagatgcttttgttgctgtctgatctgtgtccagtttattcctaccaagatggccactgtctaggagatccctggctagtaaaaaagttagatttgggtgtgtcagtcaggtgagccatgtaagaggcagcacaacaaaatgcatgaagtagcagaagcagcgtattactcacaggtcctagagggaggagggcagcacaccaataggaattgagagccacctggtacaaaaaagcccaactagtatttaaaatggatgccgagacaacataaaatgacaakaattcactaccatcccttacaaactatgatttgtaaatattttctcccattacctaagctatctttttactttcttgatgatattctttgaaacacaaaattttttatttaaagaagtctaatttatttttattgttgttgttgcttatatcttgagtgttgtatgtaagaagggtttgcctacaccaaagtcacaaagatttactcctatattttctcctaagagttttatagttttagctcttaaattta

SEQ ID NO: 785510 - DNA, 510 bp, Homo sapiens
catcagtgtgctgtattcaggatacccatctcacgtgcaaagacacacacaggctcaaaataaagggatggaggaagatctaccaagcaaatagtaagcaaaaaaaaagcagggaatgcaatctcctagtctctgataaaacagactttaaaccaacaaaaatcaaaaaagacaaagaaggccactacataatggtaagggatcagttcgccaagaagagctaactatcttaaataaatatgcacctaatacaggagcacccagattcataaagcaagtccttagagacctacaaaacagacttagattcccacacaataataatgggasattttaataccccactgtcaatattagacagatcagtgagacagaagattaacaaggatatccaggacttgaactcagctctgcaccaagcagacctaatagacatctacagaactctacactccaaatcagcagaatatacattcttctcagcaccacatcacacttattctaaaattg

SEQ ID NO: 785511 - DNA, 602 bp, Homo sapiens
taaagggactgggaattagatccaaaacctgaaatggtgcaaggcccagagcatttttatactacaaaaaaaggaaaagctgcttttgaaaattgaattcagaagagaatctcccactcttagttgactcaagtgaggaccacgcaacctctctgtctacatgtgcttcttaagacatcaagggactctggtggaaatttgaggggcgttctttttctttatcttggcccaagatcccacccaatggtaatgagcagggaatggrgtcggtgatctgaggcatgaaagaggttcattatgaggaagtggagagggaaggctggatgaaaagaaagtggcttagccactctgtccccaaaggcagggagcactgaggtcagttgcagactccaaaacagtcagtaatctgttctggaaacctgaagttccttattgaacagcgcaatctttcctcaagacatggaagaaccagcactgatgcagtcagcccttcttccaaaacaggtactggcgacagagaggtgggcgtgagatggactccgggcctattgccatcttagcatgaacgctggccactgaagtaggaatacccttctcacgag

SEQ ID NO: 785512 - DNA, 634 bp, Homo sapiens
acctcccaaagtgctgggattacaggtgtgagccactgtgtttagcctagacttacctttaatagcttttgataagttattttttaatgtaattttgataaaataattgtacctaaaatgtactaatgtgttggtattgtctactatccaatctacgaacaaattttactgattcattcgtaactgaccccagagttggtttgtttgaatcactgtaactgagcctctattataaagatcatacgatgtttgttttacctactttccctttccccttgtccttttcttgctctatgcgtgcttgcttgcatgtcattatttcagtagagggtagtcactaataattgattaacttcatatcctaacctacaggggtgcctggcagattgatgaacttgtttttcttttaaagaaccaygatccttaggttatgcagacctccttgatggtgtccagaaatttgggtagagggatgccaacagctttgatcactgggggagtttcatctcccatatacccaccttactcatacaagtccccagttaaattcaaaggcagggcagatttgagagactgtctctcctgccctcttgctttggtcaaattgaataaacctttctctgttcctgagtgc

SEQ ID NO: 785513 - DNA, 548 bp, Homo sapiens
aaactgacaaacactttgtatgactctaccattttgtattgccatcagcattatatgagtattccagttgcttcacattttcaccagcattttgtattgctatctgctgaatgtgtccccaaaagtcacgtgttggaaactgaatgcccagtgcaatagtattgggaggtatggtctttgagaggtgactgagtcatgaggactcttctttcaagaatggattaggtctcttataaacagggcttacagaagtgggttcattctccttcattcttctaccatgtgaggacacagtgttccttctctctggaggatacarcattcaaggtaccaccttgaaagcaaagaccagactcttactagacaaggaacctgccagcaccttagtcttgaacttcccagttcccagaactgtgagaaaataaatttctgttattcatacatcaccgtttcaggtatttttattatagcaacacaaaaccaagatgggtattgtcttttaaaaaaaattctagtgagtgttttgtagtatctcagtgtgtttttaa

SEQ ID NO: 785514 - DNA, 656 bp, Homo sapiens
gagacttgttaaatccttttccttaaaagactcccgaaattgtatcagttccggctcccacaaaaagcatggtgtcccggccagggggtgtgtggcccaggaaggagcagggaccctcagctagcaaatcgcaaagtcaaccaagtcaaagaagggctggcgggcgggcaggccagagaaggccgcgtgtttgaatagggatagtggtcaaaagcgtttcctttcagtcaaggaaatacgaacttttcggcaatccccggggacatgaggacttgccgggcctagcaacatgtttctkacacacccacagggccgaggcgaaggggagggtgaggaccaggccttcagaggccaggacatgtgggaggggaccccaagcagagggcgggtaacccggggccctccttcttccccaggacacggcactacccactcaccatcttgggtggggccagcaccaggatgacgaaccgaacctcacaggaattctccccccagttctgtgggcgaaccaggcggctgatgcacacgtgccgcttctgtagggccttcatggtacagctggcaggggcggggaggacacagtgcacagttgcaccccagggagctggggctccccgacccagaaccccctcgaccttgacccctggcgacct

SEQ ID NO: 785515 - DNA, 600 bp, Homo sapiens
ttggtcatgtaaatggccatacagaaaactattaaattataagaagacatacaagcagccaacaagcatatgaaaaaatgctcaacatcctaatcatgagagaaatataaatcaaaaccacagtgagatagcatctcacactagtcagagtggctaccatgaaaaagtcagaaaactaaagatattcacaaggtcgaggagaaaaggaaacatttgtacactgcttgtgggaatgtaacttagttcggccactgtggaaagcagtttggagatttctcaaagaacttagaactaccactcgactyagcaatcccattaatacaaatcattctaccaaagacacatgcacgcatacgttcatcgcagcactattcacgatagcaacatggaatcaacctagatgcccatcaatggtgggctggataaaggaaatgtggtacgtacagcatggaatacttcacaaccataacaacatgaaatcatggactttgcagcaacatagatgcagctggaggtcattatcctaagtgaattaatgcaggaacagaaaaccgaacaccacatgttctcacttataagtgggagctaaacattgagtac

SEQ ID NO: 785516 - DNA, 639 bp, Homo sapiens
ttttgttttttttaaagacagggatttgctctgttggccaggctggagtgcagtggcacaatctcagctcactgcaacctctgcctcccaggctcaggcgatcctcccacctcagcaaagtgctggaattacaactgtgagccaccacaccgaggcaggctattttaaataaaggagtcagggaaggcctccctataaaagtattgtttaatttgggctctaagagatgaaaaaggctgtggctcatccctataatctcggcactttgggaagtggaggtgggtggattgcttgagcccaggagcttgaggctagcctgggcaacatggcaaaaccttgtctctattttaaaaataaaaaattaaagaagaagaagaaaaaacaagacaaagagctagttttggaacaagcgtggaaagaagattccaagcaaatggagcagtgtgtgcaaaggtcctgaggcagaaaagtcttgagcagkttgaagaactgggagagaagaagatagtgacgagtgtgcagtgaacaaagagaggagagggcagcatgataaggctctccttccctgagttctgggttagagattgttgggggaggtatgcctgggaaacctggcagtcagaagagaggctagctgga

SEQ ID NO: 785517 - DNA, 618 bp, Homo sapiens
agtaggatcttcagatgcattaagcttttccagtcacgtattgcttgtataattgcttcgtaactgttattctgtatttgtaagtgacatatcagtcaatcagtcatatttattaagtgcttagaaggtgcaaagcactgaaccattaatcatcaattattaccagtcatcacattcaatttagaaaattcagttcgtgaaaataactcattattctatttccccaaaacagtcttattacctctcacagtaatttgttgcattcctctaaaactcagagtgctgccatttttcctgctagaatttattcttgattttccctttgccttttttgctcatttaaaaattagaaagagacttcctgcctataaatttaaaatgtatgtgtcttctatgctgtcytccacctaaatttctcctgtctcatatgttttataaagaacttataagtctttattttccactttaccttacacacatctataaaatagatatctccctctccaatcatctggtatctctaatctcttccttgccttttcatggagctgattttaatttttctcatgtatctcatatttggggcaaagaagaactcaagatcctccttaaaataaa

SEQ ID NO: 785518 - DNA, 630 bp, Homo sapiens
atcttcatactacgcaccccagataaatcccattagcttttgactgaaattgtattgtcctaatctcagagttcaaccattcagcagagaccatctgaaaacaagttcaggttgcttagatggggcatgatgggctyatgagaaacaattagagaccttggacctagattatctaatgcagggttagagattccactcctagaaaccagcatgaaaaccaaaggattccacagtgtgagtatgaatcagaggtagtgcagttggaatatgatgaataaaatactgcaccagcagtagggagtctcctgttctagttaacatgtcttctaggctagttcctgtattccggctggatgaccaatcagacttagtctcagaatatatatgcttgatgatcttttccaagatttttaaggttgaaaattaaatgcatgtttcgaaagagttagtgagaaatattagtgatttttggtgccaaggaagaagtcagaagacataatttaaatcagtagtttaatattgtaacccttgtatcaaacttcatcttgataataaatgagaagttaatgggaagcagcctgcctagggaaaaccagtcactgttaaatgagaaacaacccagcccaactc

SEQ ID NO: 785519 - DNA, 562 bp, Homo sapiens
caagatgattaagttctagagaactgctgtacaacattatgcttataattattactactgtattatatagctaaaaagtttaatagtagggtaaatttcatgttaaacattcttactgtaatttaaaaaaataatatatagacgatttttatgattatgtgttttaaattgctttaatatgacacaagtgggctaaatggtaaagaaatatcgataaatgtaactattgaagttagtaatttaggccaagtgtggtggctcatgcctgtaatcccaacactttgggaggccaaggtgggaggattgtttgagccaaggagtttaagaccaccctgggtaacatagtgagactttgtctctacaaaaaataagaaaaaaaaytagccagacatggtggcacatgcctgtagcctcagctactcaggaggctcaggtgggaggatttcttgagccagggaggttgaggctgcaggaagccatgattatgccactgtacttcaccctggatgacagagtgagattgtatctcaaaaaataaataaataatttatgttcatcaaaa

SEQ ID NO: 785520 - DNA, 656 bp, Homo sapiens
gccatggtagagctaagacaaagttcaattctcctttctctttatccgtgcagttttttttccccccatattccagcatattccaggtaaaaagcttctttcttctgtgtgggttgagcactcttgttaagttttcattcttctctttgttacttggttcatctagaaaaacatttctttcccactaataaaaatacttttcttgccttacaatacctgacctaagaatagcttgaaaataaacctgaatttcccttaagataatgtaataaagggacaccagatcagacatctgttactcattacttataatccatggctaaaagtcatgctaataaggagttattgctatttgtttctcagatgcttgctcaagrgactcatgcattgtctttagtcattttcactttgcttgtgatgtcagtaaagcattagcaaaattggaaacactggctattaatggggaggaggggactcccaccataacacaatttagtgatcaaaatgtgtcagttctagccactgctcacagtgaccatgagttacatttctcagttgctgaagagcgatttggaattcttagctttctataattgttttgttttaaagagaggcaggctgcttgttatgtatattcctcatatgtggctgtggtg

SEQ ID NO: 785521 - DNA, 686 bp, Homo sapiens
gggataatttctaagaccccctgtggatgccggacactaccgctagcaccaaacaacctgattaccatcaatcagaactcatttctgttcctatcttccacccacaattgtaatgccttttccattttaaccaagcacttattatayactatggccataacttttgcagtttgaggtatgacagcaaaattagcatacatttcattttccttcttcacattttcatagatggaagagtctttcttaccacagatcatagcaacctcggcatatgacttttttctttccctattaagtcaagaacttttatcttgacttttcacttaaaggaagcactttacagcttctctttggcatatccaaattcccaacatcactactcttgcactttggggctgttgctaagtaaaataagggtgacttgaacacaagcactgcaacaccaggacattcgatctgagacctgagccaactacgatgtaactaacagtcggggactgtgtacagcatgggtatactggacaagaggataatttcatcacactactgagaatggcatgcagtttaaaacttatgaattgtttatttctgaaattttccatttaatatttttggaccgtggttgaccttaggtaacagaaaccaaggataagtggggggtattatatacatatatgtatatatgt

SEQ ID NO: 785522 - DNA, 584 bp, Homo sapiens
gagaggtaagggttatcatccccattttgtagataaggaaatgagggcacagtgaagttaaagtctaatgacttacccaagaacacccagatagtaaatggtggagcccgagttggattcgaatccagtccaatctgtctcgtatcttagccactctcctacacagccttattctgctcactcactgtgtgaccagggcatattgcctaacctctcatccactgaggatgtcattttctttagcttttgaaataatacccatgtcatagggttactgtgaaagtttggttcaggtagagctcttagattcctgtytggcacacagtgacacctcttttcaggtgacccattctcgtttgatattgtcagccattgtgaaataagagggtatagagcaaagctttccaaatggaaaaacctgctatgatttctagaaagtcttgggaaactttctagatcagttatggaggttgcagagcagaaggcctcaaggacgagatgcaaaaacagcacccatgcaagttgacttgtaaactgctttcttcatcctttaggaggaattgcccaagaggcagcatttatgg

SEQ ID NO: 785523 - DNA, 492 bp, Homo sapiens
ggtaaatcttgcttatccttataaagtcaaatgatagacatttcccatcacctatttctattcaacaagagcaccagattcagttagctaatctgcttccaaagagtagaactgcattgagctcaaataatttcaaaatactgacttttwtttatttatttatttattttttagatgtggtcttgctatgttgcccgggctggtctctaactcctgggctcacacgatccacccacctcggcctcccagcatgctgggattacaggcgtgaaccaccatacccagcctatttctgcgtatgttaaacatgctttacaattttaaaaatgaactgttttgaaggtaaaattacaaatcttgaaattaaaaaagcaaatatgtaaaggagcaaaaactataaatcaaacatttgagaagagaaaattggaggctaacttgtattaaattcacaaaaacttctatactttctgtaaatacttttttaaaaaacta

SEQ ID NO: 785524 - DNA, 646 bp, Homo sapiens
tttcagagggggtggtgggcagaggacagcaggctgttgtcctgaagcccctagaacctagcggagaagaggcaggacccaaaagaaggaggtgtgttcaccctgtaggacttgctttgtaggtgcaggtgcccagaggccaggcccgtcagtgctacctggggtggggctggagaagggaaggcctgccaggccccataggtgatgggagggccaggacctcaggttggagggaaccactgaatcctcggccctgtggtgcaggcccacacagggcatagcccctgggcactggcactgcccactgcccactgcccgtgtgtgctggggccatgccagccttctccgctgctaaactggcttcttcaccctccctcagkgggcacagctgccgcttccatctcagtgtctgcttctcccttgcttggtgggtcattatgtgcccacttagccataggctttcactgagtccccaccttcatgcaggatgtgggaggtcccaggggcccccaggcagctcaggctggcctgccctctagtggggagcagagcagacagatctcccagcccagtgggggccagctgtggtggagcccgcctccccattctattcttggagaggaaaagcacagaaatacaggagtga

SEQ ID NO: 785525 - DNA, 626 bp, Homo sapiens
cataccactgcactccaaccgggtgacagagcaagaccctgtctaaaaaaaaataataattaatttaaaaaattcctgcggtataggaaaactcagtttcacacttgtggaaatgggcacaaaaggttagaaatttggtcaagggctgggcgcagtggctcatgcctgtaatccctgcactttgggaggccgaggcgggcggatcacgaggtcaggagatagagaccatcctggctaacggtgaaaccccgtctctactgaaaacacaaaaaattagctgggcgtggtggcgggtgcctgtagtcccagctactcaggaggctgaggcaaaagaatcacttgaacccaggaggcggaggttacagtgagccaagatagtgccactgcactccagcctgggcaaagcgagactccgtctcaaaaaaaaaaaaaaaaaagaaatttggtcaaggtgaaacatccttgggccrgaattctatcctctgtagtaagtgtagtgagcgattaggccagaattcttgtctttctgcaaggcccatgttctttctactgccaagaaagagaaacaatcatcagggtatctataccgaatagcctcacaagggaggcagggcaggcattggctc

SEQ ID NO: 785526 - DNA, 394 bp, Homo sapiens
agtatcatatccctagataagcccaatacacttggaaggtaatcaatatttcttttcttttttgagacatggttttactctgttccccaagctggagtgcaatggtgcaaacacagcccactgaaacctcaaactcctaggttcaaggaatcctctgacttcagcctcctgagtagctgggaccacacacacacaccactatgtccagccgatcaatatttcwtgtttttttttgtttttttgtttttttatatggggtctcactctgtcacccagggtggagtgcagtgccacgatcatgtttcactgcagccttgacctcccgggcccaaacaatcctcccaccaccttagcctccggagtagctgggaccacaggcatgcaccaccatgcc

SEQ ID NO: 785527 - DNA, 575 bp, Homo sapiens
tacatatctatgttttgttgttgttattgctgttgtttttgaaacggagtctcgctctgtcgcccaggctagagtgcagtgacgcaatctcggctcattgcaaccttcacctcccagggtcaagtgattctcctgcctcaacctcccgagtaggtgggattacagatgcgtgacactatgcccagttaattgttgtatttttagtagagacagtgtttcaccatgctggtcaggctatctcgaactcctgacctcttgatccgcctggcttggcctcccaaagtgctgggattgtagcaggacgagccgcagacaaaacctctcagacaccgagttgtagaaggaagggctttattcagctgggagyatcggcaagctactgccttaaaatccgagctccccaagtgcacaatttctgtcccttttaagggctcacaacactaaagatttcgcatgaaaggatcgtgattgatttgagcaagcaggcggtacgtgacaggggctgcatgcaccggtggtcagagagaaacagaacacggcagggagtttcacaatgttcttctatacaatgtctg

SEQ ID NO: 785528 - DNA, 629 bp, Homo sapiens
ataacaaacacccccaaatctcaggggcttccaacaacaagcatgcgtttctcacagttctgggcatcagttgtgggtggtcggctgattggtggcttctgctggaatctgatgggcagggctccagactgtagattgggttcaggtgtgatccacgtgtcttattgcagaccccaggctgaaggagcagccagctacctggggtatgcccttctcatccaagacgkcaggagtgcaagagcaggggcaggaacccaggatgtctcccgagctctctgctcagaacaggtacaaggtcactttgcccatcccccatcagtatgtgcaagtcacacagccaacccaaagtcagtgggggcagggcaatatactctgcccacagggaaacacaaaatggggagagagaaggaatcctttctggaaaataataatagaatccaccacaccatggcagcaacagcaagatggcagtggtgtccttactggtctggatctgggctgtggttcccacccaatttatcttatttttgtagaaacaggtggtgctggggcggtaggcggtggggggtggggtgggggttcttgttatgttgcccaggctggccttgaactcctagcctcaagcaatc

SEQ ID NO: 785529 - DNA, 629 bp, Homo sapiens
ataacaaacacccccaaatctcaggggcttccaacaacaagcatgcgtttctcacagttctgggcatcagttgtgggtggtcggctgattggtggcttctgctggaatctgatgggcagggctccagactgtagattgggttcaggtgtgatccacgtgtcttattgcagaccccaggctgaaggagcagccagctacctggggtatgcccttctcatccaagacggcaggagtgcaagagcaggggcaggaacccaggatgtctcccgagctctctgctcagaacaggtacaaggtcactttgcccatcccccatcagtatgtgcaagtcacacagccaacccaaagtcagtgggggcagggcaatatactctgcccacagggaaacacaaartggggagagagaaggaatcctttctggaaaataataatagaatccaccacaccatggcagcaacagcaagatggcagtggtgtccttactggtctggatctgggctgtggttcccacccaatttatcttatttttgtagaaacaggtggtgctggggcggtaggcggtggggggtggggtgggggttcttgttatgttgcccaggctggccttgaactcctagcctcaagcaatc

SEQ ID NO: 785530 - DNA, 629 bp, Homo sapiens
ataacaaacacccccaaatctcaggggcttccaacaacaagcatgcgtttctcacagttctgggcatcagttgtgggtggtcggctgattggtggcttctgctggaatctgatgggcagggctccagactgtagattgggttcaggtgtgatccacgtgtcttattgcagaccccaggctgaaggagcagccagctacctggggtatgcccttctcatccaagacggcaggagtgcaagagcaggggcaggaacccaggatgtctcccgagctctctgctcagaacaggtacaaggtcactttgcccatcccccatcagtatgtgcaagtcacacagccaacccaaagtcagtgggggcagggcaatatactctgcccacagggaaacacaaaatggggmgagagaaggaatcctttctggaaaataataatagaatccaccacaccatggcagcaacagcaagatggcagtggtgtccttactggtctggatctgggctgtggttcccacccaatttatcttatttttgtagaaacaggtggtgctggggcggtaggcggtggggggtggggtgggggttcttgttatgttgcccaggctggccttgaactcctagcctcaagcaatc

SEQ ID NO: 785531 - DNA, 509 bp, Homo sapiens
gcttggagatcataagctggtggcctgcaggcctaccttgggctgcagataggttctctttgtcctgtcagtgggtaggcaaccttttgaattagtcaccacattttaaaaattgggagctgttaaataaaaacaaaacttgcaattataaacttccagcttctcttaaaaactgagaagatctaggttcactgggacacacactcctcagggggagcttttgatggaggcactggccccagctctccacagccccaccccaccagcagccagcatggtctccgttaccttccctgtagtcagctgagtgctccccaggtgagcgatgaaggactgtttcttcctcccttgcctcaccyacttacctgctcttcctctgccacctacagcacaaagtcagtctcctgactggtctctgggcctcaggtctctctcctcaccaactccatccttgcaaggctgccaggctaaccctctgaaaaacactgctttcgagaaaccagcaatgg

SEQ ID NO: 785532 - DNA, 671 bp, Homo sapiens
taaaagatggtaactaatctatttgaaggctactgtgatacaacgacagacctaacctaaaacagtgaccaaatttttagactcttatcacttactcagtagactggatatagataataaaagataaatccctctttccatgccttcctattctgattaagaataaagaaaatttgactgcaataggatctgaatggaaaactaatagtcatttttctacattcagaaatagaggatgtaacctatacttcagccagaagttttcaatttcttagcagtgacaatttaagtaaatttcatacgagttgtggggatctaactttgttatgattgacaatataaaattagccttttctgctgttaagattatctagcatacctgtcattcaggtggaatgtggaacgagattgcccagctgtggatttgaacatcattaaagtcaacaaagggttmaaagttacttcctctgatggatttaaaattgccgcatacacgcaaacaagtttttcaaactgccccattttatgtctttgttgagagacagtatagttgctgcattttaatgtccagattatattacagatatatttcagtaaaccatgaagaaccatcatagattctagaagctggtgatctgtgcttaaataagcatctcctgcagcatcttttt

SEQ ID NO: 785533 - DNA, 629 bp, Homo sapiens
tattgtagtaacagtttatttccacttattttagcaataatatttgaaatttttaaaatatatcatatttttaatcagatttttctattttcactttcttttttattgttgagtagaaatttatattgtgtatataccaatagctgtttatccattcatcagaggctgaacatttgtgttgtttccagtttatagctcttaccaataaagctactacaacattmacttgccaatctttgtgcagacataggttggtttgtttgtttcctcttgagtaaatacctgcagtgggattgatgccattctttttcaaagttattgtactatttgcattttcaccatcaatgtatgaaagtatcagttgcttcagatttttgccagcttttttctgttttattaactttttcccttttttaaggttttcagtttcatgctattgtgagtttaatgtgcattttcttaatgactaatgatattgaccatcttttcaaatgtatacttgccatacttatttcttctctggtaaaacatctgtccatacttttggatgtttctaaattagttttctcattttttatttttgagtattaacatgcttaatcagatatttgtttaataaacacatactt

SEQ ID NO: 785534 - DNA, 658 bp, Homo sapiens
tactcatgttcttttctttacctgtaatatttattgatttggttatccagacatatttatgatcacatataaatatctggtaacttagaaacactgttcttaagcatcttaaatctccatttcacaaaacaattttatttagtctttatgttcctctttgacatcagtctttgtcacaattcaagtagcattttgagtaatgggagagcattttctcaagtacattgacattacttccagctaagttgttttgagatttttaaaaattcttaaattcttaaaatatgctattaatgaaaacttactctgrgcctcatatacccacttgcataatatttagtagagttgattcttttactcgtcatctagaggtatctttgtgatctctacaaaataacttcatgacttctgctttttattttttgaaaattgagatagaatttacatgccataaaattaactatttaaatgtgtacaattcagtggtcttcagtatatacacagtcatgtaaccatcaccattatctcattccaaaacactttttgtcaccccccaaaagccccatacacattagcagtcactatctataaaccccccaacgacacccatcccctgtcatgcacttcctgtctctatgacttgcctattttgcacatt

SEQ ID NO: 785535 - DNA, 658 bp, Homo sapiens
tactcatgttcttttctttacctgtaatatttattgatttggttatccagacatatttatgatcacatataaatatctggtaacttagaaacactgttcttaagcatcttaaatctccatttcacaaaacaattttatttagtctttatgttcctctttgacatcagtctttgtcacaattcaagtagcattttgagtaatgggagagcattttctcaagtacattgacattacttccagctaagttgttttgagatttttaaaaattcttaaattcttaaaatatgctattaatgaaaacttactctgagcctcatatacccacttgcataatatttagtagagttgattcttttactcrtcatctagaggtatctttgtgatctctacaaaataacttcatgacttctgctttttattttttgaaaattgagatagaatttacatgccataaaattaactatttaaatgtgtacaattcagtggtcttcagtatatacacagtcatgtaaccatcaccattatctcattccaaaacactttttgtcaccccccaaaagccccatacacattagcagtcactatctataaaccccccaacgacacccatcccctgtcatgcacttcctgtctctatgacttgcctattttgcacatt

SEQ ID NO: 785536 - DNA, 634 bp, Homo sapiens
tgtgaactgacagtctgcagccatcttttccttgggggcatttgcttactctaaaagcaagacaggaggctgagaatccaggcctcattttcacatggccctcctgagaacagagaaatcagaagaactaagcaaacaacaataacagcaacaacaacaagacaaacagcttaagcgtttacgggccatgatactagggtacagtaatggaggcagaacaatactgatccagatataaggctgatatttcttctaatgtgtttgccaaaatctgatgatgcaaagagtataaggctaagaaactgaaagaaaaawgttgttctgattatttattactttattttatatttttgtgaggttattcagaaattacaatgttcagagtttagaaatcaagagaagtggagcaccagtgactacaccaagctttcaatttgaagcccaggaaaacttcaccctaactgctttacccaaaggctgaggcttttcaaactttaatttggtgcatgcatggatcaaggtcataagcacgttctatttgcctaggagatcagaagctgaaccttccctggttgaaaaatagcatcagttggagccttaataattttttatacaatataaaaatttgacaaaa

SEQ ID NO: 785537 - DNA, 634 bp, Homo sapiens
tgtgaactgacagtctgcagccatcttttccttgggggcatttgcttactctaaaagcaagacaggaggctgagaatccaggcctcattttcacatggccctcctgagaacagagaaatcagaagaactaagcaaacaacaataacagcaacaacaacaagacaaacagcttaagcgtttacgggccatgatactagggtacagtaatggaggcagaacaatactgatccagatataaggctgatatttcttctaatgtgtttgccaaaatctgatgatgcaaagagtataaggctaagaaactgaaagaaaaaagttgttctgattatttattactttattttatatttttgtgaggttattcagaaattacaatgttcagagtttagaaatcaagagaagtggagcaccagtgactacaccaagctttcaatttgaagcccaggaaaacttcaccctaactgctttacccaaaggctgaggctkttcaaactttaatttggtgcatgcatggatcaaggtcataagcacgttctatttgcctaggagatcagaagctgaaccttccctggttgaaaaatagcatcagttggagccttaataattttttatacaatataaaaatttgacaaaa

SEQ ID NO: 785538 - DNA, 641 bp, Homo sapiens
tatatggatgataaatatgcataataagagtctcaaaatcagtagtcattagggaaatactaattgaaaccatgagataccataggttgtttgcaagaataaacgtgatataccatttgtgaaaataaattagaaatttcttataaagttaaacataagcccatgactcagtaatcctactcacagtatttaaccaaggtaaatgaagacttaggttcatacaaaaacttgtatggaaaggtttataatggtcttatttattattgtcaaaaactgggaaaacctaaacatccttcattggttaatggataaatagtgacatatacatccaatgaaatactagtcagcaatagaaaaacctgattaataatatacacacaacatggatgaatctcaaatgcatgtgctaagtaacaagaggcagagagaaaaaattttatatggtatgtttctatctaatgacattctggaaaagtaaaatataggaacrgaaagcacattagtgtttgctatgggctgggcgggcaggaggtgttgactataaagtgcagcaacaggggttatttggggggtgatgaactattttgcagtttgattgtggtcatggttttatatgactgtaagcatttatcaaatttgac

SEQ ID NO: 785539 - DNA, 576 bp, Homo sapiens
gctgactagggctgggcacagtggctcatgcctgtaatcccagcactttgggaggctgaggcaggtgtatcacttgagctcaggagttcaagaccagcctgggcaacatcatgagacccctatctcyactaaaaatacaaaaaaaatagccagctgggcacgctgatgtgcacctgtggtcccagctactcgggaggctgaggtgggaggatcacttgattccagggatggggcagggcagaggttgcagtgagccaaaatcacaccactgcactccagtctgcgtgacagagctagaccctgtctccaaaacaacaacaacaaaaaaagatggctgactaaaagcatttcatatgctcacctcctccacttagaaaaaccaaaagagtatatagacaatcatacttctgataaattatctaagatagaacactggaattcaacaggaaagtgacaggaaacacagaaagcaaggaaggagaaagaagagaagcagcctacctggctgagattggctaggaaacagcaagtgacttcccaagggtaagcaagagacttctagcagcccacatcccc

SEQ ID NO: 785540 - DNA, 576 bp, Homo sapiens
gctgactagggctgggcacagtggctcatgcctgtaatcccagcactttgggaggctgaggcaggtgtatcacttgagctcaggagttcaagaccagcctgggcaacatcatgagacccctatctccactaaaaatacaaaaaaaatagccagctgggcacgctgatgtgcacctgtggtcccagctactcgggaggctgaggtgggaggatcacttgattccagggatggggcagggcagaggttgcagtgagccaaaatcacaccactgcactccagtctgcgtgacagagctagaccctgtctccaaaacaacaacaacaaaaaaagatggctgactaraagcatttcatatgctcacctcctccacttagaaaaaccaaaagagtatatagacaatcatacttctgataaattatctaagatagaacactggaattcaacaggaaagtgacaggaaacacagaaagcaaggaaggagaaagaagagaagcagcctacctggctgagattggctaggaaacagcaagtgacttcccaagggtaagcaagagacttctagcagcccacatcccc

SEQ ID NO: 785541 - DNA, 570 bp, Homo sapiens
tgagttcatcaggaatatttcttatttccatgttactataggcaacagtcctgtcaaactttcaacacttcccctttcatcgatcttccaataagattttcttcactttcccttaaaccttcactgacagcctcattaagaacctttaggccgggcgcggtggytcacacctgtaatcccagcactttgggaggccgaggcaggcggatcatgaggtcaggagatcgagaccatcctggctaacacggtgaaaccccgtctctactaaaaatacaaaaaattagccaggtgtggtggcgggcgcctgtagtcccagctactcgagaggctgaggcaggagaatggcgtgaacccgggaggcggagcttgcagtgagccgagatcacgccaatgcactccagcctgggcgacagagcaagactctgtctcaaaaacaaaaaaaaacaaaacaaaaaaaaaacctttaggcttccattaaaactctcctcgagtctccttcagttttcactgacactctgtgtggtcctttatgcttctttctgctccccaggtccagagccaatgccatgt

SEQ ID NO: 785542 - DNA, 687 bp, Homo sapiens
attttaacttaattatctctttgaagaccctttctccaaatattgtgggatcctaggggtgttgcttttctggccggaaacctgtggccagtggtgcctttgcctgagttttgcttgggcccactgggctcgttccactcacttggcctggcaggctgctcatgctatcagcctggatctcacgcctccaagagagactggagttaggcatggagtggtgaggagtgtgtatgaacgagcttggggcccatctactgcgcagtcagacacaccagctcctgccgcaagtgggcagctccaggtgcagcatggatgccagctctctgtgaggctgcagctggaccaggcacaccacaagcagcttccctggctggcaccaaagaatgcagtagtscccaaaagcttggaggaaccacagggccggaaagagggagtcacagccctgactccggaagctcccaggtctgggctccccaaagggctgcagctcttccctccttctctttgcccaaactgcagcaagcagggggcatatttcagcccttttggtgttacagcaactcttttagccacgccgttcagcagatcccgagttcttgtcctgcaaccaggaagaatgaggtacgcagacaagtggagggtgagcaagatgaagaggtgctgtattgagcaatggaacagctcaga

SEQ ID NO: 785543 - DNA, 687 bp, Homo sapiens
attttaacttaattatctctttgaagaccctttctccaaatattgtgggatcctaggggtgttgcttttctggccggaaacctgtggccagtggtgcctttgcctgagttttgcttgggcccactgggctcgttccactcacttggcctggcaggctgctcatgctatcagcctggatctcacgcctccaagagagactggagttaggcatggagtggtgaggagtgtgtatgaacgagcttggggcccatctactgcgcagtcagacacaccagctcctgccgcaagtgggcagctccaggtgcagcatggatgccagctctctgtgaggctgcagctggaccaggcacaccacaagcagcttccctggctggcaccaaagaatgcagtagtccccaaaagcttggaggaaccacagggccggaaagagggagtcacagccctgactccggaagctcccaggtctgggcyccccaaagggctgcagctcttccctccttctctttgcccaaactgcagcaagcagggggcatatttcagcccttttggtgttacagcaactcttttagccacgccgttcagcagatcccgagttcttgtcctgcaaccaggaagaatgaggtacgcagacaagtggagggtgagcaagatgaagaggtgctgtattgagcaatggaacagctcaga

SEQ ID NO: 785544 - DNA, 687 bp, Homo sapiens
attttaacttaattatctctttgaagaccctttctccaaatattgtgggatcctaggggtgttgcttttctggccggaaacctgtggccagtggtgcctttgcctgagttttgcttgggcccactgggctcgttccactcacttggcctggcaggctgctcatgctatcagcctggatctcacgcctccaagagagactggagttaggcatggagtggtgaggagtgtgtatgaacgagcttggggcccatctactgcgcagtcagacacaccagctcctgccgcaagtgggcagctccaggtgcagcatggatgccagctctctgtgaggctgcagctggaccaggcacaccacaagcagcttccctggctggcaccaaagaatgcagtagtccccaaaagcttggaggaaccacagggccggaaagagggagtcacagccctgactccggaagctcccaggtctgggctccccaaasggctgcagctcttccctccttctctttgcccaaactgcagcaagcagggggcatatttcagcccttttggtgttacagcaactcttttagccacgccgttcagcagatcccgagttcttgtcctgcaaccaggaagaatgaggtacgcagacaagtggagggtgagcaagatgaagaggtgctgtattgagcaatggaacagctcaga

SEQ ID NO: 785545 - DNA, 594 bp, Homo sapiens
aagataatatcgagagtttggagtatggttcttacccaggatccccataaaccaaaccatctaaaatgaaatagatcaaacaatgagctagataaagagtctgctcgcttaactaagcagtctcttttctaatcccctacaacygaatctctatactacccaatgttttctccatgtgccacaagtgtcagcagctgcacagatacttctgtttagccagtaagtaatctagagtaaatctattatttagcataactttcacaagagaatttaaggtctgttgtgtaaccatagcctttacagtagaatctgctatagagcctatcatgagggatacatttttaatcattgcctcttttactccaaaccatggaaaaaggacctaacaaatgatgcccttatagaacagtgaagccctcctggcaatgttctttttaacccatgatgtgggttaagaagagtgaaacagtgctctgtttctgactatgaggcaacatatgtaccattaaagtttctcacctacattgggccttcatctttcatctatcaaggtataaggttatccatgcataaggctggctgcaaaatcctttg

SEQ ID NO: 785546 - DNA, 507 bp, Homo sapiens
gccttccgagggaaaattcctgctgaacccaaaccattcacaggaaaccagcatcagaaaagaccattctgtagccatcatgaagtaggcaaaaccaagaaccttccatcattgtgtctgagcacagccaagaacaggaaccctacaagctgtgaacatgaccacccatccttagcaactatagctccagtctccctattcctcgtaccccttggataaaaatcagtgaataaccagtcatagttactccatgtcgtgaygatatccacaataggctctgcttcctgcttccttgactactccgaggatcacccaaccttagcccaggtcccatcacaatttcctctacacctcttactgggaacatcaaggttctccatggcctgtagtctctcctgagctgcagtaggtaatagaccagactttgactcgtggtctctggctggggagcatggactgtactgatgctttgagggccctggtcggagaggtggttctctctcagga

SEQ ID NO: 785547 - DNA, 617 bp, Homo sapiens
gtccctgaaggggctgactcccagcactgggcaaacgccgtctccttccactttcaaagccaaactgagctctgtagcaaattcctaaaggtatttatgttttctctgatatattcatgaataatatgagttgtgtgtgtttccctaggtctcctcttcttttagctatggcaaatactgagttgtgatttgttttttatatctatttctccttcactgaactaaactctttgtggatcaaggctgtgtgtgtcactgtggattccatccatcggcacaggcctggcatagcacagtgtctgctcggtacaatatttattcccaaatctatttctttgtcaattcttccctcctgcagggctgggtgcagctgtaggcctgggcatcactggagctccagtctatgcatcactgtaactgactggagaggcagggaatggatgtrcacgatgtacctgcagggacaggtgacttagctcagctgtaagaaaagatgcctgctgaaatattgatgacttctcactgtgcattcttgctttggagaacattttatcagtatgtgtgaaatgcctgcatagcagggaggatgacttgattaataagtcacatgaagccta

SEQ ID NO: 785548 - DNA, 523 bp, Homo sapiens
ccaattatagaaagcactctgctgtttggtgtctattaaacagagtttctattaatgaagtcttctccttagcaaccaagcaaggataattgatgtttaaatgataaccctgaggactgtgaaactctaaagttatcagagaaaaattaatattcctataatgtttctgcaacttatttttatagaacagcacaaacagcagrgaattaaggtaaatggaaagaattcttagcaaacaaagattatgttgattattagattcgaggtttagagttgaagaattggactttgaaagaatctcatgtaattttatgtaagggaaagtgacacccatggttcacacagttagaaaatacggccaaggttcaagctcctggcctcgcaccccttctttaccagtgatcttggagtctcctctgattcatcctgcatagcaaacattcaaggtaggcaaatttgcccttgacaaaggttggatcctctttcttgtttatcattatttcttccctttcagtggttgacc

SEQ ID NO: 785549 - DNA, 610 bp, Homo sapiens
cctcccagccccagtggggggcctggccagggctctgatggggctgggagaacacaagagctggacctcagtgaggctggggcttgtgagaagtgcggggccaggtccagcttttgagggaggcaagcagggtgtgtgtgggatctttcacagccaggccgaggggctggtgagtggaactgggaccccagacatggctgcagcctgtcctgccttccttgcccctgccccagcccagccccagcctgggcctcccctgcccctgcagtttgtttgggtaactcaacagcctgctgatttatgggacattccgcagggttttatctgcccagccrctttctctcagttcctttgaagtagaaaagggtgtttcggccagaaacacccaaaaccctttagtgatgcagaaagaaaagaaaggccgggccttctgctgggccgggccaggggaggggcactgtgggactgaccagagaagtttatgggacctgtggattcattctggctcctggtcccagccccagccccaaattctgggggtcggtggtgtttgctttgctcttaagcaaagggtctaaggccaagccttcctccctccctcctgtgtgca

SEQ ID NO: 785550 - DNA, 588 bp, Homo sapiens
tctctattccttaaagaatcagaagaattctagcacatccaaaaattgctacaccaatgaaaatgacttatgttatttaaactgttgaaatcctagccactcaactgtttcttcaaatgaaatcttatggaggaagtcaaatgtaagagaagcttcactgactgcagtgggatggggctggcagcaactccattcacaggcattctgtttcccaccacggcccctcattagatccctggcctctcaaaagagtgttaaggctctaaaactataccaggaagtatatttttgcaaaaccaaatgggctctaagtaattagttttcaaaattctccagtgtattgttttggayttatgtttcagactggtgataaaatttcagcacctcacaacaccatgacacggcagggcagaaggaaaccctctgccgggaagcagatgacctggacgtcagccccagctttgccattaactggctcctcaagccagggcaagtcagtttcttctgacacaaaatgaggggtttagatgaaatggtccataaagtctctgcctattttaaaatactgtaattaatcaacatttgaac

SEQ ID NO: 785551 - DNA, 615 bp, Homo sapiens
ggtctgccatcagcttcctgtgaaatcccaggcaaggtgcttgggatttcccatggagcaaaatgcaggagttagactagctcgccagagttttttccagctctaaaacgtcttcagcatttgtccagagagtgtgatcagttgcttatgatacagttatggttaatgggaaatgattattttaaggcaaagtggggagagaatatataggtctttatgcccatatgtgtatgatgtatgcatgggttttatctctctagtatcctggaatatgttagtctgcacagtgaaatctatgtaattaaaaaaaaatctagagtaaaatttgctctactatagtttttgtaggtgaaaaagaacgaacttttcttccagagactacaaagcagakttttttttttcccatttgagaacctctagatactaatactacacatttctttttctggaagaaaacttcatgtaaggtaagatcttagcctctgaagactaagacactgccatgtgttggacatgttttattacttgattttgttctttggtaatgtaatttttttctcttttctttctcttctctgtagtcagaaaaatgggtaagaagagtcgagtaaaaac

SEQ ID NO: 785552 - DNA, 657 bp, Homo sapiens
ccactgcactccagcctgggggacagagcaagactctgccttaaaaaaaagaaaaagtgtctattgtcatctcaactgcaccacttcccaaaactcaccagaattctcctgggctgagttcatttcataatctcatgctaatggagagtgatttccgtggactcataccttaaggaattgtggttytctcagagccagccttaaagggtaataggcattcaaaactgctaaggcagctcccaggcaccgttacacccctattaaatcacacacaccattaaaaggataaaagcccgagctggcagggctgtggggaacttagcacgtgtgagcatggctttcctcctagggtgctcttccccagctctgctgcctgcaggaatgggagcctcctttcaggctcagcacacgcgtctctgcagtgacaccttcccagctccccagtcagaattgctgcccttcctggcagttccatagcacatgggtcttgttcatggcactttgcactgtctctgtcttaactcccaggtaggctctgaaattgatgacagggatggaagctcattcgttcagtccacagcatgctgagtgctttatgctcttggcctgtgatcctcactagcaccctttaatgtggtgaccatcccattttacaga

SEQ ID NO: 785553 - DNA, 680 bp, Homo sapiens
actcctgacctcgtgatctgcctgcctcagcctcccaagctgaggatcccaagctgggattacaggtgtgagccaccgtgcccggccaactctaagtcttagttgcggcatctgtaaaatggacccagcaccagggccagtacmcggggtgtcgggagggatagtgagatcatggtgaggctcggtgaggcactgccaccaattacaaattacacagctcctgtctccctctcaccctccccagtccccaggctacacaggctgctttgagtacatcccagtgcccagagctgtgcccaggcctggcacgatgtttctgcagggcttctccatgctcctcctgcccggccaggccctgctctgggctctgtagagaggagttagctccaaggtgcacatggccaaccccatacaccagatgtgcacccctcgcattcctttcctacctgggtccctgaaagccagcagtgttcctggggtgtctgagcccctgctctgtgcccacaccggcctaggcattgggaggggccccatggagaggaggcacctgaaggaagcagctgagctgagttccagagaatctttgagagagaaggaaaagccaggcagaggccctgccaatgccgctaggttttcagctgggtgggtgagcccagagcggacctcaggcagtggctgta

SEQ ID NO: 785554 - DNA, 599 bp, Homo sapiens
actgaacctctaagcctcagtttcttcatctatatcctgaggctaataatgtctcgatcctagaactgggccttaaaggatgggttccatgtcctttcattatttcctggcctctgcggatttgccttccctgggtgggagtgggagatcccctgacacacgctggtacccagtgtagggtcggaggcagctgagtcctcatctagttgaatggagggagccagcattccaggcaggaataagaatggctaaggtttggaagtggggtctggagcatggcattgagaatccggggcctgcaaggtggacccaggatgtgtgtggggagatarctcttaggggggttagtgctgtgggcagccccacagggcagaccccaaagtcccagcttttcagacttcagtgcccacaagcaagagtggcccaggtggcctgtgttgcctccagggctggggagcgctgtgtcaggggaggttgcgtggacactgagaaggggcattcctgaatccactgaggatggggcttgtggacaccccagacagctctgggaatctggttgagatgtgggttctaagacacgccccacattacaactggga

SEQ ID NO: 785555 - DNA, 599 bp, Homo sapiens
actgaacctctaagcctcagtttcttcatctatatcctgaggctaataatgtctcgatcctagaactgggccttaaaggatgggttccatgtcctttcattatttcctggcctctgcggatttgccttccctgggtgggagtgggagatcccctgacacacgctggtacccagtgtagggtcggaggcagctgagtcctcatctagttgaatggagggagccagcattccaggcaggaataagaatggctaaggtttggaagtggggtctggagcatggcattgagaatccggggcctgcaaggtggacccaggatgtgtgtggggagataactcttaggggggttagtgctgtgggcagccccacagggcagaccccaaagtcccagcttttcagacttcagtgcccacaarcaagagtggcccaggtggcctgtgttgcctccagggctggggagcgctgtgtcaggggaggttgcgtggacactgagaaggggcattcctgaatccactgaggatggggcttgtggacaccccagacagctctgggaatctggttgagatgtgggttctaagacacgccccacattacaactggga

SEQ ID NO: 785556 - DNA, 543 bp, Homo sapiens
gcagggctggacaggtgaggcagaggcctttctaggctgttttgaaggggacagaggcaggcagggccggtggcaccgaaacggcagctatggagaagagtcgacccatttccaaaaatagaccatccactgtcaggggaagcatctctttgtcttcccaaatctgtctttccgttggctcccaggttgtaaggcaagaaggaggcccgctcttgtctaggaatcagaggctcctttgagcgcggtgctcccccgcccgccacaagggcccgattgtgtgggrccctgaatgcgcccgcctgtcaccgcgcacggcaccggcccggctccctaatgagcccgctctgggagtggccctttgtggcgggttccggccacactgcccatgccaaggctctgtttcccggctgcttaatatccctcagcggctggtggaacaatgggacgctccccccacccagccaccctttctccagaaaattaagaagctagtttctccctctttcggcaccttctgtcctggctggcaggggaaggctcccc

SEQ ID NO: 785557 - DNA, 572 bp, Homo sapiens
atgtgtgtgtgagggtgaggtgtgcaggagggatggaggaggaggtggctcctttgtgaccttctgtttccgtgagaacccttgggacacacctctcacccaggttgggggttccctgtcctggattaacttttgtttcacccagaggccaggccaacctaggcaggtttcggatatcgcctcctgtgtgggccagccctggttcaaacccsagctctggccctatgtggctgtggccaactgcccttcctcagaagcttggtttttgtgcctgtacagtgagggtggccatgtccatctcatgcaccatgtgcctgatgtccagcagcgcgttactgttcctcagtgattgtgtggcattgcgctgtggctctgtggcacttggttagggcttgtggaggtagaagggtgaaactggctggccactgccctcaggggtgccagaggagggaggggcaggagccaaggtgatgggcagagatgaaatggggagcaggacctggggacccccaggtagccagggggtttgcataggcccgggggcagagggtcagcttgctggagggcgtcgc

SEQ ID NO: 785558 - DNA, 572 bp, Homo sapiens
atgtgtgtgtgagggtgaggtgtgcaggagggatggaggaggaggtggctcctttgtgaccttctgtttccgtgagaacccttgggacacacctctcacccaggttgggggttccctgtcctggattaacttttgtttcacccagaggccaggccaacctaggcaggtttcggatatcgcctcctgtgtgggccagccctggttcaaacccgagctctggccctatgtggctgtggccaactgcccttcctcagaagcttggtttttgtgcctgtacagtgagggtggccatgtccayctcatgcaccatgtgcctgatgtccagcagcgcgttactgttcctcagtgattgtgtggcattgcgctgtggctctgtggcacttggttagggcttgtggaggtagaagggtgaaactggctggccactgccctcaggggtgccagaggagggaggggcaggagccaaggtgatgggcagagatgaaatggggagcaggacctggggacccccaggtagccagggggtttgcataggcccgggggcagagggtcagcttgctggagggcgtcgc

SEQ ID NO: 785559 - DNA, 602 bp, Homo sapiens
ccctgccctgtggagactgagggaggcaggggaactgtcctgtggcccggcccaggcttctagtggacacaggcagctttaccctggcaaggctccctgtgggcctgggggtggaggccttgtgggagccctgttctctgaggaggcccgtccctctccagaccttgcttcccttctgcagagatggcttggctcccatgggccctggtatcgggcagaggtggtctgtggctgttgatgaacaaacctgctcgcttggtgttctgcgactccgcccaggcggccactctctcacctgtttccctgccctcaagacctttctctaggccatagggttggggcagcagggaggaggcgtgcattgagtacaccgggcccagcgagcacagcccactctgcaccctcctccagtggcatttgaatgcccaggtggacagagcctgcgcagycccttccctgtgaggcgggcgtgatgctggcggtctgggggctgctctgagaatagagaagcagtgctggggccgggcctggcgcctggcatacaggtgccctggagtctctgtgtgtggtactcatggctctcctgcctcccctgaggttcc

SEQ ID NO: 785560 - DNA, 519 bp, Homo sapiens
gattcatgggctgtcctaggctctcccggcccagaccctcccacctcctggctgccccttcaccctacccagccctggctgcagcgttggtgcccgcaggcatgaggcaggcatgagggctgcgtgtgtgggtgggcagacccccttccttgctaagagggcagsctttggtggaggccactctgggctgaaaggtcctgggtccctttccctggtgtccagggagcatctatccagggggcagctggtgtgagtaggttcctacaaggagggaaagaacacctggctgtgtgcagggggtgagtggggcctaggtgcaggtttgatttttttttttaatttcaaaggggatgtgttccctagagaagcttaggaagatggggaaatgtagaagaaaaacccagacccatgcaacccagtcccgtggcctctgctgggaagatttctttcccctgagattgatctgtgtgttctctcccgggcaggggtgtgctggctgcgggcccacctgctgtgggt

SEQ ID NO: 785561 - DNA, 519 bp, Homo sapiens
gattcatgggctgtcctaggctctcccggcccagaccctcccacctcctggctgccccttcaccctacccagccctggctgcagcgttggtgcccgcaggcatgaggcaggcatgagggctgcgtgtgtgggtgggcagacccccttccttgctaagagggcagcctttggtggaggccactctgggctgaaaggtcctgggtccctttccctggtgtccagggagcatctatccagggggcagctggtgtgagtaggttccyacaaggagggaaagaacacctggctgtgtgcagggggtgagtggggcctaggtgcaggtttgatttttttttttaatttcaaaggggatgtgttccctagagaagcttaggaagatggggaaatgtagaagaaaaacccagacccatgcaacccagtcccgtggcctctgctgggaagatttctttcccctgagattgatctgtgtgttctctcccgggcaggggtgtgctggctgcgggcccacctgctgtgggt

SEQ ID NO: 785562 - DNA, 592 bp, Homo sapiens
gttaacacacccctttcacacgaaataccttggtacacatttcttaagaaaaaggacttcagcggggcacagtggctcatacctgtaatccgagaactttgggaggctgaggcaggcggattgcttgaacccaggagtttgagatcagtctgggcaacatagtgagacttttacaaaaaagtaaaaataaaaaatactagctgggtgtggtgacatatgtctgtggttccagctctttgagaggctgaggtgggaggattgcctgagcctgggagttcagagttcaaggtttcaggtgagccatgatcacactgctgcactccagcctgggcaacagtgagatactgtcgcaaaaaaagracgagaactttcatatagcatagtgacaaaaaatgatcaatatcagaacatttaacgttgatactattaatacttgtcccaatatgatgctctagagcaagtttcttttttaagagacagggtctcattctgtgactcaggctggagtgcagtggtgtgatcatagttcactgcaacctcaacagggctcaagtgatcctcccgccttagcctcccaagtagctgggactac

SEQ ID NO: 785563 - DNA, 638 bp, Homo sapiens
attcagaagggccataatgccctgcactgctggaggcatacattcggagaagtgagtgctcatgggacagccactgtgtgttttagaggcagatagagcatctctgggtctgttaatgtgaagctagagatggtttaccagtggccaactacttcacagtacagtcatgcagaaagcactcaagtgtcrtggggtaaagacgtcagaaggaattcacaagtgaaaatgccagtgagtagtcacagtaagggcctcaaatatacaggaggctacaaacatgcagacccagtcaaataaatctggtgaaggggtgggttaatttgggtcctttaagaagcagactacaagccaggattcaatgtgactgggttatattagagtaatcacctgttagagaaaaggcgcaggaatctaggggcggcaggggagctgacagaccgtggcgcaccacgggcaggcaaattgggtggaggcatcacagataggtgacctaaggaatgtcgaacaaggcctttggggtatctctgaatccaaaattgcctattagagaagtcccaggtctcccaggagtaggcctgccttagtatccctatcacttcagtcatccactggcaacagctcaggaagtatgatctcac

SEQ ID NO: 785564 - DNA, 646 bp, Homo sapiens
cagatgaagtttttgtgtgttcttcctttttgttgatgttgatactattcctttctgtttgttggtcttccttctagcagtcaggcccctctgctacaggtctgctggagtttgctggagctccactccagaccctgtttgtctggagcggaagctgcagaacagcaaaggttgctgtctcctcctttctctggaagcttcatcccagagggacacccaccagatgccagccggagctctcctgtgtgcggtgtctgtggacccctgctgggaggtgtcttcctgtcaggaggcatgggagtcagggacccacttgaggaggcagtctgtccctaagcagaacttgaacactgtgctgggagatctgctgctcttttcagagctggcaggcaggaatgtttaaatcttttaaagctgtgcccacagctgccccttcccccaggtgctctgtctcagggagatgggagttttatctataagcccctgactggggctgctgcytttctttcagagatgccctgtgcagagaggaggaatctaaagaagccgtctggctacagttgctttgtggcactgtggtgggctctgcccagtccaaactttctggtggctttgtttacactttgaggggaaaaccacctactca

SEQ ID NO: 785565 - DNA, 593 bp, Homo sapiens
cagacgaagaaaagggtttgtgccattgaagatgcccaacgggattgcagtcattgcccttgactttgcccatctgcctttccagagggggcaggcccactgtcacagaaactggaagagccacacaggggagacrgtgggagagctcggaacagggcatgagagtgtcttgctgcctcttggaggccaccattgtgactatgaaccataccgggcagaggaagtgggtcaaggaggccagggcagctgggccgggcagggagaggacctgggcatggcagaggaggggaaaatagactgacccagcctcaggaggtcagaagtgtgttgggctgtgctgggtcacagaacaacacagcttgggaggctcctggaggcttcaaggggaggcttaaggctaaggctgtggatgttgattgtcgtgtccattactagcccaattattagtctgtcttcctggtaaaaatgtgtggttggaaatgccaaactgagaagcccacttttccccactggggatcatctgggttggcgtgtccatgctcaaggataatctcttgccctttcctgccccctgcctaggatttctccccaga

SEQ ID NO: 785566 - DNA, 576 bp, Homo sapiens
atctgcctcgggcgttttttcagtgccaggtgccagtatcctttccttcctgcaagcctggtcccccagagaccaaattgcatctcggccaattgctttcaggcctggaatcgggcaaagggagctggtgtccagatggacattcacagttacccgatggaccacaggggcagccctggcctgggggcccacacatctatttctccccgtcctctgctctgccctgggtcacaggagagctgaccccctgcgggctgcattgtcccggctcccctatactggcttctggcaggaccagaggtaagtagtcggctgggggtytctctgacagcctctccgccctgggtggtgtctcctgcagcagatgtatctcctttggggctctagttcctgctgctcagcggcccccaacatgggtctaggaacatctaacattgcctccccgccttgtctctctagcgtaggggttgatctctgggcttccttttgtctcctcgcagcttctcagctcctcctcctcattacaccctcctggttcatagctggactcggaggggctttactctgctgattgga

SEQ ID NO: 785567 - DNA, 542 bp, Homo sapiens
agccctgccaatatcttgattttagtccattgaggcctgttttggatttctgatgtccagaagtgtaacataacaaatttttgttgttttaagcaaaaaaaaaaaagtagtgattattattttgcaattcaattttcctggcctgttactgtattttgaaatactaggcattggggctttcattagccctgagctcttaatctgtaggcagagtttgaaatcaactaaaacatacggtwtttgtgtgagtcaaagccacagctaaaattgagcaaatctgacacagatctccccaatgctgaggtcagaaactgcagatgggaaaagattgagccagaaataatacctggagaaagtcattctggttcacagaacatgctgcatcactgcagaacagtctatttacatctacaagggaatacagatgagaatttacagcttatccagacacgcagtgaactgttcttaacaattctgctgagttatttcatttcagtaaacatttgttgggccctgaccatgtaccacacattgttgctagc

SEQ ID NO: 785568 - DNA, 650 bp, Homo sapiens
aaaagtgaaattgttggacagttgtgggcattgctggatccacctcaggtctgtgctgctctgaagtcacagtggcagacacagttccgggtgatgcaagttccaagtgagcgtcccctagagtccacctggggtgtcacatccctccgcgtgggcctcctgtggaattcctcrctgtgtttcttggtccctcagccctgcagatggttctgctttccctctggaagagtattatgtcgattcacttgaagtcatgtttggggcaaacaaggcaccagatgctggaatgtggtcccctccacttttccagagaggtatgaggatttaatctttgcttttcttaaaaaaaaataataatggttctgagggctggaggacatgtaaaatcaaagggaaattacaggcaatgtgcagagaattcttagtttccagatgcttgtcaacccaccttgggaaatgagcccctctcacaggtaggggctgccagaagccctttctggctggagaacatcacggaggagaactagcaagacccctgccttctcccctgggacctggcactgcatttagcagcatttaagaaacaatccccccatcactgctgattaggaggaacatcaattttaatggagaggtgttacctaagtctg

SEQ ID NO: 785569 - DNA, 671 bp, Homo sapiens
aaatacaaacaattagccaggtgtggtagcacatgcctgtgatcccagctactcaggaggctgagtcatgagaatcacttgaactcgggaggtggaggttgcagtgagctgagatcataccactgcactccagcctgagtgacagagtgaaactctgtctaaaaataaataaataaaaaataaaagtcactgccacctccattttacaagaggtaccgagtggatatgttacttccccagggcctcacagggaggaagtggtggagctgggatttgaacccgggctgttgtttttgtaaaggatcgaataaatgctgtgaatgtactgatctatgataagctagctgcatgagatggagactcagacacagatgaagccaaagctgagatgcagaatttrctgagaaatcgcattgtatctcacaagagcaaattgctaagcccaccacgtatccaggctgtgccgtccgattgaagagcctgtgctctgaactccatacagcctccttcctgcagctgaggagctggaggctacgggaaaatgggctctagatggctgagtttcaacgggagcctaccagtgtccctccccagcctcgcacctgccgtggctccataaccaagaacccactctccctctggatccggccctccacccttccctcccagct

SEQ ID NO: 785570 - DNA, 481 bp, Homo sapiens
tgtttgtgttgttattttaaaccatcctaggggagcttatgaaatctctggagacttttaaaaatagcatagtttctggttttaaaagtagtacatgtccactgtataaaatatggaaaaatacaaaatgttccaaatgatgccacccagaaatgactaccatttaccttttgaygcattttctttttgggctttttccctgtgaatgtgtcgagttttaacataaatggtgtagagggtgttaaggacgtgtagttgtgtggagtgagccgctgaattctctccatgcctcagtccccctatctgtgaaataggcccaaaagtcagaccttcctctcgggcttgcagtgaggccagatgaggacgtgggaacacgtcaacccttggcacagtgccaggaacacagtcagttctcaataaatgcttgtcattgccattagcaatttcagtccaccatgtatataattttggatcctatttt

SEQ ID NO: 785571 - DNA, 624 bp, Homo sapiens
ttttccattttggccagagaaaaatatgcgtgacaaaacacagacattatccacccagctcagtgtccagtatccacctggcaaggctcaaattcacctccattgtcccctgttgtctttaatccattcaaagtggggtgcagtgacctccaaccaggagtttcaacatgtggtctctgggaaagatggagaagtggacagttgccctgagtgacagaaaaagatgggaaagggaaaggaaagaaagaaagagaaaagtattgcctgcggtggggtgaggaaggcaaggaactcagggaggccagagaaagacccacccatcatatcaacagttcagccagccactcgtcagtccctaaaggatcttttccagcaatcccatcagctcccaagttccccctttggggagaaaaaagctccycatatcccatgatcctatgcatacctaatcctatcacccacagatgacagcaaagagcgcaaaggcagattaatccaaagagaatagcggctaacatcctgtggcacgaaatccacttttccttactgagggacttcaccaagaggacctctcatcccctatggtcttaggagtcccagcccaattccatcctttcctcagga

SEQ ID NO: 785572 - DNA, 497 bp, Homo sapiens
gagcttccgggacggggtccaaaaaataaggccttatcctggcatggaagaccctttagggtctgtcttggaacttgccagcctcagcccctccccactggtgtttacctgctaggcgcacctcacccccacggggctacctgtttctctcagcgggctccctacttcttaggctttgcgcggccrtgccttttcagccagtttctccccggccttaaagagcaggcttgaaatatccctgttggggagcccaaagttagatgggccccacgaaacactgtgttcagaagcccaccgaagccctgaccctggaagtgggatgcctcattgacatttttttcccaattaaagggaatgttttgcatttttctagaattgatgaaactggtcaactgttactcaccctccttcctttgtccctttctaggagccctgggctcccccagtgttgcctgggtctgactttgcctcagtgaaaactgcctcgaattctttct

SEQ ID NO: 785573 - DNA, 524 bp, Homo sapiens
tctgagtgctgtgggcacccagaggggctgcaggcaccaggggagggacagacaggtttccaaggaaagtgaggggccggataggggtttgtggggctggcagaggtgggccactgaggcctggaaggaccattctaagcctcaaaggccagggacggacatggaggggctggagccygtgagaggcaggatcggggagaaagagggtcaggagaaaggcagggtggaggccctggggcctcacagcagggctgagggtttgcaagggagcgaggtaacagggaaccacggatggttcaggagagaatgttgtcactttgggcagacacctgaactggggtccagttagggaggtgagggggtggacccaggccacagcagaggaggacaggaggagtgggggaaggagagcccccagaagctctctgggctcagcagcacagatcaaggtagattaagggaccttctattcccactacttccccttgaaagactcaaggaggtgggcctctggcctgctcatg

SEQ ID NO: 785574 - DNA, 524 bp, Homo sapiens
tctgagtgctgtgggcacccagaggggctgcaggcaccaggggagggacagacaggtttccaaggaaagtgaggggccggataggggtttgtggggctggcagaggtgggccactgaggcctggaaggaccattctaagcctcaaaggccagggacggacatggaggggctggagcccgtgagaggcaggatcggggagaaagagggtcaggagaaaggcagggtggaggccctggggcctcacagcagggctgagggtttgcaagggagcgaggtaacagggaaccayggatggttcaggagagaatgttgtcactttgggcagacacctgaactggggtccagttagggaggtgagggggtggacccaggccacagcagaggaggacaggaggagtgggggaaggagagcccccagaagctctctgggctcagcagcacagatcaaggtagattaagggaccttctattcccactacttccccttgaaagactcaaggaggtgggcctctggcctgctcatg

SEQ ID NO: 785575 - DNA, 555 bp, Homo sapiens
aacgcacagccatcatgctgggggattcacaagcacatggatggcacatccagctcctgaaagggccagcaagtacagttgcgcatgttgtgcactgcacaattcagactttgctgtgagtggtataatgtgcaactacacaatggggcataccagccttattgtcacattgcagagtctcttttctgtctgcctcctcactgtttcctggtcttctggagttcagtaacctctgtctccatgtctcctcaaccccactcctggagtcatatcacagggggaactgtcatgtggaaatggcaaaccccaacgccttctgccctgccggctcccagcacatctgccagtgggtgtggagagcacttgtctctttgtttctgctctccccattccctgcccatctggyggctcctcttccttggtctgcagacacacttgagactctcccctgctggcatgcaagcaccctggggtgactcgggctgcccctcccagcctcgtctctcaagtgggtctccactgacccaactctacttcatatcaaatgcacttcgc

SEQ ID NO: 785576 - DNA, 579 bp, Homo sapiens
gggcactcaattcagaatcactggagagagccctgacacaggtgtctgagcaggacagagactggaactttagggggatgagtttgaggaggggatgccgaagactgggtcgcaggtagtgttgacaatagtagacagttctaaaagtggtagacctcaggagtgggagggtagtgcctrtctcttaggttgtagaatagcttgttaaatgaaacccaaagaacaggtatgcaggtacagggtgagaaagaacaaagttgctttttgctatcttcctgagttcagctcattcaataaactcattgcatttgtttaaatcttctcgatgattttataaaatgtattgtcactgcaatggaaaattaaacaatattgaaaagtacaaagaaaaatgtaaaagtcacccaaatctcttcattcataggtaagcattattagcttaaaggtttcaatcagaattggaaaactatttcagacataactctagaaactattccagaaacttcccagtaagggagcctagggcccaagcctcaatggttaataattttaacattccttcccaatcattttctcaga

SEQ ID NO: 785577 - DNA, 593 bp, Homo sapiens
ccaagaatacacatggagaaaggacagtctctgcaataaattgtggtggaaacattggatatccacattcagaaaaatgaaatagatctcatgccatataaaaaaccaactcaaaatgaattaaagacttaaacataagatgtaaactgtaaaattactagaagaaaacatggagaaaagtygatgacatggcctgagagatttcttcagtatgacctcaaaagcacagacaacaacagcaaagataaacaagtgagattacatcaaactaaaaagcttctgcatagccaaggaaacagttaatggagtgaagagataatccatagattgggagaaaacatttgcaaatcaaatgtctgataaggggctgatatccaaaatatgtaaggaactcaactcaatagcaagaaaacaacccaattgaaaaaagcagcgaaggacctaaataggcgtttcacaaaagaagatacaaatgaccaacagatatatgaaaaaactcttagcatcattgattgtcagggaaatgaaaatcaaaccaaagggagctatcacctcccacctgttggtatggctattgccaaaaagataaaagg

SEQ ID NO: 785578 - DNA, 573 bp, Homo sapiens
cgctgcgtccccgctacgccctcaggtggaggaggcacgaggcggcggccccggctggagcgcccctcggcttccgcaacccggtgttcgacgtgacggcctccgaggagctggtgagggggctggaggggggaccggggcctcctcggggccgggactcggcgccgaccgccgcctgaccctgtcaccccgcagcccctgccgcggcggctcagcctggttccgaaggcggccgcagacagcaccagccacagttacttcgtcaaccctctgttcgccggggccgaggccgaggcctgagcggccgcctgaccgtcgaccttggggctctccacccsctctggccccagtcgaactgggggctagccacctcctcgtccagcccccaaacctccccttcctttccccctcctccgggggccaaggacagggtggccttactcagtaaaggtgtttcctgcacctgctgtcagcctggctatgccgccaccggccccgcccatgaggactaggagcccagccttgcgccgcattcgcactgggggacatgggaggggtctagctggccactgc

SEQ ID NO: 785579 - DNA, 602 bp, Homo sapiens
atggtcttatcctgtatagatttttggtaaataagtatgtatctaagccaaataaattttgtgtgtattttatattatttttcttctctctgcttcctcttggggacatcctttgttctgtggccccagtggcacctagagtgaatatgaatgatttgtctatgttttcccttcaggcggaatgccgattacttggattttttcttgttaattttggtgactgagttgcctgtttttgaagtgaaaaatacctkcagatagtagggttgccctttagcattttaagtgtctaaatgagacctattgggatgtttccatagtttgcatcaaattcatgtaaatgcgcgttaatgatgttagctagtctgcctgagctaaattactaatttcattactactatttaataaaggggcaggatttgccatggtcattctagttaatggtaagagccctgtaggtctctcatcatatatctaagctgaattaaggttgaaaatattactgagtgccttgtggctctatttggtaacagtcatgccttacattttgagacagctaatccttttacacaccaggtgactcatgtgaattgtgagtagac

SEQ ID NO: 785580 - DNA, 602 bp, Homo sapiens
atggtcttatcctgtatagatttttggtaaataagtatgtatctaagccaaataaattttgtgtgtattttatattatttttcttctctctgcttcctcttggggacatcctttgttctgtggccccagtggcacctagagtgaatatgaatgatttgtctatgttttcccttcaggcggaatgccgattacttggattttttcttgttaattttggtgactgagttgcctgtttttgaagtgaaaaatacctgcagatagtagggttgccctttagcattttaagtgtctaaatgagacctattgggatgtttccatagtttgcatcaaattcatgtaaatgcgcrttaatgatgttagctagtctgcctgagctaaattactaatttcattactactatttaataaaggggcaggatttgccatggtcattctagttaatggtaagagccctgtaggtctctcatcatatatctaagctgaattaaggttgaaaatattactgagtgccttgtggctctatttggtaacagtcatgccttacattttgagacagctaatccttttacacaccaggtgactcatgtgaattgtgagtagac

SEQ ID NO: 785581 - DNA, 591 bp, Homo sapiens
tgtctactggtcatagaacgggagactcaaggcagattgagggaaagtgtactcagaaagtgtgagagcattggctgggtgtcgtggctcatgcctgtaatcccagcgctttgggaggccaaagcaggaggttcgcttaaggccaggggttggagaccagcctggacaacatagcaaggctccatctttacaaaaaaagaaagaaagaaagtgtgagaacatgaaagggagttttggtctcaagyagaggaccctgtgcatctgggtcaccatctcccagaagcagagcgatgatagttttgacctgagagacaggagctggctctgagtcctgtattcctttgacgcatcaagtgtgccctggctgccgagattcccgccccgcctccgctctgcctcctggccagccctcacctctccgtctctccgtgccttcccctccaggcccctttggccactgccgcacccccctgcagtcccctcctgaaggcgccctccccggctggccccttacacaagggcaagaaggcagtgaacaaagatagccttgagtaccggctgaggcgggagcgcaacaacatcgccgtgcgc

SEQ ID NO: 785582 - DNA, 486 bp, Homo sapiens
cttcttctctgactctgtattttcaaatagcttgtcttcaaactcactaattctttcttctgcttgatcaattctacttttaagagattacttttaagaggctttcttcagcatgttaattgcattcttctttttatttatttwtttttttgagatagactctcactctgtcacccaggctatagtgcagaggtgcaatcttggctcactgcaacctccacctcccaggttcaagcaattctcctgtctcagcctcctgagtagctgggactacaggtgtgtgccaccacgcccggctaattttttgtatttttagtagagacggggtttcaccgtgttagccaagagggtctcgatctcctgacctcgtgatccgcccacctcagcctcccaaagtgctaggattacaggcatgagccacagcgcctggcctgcaattttcaactctagaatttctgcttgattctttttaattatttcaatctc

SEQ ID NO: 785583 - DNA, 486 bp, Homo sapiens
cttcttctctgactctgtattttcaaatagcttgtcttcaaactcactaattctttcttctgcttgatcaattctacttttaagagattacttttaagaggctttcttcagcatgttaattgcattcttctttttatttatttttttttttgagatagactctcactctgtcacccaggctatagtgyagaggtgcaatcttggctcactgcaacctccacctcccaggttcaagcaattctcctgtctcagcctcctgagtagctgggactacaggtgtgtgccaccacgcccggctaattttttgtatttttagtagagacggggtttcaccgtgttagccaagagggtctcgatctcctgacctcgtgatccgcccacctcagcctcccaaagtgctaggattacaggcatgagccacagcgcctggcctgcaattttcaactctagaatttctgcttgattctttttaattatttcaatctc

SEQ ID NO: 785584 - DNA, 461 bp, Homo sapiens
ttggtggtcttggatgtgatctggaagaattctatggattaccaagcagagactcttattcttttcccttactttctcccccaccccaaaatggaagctctctctctgtgtgctcagcagcatggagctgtgggtgtggcgatgcaagcacccatgtggcaaccaccactgggactgtgctgggtcagacatgaagccagcacagcactatttcttggccaaggcccttctyttcagggcagcgagttccccaggactcagaggtgtccagagatgctctctgggaaccaggaattgaagttaaaaatcttagcagtttagctgatgtcctagtgcagctaagctggcactcacaccacaatataaagttcttcccgctcttccctcccctttccacaggcagaggagccccccccccaccactgccaccactgccaccactggtctatggtggttctgcc

SEQ ID NO: 785585 - DNA, 561 bp, Homo sapiens
ctccatctgtgtcaggtctccctccccctccccctcaggaggatacttgcgatagcatttagggaccacctggattgtcttctcctaccaagacccttaacgacatctgcaaggacatttcttccatagttggtaacatatctctggggggcgctgttgagcctgtagaaygccctactttaccagtgaggggatgatggggctggaagagggaaggaatgaaaggagtgtgaaggaagcgccaccaaggagagctgtggaagcccaacccaaagaccgcacctgggatgtcgggaagggccaaggtacagaaggagaaggaagagggttggaggtggagggccagcagcaccaaggctcggagccagggtgaaactcccccgccaggggatggagagaaatggtggggtcgttctctcaggcagtggcacagcagagccagggccagatctggaggtggctgtgcccccctggggggtgcagactcacagcccctccaacagggagcccctccaggtgagagcgaaatggagatgagcgcaaaaccccgactatcaggca

SEQ ID NO: 785586 - DNA, 660 bp, Homo sapiens
gggtagacacctagtaggtacagaatcacagaatggataagaattcaccaaccagctgctgtcttcaagagactcaccaaacacacataaggactcacataaacttaaggtaaaggggtagaaaaagatattccatgcaaacggtcaccaaaagtgagcaggagtagctattcttacatcagacaaaacaaactttaaagcaacagcagtttaaaaagacaaagaggggcattacataatgataaaaaggacttgtccaacagtgaaatatcacaatcctaaatatatatacacctaacactggagctcccaaatttataaaacaattactactagacctaagacagcagcacaataatagtgggggacttcaatacctcactgacagtactagaaaggtcatcaagacakaaagtcaacaaggcaacaatggacttaaactataccctagaacaaatgaacttaacagatgatctacagaacatgctacccaacaactgaagaacacactttctattcatcagcacatggaatattctccaagaaagaccatatgataggccacaaaacaagtctcaataaatttaagaaaatcaaaattacattaagtactctctgagaccacagtggaataaaattggaaatcaactccaaaaggaa

SEQ ID NO: 785587 - DNA, 445 bp, Homo sapiens
ctggccactaaatagtgggattagatagaagccctccaagggcttccagcttgacatgattcttgattctgatctggcccgattcctggataatcgtgggcaggcccattcctcttcttgtgcctcattttcttcttttgtaaaacaatggctgtaccatttgcatcttagggtcattgcagatgwaagtgttgctgtccagagcctgggtgcaggacctagatgtaggattctggttctgctacttcctcagtgacattgaatagctgacctaatctctctggctttggtttcttcatctgtaaaagaaggatattagcattagcacctcacgggattgttacaagaaagcaatgaattaacacatgtgagcacggagaacagtgcttggcatatggtaagcactacgtacattttgctattcttctgattctttcagtgttac

SEQ ID NO: 785588 - DNA, 568 bp, Homo sapiens
tgaatggaagttcagccagggggaagtggcctccagacccgacatgaagtcaggggaccatgcccagagtgccaacaatgcagggccagcagtaatgaagacaaatttggcttggacaaatgttgtggtctaaaaattttgcagtagataatctaggaggaagctcctctactttattaacatgtaggttttgtggtttatggtttcagattgttttcattttgaatgataccttcagagatctatttgatgctgggtgcttctagagaagttcatccagttctgtgartgcacatggaagtgtctgggaatttgacttctctcctgtagggaagtcatgtagtcagccctgtgtttctgagcaatcccctatagctatgtggaggacacagttcttaaaccatccataactacgcttgagtgtgtacacatatatatgcgtgggtgtgaacctgtgtctgggcgatgctagggatccatttgccatctcttcctcctttctacccaccaaagaaaacctgtaatttaggtgtaataccacaagggggtgataacgcaccatgatgca

SEQ ID NO: 785589 - DNA, 559 bp, Homo sapiens
tgcgtgggtgtgaacctgtgtctgggcgatgctagggatccatttgccatctcttcctcctttctacccaccaaagaaaacctgtaatttaggtgtaataccacaagggggtgataacgcaccatgatgcaaacaatgcattccagctcatactccactgaaaatgacgggaaggactatctatctttctttacaccaaaaataatcttttcatgaaaatacttcaatgtgagcaacattaatcaataatacatamcttaaagccccatcaccttgctctcagagagctgtcaacaacgcagcaggcggcagatggcaaaactagtcctggccttttcagttctgttgcctcccagttgtgtgactttgggggaattcctcaacctctcttaagtgttggtctctcaacctggaaattaaagatgttgattccgacttcataggtgcgtatgtgtgtgtgtgcacatgcatgtgtgagagagacagagagaggagaaaaaaaaagtaaagaacatagaccaggtgtttgggataaattggtctcccttcctttctttct

SEQ ID NO: 785590 - DNA, 596 bp, Homo sapiens
tgcgtgggtgtgaacctgtgtctgggcgatgctagggatccatttgccatctcttcctcctttctacccaccaaagaaaacctgtaatttaggtgtaataccacaagggggtgataacgcaccatgatgcaaacaatgcattccagctcatactccactgaaaatgacgggaaggactatctatctttctttacaccaaaaataatcttttcatgaaaatacttcaatgtgagcaacattaatcaataatacataacttaaagccccatcaccttgctctcagagagctgtcaacaacgcagcaggcggcagatggcaaaactagtcctggccttttcagttctgttgcctcccagttgtgtgactttgggggaattcctcaacctctcttaagtgttggtctctcaacytggaaattaaagatgttgattccgacttcataggtgcgtatgtgtgtgtgtgcacatgcatgtgtgagagagacagagagaggagaaaaaaaaagtaaagaacatagaccaggtgtttgggataaattggtctcccttcctttctttctgttactatttccgcacctggagaaggtacacaccgac

SEQ ID NO: 785591 - DNA, 495 bp, Homo sapiens
aaaaaaagtaaagaacatagaccaggtgtttgggataaattggtctcccttcctttctttctgttactatttccgcacctggagaaggtacacaccgactcgcctctggttcttctccctctcctttagaaaaggrcggcttccacttcacgcaggatggttgccagcctccgggcctcactcagggctgcttttgctcagtgaggagagggtctcgtgccttccctcccatctgccaagagagccggtgcgagttcactgacacccctcagtttcagtgttttagacatctgctctccctctggggagaaggcacaagaagaatttaaaaataacactaaggccttgacatgttaaaaagcgtagatgcccgtgctgcccctagtgtgaccccacttacctttctagaaaccccacctgcttcatctggtagaaactgccagctgaatcagattcttgcagaatcacagagatttcgcacccacctgccctggg

SEQ ID NO: 785592 - DNA, 563 bp, Homo sapiens
tgatatcattttaatatttttgaatgctttaatagttgttttgtggcctaacatatgatctatccttgagaataattcatgtgctgaggaaaataatgtgcattctgcagctgtttgataaaatgttctgtaattatctgttagagccatttggtctcccatgcagattaagcctgatgtttctttgatcattttctgtctgaaagatctgtctggaagacctgctcagtgctgaaagcgggtgttgaagtctccagctattattgtgttggggcctttctctctctttagttctatgtcttttttatatctgggtgttacggcattgggwgcatatatatttaaaattgttatagcctcttgatgaattgacccctttatcattattgagtgaacttatagagtctcttgtagtttttgtcttgaaatctacttgtctgatataagtatagtgacttctgctctttcatgatttctgttggcttgaaatatctttttttcatcccttaattttcagtctatgggtgtctttataggtgaagtgtgtttcttacatgcaacag

SEQ ID NO: 785593 - DNA, 563 bp, Homo sapiens
tgatatcattttaatatttttgaatgctttaatagttgttttgtggcctaacatatgatctatccttgagaataattcatgtgctgaggaaaataatgtgcattctgcagctgtttgataaaatgttctgtaattatctgttagagccatttggtctcccatgcagattaagcctgatgtttctttgatcattttctgtctgaaagatctgtctggaagacctgctcagtgctgaaagcgggtgttgaagtctccagctattattgtgttggggcctttctctctctttagttctatgtcttttttatatctgggtgttacggcattgggtgcatatatatttraaattgttatagcctcttgatgaattgacccctttatcattattgagtgaacttatagagtctcttgtagtttttgtcttgaaatctacttgtctgatataagtatagtgacttctgctctttcatgatttctgttggcttgaaatatctttttttcatcccttaattttcagtctatgggtgtctttataggtgaagtgtgtttcttacatgcaacag

SEQ ID NO: 785594 - DNA, 563 bp, Homo sapiens
tgatatcattttaatatttttgaatgctttaatagttgttttgtggcctaacatatgatctatccttgagaataattcatgtgctgaggaaaataatgtgcattctgcagctgtttgataaaatgttctgtaattatctgttagagccatttggtctcccatgcagattaagcctgatgtttctttgatcattttctgtctgaaagatctgtctggaagacctgctcagtgctgaaagcgggtgttgaagtctccagctattattgtgttggggcctttctctctctttagttctatgtcttttttatatctgggtgttacggcattgggtgcatatatatttaaaattgttatagcctcttgatgaattgacccctttatcattatwgagtgaacttatagagtctcttgtagtttttgtcttgaaatctacttgtctgatataagtatagtgacttctgctctttcatgatttctgttggcttgaaatatctttttttcatcccttaattttcagtctatgggtgtctttataggtgaagtgtgtttcttacatgcaacag

SEQ ID NO: 785595 - DNA, 613 bp, Homo sapiens
cctttcatatccagttgggagagaaatagaacctccactagggatatatagcagccacagtagattcattagctattgccccaagttgtcataaagcgataaaaattgagcccttatatttacagggtcactgggggaagtcttgactattagtgacttttaatgagagtgcccaggcaataagaggcttggctgccagagtaaaattacttactaacgtcttaagccatatagctagaagtcaagcacaaagtttgatctcaaacttaacatcagtgcttaaattcaamcttctgtatttaaaacaagttgcgttagtgagctttatatctaaggaccataccttaaattaactcatggaagagtctgatgactaaataaggaaaatgacattatgaagtaacatttacttcaggaagcacagggcccataaaagaagtctcagggataccttactaagatgtaattcaaaactgttagttgccttctcatatcaagcaaaccacggaacacatgagagaccggtggagattcaactttcttatcttattccactcttaagggaagtatttaatttgtatatcccggatccaataattggagatatggtcca

SEQ ID NO: 785596 - DNA, 622 bp, Homo sapiens
aggggcttggagggaaagcttttatagggtgaatgtggaagcagagcaaagaaattatttaattggttaaagtggagcagtcctttcatttgaactctccagccagggggagttcctcgtaatagaactcatgcttacttggctgcctgtgattggctgagygtaagtttctttttttctttctttttttttttttttttgagacagtctcactctgttgcccaggttggaattcagtggcatgatctcgactcacggcaatctcgcaatctctgcctcccaggttcaagtgattctcctgcctcagcctaccaagtagctgggattacaggtgcccgccaccatgcctggctaatttttttttgtatttttagtagaggtgggatttcaccatgttggccagggtggtcatgaactcctggcctcaagtaatccactggctttggcctcccaaagtgctgggattacaagcatgagccaccacccctggccttaagtttaattctgcttatgtaagaacccaaggcattagggtacccttagtctgagggcctcccttttaattgttttaacaatatacaaaacataaaatgtatggtatcaatcactttaaagtggctga

SEQ ID NO: 785597 - DNA, 629 bp, Homo sapiens
gggggacagaagttacaggcagacatcaatcaataaatgtaagctgtacattggttcagcctggaaaggcaggacaattgaagcttccaggtcataggtggattcaaaggttttctgattggcaattggttgaaggacttaagttattatctaaagatctggaatcaatacaagggaatgtctgggttaagataaggggttgtgaagaccaaggtttttattatgcagataaaacttcagggagtaggcttcagagtcaataggttgtaagtgtttcttatcagacttaaaaaggcgccagactcttagttaattctctcctggatcaragtaaagacctggaaagggaaagggattctctacagaatgcagatatcccccacaagagacagctttgcaggaccactgcaaaatatgtcaaagaaatatattttgaggtaaaacacttccatttctttcagagcctgctatctgtcatgtgatgctacactagagtaaggttggaatttggtgtcctattgctacaaggagtctgttttttcattcttcagatctctgtcttcatggtaacgctggtctgttgtgcctgaactccaaagggaggagggtaaaatgaggcacgcccaacc

SEQ ID NO: 785598 - DNA, 591 bp, Homo sapiens
tcccaaaccttagactggttggcttaggattgggctcaggggaagggaacccagaagcttgatatgctggcaaaagggtaaaagttttttttacagtcgggcttttggcctccctctccctgtgcaaactggtaaaaggccttgggatttttgatgtgtccttacccatcccttttttctcgttttgatacgtgttttctaataacctggtttgtctcttctcaccttcaggctatcaaactccaaatggtcatgcaactggagctttggaggatggccctttctgccgggtacccttagctagctagacctctgagggagctccamtgccattcccccagaacagcgccccctgtcagcaggaagcagttaagatcggtcttcgtccttatccttatccttattttaacagcagttagatgtacttctgcagaggggggaatgagacagccaggtgtaaaagggtccctggagaaactccaactgggctgcatactgggtgaatgaggtgaatccttgggaagttcctgccatttgcagggaggaagagtctggattctcctattccggggttggtaacctggatttaat

SEQ ID NO: 785599 - DNA, 481 bp, Homo sapiens
tcagcccagaacacacatcaggcactatcctcgaatcctttcagataggtttctcttgaccttgagtagttaccacacacatgactgcactgatcagtattctgctgagtaccgactggggcaaggggaatctttggacggttctttcctctttagtactctaactgctttggtccccgcagactcccagctgcatctcctaactcasggagtgcgctgggcaccacctggatcctctcttctctatgctgtgtctggaaactttctcaaagtgataagctagtaccatcaaggggctcacattgattgtttccgtctctcagggaatcaggattcctcactgcctgatgcctagtttgtgtttttgttttggggggcttttgttggtttgggaaccagtttttgttgttttgtggtgggtgacttgttttttcttcctggaagcctttttttttcttttttggccaaacttactgaccaa

SEQ ID NO: 785600 - DNA, 646 bp, Homo sapiens
ttgtagtcaatgtgagaatactgtgattttgcaaaaggaaaagtggagtccaagtggtatgcttcccttcagccccacagcccatgctgctccatttcagaggatgtgatagttctcccaggcaagcctccagtcatctgctagggatgccagtacttctcagaggggtagaaattagctctgtgccttgcttctaagggacccacttactctctccctaataggatgtccccatttctagcatgacaatgttccccgtccctggtttcctgtactgggcaggtcatttcagtggggatcccatggaggcacatggatactcgtggtcatgctgctaacctatcaagccattttccttaatctgtactctggaccacacactgtcccagactcacttaagaaatatttactggtcattttctagatgcaaggaatgctgaaataaaagacwctgctcttaccaaaaaagctaatctttccattcctctagtacattgtacttatccaaattctgcactgtccctttcattgatcttgaatagttctcaaattatataaatttctgaggtacaaacaacaacaagttatgtttttgtacttaaggagcttccagtacaaagaccagggtggatgggttggtgggcaa

SEQ ID NO: 785601 - DNA, 551 bp, Homo sapiens
agggagcagcagctggattggatcctcatcctggcactttctccttttataacaagtacttatgaaggaagagccatttcttgccccctttacagataaggactctgaggctcagagaggagacctgtgtggtgagccagtgggggagccaaggtttgatccccaccagcctgactcacagcccctgtctctgtaacactcagctatgcttgtcaaagtgtggagaaatgctccaccctactcattccaaactcttgcagttctatagcaataagcataggctgaggcaggagaatgcttgaacccaggagacggagattacagygagccgagatcgcaccactgtactccagcctgggtgatagagcaagattctgtcttgaaagaaaaaacaaaacaagtcctatgggagtaggagggactggcccccatcagaaaggtcctgcagatgtctcatgatatgggaacttgttcctaaaggacaggtctcagcacatcactgagtagcatccatggagcagagttgggcctcctgcagcccagcagaccac

SEQ ID NO: 785602 - DNA, 588 bp, Homo sapiens
aataatatattgtcttctcaaaaaatgctaagagagtagattttaagtgttcttaccagaaaataatatctatgtgaagcaatgcatgttagtttgattttgccattctacaatgtgtgtgggtgtaaacgcacatatataaacatatatatacacacacgtaaatgtatatgtgtatatatacacacacacacacacacatatatgtttcaaaacatcattttgtacactataaatatatacaattttggccaggcawggtggctcatacctgtaatctcagcactttgggagactgatgtgggtagatcacttgagttcaggagttgagaccagcctggccaacatggtgaaaccatgtctgtacaacaaataaaactagccaggcgtggtggcacgtgcctgtagttccagctaattggaaggctgagatgggaggatcaatggagcccaggagggcaattttgcagcgagccatgatcactccactaaactccagcatgggcaacagagtgagaccctatattaaaaaaaggggcaggccgggtatgctgcctcatctctgtaatcccagcactttgggaggcc

SEQ ID NO: 785603 - DNA, 588 bp, Homo sapiens
aataatatattgtcttctcaaaaaatgctaagagagtagattttaagtgttcttaccagaaaataatatctatgtgaagcaatgcatgttagtttgattttgccattctacaatgtgtgtgggtgtaaacgcacatatataaacatatatatacacacacgtaaatgtatatgtgtatatatacacacacacacacacacatatatgtttcaaaacatcattttgtacactataaatatatacaattttggccaggcatggtggctcatacctgtaatctcagcactttgggagactgatgtgggtagatcacttgagttcaggagttgagaccagcctggccaacatggtgaaaccmtgtctgtacaacaaataaaactagccaggcgtggtggcacgtgcctgtagttccagctaattggaaggctgagatgggaggatcaatggagcccaggagggcaattttgcagcgagccatgatcactccactaaactccagcatgggcaacagagtgagaccctatattaaaaaaaggggcaggccgggtatgctgcctcatctctgtaatcccagcactttgggaggcc

SEQ ID NO: 785604 - DNA, 503 bp, Homo sapiens
caatttttctataagtcatgaaataaagtgaatgttttaaattgacaaaggagatacataaatagccaacaagtgcataaaaagatgttcaacatcaggccgggagcagcagctcacgcctgtaatcccagcactttgggaggccgaggtgggtggatcatgagatcaggagttcaagtccagcctggccaagatgatgaaaccccgtctctaccaaaaatacaaaaattagcctggcatggtggtgggcacctgtaatcccagctactygggaggctgaggcacagaactgcttgaacccaggagacagaggttgcagtgagccaagatcccaccaccgcactccagcctgggcaaacagagcgagactccatctcaaaaagaaaaaaaaaaaaagatgttcaacatcactagccattgggaaatgcaaaaaaccacaatgagatacctctttacaactactggattggtataatacatattaatattaataaaaaatgttg

SEQ ID NO: 785605 - DNA, 503 bp, Homo sapiens
caatttttctataagtcatgaaataaagtgaatgttttaaattgacaaaggagatacataaatagccaacaagtgcataaaaagatgttcaacatcaggccgggagcagcagctcacgcctgtaatcccagcactttgggaggccgaggtgggtggatcatgagatcaggagttcaagtccagcctggccaagatgatgaaaccccgtctctaccaaaaatacaaaaattagcctggcatggtggtgggcacctgtaatcccagctactcgggaggctgaggcacagaactgcttgaacccaggagacagaggttgcagtgagccaagatcccaccaccgcactccagcctgggcaaacagagcgagactccatctcaaamagaaaaaaaaaaaaagatgttcaacatcactagccattgggaaatgcaaaaaaccacaatgagatacctctttacaactactggattggtataatacatattaatattaataaaaaatgttg

SEQ ID NO: 785606 - DNA, 594 bp, Homo sapiens
tgttttaaggggtaaaatgatatcccattatggttttgatttgcatttgtctgatgattaatgatgttgaagattttatcgtatacctattggccatttgtatgtcttctattgtggaatgtctgttcagatcatttgctcaatttttttaaatcaaattttttgttttctgactgttgagttccttgtatattctggttattaattccttgtcagatgggtagtttgcaaatattttctcctattctttgggtgtcttttcactgttattgcttactttgctgtgctgaaactttttcgtttgatgtaatcccattcatctatttttgcctttgttgcttgtgcttttgaggtcttacmaaaaaatttttgccgagaacaatgttctgaagcatttccaaatgttttcttcaagtagtttcatagtttcaggtcatacatttaactctttaatccactatcatttgatttttgcatatgatgagagacaggggtttagtttcattcttctgcgtatggatatccagttttctcagcaccatttattgaagaaactgtcatttctccaatgtatgttcttagtgcctttgtcaa

SEQ ID NO: 785607 - DNA, 637 bp, Homo sapiens
aaattttaccttaggcccagcccaagttttgagggcacagtgcattgcaggtactgtctgtattggtgatcctgggtgaagatatatagaagtagaatggtacatgaagggttgtgcaagattatctaattcctactcattttgaagacaaaagcattgaaactaagacaatcactaagtttattaatagcagagcctagagtagaactgagtctttaagttcattatatcatatttatatcaaaagaaggttcttggagaaatggtttctgagaaactgcaatttagggagaagaaatgtcttatgtttgagaactttgaaaattcagactttctaaccttgggtttataatagaaaaaaatggttatgatatgtaacttaattaccttttatgtgycaataaatatatctcttcaacatcatttctagtgtcagcaaagggctccatactttggatatattatacatgttatttaatcagtcattattggatatttaagttttcgattcttttgtgttattcagaaaacagaaacataattttcaaagcaaccaataggaaagaaatgtgtagattcactaaaaaatgtcccaggctcatcaacattaatatcagagtcagaagtggacaggtgg

SEQ ID NO: 785608 - DNA, 611 bp, Homo sapiens
gatattgaagctagagagatatgacttagggaaagaatggtaagaggtaacatcaaaaaggtagaggaagctagaatatgtatggccctggtagactgtagaaaacattgaattttgttttgttttgttttgtttgctcatttaaaaatcatcctttacataatcaaaggaatgtacataatgaaacctgaccttaggggggaaagaatttagccattcaataataaggatggtataaactatggattttatataaatgccttttatcagatgaaggaagttcccttcttttcctagtttgttcagagtttttatcatgaatggatcttgaattttgtcaaatgttcttctgcyttttttgggataatcatgttgtttttcttttttagtttgttagcatagtgaactgcactgattgatgttcaaatgtggaatcaaccttgcattgccagggtaaattggtcacaatgtgtttatatttttatatattgctgaattagatttgctaacattttgttgaggatttttgcatctatcaccatgaggaatattgatcagtgatcaatatactagtaaatgtttaataatcagattttaggggttgggataga

SEQ ID NO: 785609 - DNA, 667 bp, Homo sapiens
agaacttaatcataagatgtcaggaaaaattgttatggaacttctagaaagacttaaaagcagggatagttggagaaaaccccttttgtactccctcctgacatggtttggacctgtcaaaccatggtgtccccaccaaatctcatgtcaaagtggaatccccagtgttggaagtggggcctggtgggaggtgattggatcatgggtcgggtttctcatgaatggtatagcaccaaccaccttggtactgccctcacgattagtgagcgagttctcatgagatctgtccatttcaaagtgtgtggcacctcccccctcactctctcttgctcctgctttctccatatgaatttccwgctcccactttgccttccatcatgagtaaaagttccctgaggcacccccagaagcaggtgccaccatgcttcctatacagcctgcagaaccatgagccaacctcttttcttttacattacccagtctcaggtatttctttataccaatgtgagaatggcttaatacatctccttcctgatgcttggaatgcagatgtgatggctggagctccagcagtcattttgggatcttgaaatgaagtcatactctgaaaatatcggtaaagaaaagctggtgcctgggacccttgtgatagcatggaactgtcaca

SEQ ID NO: 785610 - DNA, 603 bp, Homo sapiens
agctctaaacaaaccccagatattgacacgcttgtcatcacctggcaaattcctttagagtgggacccattttatgtattcccggtacaatgcctggcacatagcacatcttaattcttttatctattcaaccaatgtgtctggaagggccaccatttgccagaaaccatgcaacgtgctggagaattcagaagccagaagaacatggttcttgacttcatgccctactacgcagttgaaataggaaataaatatttactgagaaacattaaatcagcttgtgttcctgacatgttatctttttagaaatgcaataataatgacaatattatatatttccaacaattttttagaaagctttgggaaaaaaattaaggaagtattagcaaaatgaaaacctgttcagcatttacrgagtgcctgctccacatgaaacactgacctagaatctctgaggaatgaagagaagagtgaaacctggctcccaccctatgaaagtgcaaaggctcttggaaaggacaggtagacagatatctacaaagataactctaatccaaagcaagttatgggaaatgctatagtgaaggtttaaacaaaatgtag

SEQ ID NO: 785611 - DNA, 638 bp, Homo sapiens
cttatcatgtacaacttgttattttgaaatatacatactgcagaatgactatattgagctaattaatatagattacctcacatacttatttttgtggtaagaacacttaaaatctactctcagcaattttcaagaatataatacattgttattaactatagtcaccatagttttttgtttgtttgtttgttttttgagatggagtctcgctctgtcgcccaggctrgagtgcagtggcatgatcttggttcactgcaacctccgctcctgggttcaagcgattctcctgcctcagccccccgagtagctgggattacaggcacctgccaccacacccggctaatttctgtatttttagcagaaacagggtttcaccatgttggccaggctggtcttgaactcctgaccttaggtgatccgcccgcttggcctcccaaagtgctaggattacaggcgtgagccaccgtgctctttgtcaccatgttttacgatggatgtcttgaacttattcctcctatctaaatgaaatttagtattctttgaccaacatttccctaaaccccccttgtcagcccctggtaaccaccgttctactctctacttctacaagttcatattttttagattccacatgtaat

SEQ ID NO: 785612 - DNA, 638 bp, Homo sapiens
cttatcatgtacaacttgttattttgaaatatacatactgcagaatgactatattgagctaattaatatagattacctcacatacttatttttgtggtaagaacacttaaaatctactctcagcaattttcaagaatataatacattgttattaactatagtcaccatagttttttgtttgtttgtttgttttttgagatggagtctcgctctgtcgcccaggctagagtgcagtggcatgatcttggttcactgcaacctccgctcctgggttcaagcgattctcctgcctcagccccccgagtagctgggattacaggcacctgccaccacacccggctaatttctgtatttttagyagaaacagggtttcaccatgttggccaggctggtcttgaactcctgaccttaggtgatccgcccgcttggcctcccaaagtgctaggattacaggcgtgagccaccgtgctctttgtcaccatgttttacgatggatgtcttgaacttattcctcctatctaaatgaaatttagtattctttgaccaacatttccctaaaccccccttgtcagcccctggtaaccaccgttctactctctacttctacaagttcatattttttagattccacatgtaat

SEQ ID NO: 785613 - DNA, 564 bp, Homo sapiens
taacacagaacatcaatgccttagagcaaaggaatgcataatgtggtgaatttcagcaacctgactgctggagccattccatttctatttttattgtatagggtgagttatccccaacactcatattattccacagagcattgccttcttaacctatatataagctcaatcctgctgacaaaactctataaaatgtccagggatattttcttctgaaagaaaaaaaaaaaaaaagaggctgggtgcagtggctcacgcctgtaatcccagcactttgggaggccgaggagggtggagcacctgaagtcaggagtttaagarcagcctgaccaacatggtgaaacccagtctctactaaaaacacaaaaattagccaggtgtggtggtgggcgcctgtaatcccagctacttgggaggctgaggcaggagaattgcttgaacccaggaggcggaggttgcagtgagccaagatcatgccattgcacttcagcctgggcaacaagagtgaaaccccatctcaaaaaaaaaaaaaaaaggattaaggcaaatctacataatcatctg

SEQ ID NO: 785614 - DNA, 515 bp, Homo sapiens
tccccatgagagtggtctgagacctttgttaaactaaagcagcctctctgtccaatcacaacactgagtgaattataatacccaccatcattctccagctttaaataaagtaagaaaaataacagagtatcttatcatagaagtgacttttaagtaatcatttcstcaagattcttttggtaaatacaggatttaattttcctacagtcacttctgtaggaaaattaaagtagtttatggaaaagaaaatgtgagaggtttattaaattagggaaaaccatggccaatagagcaaaaaagtgacggggtgaggatggtatttaaccaactagccctactgaaaaatactaagatggcatacagttctctatctttccataagtggtgattttaaaataatatttggaagcttgcacctcactcccaaagatgcagctgctgtgctgtttttcttggcatgtttaaggatcctccatgggtactgaagaaacctgagcttcgaaactcagcaactc

SEQ ID NO: 785615 - DNA, 633 bp, Homo sapiens
gtgtgtcatcttgaaaagatttgttttcttattccaatttgcatttttattaagtacacaatacattttattgacagaccttgaaagataggaaaatattctcaaaaaaacataaaaatgtgactatcagaaaaaatctaatgatatatttaatttgttattcttatttttatttgttatttttatttttatttgttcttctcctgagaatgtgtaataagtgtctgtggtctgtaccttccgggggtggtttcaagcagaatctcagggcttagttttagggatattcctgggtgagaaggaaaaattcttttactttatacctgcagagaaattgatacagttccmcaagaaattgtggtagatcaattggtgatttacaaaaaaaaaaaaaaaaaaaaaaaaaaaaaaatctgtttctcttttctgtacggtggagtatttgtgatagtggataaatgtattctgtaggtgggtgcagtggctcatgcctataatcccagcaatttgggaggctgaggcaggtggatcacctgaggttgggagttcgagaccagcctgaccaacatggagaaaccccatctttactaaaaacacaatattagccagttgtgatggcacatacctgtaatc

SEQ ID NO: 785616 - DNA, 594 bp, Homo sapiens
ccattttatcgacatcttcaaagaatcagacttctgattcactgatttttgtgggcatggttttgttttctgttttctcttttattgaattctgctctttattatttctattcccttgtctacttgagtttaatttgttctttttcctttttacatttttaaaatatacatttatcacttaaagcccttctcttctcttcttttctttttcctttcttttctttattgagacagagtcttgctctatcaaccaggctggagtgcagtggcaagatcttggctcactgcaacctccgcctcctgggtttaaacrattctcatgcctcaacctcccaagtggttgggattacaggtgcatgccaccacactcagctaattttgtatttttaatagagatggggcttcaccatgttggccaggctggtctcgaactcctggcctcaagtgatccgcccaccccggcctctcaaagtgctgggattacagatgtgagccactgttcctggctttctaaaattcttttaacttgattgagacttgttttaaagcctagaatagatccattttggtaaatggtctatgcgctcttaaata

SEQ ID NO: 785617 - DNA, 575 bp, Homo sapiens
ggcttagctggtggtcttgctggatagcagagcatagccagctgttccacccaaatccagagaaaaggcagtgacccagacatctagagaacctgaatgcaagctctgcctgcccagattcattaccagctggcccattcagaattatagcatagactaactagtgaaggtctatctctgccaaagaactcttataaatgccagaaaaggtggctttctctgaaaatgcataaacagcaatgcaggaacacaaagattacacagatttgagaaatcatgacacctccaaaagaaactaacaaaggtccaacaatggacactaaagaaagggaaatttatgaaatgacaaaaaaatttagaataatcctcttaacaaagttaagtgaacytcaaaaacatatagataaaaattaaataaaatgtgtaaaacaatacatgaacaatatgagaagtttgacaaagaaatagaaacaattaaaaaatacccaaatagaaatcctagagatgaagaatacaatgcttgaactgaaaaatgcaataaaaacttcaacagtctgcttgatcaaattggagaa

SEQ ID NO: 785618 - DNA, 575 bp, Homo sapiens
ggcttagctggtggtcttgctggatagcagagcatagccagctgttccacccaaatccagagaaaaggcagtgacccagacatctagagaacctgaatgcaagctctgcctgcccagattcattaccagctggcccattcagaattatagcatagactaactagtgaaggtctatctctgccaaagaactcttataaatgccagaaaaggtggctttctctgaaaatgcataaacagcaatgcaggaacacaaagattacacagatttgagaaatcatgacacctccaaaagaaactaacaaaggtccaacaatggacactaaagaaagggaaatttatgaaatgacaaaaaaatttagaataatcctcttaacaaagttaagtgaacctcaaaaacatayagataaaaattaaataaaatgtgtaaaacaatacatgaacaatatgagaagtttgacaaagaaatagaaacaattaaaaaatacccaaatagaaatcctagagatgaagaatacaatgcttgaactgaaaaatgcaataaaaacttcaacagtctgcttgatcaaattggagaa

SEQ ID NO: 785619 - DNA, 287 bp, Homo sapiens
aagtaatagcttcactatgatcacagagatgatcaatgatctaaatgcctcacctattttcagcagagccatggatacaagtaatcacaaggcagaagatattttccctttgcttctgaactgcttttggtggcaatgatacaaatacaaattgtggttgatgtttgcataagggcacagacatgcttggtccaagctgaagtaaagattccaagttgtggrccgtcctgcccacattctgcatcatgatgtcaaaatagcatctgatgttctttgcattttcattg

SEQ ID NO: 785620 - DNA, 630 bp, Homo sapiens
gtataacgagaatgaaatgtataatgaatgtatcattatagctgttatgatatcctgcagtatattttcattactgtaataatcttgtgctctatttatttatcctttcttttcctaaccactggaaaccaccaatcttttcactctccaaagttttgcatttttctgaatgttatatacttggaatcatagataactttccagattggcttctttcagttastaatatgcatttagtatgtaatatgcagttagtaatagctcatttcttttcagatgtgattaacatttcattttctaaatataccacatttgtatttatcattaagctacttaaggaaatcttggttcctcctgacttttggcagctattttaaaagctgttataaacatctgtgtgcagatttttgtgtggacataagctttctggtcatttggataaagacctagggaatgcaactactggatcacatagtaagattatgtgtagttttgtaagaaactgcccatattaggagagtctttacattggtagaggagactgtgctaacatactgcagaaccatgctcagctaattatttgtttgtatttgttttagagatggggtttccctaagttgcttaggcttg

SEQ ID NO: 785621 - DNA, 608 bp, Homo sapiens
cacaataatcttctttgataatgtcactactggaaattatgtttatccttcataaattaactaatccttatttttgtaataaattatctgatatccttcagaggttatctaaaaatattcctttaagtctgcatgtattcagcatatttcatggtataacaagacttttacagttgtataacagaaatttaaaataaggcaacggactgtaatccaracttctgtcaactggaaatttttatgaagtagtattttgctggtatactgatacttcaccaaatacaatgtttatctttaaagaagtttctaaataagacaaaacattatgtttagtaaaattcaatgtagtatgttttactgtatactaattctttatatagcccataatcataatacataggctatataatacatgtaaagcatataattcataatacataggatacaaatcaaatatatgagctttattttgatataatcagactttattctgttacctatttgcctttctttttcaaacttttaagcgttgcccttattttcataagacttagtgtttcactcagtattaaatttatccaaagtcattgtgattttatgaaacattg

SEQ ID NO: 785622 - DNA, 608 bp, Homo sapiens
cacaataatcttctttgataatgtcactactggaaattatgtttatccttcataaattaactaatccttatttttgtaataaattatctgatatccttcagaggttatctaaaaatattcctttaagtctgcatgtattcagcatatttcatggtataacaagacttttacagttgtataacagaaatttaaaataaggcaacggactgtaatccagacttctgtcaactggaaatttttatgaagtartattttgctggtatactgatacttcaccaaatacaatgtttatctttaaagaagtttctaaataagacaaaacattatgtttagtaaaattcaatgtagtatgttttactgtatactaattctttatatagcccataatcataatacataggctatataatacatgtaaagcatataattcataatacataggatacaaatcaaatatatgagctttattttgatataatcagactttattctgttacctatttgcctttctttttcaaacttttaagcgttgcccttattttcataagacttagtgtttcactcagtattaaatttatccaaagtcattgtgattttatgaaacattg

SEQ ID NO: 785623 - DNA, 522 bp, Homo sapiens
aagttcgaatgagaaaaatttaaataaaagttattgtttatagatatggaaaggaaaataatgtttttagttcaatatgagaaagaaccttttaaatgtagaaataaaatggggtgcctttctacatccattcttaagaatttggcagaagttatgaagaagttaaaaagaaggagttcctgctgatataagtcacgaggattatttgaaggaaatttatgtcacatctcgtaaaatcatcatattgacaattataaatatgtaaaactttatgtgcaatagttattactaaaaatactgagctactatttatagkgagatcattattaaataaatttaacagatagaatagcaaatcacatttattcattcagtatattcttaccaacaacctgctgtatgtcagtcattgcataagactgatgtgatgccataggtcttgcagggaatgtagacattaagcaagtaattacaataaagtatagtggcttatgatattataaaaacaaagcagtccttaag

SEQ ID NO: 785624 - DNA, 596 bp, Homo sapiens
ctcccaggtttatgcaaaagaaatgaaaaattttaaatgccaggagccaatcaaaaacaaataagtattcccaggattattaattccatacaaccgaggctcagccagaattcctctctgccatcaattatctcagaaacaccacagctattaaaagctacataaaccaccatctaaaaaagataaagcagaaagttcaasgggaaataattttgaaattgactggagacaccacataaaaatcaaattaaaaatgcagactccattaacttggattctgtgactttccaaactgggtggagtttaagtccacctttcagtcttttccaagaaaaggagactgcacacattagtaaatacaacaggcagagtagatattttaagacaatctacttttttaaattgtatacatttgcttgtaagcaaacagactgcttaatcactaactttcttttccctaagaaggaatctaatctatgcaaaaatccttggtagcaaataataggccactgcttcctgcctcttttcattacctcaccaagcacccatttccaaatttcccaatgaagcaactgcaagttctaatccctctatct

SEQ ID NO: 785625 - DNA, 622 bp, Homo sapiens
tatcaggcttctcatttaaattcaaagaatctatgggaaagtctcagaaatcacttaacccaaactgccatcaaatagctgctgttctgtttatagaaatttactaataaattacagtaaaatataaaacaattgggaacctgaagcaattgtgaaagaagatatatgcttacttctcatttaaagaaatcaaataaatgaaaatcggttttaaaataaaggttaaaccaaaagggtactaattcaccatcaaaacacttccagaccctctatgagtgtgtgtgccacgcatttttctaagcacttacattgacacctttaatttctacataaggattctgatttgggttccattaatattacaaggcactttaaattgacccttaaarttgtgacacattaactttattcatatactccactgagaaatattcatgtgaaatagcactccaaaaccttaattatgttactggcttcaggactaccaccttggctaacgtaagtccatactaacttttttcttccatccacccagagacatggttcaaaacatcaggatgccttgataatggcattagtttaggtttattagctcaggaaattctttctgttgcaatcattg

SEQ ID NO: 785626 - DNA, 644 bp, Homo sapiens
aatgtgcccttctgtggtaccctcactcatgccccctaatcctacttggagtaaattctcattcttttccagcacaccagcatctcccttgtgaagtccttcaattctgaggaacagagaaaggagagaaggacaagtccacaaactctatcatcctaacagcgaatgaaaggggttcacaattatctaaaacttaaaaaggcaactatttccattatgtattttctacattttatataaaactttatattatatacaaaagtactctgttacatttttaagtaggtagaatgcttggygaaatacgtttgattttttcctcttttctgagttcattaaggaaattaatttgcagagataattctatatgattcacacgcagaccaaaaaaaattagcaggcaattcttgagctaaaacagcttgtaaataaacatcatgaatatggacaaaatgtgaacacccacaaggcaagtagtgaagaattccacctacataaatctagtgagtcatactttaattcaacaagttgtctctgagtcctgatagggcgttctgtcctatgtttggtgccacaggagtttccagaaacctcaagattagggccctactttcaaagaggttagacaatgtggtaagatgtta

SEQ ID NO: 785627 - DNA, 491 bp, Homo sapiens
taatctctagattacttataatacctaatacaatgtaaatgctacgtaaataattgttatactgtattttaaaatttatataatttttttattgttgtggtttttttattgccttttaaataaatattttcaatccagagttggttgaatctcaaatgcagaatgtgtggatatggagggctcactgtacactacacgttttcccccttttctctgttgtagctggcacattctggtacctgagaaaatggcatttccactcttagattacccatgtgatgctcttttcccaaaagcaaagactttytgacagtcaattcaactgaggaaataatttttgaataaaattgtatgtaaagttagttaatttgtttcttagtaaacatgggtaagaatccctttgaattaatgagggtaaatgagtgtggtattaaatcggtttccaggaatttttttctcttcctcctccatttaagtgtagaaaagggaga

SEQ ID NO: 785628 - DNA, 611 bp, Homo sapiens
aaagaacaatgatagcggacattgtgtcttgcttttcaatagtgaaatgcgactagtgttccctttctaaatgctgaattttggttgcgatatctgcattttatcatgttaggaaattatccatcattacttcattaactaagcatttttgaagagggatcttttcaaaaggcagacttgatcatgtcactcttctgcttcctggtgttctgaagtagaaactaaaattcttgcctgcatccccagcccctgggccatccggtccctgtttcccctgcagcctcatctggccagatgctgcattttgctgcctgggctccagccacaccggctgtctkgtagcttctagaacgtgctgtgcccctgccaaccttagaacccttggacacctgtttcctctgtaatgcttgctgctctgccctctgccaccccacaggtctttgcctaaccacctcctactatcttgcagaggtcatctcaataggcacttcctcacagaagtctcctgatcccccaaccagactggctccccatctagtcccctgcattctacctagagaggcagatggggtcagagtgtgaggatcctggggcagtgaatctgaggctgc

SEQ ID NO: 785629 - DNA, 611 bp, Homo sapiens
aaagaacaatgatagcggacattgtgtcttgcttttcaatagtgaaatgcgactagtgttccctttctaaatgctgaattttggttgcgatatctgcattttatcatgttaggaaattatccatcattacttcattaactaagcatttttgaagagggatcttttcaaaaggcagacttgatcatgtcactcttctgcttcctggtgttctgaagtagaaactaaaattcttgcctgcatccccagcccctgggccatccggtccctgtttcccctgcagcctcatctggccagatgctgcattttgctgcctgggctccagccacaccggctgtcttgtagcktctagaacgtgctgtgcccctgccaaccttagaacccttggacacctgtttcctctgtaatgcttgctgctctgccctctgccaccccacaggtctttgcctaaccacctcctactatcttgcagaggtcatctcaataggcacttcctcacagaagtctcctgatcccccaaccagactggctccccatctagtcccctgcattctacctagagaggcagatggggtcagagtgtgaggatcctggggcagtgaatctgaggctgc

SEQ ID NO: 785630 - DNA, 611 bp, Homo sapiens
aaagaacaatgatagcggacattgtgtcttgcttttcaatagtgaaatgcgactagtgttccctttctaaatgctgaattttggttgcgatatctgcattttatcatgttaggaaattatccatcattacttcattaactaagcatttttgaagagggatcttttcaaaaggcagacttgatcatgtcactcttctgcttcctggtgttctgaagtagaaactaaaattcttgcctgcatccccagcccctgggccatccggtccctgtttcccctgcagcctcatctggccagatgctgcattttgctgcctgggctccagccacaccggctgtcttgtagcttctagaacgtgctgtgcccctgccaaccttagaacccttkgacacctgtttcctctgtaatgcttgctgctctgccctctgccaccccacaggtctttgcctaaccacctcctactatcttgcagaggtcatctcaataggcacttcctcacagaagtctcctgatcccccaaccagactggctccccatctagtcccctgcattctacctagagaggcagatggggtcagagtgtgaggatcctggggcagtgaatctgaggctgc

SEQ ID NO: 785631 - DNA, 611 bp, Homo sapiens
aaagaacaatgatagcggacattgtgtcttgcttttcaatagtgaaatgcgactagtgttccctttctaaatgctgaattttggttgcgatatctgcattttatcatgttaggaaattatccatcattacttcattaactaagcatttttgaagagggatcttttcaaaaggcagacttgatcatgtcactcttctgcttcctggtgttctgaagtagaaactaaaattcttgcctgcatccccagcccctgggccatccggtccctgtttcccctgcagcctcatctggccagatgctgcattttgctgcctgggctccagccacaccggctgtcttgtagcttctagaacgtgctgtgcccctgccaaccttagaacccttggacacctgkttcctctgtaatgcttgctgctctgccctctgccaccccacaggtctttgcctaaccacctcctactatcttgcagaggtcatctcaataggcacttcctcacagaagtctcctgatcccccaaccagactggctccccatctagtcccctgcattctacctagagaggcagatggggtcagagtgtgaggatcctggggcagtgaatctgaggctgc

SEQ ID NO: 785632 - DNA, 648 bp, Homo sapiens
atttaaaatcacaatttgcttaacagtgttttgatactaatgataatgattttaaaacctgtttctgtttagagaggaaacaggttacataagagatatggtccttttgttaagtaaaatccagtgtaacaataaaaggtatgctgtactctgagtcatagaaagtagtagaaggactttggagacttttcacactctggttgtctttatgtcttctttaaaatgtctttttcttagcttgtgtcctgcataaaagactctagtgtcaaatacatttgaattccattcactattcactcaataggctcattamtactaaaagcaaatattaaaatgatacatttatcacatccagtataaaccagtttccttcagtggcctcactcctgttcacttgcctgaatgaacccatctcctgcgaccccacctgtccctcactcgctccagccacgctggatcctcaggcaaggctgacaggctacttaactgaggcctttgcattttttcttctctccacttatccccctcacagccacatccttcagaatttccttaaatgttgccttctctataaggccctccctgaacacttcatgtacatttgaatggctcctatccaatgtttctttctctcttcttctgcttttt

SEQ ID NO: 785633 - DNA, 540 bp, Homo sapiens
ctttttaaattttcaagtggttgttcctgagtttacagtatgcatttttattagtccgctttgaattgatattatttccattttgttcaatgtgaaaaactttaaaataattcaatttatacctctttttgtcttttctgctatagttatatatgtagctattattgctrcatatgttatacaccccacataggttgctaatatttaaaattaaataatgaatcaattattaaagaatttaagaaatatgggctgggtgtggtgactcacacctttaatcccagcactttgggatgccaagccaggctgatcacttgaggccgggagttcaaggccagcctagccaacatggggaaaccccatctgtagtaaaaatacaaaaattagccaggtgtggtggtgcatgcctgtaatcccagacactcgggaggctgaggcaggaaaatcgcttgaacccgggaggtagaggtagcagtgagccaagaccatgccactgcactccagtctgggctacagagcaagacttcatctcaaaaaaac

SEQ ID NO: 785634 - DNA, 627 bp, Homo sapiens
tacttttctgatgtttgtatgtattttgctttctgatctgactgcatagctagaatttacaacacaatattagcttattgtgaagaaagcaagcacattctaatatgtgcatgactttaatagacatgagtttagagttttaatttttaaggtagtatttgatgtatcttgataaatcatgtttatcatgtataaggtttatctgtatccrtgttccatggatagaaggtttttctctaatttcttagtgttactgatttcttatttgatgaataggtttttaaattttctaattttgtgccactccttaatttcctgaactgtacttttccatggaattagttctttaataggctgaggaaataaaattttcttttttagcatatttgcatgtaatctattaattttgacatatagttgtcttttttgtacattataatttgctagaagctattgatctttctttctgatctggaagactttaaataactaatgttaaccattttgggaaggttcatttaatcattttgggaattactcatttgtgaaactatccagtcaccttttaaattttaatttaatttaattcacttttttgagaccgggttttctctgtcccccaggctt

SEQ ID NO: 785635 - DNA, 645 bp, Homo sapiens
agatgaatcatgcctgcttcatatcctgagcaaatctaggtccacttccaacagtctactaacaataaccagaaaatacacgcagaactagatgcatcatgagcccatcacgagttaactgtttcaatctcagagaataagttagattccatgccaatgaaatagatacaattttttaaaaaacagcactcacatctctagctctgtaacttttatctactcaaaagttttattatagaagacatcagaaatatgcaaatataagtagaataatgggttattttaggttcattgkctattaattctctttcataaaatctgagcaacaggccgggggcagtggctcatgcctgtaatcccaggactttgggaggccagggcgggcagatcacctaatgtcaggagttcaagaccagcctggccaatgtgctgaaaccccgtctctactaaaaatacaaaaagtagccggtatggtggcaggctcctgtaataccagctacttgggaggctgaggcaggagaatcacttgaaccagggaagcagagcttgcagtgagccaagatctggccattgcatgccagcctgggcaacaggaacaaaactccgtcttaaaaaagaaaaaaaattgaagaaagagatcacctc

SEQ ID NO: 785636 - DNA, 635 bp, Homo sapiens
gtagcaatttttttttttgccttgctggaatattaataataccatgaagaaaacttcatctaggccgggcgtggtggctcacacctgtaatcccagcactttgggaggccgaggcgggcagatcacgaggtcaggagatcgagaccatcctggctaacacggtgaaaccccgtctctactaaaaatacaaaaaattagccaggcgtggtggcgggcgcctgtagtcccagctacttgggaggctgaggcaggagaatggcgtgaacccgggaagcggagcttgcagtgagccgagatagcaccactgcactccaacctgggcgacagagcgagactcygtctcaaaaaaaaaaaaaaaaagaaagaaaacttcatctagcagggaccagaaaagcaagtcattcaaggcggtggcttggtgtcttaattagatactaccttggtgcttgctttctcttcgtttgcactgacggtatctaaatgacagtgttctgggatttctggatcagacacaaaatgtcttctgctcaaatcttccatgaaatgtaattttgaaaccatgagcttggttcttactcaagcagaactcttagcgtatttactgggacttcagctgaattggaatggaattgtga

SEQ ID NO: 785637 - DNA, 478 bp, Homo sapiens
cagtagttctctcattgtagactatttcattttagaaataaggaaaaccaagagaaatttaaaggttttttttttttttttttgagacagagtttcactcttgtcacccaggctggagtgcagtggcacaatctcggctcaccgcaacctcctcctcctgggttccagcgattctcctgcctcagcctcctgagtagctgggattacaggtgcccactaccatggctggctaatttttgtaattttagtagagatagggtttcgccatgttggccaggctagtcttgaactcctgacctcagatgatccacccacctkggcctcccaaagtgctgggattacagtgtgtgccaccatatctggccaaggttcttaattattggtgttagtgaatatgaagtatacatcttaaaatttatagttcagtattctatttttctcagagaagtggtagagaagcattacagaagtacttgtg

SEQ ID NO: 785638 - DNA, 598 bp, Homo sapiens
aggttgttttaagatcatcctgttcttaaggaactacttacaatctattagtggaagagaagggtcatttgaaacagtacagatatcacaagcattgacaaagcacatatgtgaacactaaaaagagccacagaaatgtaaggtttaagacagcacatgatgaattgcaaagttatgccttaaaggaagggtgggatgggggcaagatgggaaggatattcccatgtggccattggtgaggagacagacaagcacagtgagaatgtgcttaacaaagtggtgagtttgctttgtttgatgtaaagcacaggccttatccagacagattccctcaaaatactaatccatcagctccggtccttcacatgcagatttagctctatttactcttsctacatttcccttatctttcccctatattcccacctggctaatgctttctcatctccagattccatcttagatcttacctccttttgccaatatccctctaaccactaatatatagtggttctcttgaaccattaaccaacactcatttcctttacatttcaaatgtccttcctccgcaactagattataaattctaacattaggc

SEQ ID NO: 785639 - DNA, 557 bp, Homo sapiens
cttatctttctccccatacctgctccaagtctttccatctcgacagtaactttatccatccttccagttgcaatggccaaaatgttgatgttgtcgtcgcctttttttccgtcgcttacctgttcaacctgtcaggatattctattgactctagcttcaaaatatttctagaatccaaccacctcacaccatcttcactgtatccaactgtagtccaagtcatcaactcatcagcrtttttctttttttgtttttgtttttatacgcctgccacctcaggagcatcagcgtttttcaaagtaggagttagaatgattctgttaaaatataagtcagatcaaattattctttggttcaaaactctccaatagactccctatcccactacatacaagtcaaagcccttataatggtctacaatggtgctactcaagtatggtctatggacctgtgactgtctgcaagctgttactagtctatgaggcgattagaagtttgtgtcaaaatgtaaatcaactaggtcactagacatgctgtttaatttgcctgatgttttg

SEQ ID NO: 785640 - DNA, 476 bp, Homo sapiens
ttcagaaccaagttccttatctttctccccatacctgctccaagtctttccatctcgacagtaactttatccatccttccagttgcaatggccaaaatgttgatgttgtcgtcgcctttttttccgtcgcttacctgttcaacctgtcaggatattctattgactctagcttcaaaatatttctagaatccaaccacctcacaccatcttcactgtatccaactgtagtccaagtcatcaactcatcagcgtttttctttttttgtttttgtttttatacscctgccacctcaggagcatcagcgtttttcaaagtaggagttagaatgattctgttaaaatataagtcagatcaaattattctttggttcaaaactctccaatagactccctatcccactacatacaagtcaaagcccttataatggtctacaatggtgctactcaagtatggtctatggacctgtgactgtctg

SEQ ID NO: 785641 - DNA, 709 bp, Homo sapiens
acttcttagattcaatggaatatggcagcaggtgagaaccaagactcacatcagtccccgcccccccccgcctcctggctccctacaccacatgagaggtaactaactggctcttaatcacctttaataatcttttagctttctctccatgggccccattgaaaaaaagaaaacttgtaaccaaatgaattgaatgtattatatttcttcacttttcactaattcaaagacatgcaaacctgcctakgagagcgtccattgacatctaattggtgttaaatattaagttgaataattaaagcaaaaaaatagctttaattagtttgtgcagtattatgagagatgaacatatgatttccactgaatatgttgaaataaataaagttcatctctatcttcaagaactcttgggatccagctcaatttgggaagccccaggctccagcaggcactgtgtgccctccagcatggaggctccaatcctacaggcctccttcctctgcccctgaccccaggggctgcctggtcaccttgattctcagccctcacatactgctttggacattaactaaaaagtatctaagagacaccatcttaagatcaagcatcttggctcttgcctcttgactggccaaacacccaaaaaaaccagcccaaaggccccccagcagctgcccccgggtgtactcactgcagacggaagatggca

SEQ ID NO: 785642 - DNA, 709 bp, Homo sapiens
acttcttagattcaatggaatatggcagcaggtgagaaccaagactcacatcagtccccgcccccccccgcctcctggctccctacaccacatgagaggtaactaactggctcttaatcacctttaataatcttttagctttctctccatgggccccattgaaaaaaagaaaacttgtaaccaaatgaattgaatgtattatatttcttcacttttcactaattcaaagacatgcaaacctgcctatgagagcgtccattgacatctaattggtgttaaatattaagttgaataattaaagcaaaaaaatagctttaattagtttgtgcagtattatgagagatgaacatatgatttccactgaatatgttgaaataaataaagttcatctctatcttcaagaactcttgggatccagctcaatttgggaagccccaggctccagcaggsactgtgtgccctccagcatggaggctccaatcctacaggcctccttcctctgcccctgaccccaggggctgcctggtcaccttgattctcagccctcacatactgctttggacattaactaaaaagtatctaagagacaccatcttaagatcaagcatcttggctcttgcctcttgactggccaaacacccaaaaaaaccagcccaaaggccccccagcagctgcccccgggtgtactcactgcagacggaagatggca

SEQ ID NO: 785643 - DNA, 533 bp, Homo sapiens
agcttctgattctttaaaaaccccagggatgccagaggggaacaggaggtgacacttgggaactgcagctgctctattctagtccgtactctccagtcacatgtctcaaccccttgagatgacccttcccaagggccttaaagatacgacaggctgagagctctgcaatcacggtagtaatcacaggcatagctatrtgagtattctggccttatccaaattccaaaattctctgagataggaattatgatctccatttccggagcagaaaggggaggtgcacagaagctaagtaacacgcctaagtcacagagctggtaagcagcagagttgagatttaaacccagctatgtctgacttctcatctaagtttcccagaaggccctgggtggggcatttaaacaaataactgaggcagtgggacacgactcatgagggctctcaccaggaagcagctgacgtctatgagcaggacagtggggatgccaccaaaggtgaccccctggagcacggtgctgtttttggccgagttg

SEQ ID NO: 785644 - DNA, 613 bp, Homo sapiens
gtgagtctttagcagcttgtggctcttgtggctgtggttttgggaactccattgtgccctggtgatagctgtccccgagaggtttggtgcaatcagccgtccatgtacccatgtaccctgggacaggctccagggccactcaccaaatggcgcgatgatgggacaagtgatgctgtaggccacgatgacagtgaagacacacagcatccatgcatacatggctccaaactcgtactggaaggcctggttctgggaggaggaggtggtgaggagctcatggacttgttccacctcaaacacccttttgtgctctctaagtggtgatgggagagcagggtggaggaggactttggaaataggagatgcgtggctccccgcctcccaaggtccttcccatccctcccagcytgccctgcttcactcagtgcacccagccctcccgaggcatggtgatgcgtgtttgctagtgctcccttcgttccacccaacaggcatgtgagcccctggagggaagaggtggtcagggaagaggtgtagagtgactccagcccttctagcaggggatcctgggccagcttagttcatgcctctgtgaaatcgggatactagcagt

SEQ ID NO: 785645 - DNA, 585 bp, Homo sapiens
ctgggtagtttataaagaaaagaggcttatttggctcatggctctgcaagctgtgcaagaagcatggcgccagcatctgcttctggtgagggcttcagggagcctccaatcatggtggaagaggaaggagagccagcttgtgcagagatcacacgtcaagagagaaaggaaaagatagagaaaggccgggcacggtgcctcacgcctgtaatctcagcactttgggaggctgaggcagatggatcacttgagatcaggaattcgagaccagcctgaccaacatggtgaaacgctgtctctactaaaaatacaaaaattggttgkgcgtggtggcacacccctgtaatcccagctacttgggaggagaatcgcttgaacctggaaggcggaggttgcagtaagctgagattgtgccacagcactccagcctatgtgacagagcgagactctgtctcaaacaaaaaaaaaggggagagagagagaaagaggaggtgccaggctctttcactgagagcgaggacttactcactactgtgagaacggcagcaagccactccagagggatccgcccccatcacccaaaca

SEQ ID NO: 785646 - DNA, 604 bp, Homo sapiens
aaaggttccaagagggaaaaagcagccacatataaagtgtgaaaaatggaattgctttgcacccttccacagcaacattggaagctaaaagaaatggaagcattgccttcaaaactcagggtgaaataattcttcaacctaaaattctaaacttagccaaactgtaagtgtgcaagtaaaggctgaataccaacagatgtgcaagaawgaggaggaagccaagattatctttctcagagacttcttagaaatgtactttcttagaaagtttaggaggatatacttcaccaggacaagggcatgatcccagaaagaggaaaatgaagccagcaggaagatccagctcagaatggcacaggtctagagggacagtgagggaagactaagacagcagtcagtatgtgatggcactgcccttccaggaggaccaggggaacaagtgaggggctctgtaagagctcacgactctgtcagagcggggaagaaacagctctgaaattcagtttcctaaaccttttgtagaaatgagaagaaagaaactgtaagatccatgagtgtaagggtttttgagttttctgtttgtttcccctgtgcccagaatagt

SEQ ID NO: 785647 - DNA, 643 bp, Homo sapiens
aacaaagacacaatgtaccagaatctctgggacacatttaaagcagcgtgtagagggaaatttatagcactaaatgcccacaagagaaagcaggaaagatctaaaattgatgccctaacatcacaattaaaagaactagaaaaacaagagcaaacaaattcaaaagacagcagaagacaagaaataacacagatcagagcaggactgaaggagatagagacacaaaaaactcttcaaaaagtcaatgaakccaggagccggttttctgaaaagatcaacaaaatagactactagcaagactaataaagaagaaaagagagaagaataaaatagatgcaataaaaaatgataaaggggatatcaccactgatcccacagaaaatacaaactaccatcagagaatactataaacacctgaatagaccaataacaggttctgaaattgaggcaataattaatagcctaccaaccaaaaaaagtccaggaccagacagattcacagccaaattctaccagaggtacaaagaggagctggtaccattccttctgaaactattccaatcaatagaaaaagagggaatccttcctaactcattttatgaagccagcatcatcctaataccaaagcctggcaaagacacac

SEQ ID NO: 785648 - DNA, 643 bp, Homo sapiens
aacaaagacacaatgtaccagaatctctgggacacatttaaagcagcgtgtagagggaaatttatagcactaaatgcccacaagagaaagcaggaaagatctaaaattgatgccctaacatcacaattaaaagaactagaaaaacaagagcaaacaaattcaaaagacagcagaagacaagaaataacacagatcagagcaggactgaaggagatagagacacaaaaaactcttcaaaaagtcaatgaatccaggagcyggttttctgaaaagatcaacaaaatagactactagcaagactaataaagaagaaaagagagaagaataaaatagatgcaataaaaaatgataaaggggatatcaccactgatcccacagaaaatacaaactaccatcagagaatactataaacacctgaatagaccaataacaggttctgaaattgaggcaataattaatagcctaccaaccaaaaaaagtccaggaccagacagattcacagccaaattctaccagaggtacaaagaggagctggtaccattccttctgaaactattccaatcaatagaaaaagagggaatccttcctaactcattttatgaagccagcatcatcctaataccaaagcctggcaaagacacac

SEQ ID NO: 785649 - DNA, 586 bp, Homo sapiens
aaaaatgagtacagtacacgtcatgttcacaggagcctgtagtcaaggccagggggttctgtcaaggccctatgttagaattactaggggagtgagccccaccccaaagtttcttcagttgacctggggtatgggccagccattggtgtttggttttggttttggttttggcttttcaaagctccacagtgattctaaggaaaagtgctacagatataataaagataccaggaaatatgaatatagagggaaattaagaaatcagtacctttccttccctactagggagccatggggtagggaaaaatgaagcgtcctggcctctaaggactgtgatgtctcgctgagtagaagcctggttgtaggttagagtcaatcatttaaaaactatgctagrgccgggcgcagtggctcacgcctgtaatcccagcactttggtaggccgtagtaggaggatcacgatgtcaggagttcgagtccagcctgaccaacatggtgaaaccctgtctctattaaaatacaaaaattagctgggcatggcggcgggtgcctgtaatcccagctacttgggaggctgaggctggag

SEQ ID NO: 785650 - DNA, 593 bp, Homo sapiens
tattcacagatgacataattaattttatacaaaacccaaaggaatctataaagccaactacctgaactaattaagactgacaaattctaaatatgcaagttcaatataaaataatcaattgtatttctgaaaaatttaaaactgcattaactgtagcatcaataactataaaatacttacttatatggtgggccttcaccatataraggctcaggccttcagttctggaaaactaccttgtctttctgtaatgtttccttcattttgtgtgttctttatggaattgcaattagttaagacacttgacctcctaaattaataacatgaattttcttttccctttttgttcaattctcaacattttctttatatttttcatcattcttcacttttagaatgaggcacagagaacctgggtaattcttcaggatcactcagtctttgtttgaactgctctttggaaacagagcacatgactttagcgactacacaatactgctttttttagaaaatgcttttgtaatgaataacctgatgtttaattaataagtgtatcctatagggcagagaagccacaaaaagatataaaaatg

SEQ ID NO: 785651 - DNA, 638 bp, Homo sapiens
tatgtacacatatatatatatatattttctccttttccatagaaattgtagcacgtttagacactgttcaatgacttttttacttaatagaaaatactagagataatttcatatatgctcacagaaaaactttctaattttattttttgacagctccttactgtcgtacattgtattgatttattttgcaaccagtcttttgctatcatgaacatagctgctctaaatgagcatatgcaagactgttttgcatctatgtaagcatatctagaagaaataaaattgcyatgtacaatggtatgcctttttgtaattttgctagattttataatgttgccttgcatacagcttcttccaaatttttgccagtatccataatgtagtgaataagactttctaaatttaatagatggataattcactcaaaagctgtgatggtttacatttccacaggattatatatttaatatcgtttgcccacattgctacccagaagttgggtgtgatcacttttctcatttttctcgttctgccaggcataaagtaatgtctgaattacttcaagttgcgtttttctattagacagattcagcattgtttcatatgtgtattagtcatatactcttctataaattgta

SEQ ID NO: 785652 - DNA, 611 bp, Homo sapiens
ttagtgagaagttatctgggtacttccaagtaaaatgtgaaaatgtcctctctactgtccctaaattttccccttatagaacaaaaataacatgtttattgctaactagttaatatatttaaaatactagacaaagtgttttgcttgatttcttttataccaatggaacgattatttgagccattcagtgcctagaacatgaaataaaaaaggaaaacagactctcgattaaaaaaagtattacatgttacaaaagtaattccaatttagtagtaataataattagctagtttttaaaatactgactttatttaaaaatgtctggaagataacttcaagaaaaagctaartatttttttaaataaaggaaatacttaatactagggcaaaaaaagattttttaaaggttgtttagaattttttaaagttcgatagatttacacaatctaatgaaaaatagggaaaaaaaatacatacagctaattgctcaaggaaagatgaacactgttatgactaaaatatgcagtcagtgagaaattccaaaagctctggtcaggttttaaaaaagtccctgaaaacttagaaataaaggatccaatagttttcccaaa

SEQ ID NO: 785653 - DNA, 619 bp, Homo sapiens
ccatttgttttttgtttctgtctgcttctgcttttttctgcctataaaactcacccactctgtttagctcattagagctcctttttattttgtagattacgtattgcccagttcatgagttactaataactcaatcagagctttgaaatttaatttgctgaaacttttttgtttgtgtgtttgttttgatacagggtcttattttgtcacccaggctggagtgcagtggcacaaacacagctcactgcagccttgacctcctgggctcaagcgatccttctgcatcagcccccgcacatagctgggactgcaggtgcaagccaccacatccagctaattttttctttttttttttgtagagatgggatttcaccaagttgccctggctggtctygaactcctaagcttaagcaatctgcccgccttggcctcccgaagtgttaggattacaggtgtgagctaccatgcctggccaaaactttgttctttgacaaatacatcttccacatgccagacactgggaatattactacgaatatatcctgttcttaccttcaaggaggtaggaagaaaactacaagatagtgtggcaaatattgtaatagtaagcacaacatgc

SEQ ID NO: 785654 - DNA, 619 bp, Homo sapiens
ccatttgttttttgtttctgtctgcttctgcttttttctgcctataaaactcacccactctgtttagctcattagagctcctttttattttgtagattacgtattgcccagttcatgagttactaataactcaatcagagctttgaaatttaatttgctgaaacttttttgtttgtgtgtttgttttgatacagggtcttattttgtcacccaggctggagtgcagtggcacaaacacagctcactgcagccttgacctcctgggctcaagcgatccttctgcatcagcccccgcacatagctgggactgcaggtgcaagccaccacatccagctaattttttctttttttttttgtagagatgggatttcaccaagttgccctggctggtctcgaactcctaagcttaagcaatctgcccgccttggcctcccgaagtgttaggattacaggtgtgagctaccatgcctggccaaaacttygttctttgacaaatacatcttccacatgccagacactgggaatattactacgaatatatcctgttcttaccttcaaggaggtaggaagaaaactacaagatagtgtggcaaatattgtaatagtaagcacaacatgc

SEQ ID NO: 785655 - DNA, 621 bp, Homo sapiens
tcttcccagcttctcaacattgcagggtcccattagtgttctcatctagcgccttagctttcagtattatctgtatgttgatgattcccaggtttatatccctagtctggccgtcccatctgaactcagtctactccatatcagttaatggcagttccgtccttttagttgttcaggtcaaaaaccttgaagttttcttgacttgtctctttcatgtctcatgtaagatctttcagtaaatcttgtcagttctactctgaaaatacatccaggatctgactgttgtcattgctattccgaggtcctgtccaccatgaatttctgcagtaacctatttggtctcyttgcttttacaatcctgttctccttcattatttttcacacagtacccaaactgatcatgccatatgtttgctcaaaatcttccagcatcttcccatttcaaccatgataaaagccaaagtgatcttacagtgttctacaaggctttatacgatctggtttccatgtagcttttggacctcactccctatttctcttccctctccttgaacccaccaggaatgctcccaccttcgagcctttgtatttgtttcttctttgtggagtactgtttcagag

SEQ ID NO: 785656 - DNA, 613 bp, Homo sapiens
gaataagattgattctgaatatgttttagttctcattcaaggagagtgttggtagaaaagaatgtctgaccataagcagtgctaaaagtgtgagcagaatagaacaaatgaagactaacaagaaattagggtcttactaatgctaataaataataacaacactgacatgggagaaagmtaggttaactcactgattaattgcaacaagagcttttagagcactggttactgtccttgagctagtgaactcccattttgaggaatattgttttaaataagtgaataaaaaaataagttttagttccttatgtcttctaggcttttacactctgatcgagatcctattccagatgttcctgcagtatactttgtaatgccaactgaagaaaatattgacagaatgtgccaggtaatatgggttcttattttctgaactcctgaatttggaaatggatttttttttcaagaaaaattcctagatgtccagggtgaaaaatcagaaattcctatgcctactttctcactctgatttttgagactatctttgaattccaaatagcctgaaagacttaaaacttttggctgaagaagtattatacagtagtcctctcat

SEQ ID NO: 785657 - DNA, 636 bp, Homo sapiens
attactaatcataaccatttttaaaatgaagtgctttttgctatcccactatattgaagtaaaatattaagtataaagtaggtgttcataaatttgctttaaagattaagaaatgagtaagggattagagaaattatagaataactgaaaaagaaggaggtattttggaactttattagcccaagtgaataactaactggtggaaaactgccttctttcatatattccatttctcttctgaggcttcttgtacccaccactactttgttaactcctacccacccaagtcaaygttttctccatatagacaccttccttgataaaacagtcatgcttaggaaaagagtgtgcgtcataactgcaaatcgtttcccatagccaaagtaaaattagtcaatgaaaggttcttcttagtgacatcaggcccaactcacagtggaaaaggcactgatctttgttaagtccaagttatgatgatatggaagtggtaagacggagctaaaatatttagatattagatttgctatttgtaaagaaattccaggtttcttggttatgaaactaaaaacacattttgaattaacctccataaagttatatgaaactgttaagagttaatctaaaattttatttttc

SEQ ID NO: 785658 - DNA, 627 bp, Homo sapiens
atgtgggacacggtactactgcctaccacaaataacccttatgtggaattctaataaatctggatttcagtgtatctttctagaaaccatagaaatttcaatatatgctcaaactgaagccattcctaatgggaatatcagaaaaagaagaacttggaattcagaaggaaaagtaaagaaactggttaagaattaataaaggctttagcartgaacttttaagatagctaaagctggaagaaaataaactccgaagttcaaactgtgttcctgtatttgttagctctcaagggaattgagggtgaagaaggagctaaaggcaggagctttggcaagatatcatcaagccaaatatcagataatctcatatgtttaactaagctgagttaattaaataatgattgcccaagatttttccacctcgaacatccaaataacgacagatgtctgacaccaaaaacacaaccctagaagttggagtcaacagttcagttccaagtcctatcacaaaagtattaagcacggaaattatctgcaatatagcaaaacaaatttaaaatgattttgtaaaagaatgtagaaggaaggagaccttgaagcatgagaatggtaataaaaatattattg

SEQ ID NO: 785659 - DNA, 627 bp, Homo sapiens
atgtgggacacggtactactgcctaccacaaataacccttatgtggaattctaataaatctggatttcagtgtatctttctagaaaccatagaaatttcaatatatgctcaaactgaagccattcctaatgggaatatcagaaaaagaagaacttggaattcagaaggaaaagtaaagaaactggttaagaattaataaaggctttagcagtgaacttttaagatagctaaagctggaagaaaataaactccgaagttcraactgtgttcctgtatttgttagctctcaagggaattgagggtgaagaaggagctaaaggcaggagctttggcaagatatcatcaagccaaatatcagataatctcatatgtttaactaagctgagttaattaaataatgattgcccaagatttttccacctcgaacatccaaataacgacagatgtctgacaccaaaaacacaaccctagaagttggagtcaacagttcagttccaagtcctatcacaaaagtattaagcacggaaattatctgcaatatagcaaaacaaatttaaaatgattttgtaaaagaatgtagaaggaaggagaccttgaagcatgagaatggtaataaaaatattattg

SEQ ID NO: 785660 - DNA, 669 bp, Homo sapiens
ggcttatcttttcattttattaatgatttcttttgaaattcagaacctttactttttgattaagttgttttatcatttttttttcttttatggttggtgctttttgtcctgtcaaaatctttgcctttgaagggccataaaaatattgtcctatgtttcatgtagaaggtttatggttctagaaagtggtttgtttgtttgtttttccagtgatttcttcttatctcrgtggcagtagagtctttcacgttcttctacatcctatccagcagcgggatgatatatccaagaaaatctgtttaaagtacaaccttccaaaataactgtctgacttaaaatttttttttaatttaaatcaacttttgatcctttgtttatagtctcaccggccataagatagtggatctgtcatgctgaatcatgagaattttttgtacatttaattggatttccaacaggaaattgtaactttattttaatagtgaaagccatttgaaaaactagaaaagcaatgaaataaagcagtgaagactcaggtgctgaagttgtgttgtcttctgtgcaaatcctagttctgctcctcactagctatttaaacaaactgagctttaccacatcactttcctcatctctaaaatagtacataaatgatagcgacttctgagcctt

SEQ ID NO: 785661 - DNA, 571 bp, Homo sapiens
cttaataaaacaaaaatttattatctcgtagttctggaggctagaagtctgaaatcgagcagttgtcagggccatgttctctctaaaatctgtagaggagaatccttccttgcctcttcctcttctagcttctggtatttgccatcaatccttagcgttcctggatttgaagatgcatcactccaacttctctctccgttgtcacatggctatcttgtctctgtgtgaatctttacatggtgctttccttttcttgtaagaccaccggtcagattaggatccaccctaataacctcatcttaattcgattacatctactaagacccaattcccatgtgagatcacatcacagctaccagggctgaggacttcaacattcctcttggaggacactgttcaatacaggacagactatgtcrgcgtaaggagcctgaaggaatgccagcagatgaacaggatgcaaacagagagaactggttgcagaagacaaaggaagagatttgtagcataagcgtggggccaatatttgtgaattgatcaaactactacattaagtaaaagaaagactaag

SEQ ID NO: 785662 - DNA, 488 bp, Homo sapiens
aaaaacaaggtagtccttccaagatacaatgtgggtacaggcattgagcaaatgctcccattccaatggaagaaattggccaaaacaaaggggcctgcagccccatgcaagtccaaaacccagcagggcagtcatttaatcttgaagctccaaaataatctcctttgactctatgtctcacatccagggcacactgatggaaggggtgggcttccaaggccttgggctggtctgcccctgtggctctgcaaggcacaaaacctgcaactgttttcatggcctggcattgaatgtttatggcttttccaggcacacaatgcaagctgtcaatagwtctacccttctggagtctggaggatggtggccctcttctcacagcttttattaagtagtgctccagtgggtattttttgcgggggctccaaccccacatttccccctctgcactgccctagtagaggttctccatgaggaccccacccctgcag

SEQ ID NO: 785663 - DNA, 649 bp, Homo sapiens
caagatggtgaaaccccatctctactaaaaatacaaaaaaattagccgggcgtggtgggacgcacctgtaatcccagctactccagaggctgaggcagagaattgcttaaacctggaggggcggaggttgcagtgagcygagatcgcgccaccgcactccagcctgggagacagagcgagactctgtctcaaaaaaaaaaaaaaaaaaaaaatgcttctcattgacaatacacctggtcaccaaagagctctgatgtagatgtacaaggagattaacactgttctcatgcctgccaacgcaacatccattctgcagcccaaatatcaaggagtaatttcaactttcaaatcctattgtttaagaattatattttgtcaggctatagcttccacagacagtgattcctctgatggatctggtcaaattgaaactttctgaaaaggactcattattctagatgccattaacaacactcattattcatgggaagaggtcagaatatcaacactagaggaagttggaagaagttgattccagtcttcctggatgactttgaggggttcaagatttcagtggagaaagtaacctcagatgtggtaaaagcagcaagagaactagaattagaagtggagcctgtagctgtcattg

SEQ ID NO: 785664 - DNA, 649 bp, Homo sapiens
caagatggtgaaaccccatctctactaaaaatacaaaaaaattagccgggcgtggtgggacgcacctgtaatcccagctactccagaggctgaggcagagaattgcttaaacctggaggggcggaggttgcagtgagctgagatcgcgccaccgcactccagcctgggagacagagcgagactctgtctcaaaaaaaaaaaaaaaaaaaaaatgcttctcattgacaatacacctggtcaccaaagagctctgatgtagatgtacaaggagattaacactgttctcatgcctgccaaygcaacatccattctgcagcccaaatatcaaggagtaatttcaactttcaaatcctattgtttaagaattatattttgtcaggctatagcttccacagacagtgattcctctgatggatctggtcaaattgaaactttctgaaaaggactcattattctagatgccattaacaacactcattattcatgggaagaggtcagaatatcaacactagaggaagttggaagaagttgattccagtcttcctggatgactttgaggggttcaagatttcagtggagaaagtaacctcagatgtggtaaaagcagcaagagaactagaattagaagtggagcctgtagctgtcattg

SEQ ID NO: 785665 - DNA, 573 bp, Homo sapiens
agtccacttccaaataacactatagcatttcacatgtcctataggtaacttacagcgtttcccactttctcccttgcatcccgtaagatgctactgttatttatcttccccacgtgctatattcattacctgtctgatccaccgagaatgagaaccatacaatactctattgtattttcattaactttttctctgaagctcttcctttttgtatgtrgatatgaattttggttctatagcatttacatttttctgaagaacttattttacaatttcaggtagggaaaacctgcagccaatgaactccctcagattctgtttgttagagcaagtctttatttctacttcacttgtgaataacaatttggtggctatagaatgctaggtgaataggggtttttttctgtcaacactttaaacacttatctctgctctttattttgtttatttttttgtatgatttctgatgataaacccactgtaaattatgtccttattcttctaggtttgctcctcagtgagtaaaacaatttttttgtctctagcttcttttgattttcttttcattttttt

SEQ ID NO: 785666 - DNA, 573 bp, Homo sapiens
agtccacttccaaataacactatagcatttcacatgtcctataggtaacttacagcgtttcccactttctcccttgcatcccgtaagatgctactgttatttatcttccccacgtgctatattcattacctgtctgatccaccgagaatgagaaccatacaatactctattgtattttcattaactttttctctgaagctcttcctttttgtatgtggatatgaattttggttctatagcatttacatttttctgaagaacttattttacaatttcaggtagggaaaacctgcagccaatgaactccctcagattctgtttgttagagcaagtctttatttctacttcacttgtgaataacaatttggtggctatagaatgctaggtgaatagggktttttttctgtcaacactttaaacacttatctctgctctttattttgtttatttttttgtatgatttctgatgataaacccactgtaaattatgtccttattcttctaggtttgctcctcagtgagtaaaacaatttttttgtctctagcttcttttgattttcttttcattttttt

SEQ ID NO: 785667 - DNA, 591 bp, Homo sapiens
actcactcactatcatgagaacagcatgggggaaaccgcccccatgatccaatcacctgccaccaggtccctccctcaacatgtgcggattacaattccaaatgagatttggaggggacacagagccaaaccatatcatttgccaacacatgcttttaatcatcgtttgttattgttcttcttgttgttacatccattctagtgggtgcacttactatatttataatcagaaaaaaataagcatgtagataagtatatgaaatttatgtatataccatatcttaagggagaaaaaagaacaaaaatatcagaaggaaatacaacaaaatattaaatatggctgtctctagakgacaggattatgggtttttcttctttctacctttctgtatttttctctttgataagcaacaggtatttgcttttataaacaaattcattttaataaagtaataacataccatgaggtgttttacagctagtataatctaactttaactaccttaacatttcccagtagtgatgattagataccaaagcttcccttctgctaaagatcatacatacattgttgaattactgaagaaatta

SEQ ID NO: 785668 - DNA, 478 bp, Homo sapiens
acacataaaaccaatctatactgatgggcatcagaatagtggctatcttttgggaggtgytgactaggcacacaagatgccttcttgggggttgtacatggcctgcatcttgacttggtggtgattgattacagggttgtgaacatatgtaaaaacttcatcaaggtgtacatttcagatgtgtgtgcctgactgcacatacatcgtagctctataaaataagtataagtacactcccctaccacctcatgatttatgaatgtctttcacaagatctacaggcttccctattacaactgaccctcaggtagatcctgcaagatggctgaataggaacagctctggtctgcagttccgagtgtgatcgatgcaggagatgggtgatttctgcatttccaactgaggtacctggttcatctcactgggactggttgaacagtggctgcagcccacagagggtgagccaaagcagggtggg

SEQ ID NO: 785669 - DNA, 579 bp, Homo sapiens
gagatcacaggctgccatctgattgctcctcgatgtgatctgcctctgccatccccaaatctttctgaggacagacagtgccggtgctttctgatttctgtgggcatgcacaccccataggtgctgactctgcctggctatcttcactgtgacctcttcgtggtctcctagcttatctcctttctctyggatcaattacagaggccggactccaggttagtcctcctgacactgggagaccagcacctccaaatccctgactctctaagccttcttgtgggtcccatcagaacagtcccccaaactgagtgcctatggtgtcagcctgctctcctgggtgctgtcctgcacgctgaagacagccccctaggagggtagaatgaatttacactacaggtatgccattttagctcagcagtcactcctacttggaaatccttccaaattccattctctgcgatgagtatttcaaaatgttctagatttttccatccttataatgaactcggtttactgagatgattagagtcacctaagatcaactccctgagtatccttttagcacatttcaaaatgatg

SEQ ID NO: 785670 - DNA, 585 bp, Homo sapiens
gcagagctctgcagccaggtgggagtaaagaaagagagacttggtcagcagccatccagggacacaaggcaagggaacagttgccatctggaccatgtccgcaactgtgtaacagttcctaatccaagcaggcttccccctccagtgcagtgggccctgtgaacctgaagcttgaccaactgcagaaattctgttcaaaggtacttgagggaagaagctgggcctctgcaggaagagcctggttctaaagacagcacattgcacaaggaaagggcagtccaatgccagtcctcgatctgcccgtctgtgggtaacacaaatgggaggtgtatggagcttggagagtgaagattcctgaaagcaggggagccgctcaaataggagattctacagccattcgattcaggaaaatctcagacacatttctatgcaratgcatcaccgacaagtacagaaggtgcctcagagcctcaggcttgtgaacctggtccaaacctggtgtgctaggaagcaatgagcctagtgattgactcccaaattacactcacactcgaggcagctatgaagtgctactaagtccaacag

SEQ ID NO: 785671 - DNA, 610 bp, Homo sapiens
gattctttacaaaaaaaaaaaaaaaaaaaaccctgcctttgacaatttcactgggcaagtgatttgagtaaggaccaggtatttgagaatgagtagatcttataatattacgtagcctacctcaatctagggcagyctttgacacactagcaactgcctggactaatatatggcccttggctggatataagagctactgtcccaaacgggaccagacagtgaagcataacaggatcctttgcagagaagaaagatatttctctcttcattacatatcatactggggatgagaaatactgccagagtccccactatcatccttggctacagtttacttcaatcttactgatttcatatgaactaaatattaatgagtgtacagaaatgaacagctacagaaatgaacaactaaaatataaggtagggatctgagcaaatgcataaataaatttaaaaatcaaaatgtgttcccatcaaatcatcactgtggtgtgatttgtaaacattattttatgaagtcaatttcatgagaaatgtggaattctcagggtacagtgtaaaaaattcttgacactctcctaaactatgtttatactggacaggaagtaaa

SEQ ID NO: 785672 - DNA, 610 bp, Homo sapiens
gattctttacaaaaaaaaaaaaaaaaaaaaccctgcctttgacaatttcactgggcaagtgatttgagtaaggaccaggtatttgagaatgagtagatcttataatattacgtagcctacctcaatctagggcagcctttgacacactagcaactgcctggactaatayatggcccttggctggatataagagctactgtcccaaacgggaccagacagtgaagcataacaggatcctttgcagagaagaaagatatttctctcttcattacatatcatactggggatgagaaatactgccagagtccccactatcatccttggctacagtttacttcaatcttactgatttcatatgaactaaatattaatgagtgtacagaaatgaacagctacagaaatgaacaactaaaatataaggtagggatctgagcaaatgcataaataaatttaaaaatcaaaatgtgttcccatcaaatcatcactgtggtgtgatttgtaaacattattttatgaagtcaatttcatgagaaatgtggaattctcagggtacagtgtaaaaaattcttgacactctcctaaactatgtttatactggacaggaagtaaa

SEQ ID NO: 785673 - DNA, 521 bp, Homo sapiens
tgccggtcctaattcttctctccctatagtagtagtacatatcctgagtctcaccatggcctcttgatggacggagggtacttccttgccccttgatttggggcttggtcatgtgacttgtgttggccaatgagatgttagcagacacaggcaaaggcttgcaggactgcccttctgtgtttctgtcatcaccacgatggctactgccccttstgaataggtcccaaaatgatatgtgtggagcagaccgaccctggttgagcaacagatgacctgcagcgtacagcacagccactccaatctacttgcaaagcagcagaataaaataaaaactttttttaatgtgccactgaaatttgggggggttgtttgttatttggcaattgcagactgatataacatctgtcacaatagatattctaaggaatgaggcagagttgtctaagctacatactggaaattgtgtaactaaattaacaaaatgacctcattagaaactggtctatccaataagccgggtt

SEQ ID NO: 785674 - DNA, 521 bp, Homo sapiens
tgccggtcctaattcttctctccctatagtagtagtacatatcctgagtctcaccatggcctcttgatggacggagggtacttccttgccccttgatttggggcttggtcatgtgacttgtgttggccaatgagatgttagcagacacaggcaaaggcttgcaggactgcccttctgtgtttctgtcatcaccacgatggctactgccccttctgaatagrtcccaaaatgatatgtgtggagcagaccgaccctggttgagcaacagatgacctgcagcgtacagcacagccactccaatctacttgcaaagcagcagaataaaataaaaactttttttaatgtgccactgaaatttgggggggttgtttgttatttggcaattgcagactgatataacatctgtcacaatagatattctaaggaatgaggcagagttgtctaagctacatactggaaattgtgtaactaaattaacaaaatgacctcattagaaactggtctatccaataagccgggtt

SEQ ID NO: 785675 - DNA, 521 bp, Homo sapiens
tgccggtcctaattcttctctccctatagtagtagtacatatcctgagtctcaccatggcctcttgatggacggagggtacttccttgccccttgatttggggcttggtcatgtgacttgtgttggccaatgagatgttagcagacacaggcaaaggcttgcaggactgcccttctgtgtttctgtcatcaccacgatggctactgccccttctgaataggtcccaaaatgatatgtgtggagcagaccgaccctggttgagcaacagatgacctgcagcstacagcacagccactccaatctacttgcaaagcagcagaataaaataaaaactttttttaatgtgccactgaaatttgggggggttgtttgttatttggcaattgcagactgatataacatctgtcacaatagatattctaaggaatgaggcagagttgtctaagctacatactggaaattgtgtaactaaattaacaaaatgacctcattagaaactggtctatccaataagccgggtt

SEQ ID NO: 785676 - DNA, 521 bp, Homo sapiens
tgccggtcctaattcttctctccctatagtagtagtacatatcctgagtctcaccatggcctcttgatggacggagggtacttccttgccccttgatttggggcttggtcatgtgacttgtgttggccaatgagatgttagcagacacaggcaaaggcttgcaggactgcccttctgtgtttctgtcatcaccacgatggctactgccccttctgaataggtcccaaaatgatatgtgtggagcagaccgaccctggttgagcaacagatgacctgcagcgtacagcacagccactccaatctacttgcaaagcagcagaataaaataaaaactttttttaatgtgccactgaaatttgggggggttgtttgytatttggcaattgcagactgatataacatctgtcacaatagatattctaaggaatgaggcagagttgtctaagctacatactggaaattgtgtaactaaattaacaaaatgacctcattagaaactggtctatccaataagccgggtt

SEQ ID NO: 785677 - DNA, 525 bp, Homo sapiens
taaaacaggcagctgtgcacaaaatggattttaatcaaattcagatgaaatcactatttcaaaagtattcaaagagctattgtctagaatgtattaagaagtcccacaatataaatgtttatgcctatattataacaatgcagaatgccacataaccaagatgtatgcgtctatttttttctgattcagaaactcattacagccgagatgtcgttatagcaggctgaatactcagactctcatagttgctccactctaggggtgctgtaggcttagaactcctgaagaaacgagcagagggagctcctaggattgaagccacagcagagggagctactaggattgamatcacagtggataatggcaccaacaatactccactggcttccacaggcatcacgacaaccttaatacttacttcacagagagtaaatcaaactctcacacagaggaactatattttatctcgaggtacaaagtatgcttaggtgagagaagtgacatgctgaatctgaatgctgcaag

SEQ ID NO: 785678 - DNA, 562 bp, Homo sapiens
atggcaccaacaatactccactggcttccacaggcatcacgacaaccttaatacttacttcacagagagtaaatcaaactctcacacagaggaactatattttatctcgaggtacaaagtatgcttaggtgagagaagtgacatgctgaatctgaatgctgcaagctgcttctattatgtggtacaatctgaacatgatcctcattgtggccttcttagatcataaagcagactgcagaagttataatgagtgatatgatttttatacgatgctcgtatctgctgcatgttccatctctgagaaatcctaaaggccatgatttacaacatggtggaattatgcttctgtacctgtgcgaataagcacatctgtctaatatttaacactcttygttaaaattatgtacagtttatttatcactcccttcttcctgaccatggcatccctctgctggcatcttaaaatttattccctctgcccttcataatcattaattgtttttctttctttcttttttaacttggacaagactactgcagtataactctttttcttatcaag

SEQ ID NO: 785679 - DNA, 618 bp, Homo sapiens
catgccataatttaaggcgaccctatcaatctgaaaaatcattacctacctcatattttagtttacgttgaatggtgccattgtgaagtttctcattatcctgaaaagaaaagaaaaagccctctatattaaattatagcaagttcayggggcgggggactgattcgattacaagtatttatgggaatggaaatctaaataaacatacttgtcattcaacaatgacaacccttctatataatttacatccccaagataaacatgactctattgatccatctgccatcagagaactgaaacacttactcctaatcttaaaattctaagaataatattaaaaacaagatctccttagggcatttcttaatttgcaggatagaaatgcattgtctttatttcagtatagacttgtcacaaatatgtatcttctaaaagtcaaaattctatttatattttggataatttacaaaataaataactacggaaattggaagtattttggaagaaaacagaagaatgttgcatgtagaattaaaaagtattttagactttataatcacttaaaagttgtcataattacaaaattataaaataaagttactcctgaattcctgaatt

SEQ ID NO: 785680 - DNA, 693 bp, Homo sapiens
catgttgtgttttctgttggagaacaaatgatctccactgggtactgtactgaagtttagggttgggatggcctccagaggaagaacacagagttagagcaggaatactgggcttccacctcctgacccaccaaacgtctatcttggatgatgctggaaactaagccagtttatttgtgacatttaaactccaggtcctactaaataaacatttactttgcagattttctatagccttagtttttactctaactctcawctttggtctacgtcttggctggttaaataggacaggaaaaacagaaaaggagaaaatacagttttatcaggtaaagaattatttcagaacatataaagaactgcccaaatcaattaaacagccatttctccctccaccctgcccccccatacacaaaagaaaagtgagcaaagaataagaaaagcaaattatacatggggaaatacaaatggccaaacaatatcaggaaagatgttttaaaagcaggcaggtagaaggaaggcaaattgtcattcttcaggctttttaaaaactcaggggatattattaagagaagatctacttttgattaaatttaaatgaatacattttggtgtattaaatttaattggtgtgttaaatttgcctactgactctatttcccatttctcataaatatttgaagatgaacgttt

SEQ ID NO: 785681 - DNA, 509 bp, Homo sapiens
caggctcagagcctgcctagcacctcagaggagccttgttcactggcctacagagaagtcatacctcttagaacctttttaggcttggagtggatcgagcagtggcttgaggagtctggaagctctgaattacaaattaggcctctgtgatgcgtttttgatggtgaggctacagtactcagttagtatcaaatgctaacctttgtggattagtgttctccagattgacagaaccaataagagacagacagacaggtggatagacagataaagatatgtgagggggagattcattargtgagttggctcccacaattatggaaaccaagcaatcccacaacagggccatctgcaagctgaagaccctgggatgcgggtaaaatggctcagtccaagtccaaaagcctcagaaccagggaagccaatggtggaaccctcagttggaggccaaaggcctgagaacctgggggccactggtgcaaatcctgaggtgccaagaccagagagcc

SEQ ID NO: 785682 - DNA, 622 bp, Homo sapiens
aacagattgcttctcccgaattctctgattgccttggcctagttcttcatttcaagatgaggccctcttcccacctatggcttaaagatcctgaacatgattttgagattattcaagtaactgcagcatcccctgggacttgcagtatcccctgggattaggcagacagattaggccacaaaaccacattcctctgcataatatgtctcattccagtatttggaacatccacrcccaaagaaattttaaaagcctttcccaaagggactcaggtgtcttactaaaattttattcttaatctgtttacagaatttttattaagcatgttatgtgaatgacaccttatacagaaaagaataacacaaggcccctgaccttaaaaagcttccattctaataggaagtatacataagcagagttcttactcgactgctagcccaggcctgtcctccctgtctcccccatctcagggaagagtgtaccacctgcagcagctgtttaaacctgaatcctgggagttactcttaattccttgattctactttgctccacttctatggctaaagtgcagatccaagccactattacctttcacttggattaaggaaatagctttctaaat

SEQ ID NO: 785683 - DNA, 559 bp, Homo sapiens
aaataaaaagaactcgtaggaaggtttgagtggaagcagttaggaggcaacaatgacaacccaggtgagagaagatggtggcttgcaccaggggaagcaatgggggtggtgaaaagtagtcaggctctggatatattctgaatagtcttttctaacagattaggtgtgttgtgagaaagaaggagaagttgtgaagagtcaagggtaactccaagatttttggcctgaggaacagagagaggacttactattggtcaaggtgaaaagaacagaggtggatcyggttttggaagagatcacaaggccatgtttggaaacgctgagtttgatatttctactagcaagacattgaggagatggtgggatatttgagtctgaaatccatggagaatgtgtgggctagaggcataaatttgaaggaactaataaacttgagcacattactctcttgattttatctcctcaacagtaaattgaggtggcgggagaggatattaggcaagatattcgaataaatgattatctgcaattctttcctgtgctaacatcaggcatttat

SEQ ID NO: 785684 - DNA, 559 bp, Homo sapiens
aaataaaaagaactcgtaggaaggtttgagtggaagcagttaggaggcaacaatgacaacccaggtgagagaagatggtggcttgcaccaggggaagcaatgggggtggtgaaaagtagtcaggctctggatatattctgaatagtcttttctaacagattaggtgtgttgtgagaaagaaggagaagttgtgaagagtcaagggtaactccaagatttttggcctgaggaacagagagaggacttactattggtcaaggtgaaaagaacagaggtggatctggttttggaagagatcacaaggccatgtttggaaacgctgagtttgatatttctactagcaagacattgaggagatggtgggatatttgagtctgaaatccatggagaatgtgtgggctagaggcataaatttgaaggaactaataaacttgagcacattactctcttgattttatctcctcaacagtaaattgaggtggygggagaggatattaggcaagatattcgaataaatgattatctgcaattctttcctgtgctaacatcaggcatttat

SEQ ID NO: 785685 - DNA, 559 bp, Homo sapiens
aaataaaaagaactcgtaggaaggtttgagtggaagcagttaggaggcaacaatgacaacccaggtgagagaagatggtggcttgcaccaggggaagcaatgggggtggtgaaaagtagtcaggctctggatatattctgaatagtcttttctaacagattaggtgtgttgtgagaaagaaggagaagttgtgaagagtcaagggtaactccaagatttttggcctgaggaacagagagaggacttactattggtcaaggtgaaaagaacagaggtggatctggttttggaagagatcacaaggccatgtttggaaacgctgagtttgatatttctactagcaagacattgaggagatggtgggatatttgagtctgaaatccatggagaatgtgtgggctagaggcataaatttgaaggaactaataaacttgagcacattactctcttgattttatctcctcaacagtaaattgaggtggcgggagaggatattaggcaagatattcgaataaatgattatctgcaattmtttcctgtgctaacatcaggcatttat

SEQ ID NO: 785686 - DNA, 639 bp, Homo sapiens
gaacagaggtggatctggttttggaagagatcacaaggccatgtttggaaacgctgagtttgatatttctactagcaagacattgaggagatggtgggatatttgagtctgaaatccatggagaatgtgtgggctagaggcataaatttgaaggaactaataaacttgagcacattactctcttgattttatctcctcaacagtaaattgaggtggcgggagaggatattaggcaagatattcgaataaatgattatctgcaattctttcctgtgctaacatcaggcatttatctgaaagacaattcagcatcccacattgctcacctctggcattctgcctttgctggcctctccgcttgtrattccatttttcaggcttctgtgagacatcactcaaatgagagcccagatgtgacagcagagccagctggtggcaatggatggtgacacagctcttagatacactgggctactggctgtaaagagggcaaagcaggcaaaggaagatacaactgctttatcacgaaacggcagacccagagatagcaacggctgcagagggcaggcatgaggctgccctctttgcaaaagaagccagtgctgtccaccaggcagtgccacaaatggcattgttctt

SEQ ID NO: 785687 - DNA, 519 bp, Homo sapiens
cattctgcctatgctaaatatggggatgagaaaaagatcaggatgcaattccactcaaggaggaaggcgagcaggggctgtgagaggaggagcctggggaagtccctgtctccagagacagaggcaggagacgccagagagcaagcgtttggctttatcgcccayagccagcaactccacagcccccatgaaccagaaaacaagagaagatgtgtctcaaagtgaaggaaaaaattggtgaaaacagtttcaggacaattctaagtggtctgcgcatgccatagctgccctcctcctccccagcttctgcccctccttgctcccacaaagtactggtgttttcccacaacaattagtccacttcccttaaagatgagaaataattagaaggaaccaaaactgaaactatgtgtaaaaagggtgaggtgaggtgacattgaatgaaacataagcaaaaggcagctcaagaggatacaccgtaagtgggatcagccaaagctacccaggaggaattcagag

SEQ ID NO: 785688 - DNA, 555 bp, Homo sapiens
tctattaagtttttttgtgtatgtattaagctgtactatgagtagttggtttgtacgaaatggttaaataggccaaatacaaaagatttctctctctctctctctctttttttagagacacggtctcgctggactggtgcagtggtgcaatcagtgttcattgtaaccttgaccttcctggctcaagcagttttccctccttagcctccygagtacctgggaccacaggtgtacaccattatgcacaactaatttttaaaatttttgtagagacagggggtctcactgttttgttcaggctgatcttgaacacctaagctcaagtgattctcctgtcttggcctcccaaagtgctgggattacaggtgtgagctgctgtgtctggctgggtttctttcttttttttttttttttcctctttttttgtctataaagttgctgtttgtttataaatgttttcacttgtttgatgtatgtgtgaaacaatgttcaacaattaaccagaattttattttgctgatttactctttaacaacaaaagatgtaataataaat

SEQ ID NO: 785689 - DNA, 632 bp, Homo sapiens
ccattgtttatgtggtcagactttcccaacattggtggtaacagacagtacatgccctcagtctagttcttgttatgtattatggttgcaatacaactacagatgtgtaatgcagttgattattccataacccatacacagtgttggtagatggcaccgtggcctattaagaaattttacccaggacccagactccaaatccaaatacacarcttgctaaaagcagtctttgcaagcttaacacgaaataaaataatttcaaagtggtgtggttataggtataagaggattgttagcttccacttggggtttccagggacctggcgggatcttatcctacagagaacaccaacctcttaaggaaactgggaagcccagagaagctgcgccacctaaacatttcccagcctgtgatcctgtaagaaaagaaaaatagctcagggcagcctgagctgtgtgaggcatgtagaatttattaggcccagagagatgtgagtgtgagactttattcttaccacccacctcccgccatgcctaggggcagttgtttaaagtcatttcattccttattagctgcctcactcattatcctcacatgcctggagtttgtgatgcaaagaacaatgtatagc

SEQ ID NO: 785690 - DNA, 620 bp, Homo sapiens
aatgccccaacttccttacctgaagggtggggactaataatggcacccatcacaagtgctgctttgcccccagggagctcctcgatcttaggtgtcatgttcattcagctgaattcctctgttagttgctctataattggtgtctatttttattaatgttgataatacascaagctcatgtatgtggatcatccaggggctgaaggtaaagaagcacctcttagtagctcacttgtcctaagagaattccagctacaaaaagtgaggagctccttgggcaaggcctggtgcaggcagccttgctacgagggggacagttcctgcccttcagagggaaagtccaactaggaaaagcaaatcaaggggagcactctctccagggacgcccagttgctgaagaattattgttggcccagctcattgtaaatgcaaccacgttagtttttgtgaacatcgcttgttataccagcccaggggctgttgcttccagctggaaagctggccgaggagaaatgggtagtaaagtatttcataaaattggtttgagaattgaggggccagcttcacatcaaggcatgaagagaggcaccgggcctgagcagctgcgtttactgtccggt

SEQ ID NO: 785691 - DNA, 620 bp, Homo sapiens
aatgccccaacttccttacctgaagggtggggactaataatggcacccatcacaagtgctgctttgcccccagggagctcctcgatcttaggtgtcatgttcattcagctgaattcctctgttagttgctctataattggtgtctatttttattaatgttgataatacaccaagctcatgtatgtggatcatccaggggctgaaggtaaagaagcacctcttagtagctcacttgtcctaagagaattccagctacaaaaagtgaggagctccttgggcaaggcctggtrcaggcagccttgctacgagggggacagttcctgcccttcagagggaaagtccaactaggaaaagcaaatcaaggggagcactctctccagggacgcccagttgctgaagaattattgttggcccagctcattgtaaatgcaaccacgttagtttttgtgaacatcgcttgttataccagcccaggggctgttgcttccagctggaaagctggccgaggagaaatgggtagtaaagtatttcataaaattggtttgagaattgaggggccagcttcacatcaaggcatgaagagaggcaccgggcctgagcagctgcgtttactgtccggt

SEQ ID NO: 785692 - DNA, 616 bp, Homo sapiens
cacttggtctcacgtgttcaaggttcaactgtgctgtggcatggcgagcactctatgtctttttatggctgagggatattccaggctatggacagaccgcattggtttgtgcatcttaccagtcgatgaacatttgccttgcttctactctttattgtgttattgtgaataacacctctgcaagcattcaagtgcaagtttttccgtttgtatctattttaggggattgaaatctacacactgtttacaaggtgcttttcccacattgcagatattctccrttaaatattcttctgcacagtcactggtctgggcttcatgggattaaatcttgggatataacataattcacttggccgcccagttattagtcaatctcagctccatgagtgccccgtgtccggtttgtgccttcctatcatccctccctcgttccaaaagcatctcagaagcttgatggcttcacctgtgagacccaactcactggatggttggacccaaagtccccctgagagataatctcccagcagtgcagccgtgagacaaggatgggagagcagcgagcgtgggaccaggtgggttcctgccaggggagcccaaggtaacaggggtgcga

SEQ ID NO: 785693 - DNA, 613 bp, Homo sapiens
aacacatttaagaagctattttttaaaacaggcatttgagacctgaaatggctccccaagtaccatggtttagggagaaaactataaatgcgtcagaagtatacggattagattttcctcctgcaaagcctcaaaaacaatcggaaaggcaacaaacaaaatgcagctggtctgtcctcagcactcagcagctgagaaatgcagtcattttcagagccagtggcatccctatcccagatgctgccatcattcattcattcattcattgattcaactaatattcacagarccctactgtgtgccaaccgctgggccaggcatcgggaatatagaaagcaaaccaagcctcggcccctgtggggagtcctgtcaggctggggagacaggtgccgtccaggtaaacccgcgtgctcccctgtgagcagtgctgtggggaatccagcagaggaattgagagatgctgcggggggcctgtacttgggggtttggcaaagcttctctgagaaggtgacatttgacatttatgacttatgtcccttccgtgcatactaaaatacagagtagggtcgggagagatggcactggaaatgaaggaaccagctggaaagtcagc

SEQ ID NO: 785694 - DNA, 615 bp, Homo sapiens
ggtccccagggaatagcttcaaatcagagccagtgtagaatataccttgaaagctctgggtatttccctctttcttgaaatttcttccttttctctgggatacactcaggtaagtgttaggctcctctgaagagcttaaaggaaaatagtttatacttgtgacagtcacaggaacttttctcaaggagatctagccttccctacatttcatgggccccaggrcactgaactgggtaagagattacttctgcaggacagttctctgggtgtccttggactgatccagttctccccactttcttgtttacaattctctaaaacaacagtagaatgtgctggaatgtaatatcttgacataggaagggactagccagaacttcctgggctctgttccaatccccccaaagcccgccccgaacaggatgtccttcagtgctttagcccagtgatcacattgccctgggtcataaaacccaagccaagctacttccagggtcccactgctgcagtgcaagtgaggcatacacagtcaaggcattatccaccttgggcagcattcctgaggcttgggggaccaggcttctgttgtcctttgctcctatctgtaagtaataa

SEQ ID NO: 785695 - DNA, 615 bp, Homo sapiens
ggtccccagggaatagcttcaaatcagagccagtgtagaatataccttgaaagctctgggtatttccctctttcttgaaatttcttccttttctctgggatacactcaggtaagtgttaggctcctctgaagagcttaaaggaaaatagtttatacttgtgacagtcacaggaacttttctcaaggagatctagccttccctacatttcatgggccccagggcactgaactgggtaagagattacttctgcaggacagttctctgggtgtccttggactgatccagttctccccactttcttgtttacaattctctaaaacaacagtagaatgtgctggaatgtaatatcttgacataggaagggactagccagaacttcctgggctctgttccaatccccccaaagcccgcccmgaacaggatgtccttcagtgctttagcccagtgatcacattgccctgggtcataaaacccaagccaagctacttccagggtcccactgctgcagtgcaagtgaggcatacacagtcaaggcattatccaccttgggcagcattcctgaggcttgggggaccaggcttctgttgtcctttgctcctatctgtaagtaataa

SEQ ID NO: 785696 - DNA, 638 bp, Homo sapiens
caactttaaaactccccagagactgtattcgaggtttctgggacagtttctaaaggtgtttaaactgtaaaggatttctcctaacagaacctaccttcttgacagctctcaaaaatgtttttatttttgagactttttaaaagasctggccaggcacagtagcgcactgctgtaatcccagcactttgggaggccaaggtgggtggatcacctgaggtcaggggttcgagaccagcctggccaacatggtgaaatcccgtctctactaaaaatacaaaaattagctaggcatggtggcgcacgcctgtaatcccagctacgtgggaggctgaggcatgagcactgcttgaagccagaaggtggaggttgcagtgacccgacactagcaactgcactctagcttgggtaagacaagactatgtctcaaataaataaataaatattacaaataaataagacctctgcagtttattcctctgggaattaggtccagctccccatgtccattaaacctatgtgaacatgcgcaaccaggcctgaactacatttgtgtgttgatgtagagaaaaaggaggcagggctgcaacaaagtccacccagaggtctgcttcccccatcattcaccaagaaaccagctg

SEQ ID NO: 785697 - DNA, 423 bp, Homo sapiens
ctgtcacccaggctggagtgcagtggcagaatctcagctctgcaacctccacgttcctggttcgagcaatcctcacaccwcagcctccccagtagctgggactacaggcgttcaccaccacacctggcttatgttttgttttttgtttttgttttttgtagagacgggggtctcgccatgttgcccaggctagtctggaactcctgggctcaagcaatctgcccacctcagtctcccaaagtgctgggactacaggcacgagccaccaagcccagcccctttaaggtaaatgctacctgctcacagaatttaaggattaaaatataatgtgaggccaggtgtggtggctcacgcctgtaatcccagcactctgagaggccgaggcaagtggatcacctgaggtcaggaggtcgagaccagcct

SEQ ID NO: 785698 - DNA, 594 bp, Homo sapiens
gggtgccttttataaacctgttcaaatcacacacccgcacagaacttggtctctggaatccagcagacctcggggtctagttgtgactctgtcacacggctcaacattcacgtgcctcttgctttctttctgaagtggagacaggactaggatgtgtcttaagatcatggtggatgccgtggggaacaaggatgtaaagcccttgataccacgtgcattgcaaagacacaatcaacatttatgtcatcaattgctgaggacagagrgccagggaatgacagaatcagggcctgatctcctgactctagtcaggaagaatcttctttgctttgacccccatcaaacaggaatatgtgatgcactggaaatggcagaggctgaagaaaccaacagcctgggaacccatcccacacaccagctgtgtgaccttgggcaagacatttcccctctctgaacctatttcctcatctgtaaaatgaagataacaacaggacctatctcccagagagcggggagattagaggagatagcatagaggagattaagggtgaggccacccttaatccacaattttaagacctggagtatagatgc

SEQ ID NO: 785699 - DNA, 564 bp, Homo sapiens
tggatcctccaaggtccagcagtgatacccatatagtatgccatgtgccttaggtgagcctctgagacatgctggcttcaggtgagacccagcacattcctagctttgatagctatcgtgagagactctttctgcttgagaaaagcagagaaaaagtaaaggggattttgtcttgcaccttaggggagtagagcaccaagtgggctcttggggacctgatttcaggccttggascttggacagcatttctgaacctgccctgggccacaggggagtccactgccctgaagagtgagtcccatgcctggcagcattcaccacaaactgactgcagagcccttgggcctaaaggaaacatcagtgttagcctgacagtactccccttgggtctgttgtggtggtggccataaggtgaggctcctctgcctgtggaaaatagagggaagagtgggaaggactgtgtctcatgatttgagtgccaactcagcttcagtaaaatagaacaccaggtaaatgtctaaggttttttttaattccagtccctcgctcccagacagcatctct

SEQ ID NO: 785700 - DNA, 439 bp, Homo sapiens
tttctacagcctttctattttgtatgcacttctggctttgtacatgcttctgctatggaacatgtcatagtatattgtaattaattatttgcttgtctgtattacctagttagtagaaacttcttaaagacaggagctttatcttattcttttttacatcctcagcccctaaaacaaattctgacacatagtaagtactcaaaaaatgtatattgttgcagttactatggataaatcagtgttttaccatagttctatagcatgtttttttcaggtaaatyaatgcatcaagttggtgccttaccttcctatttttatgtctagagagcagcattagataaaaacaaatgtttaaaccattacgtctgtttgaaatggtttcctactatttggacaacttaatatcctccagattttttatataagtaagttgggagat

SEQ ID NO: 785701 - DNA, 600 bp, Homo sapiens
tgatgggacctattgataaaaggagaaagttgccgacacggacaatgagaaggcacctaaaacaaatctgatttatttcattttagtatactgaggttagctcttttctttaaaatgtattcctttattcatttccctatctccttcaacaaaggatctgagtcaacttacaaaaatattgacagtaaaatagaataaatattasactgaaataatttaggaaaaagtaaagtaagaaaataaacaaatgtgtatgttatgtatgtcctcaagaagggctatgatttggctatgagctatccatacccaaagaataaaatgaaattttatctatcagagaattcatagtgtcctatgattaaaaataaatctatatcagatgacgcacaacttcttatgctgttgagacctgagaggaatttctcctgtagttctttaaggcagagacaggtgtctgtgatactacacccgtgcaagagaagtcaaatccccaaagcagttttttggtgtaggctgcagaagtgatgtcaaagcacaattcagtaagaacagttctgtaagtaactaaaatcttgtagtccaagcatagcactctctggg

SEQ ID NO: 785702 - DNA, 625 bp, Homo sapiens
atagaaatcttccgattcttggtatatatggcattttaaagatatattttgaggactggtacctctgcccatcctctttggatggcattgtggagaggagaagagaaactacacagaggatcatggctttcttctcccccaggagcccctctgagaakggagagtggttctgggcacagctcagagtggagcctgggcagagatggcctgaggcagatagcaggtgacttttcaaggcttggcttttctgactgaacacacattcttcctcctgcccttgtaaaaaggcaagttttcattttcttagggtagtaaaaatcttttgtgtgaagaaaaagtgtcgtcaagtgtcttattcatcagcatatataccatctctttaaaatgacagtgggagtaaaagttcatcagttcaatatgtctttcacatttggagactcctgactaataacctctggtatttatcatcagaacagccaaagaactaaattctggcacatgcttctctcacgcactgagaaaaacttaaaaagacagaagattttctccattttttcttctattcacttagaaggaaaagcataccttttttaattaaaaaaaatatgagcacgcagaaacatct

SEQ ID NO: 785703 - DNA, 628 bp, Homo sapiens
atgtcaggcaaaattaatctttaaagagaatgttctagtatcagcaaactttatgctcagaggaaatgataaatttgcagagatgtgcatctatatccaagaatccaaacaggagagcttgatggggaactgaaaaggggatcaaaaatctgggctttggaccatagaaacactgaccttttggaaaggacttgaaagctataaatgacgagcaggggcaagagactgggacaggaaaaaccaatcagagagcataaagctaagattcagactctagctttatatgttttaaaaaattccaaagaaaggcttggaaatgactttctaagaacatcatttttatttgatttaatcatttgcatatttgggggtaacttgtttgtaccaaaatgtggttagattagttgattcttaactatcactcatttgyatcacatatattttgtatgagactggaataatttatcggatcagcagccacaaagaatcagcaagtaaaatcattctaaatgtaatgctatctaggatagaaaaatcaagaaagtatggacacatgttaactgggtcttttctctgtttacttttttctaatttaatttcattttaattgtaatgaaacagtataaag

SEQ ID NO: 785704 - DNA, 582 bp, Homo sapiens
tcagtgacatttccaagctcacccaagtgagcttggccaagtttgaaacttgaagagtgcttaaagttctggatggactcaattccaggtccatctgccattaaaacccccaagctcacttgcttccaggctttaaacgtgctcctccattcccagccaagtgcctttaaagaaggctttctctgtggatctactttctcacctctcatccactcagcctgctgcagcctgctttctgccctcaccctctgcagaaacggcctgcagaaggtcatcagtgacctaggttaatcccatcagcctctcctcagttctcaccccacgtggccttttgtggcattgacattgctggccatactcatcttcccctaccctccaccctctgccacatcyggctgagcccctttctctcaccacttcacctctcatcctataatccccacctcaggtccctccttccaggtgtcattggcccttttaaaggacctgaggactcagctaaagttggaaatcaggaatgtgtgtgtgggacttcctggtaggtgtaggggtgctatgggtctaaatgtgtccccctgaaat

SEQ ID NO: 785705 - DNA, 649 bp, Homo sapiens
caaaagacagcagaatcccatctttcttccattttcagtgctgccgcaatggtctgcatgagtggcctggctgacaccctcagagcaccaacaatgctgaaaagagaagcagacaccaggttctttttttctctttctttctttttttgagacagagtcttgctctgtcacccaggctgaagtgcagtggcgcgatctcggttcactgcaacctccaccttctgggttcaagtgattctcctgcctcagcctcccaagtagctgggactacaggcatgcaccaccaagcctggctaatttttgtatttttggtagcgacggggtttcaccatgttggccaggctggtattgaactcctgatcccaagtgatccacctacctcagcctcccaaatttctgggattacaggcatgagccagtgygcctggccaacaccaggttcttattaggctgtgctccaatatcatcatctggtttctcattgtgatgatgaagcttgataactttggaaaatttgaaatcgtcgttgatcctagaactgagaaaattgttgtgaccctcacaggcaggctaaataaatgtgcagtgatcatctccagatttactgtgcaactcaaagacctagaaaaatggcagattagtctccatc

SEQ ID NO: 785706 - DNA, 544 bp, Homo sapiens
tcttgttgcccaaggtggagtgcaatggcgcgatctcagctcaccacaacctccgcctcccatctcggctcactgcaacctccgcctcccaggttcaagcgattctcctgcctcagcctctggagtagctgggattacaggcatgcaccaccacaccctgctaattttgttatttttagtagagacagggtttcttcatgttggtgaggctggtcttaaactccaaacctcaggtgatccgcccacctcagcctcccaaagtgctgagatwacaggcgtgagccaccataccctgcctgttgatttttatatctgcatctatttatcactgttatttccaattaaactataaatgctttgagggcaaacatcattcatcatactgccttcttagattcccaaagacatctagcattttgtttggcacataaaggtgcttggtaaaggatggctgaaagggaatcagaatagcctcttttaatgtattgaactttaccatcctcaccagctacttttaccacaatatgtagttttgctttcttga

SEQ ID NO: 785707 - DNA, 668 bp, Homo sapiens; identical to SEQ ID NO: 753730

SEQ ID NO: 785708 - DNA, 588 bp, Homo sapiens
tctgcaacctccgcctcctgggttcaagggattctcctgccttagcctcctgagtaccttggattacaggtgtgtgccaccacacttagctaatttttgtatttttagtagagatggggttttgccatgtttgccaggctggtcttgaactcctgacctcaggtgatccacctgcctcagccttccaaagcgytgggattacaggcatgagacattgtgtccagcccttcctaccttttttttttttttttttgcaagcatttttagtttcctttctgacaggattgatttgggtaaagaacattgaattttgagtcaatagtctcaaatagatagacctatgtttgaattccaaccctgacctcaatagctaagtgacactggaaaatctatctctttgtctcagttttcctgctaaaaatcgggatggtaatgttcacccagcaaggctttatcacaaaaagtggtaacttatgagaaagtccctatctggcatggtaagcactcaagagaaattagttctattttccttcttccctctagtttaataatttaaaaaattaaatcatgcagccataaaaaagaatg

SEQ ID NO: 785709 - DNA, 606 bp, Homo sapiens
tgtgcacataaataacgatacctgcagaacctaaagaaatacatgagcacatagaaatatatgaatgaaggcaaacattccttaatagaactcatttgcaattctttcataggctagccctgtgaatgagaatatgccaatatttatactatttctccaattcaaaatgttaacaataaatacatttcccaaagtrctctttcttggctaaagaagctaaattctgttctgggcatagtttaccacttttatctactggtcaaattccttgatttgttttaaggtccttcatggaaatgaacatacttttttcttcaggtaagaaatagaaaatataacattttattattttaaattagcaataactattctttcatcctttttgtggcctgagggaggatcagatttgttattgatgttgcttgaaaaggcagagatggtttgagtaaagctatcgagtgcttcaaggagttatttatcatataaagatgtggctgattaattcagtttaacagtgcccactcttcttctctgttcctatacttctaacccaaagtgaaaaaagtcgcatatttgaaacacaaatctacccaaaatttagaaaga

SEQ ID NO: 785710 - DNA, 615 bp, Homo sapiens
catggtggcaggatagagagacagcgagagggtaacagccacacacttttaaaccatcagatctcatgtgaattcactcactatcacaagaacagcatggggggaaaccaccccaatgattcaattacctcccaccagttccttcccttgacatgttgggattacaagttragacacagtttgtgagatctgggtcaggacacaaagccaaaccatatcattctactccttgcccctcccaaatctcatgtctttctcacatttcaaaacactgaggttatgtctttttgggaggaagaccatagatataccattttcattgcatcatgtcatggcacatactgtcaacacgatttatcactgttgatgtttaccttgatcatcaactgaggcagtagttgtcaaatttctccactgtaaggcagctacttttattcctttctatactatatatttttttgagagtccctacgcatagccctcactttaaaactagagaattgtgctcctatcgtcttgagagtaaagcagctacacaaattatttggtattcttctgcaaggaagatttgtttttgttccaccatttctttacttattcaataagtgaagattt

SEQ ID NO: 785711 - DNA, 562 bp, Homo sapiens
catgactgctccctagtgcatgaccacagtcttagacactctctatattcatccaattctaattactcttgttaacactttgttttctttgccctagagtgcattttgcttactggacatcttagacattcagattgccatgcgtgttatatctacatatctatttttatgtatggatggattttttatttatggatggatttcatttgaaacattctaggcattatataaaaatacttttttttctcactatgaccattaagccacttcattaactcacacacaagaaaattgttggataggatttggttaaaaggggtcaagagtgagaatcagtaaatgcacaargaaaaagggagaacagtgcattcataggcacatttgtagcatagacttgtgccatttgaaataaaaaaaaaattcagaggctgcttacaacctgcccaatgaagtccaaacttttaagcaagatactgagtcatgaatatgatcttcccttccatcttcaactccactaaacctagttccagtcagacttttttttttttgtattagtcccttc

SEQ ID NO: 785712 - DNA, 579 bp, Homo sapiens
aattctctaggatgactgaaatttcctatatctttattataatggtaacacagatatacacctttatcaaaactcctcaaattgtatacttaaaattttattacatgcaaactatacttcaatgaagtttatttaagcagtgataaaaaattcttcatatccctcttcaacctgtcktctctctcaggaagacagattgttgaaacatcaaagtaaggtctcccaggaatgcttacacttctgaaactccatcttctctcttaaatcttgggctctcgtgttttttgtgtaagccagatatacatcaggaatgaagagatatgtgactgtggaaatccagatcaagagccaaactaatggatacataagttgggtggcataaatatttgagaagacacataagcacttgaaattacacaggcttttcatgacaggaaaacctaatttcttcaacttcatgattaaacaacaaaaatattccttattcacttcaaaatgcattccagacttaagaatcacaatcagaaataaaagcaaggcctttttctttcaagtgtggcctacagggaaaattttcag

SEQ ID NO: 785713 - DNA, 579 bp, Homo sapiens
aattctctaggatgactgaaatttcctatatctttattataatggtaacacagatatacacctttatcaaaactcctcaaattgtatacttaaaattttattacatgcaaactatacttcaatgaagtttatttaagcagtgataaaaaattcttcatatccctcttcaacctgtcgtctctctcrggaagacagattgttgaaacatcaaagtaaggtctcccaggaatgcttacacttctgaaactccatcttctctcttaaatcttgggctctcgtgttttttgtgtaagccagatatacatcaggaatgaagagatatgtgactgtggaaatccagatcaagagccaaactaatggatacataagttgggtggcataaatatttgagaagacacataagcacttgaaattacacaggcttttcatgacaggaaaacctaatttcttcaacttcatgattaaacaacaaaaatattccttattcacttcaaaatgcattccagacttaagaatcacaatcagaaataaaagcaaggcctttttctttcaagtgtggcctacagggaaaattttcag

SEQ ID NO: 785714 - DNA, 626 bp, Homo sapiens
aataccaagtacccataaaccgaacttggaactctacattgctgcatcacagagtgtcacacctagatctccatcacaaagcaattgaattgaatccacgttgttttcattaagaaattcctttgattaaaaatgtttatgatgtctatgccattaaaacaaatatttaaaaaatagtatctccatctcatcttgtaaaagtttgtttcagtatgtgtgttttatcacaggcacaacaatacacaaatattattatgcaagataaatacaggcatagcagacataaagctcaaaaactgccygagtgtggaatcaagcgtagagatcacctctccagaccatggcggcccttgcagatctgtgaaatggccactagagggtgctaggggagcaaagtggaggacggggttagcgcccctcctggtccttcctcccagccgctatttccccaccctttcagattaacaacccaagagccaggtgggttttccaatatacttccccatggcagccttgggctttcccaaagtggggagtttccctgaggccaacatgcctatgagaatcagaatggcaaacagttcttttttctacattgactggaggagaaggctgatgcccaataa

SEQ ID NO: 785715 - DNA, 736 bp, Homo sapiens
actggggttcagttctctttctgggaagatcaatcattttctttggccaggctcattgctcaggaggaggaggagaggaaggggaggcctgatcaacaagagacatcaaggggattaagctggatcgggcgctcaggaactgaccctagtatgggactttcataggcagcttctttttttttttttttttttgacagagtcttgctctgttgcccaagctgcagtgcaatggcgtaatctcagctcactgcaatctccgtctcccgggttcaagcgattctcctgcctcaggctcccaagtagctgggattataggcacgcatcatcacacccggctgatttttgtatttttagtagagacggggtttcaccatgttggccaggctggtctcgaactcctgacctcaggtgatccacctgcctcggcctcccaaagtgctgggattacaggcgtgagcccacaggcagcttcttagtggtgtcctcatatgtctttgctcccaaatcagatactgccagcagggcttcttcacataggcccccatagccttctacagracagcagacccacggtgggctccgggcctcagtcctccatgggtcccacccagggagacaggcagcctggctggctaggatagtgtcgggggggaggggtgggagccccagcactgcttcccagcatgggacccacctccatcttggtctggatccagggcccgatgacattggcctg

SEQ ID NO: 785716 - DNA, 736 bp, Homo sapiens
actggggttcagttctctttctgggaagatcaatcattttctttggccaggctcattgctcaggaggaggaggagaggaaggggaggcctgatcaacaagagacatcaaggggattaagctggatcgggcgctcaggaactgaccctagtatgggactttcataggcagcttctttttttttttttttttttgacagagtcttgctctgttgcccaagctgcagtgcaatggcgtaatctcagctcactgcaatctccgtctcccgggttcaagcgattctcctgcctcaggctcccaagtagctgggattataggcacgcatcatcacacccggctgatttttgtatttttagtagagacggggtttcaccatgttggccaggctggtctcgaactcctgacctcaggtgatccacctgcctcggcctcccaaagtgctgggattacaggcgtgagcccacaggcagcttcttagtggtgtcctcatatgtctttgctcccaaatcagatactgccagcagggcttcttcacataggcccccatagccttctacagaacagcagacccacggygggctccgggcctcagtcctccatgggtcccacccagggagacaggcagcctggctggctaggatagtgtcgggggggaggggtgggagccccagcactgcttcccagcatgggacccacctccatcttggtctggatccagggcccgatgacattggcctg

SEQ ID NO: 785717 - DNA, 526 bp, Homo sapiens
ctccatgaggcttcctaaaaataggacataagtactacaaaatggagtctgtgcaggtgccacaaatataataaaattcattcttgtattctgaaaattaaaccctatgggaacatgaaaaaagtctgaaaactaacaaaattcgtatttaagaatcaactgacctattaaaaacctaaaagcactgttatttagtaactccataagtaacaggacttaaaacaatttgtmtggctttttagatggaaataaatccattttaacaaacaaacactatagtatctactattttccaagtatcatatgaattcatcacaaaaatgagatggcacaccatttctgcacttaaagaactagaattctagaattctaatgaacaagtcaaaacaattatagtaatgctatcaacaaagttgtgcttagtaccatgtctgtaagtacgggacggggctgtggagtgggaaacatttgcaatcaaatactagctctgctgtatgtcttaataaaataagaacctcttcaaact

SEQ ID NO: 785718 - DNA, 601 bp, Homo sapiens
gattacaggcatgagccactgcacccagcctattctaggttttctacctgttgcacagggaatcagtagtgtaaatatgaggacaccagtggcactctgccccagccaagtgctgagaacatatagtctatcagcaaattcacaactgcagctcagcctgatgatcacctccctatggcccactcaacacagatactgcacatttcaggattcctgcccacactggtgccccaactccctctactcactccctctcccaaaagtttgtctccttcaaacttcctgatgccacagccataccraaatgaacaccacatactccaggcttcctgcatgcattaatgccgcctcttcctctgcactcccatgtcagtcatgagttgaagtttgcctgtgcccaagagagttgcttcaagcttgcctagttactgcaaaccagttctggcctatgcaaaccagaaacttctctgccatcaaatgggctacaactacatcttctccaacaaggtttcagacattggggaaggggcactctttcctgggtactctccctaagctttagggtgccctagagagttctcttaaatgttacagatacact

SEQ ID NO: 785719 - DNA, 639 bp, Homo sapiens
caactcatctgtaacttctgggtcaggccactcactaccatctggtaaaaatgaatgttgaaaactcccttttattctgacaaaaggtaataagaagaggttaacagcagatgatttctgagcatttcaatttggttagaccaatgcatccacaagcgggtttgcgacgttccacatgtctaattattccaagaggtattagaatgctttaaaattatgaaattccaaaataatggtaggaaggaatgtaattatgtgtatacccccctcttctcctctgttgccccctgtctgaccttyttattgaaagtgtttattctcgaaaaggcattgggaaggaagaaataagaaggattgctgtcttgaaaaatgtaattttttttttaaatgtgagcgagactagaaatgttttacatttccttaaggggggaagtattagaagtattaggaaccatggaaggagagtgtaagtggaaaggtttctcctcaattgaatgagcttcctaactgagtgattcaaaggtggagggggcacagtttagggaggaggtgagtgtctggtcactggaggtgttaggaaagccctggcatatgcctggggagagatatgttaaaaaggattcaaacttaagatagatg

SEQ ID NO: 785720 - DNA, 574 bp, Homo sapiens
tagccactagtctcatataactagtaagcacttgaaatctggcaagcatgacagaagaactgaatttttcatttcatttaattttactgaatttaactgtaagtagccacatatagctactagctactgtattgggcagcgcacccacagaagactgaaatttctatattgtgttccagagcttatccaacttgtgctgatgcagaaaacaggaatatctagaataatgagaaatcaaaaattcattacatgtatgctcattaagaatgcactaacttttaggccgggcacagtggctcaagcctgtaatctcagcactttgggaggccaaggtgggtggatcacttgaagtcaggagttcaacmccagcctggacaacatggcgaaaccccatctttacaaaaaatacaaaaagtagccaggcgtggtggagcacgcctgtaatcccagatacttgggaggctgcggcataagaatcgcttgaaccccagaggcagaggtagcagtaagccaagaatgcaccactgaactccagcctgggtgacagagcaagactgtctcaaaaaaaaaaaaa

SEQ ID NO: 785721 - DNA, 669 bp, Homo sapiens
gtctcacaaaacttaacatccttagatttaaatgagaaggtgatgcatctatgagacaagaacaaagtactgtcaaaataatgaataaggtaataagaaaaaaactcatcaatttttaaaaggatagctcatttttttgaaatcaatagaaagcttggaaaataaagtagatgaaagctcccagaaagcagaacaaataaacagcaattttttaaaagagtgataagatgagagtcttggagaaataatctaaaagattcaagatccaaataatagttattccagagatgtagagaaaagaaagagaaggaaattatcaaataaataactaaagaaaaattccatgttgaagaacatgtcttgaggtcaaaacagtccaccaagtgacccccactctgagactcattgaagtaaagagaagatcctaaacactaccccacagaaagagaaatgtcacttacaaaggattggaaatgagatttccattgcrctagtcacagcaacctgtgctagaagacaatgaaacaattgagttttaaccagaaatctacaaacagacaaattacaaataattgtgaggggaagaaaaaagacatttccagacacattcctaaactaaaaaataattgcctctcatgtgatctttcttaggaaaccattaaagaacat

SEQ ID NO: 785722 - DNA, 614 bp, Homo sapiens
ttatttcattaattccctctctaatccgtaatatttcctctttctactgctttgagcttcgtttgctcttctttctccatggcttaaggtagaatgtttggttgttgatatgggatcttttttcttttttagcgtaggcatttaaacttccctgtgagcactgctttcaccgcatcccttaagttttggtatgttgtgtctttgttttcattcatctcaaaatattttcttattttcctctgcttttatcttagacctgttkgttatttagtagtgcgctgttaaatttacacatgttcgtgaatttcccaaatctttctgttacttttaattttattctcttgtgatcagaggacgtatattgtatgatttcaatccttttaaatttattaaggcttgttgtatagcctgacatacagtctattctggtgaatgttccttgtgcacttgagaagaatgtttattctgttattgggtacagtgttctattgatgtctattaggtctgctttgtgtatactgttgttcaagtcttgtatttccttgttgatcttatgcctcattattctatccaatatttaaagtggaatatttaagtatctgaatattaatgtt

SEQ ID NO: 785723 - DNA, 522 bp, Homo sapiens
acaccactaaaaccttgatctcacctttctagcttcctgaactgtgagaaaatagatttctattggtcaagccactcagtctgtggcactttgttacagccccagcaaataaatatagtaatatgcttttgttttttttcatttcagtttcaattgttcattgcttacaaatacaaacaacttgtttttgtgtttactttgtatccttgccaccctgttatattcactattagtcctaggagtttattcttaaagattcytggggattttctacataaacaatcatgtcatctgcaaatagagacagttttttttttcttccaattgacatgtcttttatttcttatttttgcaattacaacagttaggacttccagtataatggagaataagagggataagagtggacatccatttttcaccattaagtataattttagctgcggagattttcgtaaatatcattctcaacttgagaatgttcatcttgttcgttgagagcttctatcatgaatggatgtt

SEQ ID NO: 785724 - DNA, 610 bp, Homo sapiens
aattaaaaaagatattgcaggaaatcattttttttctaaaaaatgtgttcttgttaaaaggaggataatttttgtctaattcaaagcttatttaaaggttatatataaaataaggtaaaaagaaacaagaaaatatataaagaagttatagaaataaaaaagaatttttggtaagaaagcttaaagaaaaataattttacatgagaaagaaccttgtatggtacatttttgtcctaraataaaatgactggttgtttaagaaagaggaatgttcatacaaaccagaaagtccaagcatgtcgtgaatggtctgtttaagttataataagagcatttatggaaaaagacccacaaactttcatataatcaagttgtctataattaaagggaaattatttataatgatcttttgagagattgggttttgatattaaaaaacatttatacactaaagaattcattagaacaacattttcttaaggtattgatttacttttaataaattacaagactatatatataatatattttttcctgcaaagttcaacttttattgcatctcactgttttcagctttctctccccttttaaagtacctgaaataataact

SEQ ID NO: 785725 - DNA, 593 bp, Homo sapiens
tttattgcatctcactgttttcagctttctctccccttttaaagtacctgaaataataactctatctttcaactcatttttagctcctgtaagtttttttattttctcctttgtgttctaactgttgtggcctgacgctaataaatgttttatctttgtggtctaaaggaaacattccttccaacataatatttcctgtagggaacagcggttgaaatgcagaaggtgttttgttttccctttgggaaattggcctaataaacagaktttatgctttattgaaataattcctatgtcattattactaagttttggtttgtttagaaaaaaacccgagattaaattttttttaattaagattattacatacatgtaaccctctgtatgtgcttttaaagtccttgtgccattaagttacagagctttgagtccttggtctaaaaagaacaccaagtcctgctaaatattaaacactgacagcagttaaaacctcattttctgacctggtagaagatgccaatcaaaataaactgtgttcatgagacagaaggccggaaattaaaacgattcaactcctcaaggtctggagacta

SEQ ID NO: 785726 - DNA, 635 bp, Homo sapiens
tctcaggggtgtgtgggattccgagctgtggatccacacccccacatctctctcacagctgggatcatgtccaggcagaatcgcccacattgtgtacatcattctcccttctctctctctttctgagcgcacatagctgcatttccgaagttacataataaaaacagctaacatttattgagctttcattatgtattaggcctgctcgcagccctttgctcacgcattaattcattaattcagataatcctcctaagaatgttatgaggtaggtatattattatctcttctctttacagatgaggaaactgaggcactgaatggttaagtaactagcccaaggtcaaatagtgtaccacccarcccgaaggcgttcaccttgttcccgggtaggatcgcagaactggttaagctaggttaccgatccgggtggtgtcagctgatccctcagctgctgtagtgcaagatctgcaaaatatctcaagcactgatcttaggttttgcaatagtgacactgtccccaggaacaacttggggaggttcagacccttgctgtcagaggctgcacagcccctaaaccttgatttctaatcttgtagctaatttgttagtcttacaaaggcagactggtcccc

SEQ ID NO: 785727 - DNA, 639 bp, Homo sapiens
ctgggactacaggcgcctgcaaccacgcccggctaattttttgtatttttagtagagatggggtttcaccgtgttagccaggacgatctcgttctcctgacctcgtgatccacccgcctgggcctcctaaagtgctgggattacaggcgtgagccaccgcgcccggccttctttttctttttaatttttttgtagaacaaattttattttaaaaatagggacgaggtcttgctatgttgtccaggctgatgttgaattcctgggctcaagcagtcctccyaccttggcctcccaatgctagattacaggcatgtgccaccagtagttttctttaaatcaacagaataataaatttggtcatgcttccagcccacccacacaggtagacacagcttagttcagtctccacatagagaagactcctatatacgaaaaatgtaaagacgaggcattcctccgcttgctttctgaggacaccctaccctgtatttgagtagccgtcaataaaccttccctccccactgaactctgtgacttgcctggaattccctcctgcacgagatccaagaactttctcttagggtctggattgggacctcttttttttttggcaacacaaggacatgccaattgtaactt

SEQ ID NO: 785728 - DNA, 639 bp, Homo sapiens
ctgggactacaggcgcctgcaaccacgcccggctaattttttgtatttttagtagagatggggtttcaccgtgttagccaggacgatctcgttctcctgacctcgtgatccacccgcctgggcctcctaaagtgctgggattacaggcgtgagccaccgcgcccggccttctttttctttttaatttttttgtagaacaaattttattttaaaaatagggacgaggtcttgctatgttgtccaggctgatgttgaattcctgggctcaagcagtcctcccaccttggcctcccaatgctagattacaggcatgtgccaccagtagttttctttaaatcaacagaataataaatttggtcatgcttccagcccacccacrcaggtagacacagcttagttcagtctccacatagagaagactcctatatacgaaaaatgtaaagacgaggcattcctccgcttgctttctgaggacaccctaccctgtatttgagtagccgtcaataaaccttccctccccactgaactctgtgacttgcctggaattccctcctgcacgagatccaagaactttctcttagggtctggattgggacctcttttttttttggcaacacaaggacatgccaattgtaactt

SEQ ID NO: 785729 - DNA, 639 bp, Homo sapiens
ctgggactacaggcgcctgcaaccacgcccggctaattttttgtatttttagtagagatggggtttcaccgtgttagccaggacgatctcgttctcctgacctcgtgatccacccgcctgggcctcctaaagtgctgggattacaggcgtgagccaccgcgcccggccttctttttctttttaatttttttgtagaacaaattttattttaaaaatagggacgaggtcttgctatgttgtccaggctgatgttgaattcctgggctcaagcagtcctcccaccttggcctcccaatgctagattacaggcatgtgccaccagtagttttctttaaatcaacagaataataaatttggtcatgcttccagcccacccacacaggtagacacagcttagttcagtctccacatagagaagactcctatatacgaaaaatgtaaagacgaggcattcctccgcttgctttctgaggacaccctaccctgtatttgagtagccktcaataaaccttccctccccactgaactctgtgacttgcctggaattccctcctgcacgagatccaagaactttctcttagggtctggattgggacctcttttttttttggcaacacaaggacatgccaattgtaactt

SEQ ID NO: 785730 - DNA, 661 bp, Homo sapiens
gcatgggtttcctatggctgctataacaaatgatcacaaattcaatggcttagaacaacacagatttactatcttgcagttctggaggctagaagtccaaacaagtcttgtggggccaaaatcaaggcatcagcaggtgyttccttgccttttccagcttccagaggctgccacactccctggcttatggccgccttctgtcttcaaagccagcaatcactttattcccatctctgtttccatcaccacatcatcttctctgactctgaccccaactctcttgcctccctctttcacttataaagacccttgtggtgacactggtcacactttgatgctccaggattaatctctccatcttaaggtcagctaattagccaccttagttctatctgcaaccctaattcctccttgcgacataacattaacatttcacggtttcttgggattaggacagggacatctttgggtagccattattctgcctgcagtcagtttggtgaagcctgtggaccctttttcaggataacactttcaagtgcataaaatcacagacatatgactccaaatgaaactaattccactgaatacagttactaaaatactttaatgcagttattaaaatactttaaaaacaaatgtgtgatgtagtaatacatgt

SEQ ID NO: 785731 - DNA, 661 bp, Homo sapiens
gcatgggtttcctatggctgctataacaaatgatcacaaattcaatggcttagaacaacacagatttactatcttgcagttctggaggctagaagtccaaacaagtcttgtggggccaaaatcaaggcatcagcaggtgtttccttgccttttccagcttccagaggctgccacactccctggcttatggccgccttctgtcttcaaagccagcaatcactttattcccatctctgtttccatcaccacatcatcttctctgactctgaccccaactctctkgcctccctctttcacttataaagacccttgtggtgacactggtcacactttgatgctccaggattaatctctccatcttaaggtcagctaattagccaccttagttctatctgcaaccctaattcctccttgcgacataacattaacatttcacggtttcttgggattaggacagggacatctttgggtagccattattctgcctgcagtcagtttggtgaagcctgtggaccctttttcaggataacactttcaagtgcataaaatcacagacatatgactccaaatgaaactaattccactgaatacagttactaaaatactttaatgcagttattaaaatactttaaaaacaaatgtgtgatgtagtaatacatgt

SEQ ID NO: 785732 - DNA, 622 bp, Homo sapiens
gaggtctcactacatcacttaagctggtcttgaattcctgggctcaactgatcctcccaacgcagcctcccaaagcgctgggattacaggcataagccactacacccagccaacatgcatcttataatacaagaaaatacattttaaaagcaaatacttatttaatatttgctttaaaacgttgtcaggcaggttgtaggtgctcatttgtrgatagttagaaaatatcctccgaattgtttgactgtctccatcctgccaagcttagaggtgttgagaatattcttttcctagtatttgtttcctatatactagtatttcttatatcttttcctggtatttgtacgtatttctttgggagtccttaaaattcaatcaactctaaattatcaattctggatccttcagtctacaaaacctctctgtttcctgggatgattttctgcctctgctagaacagctccaagaatctgcaaaaatagtacttaaggtctcaatttctttttttttttttttgagaccaagtctcactctgtcgcccaggctgaagtgcagtggtgcaaactcagctcactgcagcctccacctctggcttgaattttcccaggagtgagaagtctcc

SEQ ID NO: 785733 - DNA, 569 bp, Homo sapiens
acccaacatccgccccaggatcctgcagagctggcaaaagacaggtcgggtggccttcgaacaccaagcaccttcagatattccaggggaagggtcggggactgtttccccctcatctttcctccttcctgctctccatccctccatgctttcgtttctttgactgtctgcgaagggcttttsagcactctgccagtaactttgcttcttgttttggtctccttagatgcgttttcccggctgaagtttgctgctatccttgacaagtaacagcttgctgcagactagacgttcactcaaaaatgaaggcacagaaagataggaaaggaatgcaggaaaaccagcttggctaattttagcctgcattttgttgtaaggggaatcagcatctattgcctgaatgagtagtgttttgatcacccaagttaggaaaagaccttatatcagattgcccagtgaaataagcagtaaggaatcacctttaaaagttattttctttatatacaaaacattttaaataactagacttcacaattatagcatttaagaaattgtaaggatcttaaagt

SEQ ID NO: 785734 - DNA, 626 bp, Homo sapiens
aattagtattcaattgtcacccaagtcaccactgaaatcaagaaacagaactttgccagccacctaggggacctcaacagggcccccattctcctcccaatcctccttactcccacacccagttaactatcagaaatgtagcgagtgtaaactgaagaactgagtttttcattttatttaatttgaattaattcaaatttaaataggcacatatagcaagggactgccatattagacagtgcaggttgagtatcagcatcacttatgaagttcctgcttttgaaactttatttgttttttcttaggaggacattactgatatccctaaacttgcagataatctcaaattatttaggtaagtaaacttttatggggaaaaggagttactcataacaaagtcttgaagataaagagtgcaggagtttaaattrtatatccctgaggcaggttcatggttcaaaggtaaaatgtgcgctttgccatcagacaaacaatgggttgagtcgtagctctaccacacacaccagctaggtgaccttgagcaatatattatgtctctgagcctccattttccaatctataaaatgggaatatacctccccttgggcttgttgggaggattcaat

SEQ ID NO: 785735 - DNA, 543 bp, Homo sapiens
ctcatggtcgaggacacgggtgggtgctcctgaacagcagagtggccccaggggtggatgcgtgggggctcaggcgcaggcagccgtgggggacatcaccacctcagacccacagcagtcccctagggcagctcaggagctccggccacctgaactggcccttccatgggcaggaccactcctgtgggcagcacagtgggtgcagagccgggkggctggggtgagacccttggctggcagaagctgcctgccaaatgtcagcagaggcacagcagctaggaggcccttgaagcctccaccgtactgagggaacagcactcactgccgtcctcagaggccaaggccacaggcataagaggatcacccagctgggggcttgtgtatgcctgatattaatagcgctggctttgcctggtgtggccctgacaatcctcgggccagccctcggtgtgaactgccccctcctgtgtgtgggctggcacattcggccagcctaggaccgcaggcctgcggaggaccactgtgcgccgtgtgcctgcaccc

SEQ ID NO: 785736 - DNA, 573 bp, Homo sapiens
ggcatgtctcagtgtcagggtgctggtgagggacggctgttttctgtgagcatctacatgccagggtgtcgtggaatacagtgtgtttgtgtgcaccggggatgtgccgtgtcccatgtgtttctatgtgttaggaggtcrttgtgtgtctgcatgctagtatttgtgtatttgtgtaatgacatctttgtatgggggcatgctgttacatacctttgtgtctgtgtgcctggccaactacatgcatgtgtttgtgtgtgttggtgtttgctggtgtcagtgtcattgagtctctgtgtgtggtttatgctcttatgtgtctgattgctgtgtgtgtgtggtgtgtgtgtgtgtgtgtgtgtgtgctgtgatctgtgtttgagacagggtcttgctctgttgcccaggctggagtgcagttgtgtggttagagctcactgtgccttgaactcctgggctcaaggaatcttcctgcctcagcctcccaagtagctgggactacgggtatgcgccaccatgcctggctagtttcaaaagttttttgtagagatggggtcttgctatgtcacacag

SEQ ID NO: 785737 - DNA, 445 bp, Homo sapiens
cgccccccacagggcctgcagcccgggacaacaccggccatgtgaatggtgggtacccattggatatgggcgggtcagcacaggtatgtggggtgcagccattgcttggggacccacggtgatgctctgtgctccctcttcccacagtaactgcattaaagtgtttcatctgagctttgtcatcatctctgggggcactgctgacctgagtctggggaggcaggcgtcttgatccaggtctggttacagaggggcaccccacattcattgtcaatgartgaatgaatgaaggctctgtatggtatctgcaagtgaacagagcctgtggggagacagaaggtgggcacaggcctgcccctgtctttacagcaccctagcacccaggccttcagcagggcaggtgaggttcccacgctagggccctcatcccatccaccctagagtg

SEQ ID NO: 785738 - DNA, 649 bp, Homo sapiens
aaacgctctggtggccctggaggccgtggtgggcagagaacaaatccaggcggcccctcccctctatgcctaaccccagcatctgcagggaatcacccactgtcttcaacctcagggaggaagccccgacacaatctgacttgcaaagaggctccccagcgaagctcccagcaccgcccttgcggctgcctgcacttccgccatgcaccctggattccgagggtgagcccgctaatgcacaaagctgggactaacttgagggacagacaccagacggcagaggccgggctggcaccgtgcctgctccccattggtagtctcctggtgctcagtcctctccagcaggagccttccaaccccgcatttgtgactcttcctcatcctactgaagtaacaaccccgtcaccgcagatccctcctgaggcacacgctgctgacagccagrcgctggcccttctgctgggagtggtgcccatgcagcggaacggtcacaagcaggccaggacgatctgccagaagcccgcctcaccgcaggcctgtgacggcgtcaggctgagtctgcaccgagcccagccccactaccttctccaaagctggtctgtctcagagccaaggacaaagcctcaccccacggttcacaagcagcacc

SEQ ID NO: 785739 - DNA, 614 bp, Homo sapiens
cagggaaaagggaagactccacatggaggtcatactcctcaatagtaggccactcctgggagctgcctcagaggcaggaccggcccatctgtctgtgtccacaggtgcttcctctcctcattctgctcccaggaggcggctacatccctcacttgggaagtgggcaggagacagcccagggtcggggaggcggaggctgtcctgagcaggggcgcagagtccgggctcctgggggccatgccactggctgggctgtctgaacagcagagtggacgcagactggtcttgcctggcatgggcatgcaccctggctgccctagccggccaagaggcaaggctacaggcctggggaagccagcactgtgctggccaggcgagggacggaggagcccaggcacgcagctgtgaatggaaccaccaggccccaccctggaatcacgtygcctcgctgcaggccacgtggtccccaacatgcccctccacggggctgctctcggccacagcagcccacggcagggaggggccgctcacggtggggaggggtagcctgccctggtcctattcactggtgttcctcccaggttctaacttcctgagctgggccggtccagaga

SEQ ID NO: 785740 - DNA, 590 bp, Homo sapiens
agacaaaaagtgagtgtcctttcagctccccaagctgtaagcagctctttccttagcaacctaacatatcggttcacagtttctgtgtttattttttctcccagccagagcaaatctagactgcttgctttgggctgaatgttgaagaaggcagcactgttggcaggcagaggggctgtgggctgtccgtcttcctcttcctccgctaagggaaacaatggcaggatccagttgcttatctgcctgcttatctagcaagctgctgggtgtctggatcctgcaggggcagtgggggagagcccttagctcagcactgccctcctgtgctggggcaggcatggcaaagcccatgaagttgcttccctcagataaccttgtgtttccacctggagaggggaaataaagacacatcacatcattggattatgaggagtaaattatagaasgcacacacacagtgatggcattcaaaaaatatcagctgtggccaccactgtctcagctctttgaacttggacttgcaggactggcctcacttgcaggtactgtggcaaatttctccccatttacagtgaccttctgttgacact

SEQ ID NO: 785741 - DNA, 654 bp, Homo sapiens
aatattgagggttgttcagctaaaaatgccacaagcacagggaagcacttggcctcggccgctgtttggctgacggcagcacacaagcccttccttactgaagacagcactcgcttcccagcccagagagggcatcagcaggcacaagagacrtctggaagggggctctactatcttcccagatcttcctgccttttaaaagacaagaactgctctcctctttgttttgtcactacataggatttatggctctttgctgaaatactatttaaccaaggacccctaagccattgccttcagaaatacttttggactggccgggcacggtggctcgcgcctgtaatcccagcactttgggaggcagaggcgggctgatcacgaggtcaggagatcgagaccatcctggctaacacaatgaaaccccgtctctattaaaaacacagaaaattagccgggcgtggtggcgggtgcctgtagtcccagctactcgggaggctgacgcaggagaatggcgtgaacccaggaggcagaggttgcagtgagccaagactgcgccactgcactccagcctgggcgacagagcgagactccgtctcaaaaaaaaaaaaagaaagaaagaaatacttttggactaaggcttcccctgtgtgatgg

SEQ ID NO: 785742 - DNA, 654 bp, Homo sapiens
aatattgagggttgttcagctaaaaatgccacaagcacagggaagcacttggcctcggccgctgtttggctgacggcagcacacaagcccttccttactgaagacagcactcgcttcccagcccagagagggcatcagcaggcacaagagacatctggaagggggctytactatcttcccagatcttcctgccttttaaaagacaagaactgctctcctctttgttttgtcactacataggatttatggctctttgctgaaatactatttaaccaaggacccctaagccattgccttcagaaatacttttggactggccgggcacggtggctcgcgcctgtaatcccagcactttgggaggcagaggcgggctgatcacgaggtcaggagatcgagaccatcctggctaacacaatgaaaccccgtctctattaaaaacacagaaaattagccgggcgtggtggcgggtgcctgtagtcccagctactcgggaggctgacgcaggagaatggcgtgaacccaggaggcagaggttgcagtgagccaagactgcgccactgcactccagcctgggcgacagagcgagactccgtctcaaaaaaaaaaaaagaaagaaagaaatacttttggactaaggcttcccctgtgtgatgg

SEQ ID NO: 785743 - DNA, 616 bp, Homo sapiens
agtcagcccaggccggctcccgtacaccaccaggtgtgaggcctccagctctggaaatctgggcagagaaggggtagcatgaaaagaagtcagggttaaccctgtttaaccctggtgcttagttacaatgcctaagcatagaatgataaaaccttcaaacgttagtgtcaggggatgctgggcaatcactggttctacccctgcaggtagaatggaggayttcagttcaaccggccagctacgctccaagcctaatatggaagtccaatgttttcttctgctggtgtggtgcagggcacggatttcaggaagtttgtcaaattgtttattctatgagaatcaagagccaggatattgtgtcagccttgcctgtcagctgttgtttatatcacactcggctcctgtctctgggcttctttgcagggccagcttcgccttgctgggtgccctgccattctgctgtcagtggagcactgctgaccacaagaacaatcgagcaaaggctgtgctgggaggtgctggcaaagcccatgagagaaactagaaaaattcatgtttcatagacccagagcctctttagagtttcacgcacagaaggacctgccatgtgagcagt

SEQ ID NO: 785744 - DNA, 616 bp, Homo sapiens
agtcagcccaggccggctcccgtacaccaccaggtgtgaggcctccagctctggaaatctgggcagagaaggggtagcatgaaaagaagtcagggttaaccctgtttaaccctggtgcttagttacaatgcctaagcatagaatgataaaaccttcaaacgttagtgtcaggggatgctgggcaatcactggttctacccctgcaggtagaatggaggatttcagttcaaccggccagctacgctccaagcctaatatggaagtccaatgttttcttctgctggtgtggtgcagggcacggatttcaggaagtttgtcaaattgtttattctatgagaatcaagagccaggatattgtgtcagccttgcctgwcagctgttgtttatatcacactcggctcctgtctctgggcttctttgcagggccagcttcgccttgctgggtgccctgccattctgctgtcagtggagcactgctgaccacaagaacaatcgagcaaaggctgtgctgggaggtgctggcaaagcccatgagagaaactagaaaaattcatgtttcatagacccagagcctctttagagtttcacgcacagaaggacctgccatgtgagcagt

SEQ ID NO: 785745 - DNA, 604 bp, Homo sapiens
ttcctcttaaatgaggtgctagagttgccaactccatagagaccgaaagcagaagggcggctggcagggcctgcggggaggggcggaagtcactgtttaatgggcacagggtttctgttttgcaagatgaaatgagttctggagatgggttgtacaacaatgtgaatgtgtgtaacactactgaactgwacacttaaaaacggtcatgatgatgaattttgttatgtgtattttgccacaatttaattcaaaaaatataaatacacacaaaatgtctgcacagaaaccctgtttttgaaggaaatgccctgtattgtcagtgagtcagacgtgggctgtgctcccaaacctgggtggattgtgccctctgtggcccatcactgcagagggtgtcagtgtgaggaggaaaaaaaggggagtggacaggctctgggccacaggcccactgcccactgtgggacagagagtgcttccctgctctcaggagaagagaaagcatgttgctcatgcacataacacattcaccttatagggggccactggacttctagcttcccagacctggttcatctaagggaaagccatttgtaggggcagaaatgtt

SEQ ID NO: 785746 - DNA, 621 bp, Homo sapiens
actttcttctaagggttttatagtttgggttttacatttaagtctttaatccatcttgagttaatttttgtataaggtgtaaggaaggggtccagtttcaattttctgcatatggctagccagttctctgagccattattctcagcaaactaacacaggaacagaaaaccaaacaccacatgttctcacttrtaagtgggagctgaacaatgagaacacatggacacagggaggggaacaccacacactggggcctgttgtgggagggtggggtgcggagaccatcaggaaaaatagctaatgcatgccattaatacctaggtgatgggttgataggtgcagcaaaccaccatggcacacgtttacatatgtaacaaacctgcacatcctgcatatgtaccccagaactttaaaaaaaaaaaaaacagagtagcaggtggattgaagaaaaccaagattggaagcaccactgaactaacagtgaatttaccattttttgcctgcagtgcttcccagcttggtctaggaagaaagccaaaagtggacaagtgcaaaagagagaactccaggagaagccccctagttcaggttggaggaggagcagagagtcccttagcagca

SEQ ID NO: 785747 - DNA, 653 bp, Homo sapiens
tttttttaatcactttcttgaactaagatcacagatctgccacctgccttcaactctgcagatcgtggggcgtggggtaaaggggtcctagaggatgacctgcaacgtcactaggaaaagaaaaggtgtgacagaaacttatactggaaaagtccaataaaaatgcctattgcggctgggtgcagtggctcacacctgtaatcccaacattttggaggcctgaggcaggaggataatttgaggccaggaatttgagagcagcctgagcaacaaagtaagatcctgtctctattaaaaaaaaattaattgaaaaaaaatgtctaccccaagctctaataaaaactctggcttaagatggcaactgctaaagccataagcagctgtttcatcctcatctatttctgttttagatgaaatgtaaactaaattcaatatttctaacaaactagaaatattggttatatgggccayaccctgaggagttttatcgataaaaccattgacaagccaggcatggtggtaggcacctgttgtcacagctactcaggaggctgaggtgagaggatcacttgggcccagaagcttgagtctagcctgggcaacacagcaaacataacaagactctgtctctttaataacaaaacaaaacatgg

SEQ ID NO: 785748 - DNA, 530 bp, Homo sapiens
aaatctcggtgtggttaaggacaagtcagtgcttaatctctccagaattcagtttcctcatctagttatcaaactggacaatttctaagattccttccagatcttaaattcttgtcaaccatgaaccatttggtctgaggtcagtgtgattaacagcagcagatggactttatgtgatgcacttaatttgtaattttgcaagcatttctaaacctccttgaaataatgacttctttgagaytaattcagagtttgctaaatacccaaagacagacaaattccagagagtcttcagaggggatggaggggacatgacattgtgaaagcatagacaaagacattgctggtttcacatgagactctctattctaatatttcaagtaagctgacagaagtaaatctgcaaacgtttctagtgattcctaaggaatgcagggacaataatcattaatatcaccaataattaccctcttcaagttttatgagattttctaattctgctactgcacaaataaaacaactcatttttt

SEQ ID NO: 785749 - DNA, 610 bp, Homo sapiens
gtttctagacctgtgctatcagtgtcaatgtaagtcttataagttccctatgagaatgttaaatcacaagggcttagggtatataggagttaagtgatgctttcagttgatgttgaatttcatggtgactccagagtcacataatataggagcttccaagcttgacaaattgctcatatatacgtaggcagaagtggctgatcactacagtgctggtcctgggcctgtttggtttgtgtccattcttgtctttcccctactatgctgtatcacaggggaacatacctcccacaggctgcatttcccagcctcccatgtctgactgctaacagttgggtcaatggtaggcattgtcaggagattagagggcagaagaaaggagaagccagggaatttctgccttggcaacgtctctgcctccatgatgctrtctcctgccagagaagcctaccaaggttccagcttactccatgtaaccctggtccctgtgctctggtgatgctacctcttctgtgtgccctttgtggtttcctgcctttggtaatccctaggttgactcactgctacttatttggcttttttttttctctcctattacctataaaccaac

SEQ ID NO: 785750 - DNA, 541 bp, Homo sapiens
acatctaaaacccggacttgggggaaagatcacaatataacttagagatatagatttgaaagtcattaatagatttagactgtcttaccctggaatccatgaatagtcctaaggggttcacaaacctcagatatatgtatatactttccccttgggctaaggatctgcactgagtatttccagttgccttatcccacatrcatatatgtgcatgagatcacttatatcccttctctgtcctatgtctatctatgtccccaagaggctgatgtgtttgctggcattacccgactcccttgccatttcttatggtgaggcattggcaggagatgagagggaaggagaaggaaaaggttgggatattcttttcccgccttccccacattgggtcccatttctggcagaggctgtattcctccaggactatggtcctgtccagagtcccctccttcatggagccagcactcccaagcctgcagtaacacaaggccttcagtcccagcgggtcccactttttgctcttgccgtcctcttggtgatt

SEQ ID NO: 785751 - DNA, 519 bp, Homo sapiens
cctccttcatggagccagcactcccaagcctgcagtaacacaaggccttcagtcccagcgggtcccactttttgctcttgccgtcctcttggtgatttgacatgcttttccagttgcctgaaacctgcccatacatcatgaggagtcccttcattatggtctttgtaccatctgaggtggattgtttcttgccagattccatgtgtctttttttggtgctctagtatacacttgtgggagaaaaaaactcttacaagctatggggacggctgaccacacccacagattgtggccygtaaactacctgtgaggaccagcaagtaccttcatggatccttatttaccctaaaacagtttctaaaatcttagtgacaagaagttgttaccagacatcccaggtgaaactgcacccagtgagtattgtaccaaattcctaggactggcctcaagtactgctgagcttagaaggggaagagaatgtgagagttcagaatctatgaatgtgtccagcataaagag

SEQ ID NO: 785752 - DNA, 642 bp, Homo sapiens
aatgtggtctatccatccaatggaatattattcagtcttaaaaaggaaggaaattctgatacatgcttcaacatggatgaaccttgaagacattatgcttagtgaactaagccagacacaaggataaaaatcatgtgattccacttatataaggtacctagagtaggcaaaatcatagagacagaaagtagaatagaggttatcagagactgaggccaggaaatggggagttaytgtttaatatatacagagtttcattgtttaaaggatatagtttcactttaaataatacacgagttctggaaatggatggtggtgatgattgcacaacattgagactgtactaaatgcctcggactatacacagaaaagtggttaaaacggtaaattttatgttgtatgtattttaccacaataaaaagtcatggaaagacatggaggaacctcaaatgaatattattaagtggaagaagccaatctaaaaaggctacatattgtatgattccagctatatgatattctggaaaaggcaaaactacagagacagtaaaaagatcagtggctgccagagcctggggggcgggaggcatgagcaggtggcacacagaggatttctgttaaggcaatggatcccctctgtat

SEQ ID NO: 785753 - DNA, 642 bp, Homo sapiens
aatgtggtctatccatccaatggaatattattcagtcttaaaaaggaaggaaattctgatacatgcttcaacatggatgaaccttgaagacattatgcttagtgaactaagccagacacaaggataaaaatcatgtgattccacttatataaggtacctagagtaggcaaaatcatagagacagaaagtagaatagaggttatcagagactgaggccaggaaatggggagttattgtttaatatatacagagtttcattgtttaaaggatatagtttcactttaaataatacacgagttctggaaatggatggtggtgatgattgcrcaacattgagactgtactaaatgcctcggactatacacagaaaagtggttaaaacggtaaattttatgttgtatgtattttaccacaataaaaagtcatggaaagacatggaggaacctcaaatgaatattattaagtggaagaagccaatctaaaaaggctacatattgtatgattccagctatatgatattctggaaaaggcaaaactacagagacagtaaaaagatcagtggctgccagagcctggggggcgggaggcatgagcaggtggcacacagaggatttctgttaaggcaatggatcccctctgtat

SEQ ID NO: 785754 - DNA, 642 bp, Homo sapiens
aatgtggtctatccatccaatggaatattattcagtcttaaaaaggaaggaaattctgatacatgcttcaacatggatgaaccttgaagacattatgcttagtgaactaagccagacacaaggataaaaatcatgtgattccacttatataaggtacctagagtaggcaaaatcatagagacagaaagtagaatagaggttatcagagactgaggccaggaaatggggagttattgtttaatatatacagagtttcattgtttaaaggatatagtttcactttaaataatacacgagttctggaaatggatggtggtgatgattgcacaacattgmgactgtactaaatgcctcggactatacacagaaaagtggttaaaacggtaaattttatgttgtatgtattttaccacaataaaaagtcatggaaagacatggaggaacctcaaatgaatattattaagtggaagaagccaatctaaaaaggctacatattgtatgattccagctatatgatattctggaaaaggcaaaactacagagacagtaaaaagatcagtggctgccagagcctggggggcgggaggcatgagcaggtggcacacagaggatttctgttaaggcaatggatcccctctgtat

SEQ ID NO: 785755 - DNA, 621 bp, Homo sapiens
aattgcagagcgcgttagtgttacggctgtcattactattaactatgttcagaaggctggaaatgctgctcccctccaaagacctgcccccagcagccagcctggtgcacactggcatttgcctgggccaggaaggcttggaggccgcaggctgctctggggaggccatgcttctcagcttagatggagtcctcttcattttgcatgctggcccgggaaaactggatttatccacatgcagtgttggcagcttgaggtccgactcgcagaagcacaggcaaatgcagacgaatgccagcagtcaggactcaggaaagctgagctgcccctgaagacacaagccctttgcccaaaagctgagaagcactgaaagcccgaagtggcatctttaattcatggcaccacttagagatcgtattgctaaattcgaattaataatctttaaacmacaacctacagacatggcagaactgtaggcctcgtccctaggcagagcctcaggatctcctcttgctcccatcttggaatcccaagggtcaggatgggaagaactggggggaacatgggatgggggtgttccgtgtggccccctgactgcacctgttggcgagctgccaagga

SEQ ID NO: 785756 - DNA, 553 bp, Homo sapiens
ccaatatattttttcttgcaaaaatcccaaaagacttccacacagcactgctgagtgagtttcatgccagacgagtggcacttagaagttctggtttagaaagaaaatactggatgattgagaacagtttttttttggggggggggggcgtcacattttataagctgttattttttatttctataatgaaccttaagtttccttgatttatataatatcggagaccatattggctttggttatggggatttgggcccaragagcttgacggttctctgaaatgctagcaaatggctgcaaaaatgtttgtgatgggagcaagcaagcttgatagttagccggagtgttggtgattgggatgccggctgataagagtcgactctaattttggcattttaacctacattctgagctgtcacactaatatatattgagaagacataatgcgttacagcaacataatcccagagctgtccttacccaccacaaaagacaaccaaaagatattctctgcagataggacatttagggctgctagttggtaatctggggt

SEQ ID NO: 785757 - DNA, 553 bp, Homo sapiens
ccaatatattttttcttgcaaaaatcccaaaagacttccacacagcactgctgagtgagtttcatgccagacgagtggcacttagaagttctggtttagaaagaaaatactggatgattgagaacagtttttttttggggggggggggcgtcacattttataagctgttattttttatttctataatgaaccttaagtttccttgatttatataatatcggagaccatattggctttggttatggggatttgggcccagagagcttgacggttctctgaaatgctagcaaatggctgcaaaaatgtttgtgatgggagcaagcaagcttgatagttasccggagtgttggtgattgggatgccggctgataagagtcgactctaattttggcattttaacctacattctgagctgtcacactaatatatattgagaagacataatgcgttacagcaacataatcccagagctgtccttacccaccacaaaagacaaccaaaagatattctctgcagataggacatttagggctgctagttggtaatctggggt

SEQ ID NO: 785758 - DNA, 680 bp, Homo sapiens
agcctcccctgatcactctctaaagaaccctccaggtcacttgctatcacatctttggttttatttccttcattgaagaacttagtgcaatctcaagtttatattattcatttgtgtgttcgcatgttgagcgcatgtcccactgctgacccctggcacttagctcgtaataggtttgtataataggtgttcaaggtgttgaatggattttgaccatggacgtgatgcccaacagagtccctgcctcccattgcactctgggaggggaggcaagcatctccagcagcttggcaggtagaaggcctcttggataactatgtgaattatgcccatttcaaagattggatgccgagtcccagaggcagaagtctcccagtccaggggtccatggtcaggatgacctgaagtcttaccctgtggagatccaaggtccattaaggcgtggaggcaggatcgcagtgctgggcactctatctggcaagggctgctggcagtggggttcccagcgcaggcrgctgcccccggcctccccagccgccggtgcagtgtgggctgcaaagcagacagacctgggtaagaccccagcatgccccgggaacacccaccccatctgccctcccaaccccactgtggccacagagagccaggcagggctgtcccgcaacctccatcgcagcccc

SEQ ID NO: 785759 - DNA, 483 bp, Homo sapiens
gtccccccatgtgcggttttgctttccatggtttcagttacctgcagtcaaccatgatctggaaatattaaatggaaaattccagaaataaacaactcatacattttaaattgagtgctgttctgagtagcgtgatgaaatcttgcaccattctgctgcatcccaccctggatgtgaaacccccttttgtctagtgtatccacttatacactacctgccctatacaatgcaataataggaaaaaacatagtatacataggatttggtattatycacagtctgagacacccactgggggtcatggaatgcctcccctgaggataaggggggactaatgtacacacacactcacacacacatacatatatatattactgtgtccaaaaattagagtatgaacattcttttcaaacacatgtgcaacatttacaaaaactgtccccatactaggccatacaatgtctcaacaaattcaaataattg

SEQ ID NO: 785760 - DNA, 641 bp, Homo sapiens
ggtcatatccggccccgctctgggccaagggcatcctgatggctctgtttgtgttcacctctccatccccagccccagtcctgcacctggcccatagcaggtccttggaaatgcttgagaatgaagcttcacaagctacttgccatattctctcatttaatccttttggcagtgttttagtgttttgagatagggaagtgtcatgccctctctttacaggaggggacaccaaggctccttgtctctccctgtccacccaatggctttcctttcggctcacaccctcaccacagccacccacgctctgaggacatcccatccttcctccaggccacacctttgactacccccggacattcatcctggctaaggaagccaccgtctaccaggaaaacccttcgctgcactccccactagccagttgcccagtccagggagttttgccttttgtgggctctccaagctgtccacttcccccagccctcccactcctscagatgcaccccagctttgggtgaagccatcaatcctggccactgctacccaggctccctgagggttagcactctgccaggtaccccacagtgtgacatgtgacatgcccactttaaagatgaacccctgggaacccctccttgagg

SEQ ID NO: 785761 - DNA, 528 bp, Homo sapiens
ttttcatggtgagaacacttaaaatctactctcatagtaagtttcaatacctcaatacattgttattaactatagccacccatcgtgcaattgatgtcttcaacttattccttctaattgaacttttgtgttttttgaccagcacgcttcccaacccttcttcccatccccaacacctggtaaccaccattctattctctgcttccatmagttcaattttgagtccatatatgtgtgagattatgtggtaactgtctttctgtgcctggtttatttcacttaactgtaaaccaaaaataaaatttgaagccccccaccaccacccaaacatctgaatgcacgcccttctcggccagggcactccaaattttaacctgaaagactgattcaggccatgatgggaagtaggagttgggcattcttcattatacccctccagcattaacatcgacacagactttaagtctgataagaagcgtttacaatctattttctttgaagcctgctatctggaggcttcatctgcag

SEQ ID NO: 785762 - DNA, 557 bp, Homo sapiens
aaaattttttcaatctacccatgtgacaaaggtctaatatccagaatttacaatgaacttaaacaaatatacaagaaaaaaagcaaacaaccccatcaaaaagtgggcaaaggatatgaacagacacttctcaaaagaagacgtttatgtgggcaacaaacatacgaaaaaagctcaacatcacygatcattagagaaatgcaaatcaaaaccacaatgagatactatctcatgccagtcagaatggcaattattaaaaagtcaagaaacatcagatgctggtgaggctgtggagaaataggaatgcttttacactgttggtgggaatgtaaattagttcaaccattgtggaagatggtgtggcatttcctcaaggatctagaacaagaaataccacttgacccagcaatcccattactgggtatatacccaaaggaatataaatcattctgctataaagacacatgtacacgtatgtttattgcagcactacttacagtagcaaagtgatggaaccaacccaaatgcccatcaatgatagactgaataaagaaaat

SEQ ID NO: 785763 - DNA, 566 bp, Homo sapiens
cggcggccaggcgtggtggctcacacctgtaatcccagcactttgggaggccgaggcgagtggatcacgaggtcaggagatcgagaccatcctggccaacatggtgaaactccatctctactaaaaatacaataattagctgggggtggtggcaggcgcctgtaatcccagctactgaggaggctgactgaggcaggagaatcgcttgaacccgggaggcagaggttgcagtgagctgagatcgcaccactgcaccccagcctggcgacagaacgagacttcgtccccctcccccctcccccaaaaaaatgttgatcttcagtctgcgcattctgctctggattttaagcatcatttctggcagctctttttcaggaactgtctctgcaggtctttcagtgttcgcctctggagctctgctcgrgcccgcgagttctcctggcgttgccatctgtgcccttttccttattccccatcacctgtctctctggtgagctgcttccgatcagcctccaggtccacgatttctcttctgttgtccttttctgccttctcacctcatcctc

SEQ ID NO: 785764 - DNA, 591 bp, Homo sapiens
caaaagattaataataaggtgataatgatgatgataatgatgatgatgatggtaatgcatgctttttgaaaatcacagtgtactgagcattgtactcagcattttccacatttattttttgaatctcaggcatagaggcatgagtgaatcacacttctgatttcatagcatacttctattgtaagactcatacaaagactctctcatggtgtrttttattcatgtgtcccctctcctcattttatcaaccataatgtctttgatatgataccttaatattttgtatatttttgcaaattgtatagtgttgttgttatgtaggtatttttaattctataaaagtatattcatgtatactggttctgtttatttcttccttacattcggatcttactgcatttatgagtatatgtctcacgtagttaatgtcttataacagtaacgtaatattccatactgtgtgtccattatagttcccttagcttttcccctgcaatggaacatctaggttgtctaatgttccctgatactttaaaccaggggtcagcaaacattttttataaagagtgacacagtaaatatatttggctt

SEQ ID NO: 785765 - DNA, 547 bp, Homo sapiens
attttggaatccacatctccagtaattagcaccagcacacagggaccagttcctaaggctgaactgattccctgatgtcagagcactggctctgcaggtggacagcagcagagtgcttcttatacaaggactgggaaggctggggcaggaatcctgcatatgtacaggggcaaaaggagagacagagaaataataagagagttcctatgatggacataggacgacaccatctcctgtgaccttaacttgtcccagtgacattcatatgaggcagggttgttactatcctcatcatctttcccctggataactacggtgagctcctyagaggccccatttttacctacacagtggccagggctactcctacaaactgtaagtcaggtcgtggagctgctcttttcagactcctcggatgatttctcatccatctccttcagaataacatccaaagtccttatcatggctgcctaggacacctgctctcgctcagcaggtaccactccctcctctctgcctatgtttcagcccctccagtcttcttgct

SEQ ID NO: 785766 - DNA, 683 bp, Homo sapiens
actctttgtcccacaggagagcagcggatccacgccagagaagatgcttgtatcttttcacggctcttctctgagaaatgaagccacaccacgatacagtcagcaagaggaagccgggaatgggagatggcaacagtccctgtcactggaacgctggcctccctggacaagccaccctttaggaaccccaccccttatgyctgtggcggtggcacggtgctgtatcctgcctgggctctggcctctactctctcctccctctggctctgcctcccctgtttctcaggggcctggatgcctctcgctctggccaaatgccttcaaaaaagatgacttcccagtccgtcagggagacacttcctggagatccgtgtcatgatcgtttctctctccaaacgtgtttctgcttaattgggcaggtatcatgagccgggagctcttggcttccatacgtgtctcaggcagggaagcttccttcttccccacgtttcccctcatgggtgggtggattgcctagaatgagcgctaggcgaccgtgactggccttgacttccaggacaggtggtgtcccatttcctctgcacttcctgtctcattcttgagggacatcctctcctctgctcctgggtggcctgactcccttgatcttctggacgaaataaatgtcaggaaaccaaagggac

SEQ ID NO: 785767 - DNA, 610 bp, Homo sapiens
agaaatgaagccacaccacgatacagtcagcaagaggaagccgggaatgggagatggcaacagtccctgtcactggaacgctggcctccctggacaagccaccctttaggaaccccaccccttatgcctgtggcggtggcacggtgctgtatcctgcctgggctctggcctctactctctcctccctctggctctgcctcccctgtttctcaggggcctggatgcctctcgctctggccaaatgccttcaaaaaagatgacttcccagtccgtcagggagacacttyctggagatccgtgtcatgatcgtttctctctccaaacgtgtttctgcttaattgggcaggtatcatgagccgggagctcttggcttccatacgtgtctcaggcagggaagcttccttcttccccacgtttcccctcatgggtgggtggattgcctagaatgagcgctaggcgaccgtgactggccttgacttccaggacaggtggtgtcccatttcctctgcacttcctgtctcattcttgagggacatcctctcctctgctcctgggtggcctgactcccttgatcttctggacgaaataaatgtcaggaaaccaaagggac

SEQ ID NO: 785768 - DNA, 683 bp, Homo sapiens
actctttgtcccacaggagagcagcggatccacgccagagaagatgcttgtatcttttcacggctcttctctgagaaatgaagccacaccacgatacagtcagcaagaggaagccgggaatgggagatggcaacagtccctgtcactggaacgctggcctccctggacaagccaccctttaggaaccccaccccttatgcctgtggcggtggcacggtgctgtatcctgcctgggctctggcctctactctctcctccctctggctctgcctcccctgtttctcaggggcctggatgcctctcgctctggccaaatgccttcaaaaaagatgacttcccagtccgtcagggagacacttcctggagatccgtgtcatgatcgtttctctctccaaacgtgtttctgcttaattgggcaggtatcatgagccgrgagctcttggcttccatacgtgtctcaggcagggaagcttccttcttccccacgtttcccctcatgggtgggtggattgcctagaatgagcgctaggcgaccgtgactggccttgacttccaggacaggtggtgtcccatttcctctgcacttcctgtctcattcttgagggacatcctctcctctgctcctgggtggcctgactcccttgatcttctggacgaaataaatgtcaggaaaccaaagggac

SEQ ID NO: 785769 - DNA, 610 bp, Homo sapiens
agaaatgaagccacaccacgatacagtcagcaagaggaagccgggaatgggagatggcaacagtccctgtcactggaacgctggcctccctggacaagccaccctttaggaaccccaccccttatgcctgtggcggtggcacggtgctgtatcctgcctgggctctggcctctactctctcctccctctggctctgcctcccctgtttctcaggggcctggatgcctctcgctctggccaaatgccttcaaaaaagatgacttcccagtccgtcagggagacacttcctggagatccgtgtcatgatcgtttctctctccaaacgtgtttctgcttaattgggcaggtatcatgagccgggagctcttggcttccatasgtgtctcaggcagggaagcttccttcttccccacgtttcccctcatgggtgggtggattgcctagaatgagcgctaggcgaccgtgactggccttgacttccaggacaggtggtgtcccatttcctctgcacttcctgtctcattcttgagggacatcctctcctctgctcctgggtggcctgactcccttgatcttctggacgaaataaatgtcaggaaaccaaagggac

SEQ ID NO: 785770 - DNA, 716 bp, Homo sapiens
cactaaccattcccatatgtgggatcccttccctgatcacacaaagcagaagcctgagaaaaaaagcaataaagagtggcctcctggctctccttctcctcttacgtcccttgtctgggaaaggggttcccaaccccagccccaccaagagcatattaagaagctgtcttcctcccttcctttcctatctccccctcagatgctgtgatcctgactccttctgtctccacctcaaaatatttcctcttgcattttattgttattctgttatgcagggactgttaactactgttttattattattattcattatttattgwtattaagattgtcgttagagatttgttcaccaccgttcaagggacagcagcctggcccagtgggaagcctgcctctccctgtctctctctctctcacacacacacacacatacacacacacacaccctaacacagtgcacactcacgcatatatgctcacaaatgcctgctgtgttcgggcccctgcacagcaatccgaagaggcaggcatcctaccccagcatgcaaacaacacactgcccacgcacaccaccattcaggcagaacaccacccccagaccaacgccaaaacccacacgcaccgagcttgcaaggaaaggaaaatacataaagaatcccttctctccaaaacctggaggggcgagtcaggcctctgtctcttccccccagtcgctt

SEQ ID NO: 785771 - DNA, 608 bp, Homo sapiens
aaaatccactaaccattcccatatgtgggatcccttccctgatcacacaaagcagaagcctgagaaaaaaagcaataaagagtggcctcctggctctccttctcctcttacgtcccttgtctgggaaaggggttcccaaccccagccccaccaagagcatattaagaagctgtcttcctcccttcctttcctatctccccctcagatgctgtgatcctgactccttctgtctccacctcaaaatatttcctcttgcattttattgttattctgttatgcagggactgttaactactgttttattattattattcattatttattgttattaagattgtcgttagagatttgttcaccaccgttcaagggacagcagcctggcccagkgggaagcctgcctctccctgtctctctctctctcacacacacacacacatacacacacacacaccctaacacagtgcacactcacgcatatatgctcacaaatgcctgctgtgttcgggcccctgcacagcaatccgaagaggcaggcatcctaccccagcatgcaaacaacacactgcccacgcacaccaccattcaggcagaacaccacccccagacca

SEQ ID NO: 785772 - DNA, 607 bp, Homo sapiens
aaaaaaaaaaaaaaattgacagcaactcaggaggctgaggaagaaggattgcttgagtacgggaggtcaaggctgcagtgagctatgactgagccacttcactctaacctggatgataaagcaagactctgtctcaaaaaagaaaataaaaaaagtgttgcctgtaatcccagcactttgggaggctgaggcaggtggatcacttgagctcaggagttcgagaccggcctggccaacatggcgaagccctgtctccaccaaaaatacaaaaaattagccagatgtggtgggatcagtctgtagtcccagccactcaggaggctaaggcaggagaatcacttgaacccaggaagcgcaggttgcagtgagccaagatctcaccactgcactctagcctgggcracagagtgagactccatctctaaaaaaaaaaaaaaaaaaaaaaaaaaaaggagtgttacattagttgtctatatgtagatacacttgtcaaaatttaagccataaaaccctcagtgtccctcactgttcccacccccttagcctggcatactgggtctttcacaagcttgtgtcaacctcctctacagactcatctttacactga

SEQ ID NO: 785773 - DNA, 624 bp, Homo sapiens
catagaagtcaagaactgaagtttggaaacctccacctagatttcagaggatgtttgaaaacacctggatgtccaagcagaagtttgctgcaggggtggtgctctgatggagaacctctgctagggctgtgcagaagagaaatgtggggtcagagmccctatacagagtccttactggggcacttcctagtggagctgtgaggagagggccactctcctccagaccccagaattgtagattcactgacagcttgcaccatgagcctggaaaagctgtggacactcaacgtcagcccatgaaaacagccacgaggtgggctataccctgcaaagccacagaggcagaactgcccaaggctgtgggagcccacctcttggatcagcatgaccttgatgtgaaacatggagtcaaaggagatcatttcggaactttaaaatttgactaccttgcaggattttggacttgcatggggcctgtaacccctttgttttggcaaatttctcccatttggaacggctgtatttactcaatgacctgtacccccattgtatctaggaagtaactagcttgatttggattttacagggtcataggcagaagagacttgccttgtctcagatgag

SEQ ID NO: 785774 - DNA, 624 bp, Homo sapiens
catagaagtcaagaactgaagtttggaaacctccacctagatttcagaggatgtttgaaaacacctggatgtccaagcagaagtttgctgcaggggtggtgctctgatggagaacctctgctagggctgtgcagaagagaaatgtggggtcagagaccctatacagagtccttactggggcacttcctagtggagctgtgaggagagggccactctcctccagaccccagaattgtagattcactgacagcttgcaccatgagcctggaaaagctgtggacactcaacgtcagcccatgaaaacagccacgaggtgggctataccctgcaaagccacagaggcagaactgcccaaggctgtgggagcccacctcttggatcagcatgaccttgatgtgaaacatggagtcaaaggagatcatttcggaactttaaaatttgactaccttgcwggattttggacttgcatggggcctgtaacccctttgttttggcaaatttctcccatttggaacggctgtatttactcaatgacctgtacccccattgtatctaggaagtaactagcttgatttggattttacagggtcataggcagaagagacttgccttgtctcagatgag

SEQ ID NO: 785775 - DNA, 682 bp, Homo sapiens
tcccatttttcagaagaagttggaaatctagatttttgtgtatggaatcccccaattttctccccatgtcccacacagcacaaacccagcccatccagggctgaatccagtcacggaccactgttgggtgacctctggtcagtgcatgttagaatgagacagatttatttgtgcctacaaattctgcatcctgcaagggcccagaccagccactgggccacagtgaccctcgcttgatgccactatgccttccggacccccagaaaaggagcctcccaaccaagagatctctctcagtgctccctgtggtggtcacacaagcccaaaggaagagatgcagtagcctggtgatatggctggggcttgagagaccacctccatgagccacctcgaagtacagataaactgaggcctgggaagcaggaagaatgcttctgatactcacaaggcaaatcaattagtttcaaggggcccacaagccatactcctaactctcagctcaccaccytcatgttcaccgaatggggctcgaaaattcttgctgtaattgcagaaatttgaatttgaactgggaactacatgacattaagaattatctttttatattctcaggcaagaaaatagaattgtagttgtcagttttatatgcattctgaaatattcaagggtggaatatcatgac

SEQ ID NO: 785776 - DNA, 627 bp, Homo sapiens
ttttaattcaaatttgtttttgaaactttttatttttagataatttttgacttagggaagtgttgaaaaatagtaccagaaattcctgagtaccctactttctcctcagcttccccttgtgttaacatcttctataaccgtagaacatttatccttggtacaattgtcttagatacagtactattaactaaaatacagaacttattccagtttcaccagtctttcttttaattccctttttgtctttcagaattcaatccagactccacattatattgaattgttatgtctccttggtcttttccaatctgtgacagttccacagtctttccctaaattccacaactgatacttttgtacttctccagtygcttctcagaaagtccctcaatttgggtttttctgatatcttctcatgattagattgcagtgaatacattgtttggaaaggcatttcggagatgatatgcctctttcagtgcatgatatcaggggtacatgttgtcagtgtgtattgctggtgatgttaaccttgatcatttggctatggttctgtttagaaggactttgcaccataaaattactatttttctttttataattactaaatactttggaggaaatact

SEQ ID NO: 785777 - DNA, 624 bp, Homo sapiens
tatctgcctatatttttaaaaacatgaatacattgttaaaacctccaactctaatccagcaccacagaattcattctagcctctccctttccttattagtaactcccttctccaacagtgataaaactggtaatatgatctgtaatatatttacttatttgttcaactttaatatacaagtaaggtagtttcagagttcttaaccaacacctataataagaaacaaatttaccaactatagtacagcatttgtatacagttctttttgtctttagcttcacagtattcatttaaagcactgctttccacagcaatttaggtcaactccttccccatccacttcagtgtggttattataattaatttgtaataaagttagtcatttgtcataatctccttttcatcttttcctccacatcttggttgatttaaaaaaaatttaaatatagcacaatttatttctttgttytatacagtcctatggtttggacaaatgcatagaacctggtatctactaccacagttccaggtggaagagttccattgcccctcaaaacttcctcatgctcctcctttacaggcaattcctcttgtcagcccaagtcataggaaccactaatctat

SEQ ID NO: 785778 - DNA, 471 bp, Homo sapiens
agcaaaaatcagatcatgccacttctctgttttaagatccactaatggcctctcattgcactaaaataaaattgaatctccttcccgtagcttacccatctgagctcagtttccatagctaggaaatggggataattgtggctttaactagaatatrgtaagttccatgagggcatgggtttttatctgctttgttcactactgttttcctagtgcctagaacagtgtgtacacgtaataggcacttaataattatttactggatgaataaacacattcagattatgtggataccccaaagcctttcttctttcctctttcagagcagtatattatgtagctcagtattttctgcattacataggaaggccagctaaggcttctgatgcaatatctcctttctttttcccttctcactttttacgcatgttctcctgtccctccctgtcttatgtttgggtcattaggagg

SEQ ID NO: 785779 - DNA, 471 bp, Homo sapiens
agcaaaaatcagatcatgccacttctctgttttaagatccactaatggcctctcattgcactaaaataaaattgaatctccttcccgtagcttacccatctgagctcagtttccatagctaggaaatggggataattgtggctttaactagaatatagtaagttccatgagggcatggrtttttatctgctttgttcactactgttttcctagtgcctagaacagtgtgtacacgtaataggcacttaataattatttactggatgaataaacacattcagattatgtggataccccaaagcctttcttctttcctctttcagagcagtatattatgtagctcagtattttctgcattacataggaaggccagctaaggcttctgatgcaatatctcctttctttttcccttctcactttttacgcatgttctcctgtccctccctgtcttatgtttgggtcattaggagg

SEQ ID NO: 785780 - DNA, 471 bp, Homo sapiens
agcaaaaatcagatcatgccacttctctgttttaagatccactaatggcctctcattgcactaaaataaaattgaatctccttcccgtagcttacccatctgagctcagtttccatagctaggaaatggggataattgtggctttaactagaatatagtaagttccatgagggcatgggtttttatctgctttgttcactactgttttcctagtgcctagaacagtgtgtacacgtaataggcacttaataattatttactggatgaataaacacattcagattatgtggataycccaaagcctttcttctttcctctttcagagcagtatattatgtagctcagtattttctgcattacataggaaggccagctaaggcttctgatgcaatatctcctttctttttcccttctcactttttacgcatgttctcctgtccctccctgtcttatgtttgggtcattaggagg

SEQ ID NO: 785781 - DNA, 564 bp, Homo sapiens
tgctcaaaatggaatactatttagccacaaaaaagaatgaaatgctgccatttgaggaaacttggatggaatggaggatattctgttaagtgaaattggccaggaacagaaagttaaccatcacatgttctcactcacatgtggaagctaaaaaaagttaatctcataaaagtaaaaagtagaacagagaatactagaggctgagaagggtagggggaagggaggaatagggagaaatttgttaaagtatacaaaacgatagctagataggaagaataaattttagtgttctatactactactacaggatagctatagttaacaataayatattacatagtttcaaatagccaggaaaataccaaatgttcccaacacaaagaaaggataatgtttaagattatagatttgctaattttcctgatcactacaaattttatgtatcgaaacatcactatgagtcactatgaatcttacccatatgtacaactgtcaatttttttaaattaaatttaataatagaagaaatggaaaccacaaaaagatacggaagaatcctaaatg

SEQ ID NO: 785782 - DNA, 485 bp, Homo sapiens
actaaaaaaagaaatctaagtcaatctgtattctatcccatttgtcttcataaaatacactggaaatgaagatcaaagtgaaaatgctaaacctatgtaaacaaagaactagaatactagatgaataagcccaaggttgcagctgtatccacaagtcaatctggggactayactagtgatgcattgctatacttgcactagtgacggcactgttttatgtctatcttcaccaagttgaaagtactttttacttcttttacagttttcataacatgtattttgctcccaggtatggttcagagcttcacattcatcattagaaccatattttctctttaggcagtcacaaaataagcctacctctgaacagtaagaaaaataaataataagattttacccagatgacttttaaaatagtaaatatccacaacagtagcacatcatcccaataaaacatgttttattttcgcagtgaccttatacaa

SEQ ID NO: 785783 - DNA, 574 bp, Homo sapiens
aggcattggactagactcttaatatttaaagatcaaagtatactggtggagagaagacataagaaacagctacattttctttgcttacaaattcatgcttaaaaaaataacataagacttggtaacctacaaccaactgctgaacttaattaaaaatcacaatgggctgggcgcagtggctcacacctgtaatcccagcactttgggaggctgaggcgggtggatcacctgaggtcgggagttcgagaccagcctgaccaacatggagamatcccatctctactaaaaatacaaaattagccgggcgtggtggcccatgcctgtaatcccagctactagggaggctgaggcaggagaatcgcttgaacctgggaggtggaggttgcggtgagctgagatcacaccattgcactccagcctgggcaacaagagcgaaactctgtctcaaaaaaaaaaatcataaataaataaaaatcacaatgacctgtggtcctgcaccagtcaataaggcatggtgatggccatgcttgtgtcttagataatatgcctgcccctaagcttagaattcagctac

SEQ ID NO: 785784 - DNA, 574 bp, Homo sapiens
aggcattggactagactcttaatatttaaagatcaaagtatactggtggagagaagacataagaaacagctacattttctttgcttacaaattcatgcttaaaaaaataacataagacttggtaacctacaaccaactgctgaacttaattaaaaatcacaatgggctgggcgcagtggctcacacctgtaatcccagcactttgggaggctgaggcgggtggatcacctgaggtcgggagttcgagaccagcctgaccaacatggagacatcccatctctactaaaaatacaaaattagccgggcgtggtggcccatgcctgtaatcccagctactagggaggctgaggcaggagaatsgcttgaacctgggaggtggaggttgcggtgagctgagatcacaccattgcactccagcctgggcaacaagagcgaaactctgtctcaaaaaaaaaaatcataaataaataaaaatcacaatgacctgtggtcctgcaccagtcaataaggcatggtgatggccatgcttgtgtcttagataatatgcctgcccctaagcttagaattcagctac

SEQ ID NO: 785785 - DNA, 634 bp, Homo sapiens
ttaaaagcattgttgtttaaatactgttacatattcagaagtagctttaaacaagcattttttatgttcatattttccctgtaacaaaagaaattttaaaaaataaacctggccgggcgcagtggctcatccctgtaacctcagcactttgggaggccgaggtgggtggatcacctgaggtcaggagatggagaccagcctgaccagtatggtgaaaccctgtctctacaaaaatacaaaaattagccaggtgtggtggcytgtgcctgtagccccagctactcaggacgctgaaacgggagaattgcttgaaccccacaggtggaggctgcagtgagccgagatcacgtcacttcactccagcttgggcgacagagcgagactccgtctcaaacaaaataaataaataaaaaataaaataaaataaacctgccccacaatccaacatttaaccacacattgaatatttaggatctgtgagtcaattcttacataaaattcttagtatttaaccattacaagtaagtattagagttagaaaagcataattaaaagtgatggaggaaagtaactgaaaattaactgttttattagactattaactttttgtaaaaagttaatgtaagaatgttct

SEQ ID NO: 785786 - DNA, 634 bp, Homo sapiens
ttaaaagcattgttgtttaaatactgttacatattcagaagtagctttaaacaagcattttttatgttcatattttccctgtaacaaaagaaattttaaaaaataaacctggccgggcgcagtggctcatccctgtaacctcagcactttgggaggccgaggtgggtggatcacctgaggtcaggagatggagaccagcctgaccagtatggtgaaaccctgtctctacaaaaatacaaaaattagccaggtgtggtggcctgygcctgtagccccagctactcaggacgctgaaacgggagaattgcttgaaccccacaggtggaggctgcagtgagccgagatcacgtcacttcactccagcttgggcgacagagcgagactccgtctcaaacaaaataaataaataaaaaataaaataaaataaacctgccccacaatccaacatttaaccacacattgaatatttaggatctgtgagtcaattcttacataaaattcttagtatttaaccattacaagtaagtattagagttagaaaagcataattaaaagtgatggaggaaagtaactgaaaattaactgttttattagactattaactttttgtaaaaagttaatgtaagaatgttct

SEQ ID NO: 785787 - DNA, 634 bp, Homo sapiens
ttaaaagcattgttgtttaaatactgttacatattcagaagtagctttaaacaagcattttttatgttcatattttccctgtaacaaaagaaattttaaaaaataaacctggccgggcgcagtggctcatccctgtaacctcagcactttgggaggccgaggtgggtggatcacctgaggtcaggagatggagaccagcctgaccagtatggtgaaaccctgtctctacaaaaatacaaaaattagccaggtgtggtggcctgtgcctgtagccccagctactcaggacgctgaaacgggagaattgcttgaaccccasaggtggaggctgcagtgagccgagatcacgtcacttcactccagcttgggcgacagagcgagactccgtctcaaacaaaataaataaataaaaaataaaataaaataaacctgccccacaatccaacatttaaccacacattgaatatttaggatctgtgagtcaattcttacataaaattcttagtatttaaccattacaagtaagtattagagttagaaaagcataattaaaagtgatggaggaaagtaactgaaaattaactgttttattagactattaactttttgtaaaaagttaatgtaagaatgttct

SEQ ID NO: 785788 - DNA, 639 bp, Homo sapiens
gagtttttatcttagattccaagtttctaggccttttgtgcatcacagatcttgggaatctgataatagatattgacatgattctccctagaaaaataatatttatagcacatttgtggttaaacatttttgttttacagtatggactatgctgtgaaactattatgtggcacaaagatcaatgtgtaaattcattgatcaaacaaaagaataaataggaagttaggaacttaagatctgaagtcaytgaacctgaatctgattcctaagctctgttacttactagtgacacaatcagtattatggagttgtttaagggttaaatgagataattatgtagtaaagaacttaacctcacccaaaaaagaggtctggtctctgtcctgcttctgggaggtaattgctaagcctttggaatgtcatgcttgacaggactgtctttgtctgggggactctggtcactggataatataacaataatgattcagggtggggactggctgcactagatagtcttaatgtgagggctggtcatgccagaaatacaaaaaatgtgattttgggtgggggctttgggtcatgtaacatcagatgacctttagtggggctgcatactgagatcagcaaggtggtcaatca

SEQ ID NO: 785789 - DNA, 681 bp, Homo sapiens
aaatatacagattcttaaaaaatctctactagagagaaataataattaactatcttgtactctactaccaaaatgaaagcaatcagcaaacttcttggtagtcatttaaatctaaaatataagaaaatatttttttcataggtaagaattaaaaaaaaaaaaaaaaagcctaaaacaccacctacccamccgttcacccctaataataaccaagaaagaataaaatgaggttaccctggaatcttgttcagaagaccttaaagaatcagtccaagatagttaatgtgtgtccagaacaacatgaatttcaccagcaaacatctgtataagactctacagtttactaagcactctggatattatctcatttaactctcacaacctcataaggctgtactgttaccccatcatcctcattttataattaagataaatgaggctgagagacagtgacttgttcaggatcgcagagaaagaaaatagtgtgatcctctgcttctttcctgttaattcccaaaggaggccaggagtggtgacagtgatagtggaggaggctgagtggaagggaacggcctctagtgataagcactgtgatacccttcaggtgtttagatgctgggtgggtttggaaagtgcagccctaactgaagacaggatcccttcccaaagtttcttcccatt

SEQ ID NO: 785790 - DNA, 634 bp, Homo sapiens
acaaaatataaccaataaaatcaatggcgaagtaaatatctataataaccaattagacagtgtaagagggaaaaaggaagccattcccaatagcgagaaataccataaatatgaagacgtggcaaaaactttcctaaagacctgaataagaaaaaacctttactattgtcaaaatgccaaatatcctacattaatctatgtgccttttttcttcttgataaaaatgattttaaagttctgaagaaaaaaattttacaaacaggaaatacctgaaaaataaaaagagtgaagattataatacgcaacaaaagttttggtaatcaaaaccaggatagtgttgaagtaggaayagaaaaaagaaagtcactggaacagaacacaaaatctatgtttacatggaaatttagtttatgacaaccaaggcacttcaaatctgtggataagagactgaatctatagtaatggctttgggaaactagccatttgaaaaaatacatagagagagttctctttcatcccttagaacaaacttgctcctgattgagcaaatatttaaattttggaaggaaaaaaaggaaaaactggaagaaattacagttcaaaattgttataattatctaggagaaaaggccta

SEQ ID NO: 785791 - DNA, 634 bp, Homo sapiens
gaggagtgaaggcaggagaaggagagactaagagcacttatgttttgcagccctcacaaagaaatgtcctacacttgaaaaaatatcttagcattgaatgtgctgctgggacaataccagtcaagcagagtggggattggcctgtgcctcttgagagagtaggcattcatatatattaacatggaaaccaatttcaagttagccatttcttgagaattcttgttttgttttcttttctttctcatgaaacaacctctgtttagtgaacatgcaccagtgtattatcccttagcttacaacttcaaaaggataaagtattaagtttgactggcccttgttccaaagttttaagaccaactgtgctcttggcctaactattagaataaarcaatgctgtctggtcgtatctgcagtgatggtttaagtctaacacacagttagagtatggcaccataggtttactattcaacctggctattcagccccctcatatattcatcatgagtttaggacccacatcctcctgtcttagagtggtgcctatgtccaagaaaaaactccagcatccagctaagatttcaaaataatgcaatccctgacaagtattttcaaaaacactgtgagagagacatat

SEQ ID NO: 785792 - DNA, 610 bp, Homo sapiens
agatttcaaaataatgcaatccctgacaagtattttcaaaaacactgtgagagagacatatagccaatattataattgtttctgaaagtcattttattctccttgtacttttttcaygcctcctgactcttccaagccaacttcttctccaaaaactctttaaggggcccctctcccagacttagttcaatccctttcactttcttcccaattagtcaccaacaaaatccagaaaaaaaaaaagcccacaaaggcataattttcttcaaatggtggaggaggagaagaaactgagtgagcaaagccaaaatactcttgaggagtagaggggtgggaaaggctggttaatatatgaaataacattcatatattaaatattataaatttactccatcacaaatccctgtaggatttgttagacaagagagcacgtcatctgttacatcattgtgtcctctttctgtgagcagaggaaaatatataggcttcaggatcacgaagagctatgctcctgatgaacagcagattcatttttacgaatactggcagtcctccatgggttgtgcttctgtgtctgcacaggtcattaagaagtctaaagccaaattta

SEQ ID NO: 785793 - DNA, 610 bp, Homo sapiens
agatttcaaaataatgcaatccctgacaagtattttcaaaaacactgtgagagagacatatagccaatattataattgtttctgaaagtcattttattctccttgtacttttttcacgcctcctgactcttccaagccaacttcttctccaaaaactctttaaggggcccctctcccagacttagttcaatccctttcactttcttcccaattagtcaycaacaaaatccagaaaaaaaaaaagcccacaaaggcataattttcttcaaatggtggaggaggagaagaaactgagtgagcaaagccaaaatactcttgaggagtagaggggtgggaaaggctggttaatatatgaaataacattcatatattaaatattataaatttactccatcacaaatccctgtaggatttgttagacaagagagcacgtcatctgttacatcattgtgtcctctttctgtgagcagaggaaaatatataggcttcaggatcacgaagagctatgctcctgatgaacagcagattcatttttacgaatactggcagtcctccatgggttgtgcttctgtgtctgcacaggtcattaagaagtctaaagccaaattta

SEQ ID NO: 785794 - DNA, 550 bp, Homo sapiens
taaaaggagtacaaatacatacaggagtaattgattcagattacaatggtgaaattcaaattgttgtatctacatctgttccctggaaagcagagcaggagagtgtacagcacagctcctgattgtgccatatgtggaaatggggaaaagtgaaattaaacaracaagaggattttgaagcccaaataaacaaggcaaagtggcttattgggtgaatcaaattactgataaacgtcctacctgtgaaataactattcagggaaagaaatttaaaggtttggtagatacaggagtggacatttcaatcatttccctacagcactgactgtccatgtggccaattcaactcactcaatttaacatagttggagttggtaatgcccctgaagtatatcaaagtagttatattttgcattgtgaagggcccgatggacaacctggaactattcaaccaattataacttctgtacctataaatgtatggggaagagatttattacaacaatggggagcacaagttctaattccagaacaattatataccccacaa

SEQ ID NO: 785795 - DNA, 370 bp, Homo sapiens
cctgccatgcctgagcccccctgtggtgggctcccaagtgtcccaagcctccctgatgggcaccgccccctgctccacagtgcccggtcccatcgactgcccaagggctgaggagtgcaggcgtgcagcacgggattggcaggcagctccatccgcagccctggggygggatccactaggagaagccagctgggttcctgagttgggtggggacttggagaacttttatgtctagctggaggattgtaaatgcaccaatcagcactccgtgtctagcttggggtttgtaaacgtaccaatcagtgctgtgtcttgctaatctggtggggacttggagaacttttatgtctagctagaggattgtaaatgc

SEQ ID NO: 785796 - DNA, 370 bp, Homo sapiens
cctgccatgcctgagcccccctgtggtgggctcccaagtgtcccaagcctccctgatgggcaccgccccctgctccacagtgcccggtcccatcgactgcccaagggctgaggagtgcaggcgtgcagcacgggattggcaggcagctccatccgcagccctggggtgggatccactaggagaagccagctgggttcctgagttgggtggggacttgsagaacttttatgtctagctggaggattgtaaatgcaccaatcagcactccgtgtctagcttggggtttgtaaacgtaccaatcagtgctgtgtcttgctaatctggtggggacttggagaacttttatgtctagctagaggattgtaaatgc

SEQ ID NO: 785797 - DNA, 581 bp, Homo sapiens
ggcaataaataatagagaagacccagaagaagttattgggaagaaagttgcctccagaggtagagctggagaccattattcttcatgactattgatatggtttggctctgtgcgccaacccaaatctcaccttgaattgtaataatccccatgtgtcataggagggactcaatgggaggtaattaaatcatagggttgagtatttcccatgctgttcttgtgatagtgaataagtttcatgaggtctgatagttttataaaggcgagttccactgcacatgtccacttgagtkccgctatgtaagatgtaactttgctcctcattcactttccaccatgattgtgaggcctccctagccatatggaactgtgagtccattaaacctctttcctctataaattacctagtctctggtatgtctttattagcaacatgataacagattaatacaattataaatgcaaaattgcttctaaaatatgagcaaacaaaatttagcaatatataaaaagctgatcataatacataatacatagaaaaaataatcaccataaccaagtggagtttcttccagtgatgc

SEQ ID NO: 785798 - DNA, 541 bp, Homo sapiens
cacaacatttcaaactttttcatttttattatctctgttatggtgatctatgatcagttatctttgatttactattgtagatgtgttggggctcattaactgcacctgaacttaatcgataaatgtgtgtgatctgacttccccactgactaaccattctatctctctctctctcctccagcctccctagtccctgagacacaagaatattgcagttaggccaattaataacccaacaacggcctctgagttttcacgtgaaaaggagagttgcaccctgattagtcagcagccatcaacatggaggcaaaaccctccaccagcaagaagattatgactcacygaaggctcaggtgattgttagtgttttttagcaataaaatattttaaattaaggtatgtccattggtttaagatataatactattgcacacttaatggactacagtatagtgtcaacataacttttacatgcactaagaaagcagaaatttcatgtgactcattttattgcaatatttgctttattgtggtggtctag

SEQ ID NO: 785799 - DNA, 624 bp, Homo sapiens
tggctattttgccaaatccgatgctaactgctaaagaggtgattctcatgctgtccatgagcgttgcagtttaccttgtggagcttaagcattagggtccccaaactggaagaggagagagaccctggttctgcccttcaagtgcctttttaattcacagtttcgatagaaggaagaggagcttgaggaatttaagagaaacatgatgaatccatccttcgggtagggaaagggagccctcacctgtgaagggggtgctgtctggtgttcaagccttgatggacaccatccacaaccccctgtcatgyatggtgagtaactgagcgtgacctccactacacactttgcatttatatagagagcttccaagctatggttccaaactcccaatctttcctcacatagcaagaatatcagagttaatttacacttggcaaccacccctgtcaatttaaaagtagtttctcccaactctatccagaaactgtacaggatgaatcaagacttgtggagacattttttaaaaataaaacattaattaaatttttcttccaatggcatatttttaaattttgtttttagatttatatatattaaaattcaattttttggtgtacaattcta

SEQ ID NO: 785800 - DNA, 640 bp, Homo sapiens
tgggattacaggagtgagccatggtgcctggacatttgttcctttttagtgttgagcagtattccattttatgggtgtaccacagtttgtttatccattcactggttgaaggacattgaactgttttccagatgttagtgcttatgaataaatcagctacaaacattcatgtacagattttcatgtgaagataagtttttctttcactttttctaggattgggattgctgggtcatakgctaagtgtatgtttaactgttaaagacactgccaagctgttttccagagtggctgtgcaattttacattcccatcagcaatgtgtaaatggtctggtttctccacatcctctccagcatttggttgtcactatgttttacttttagacataatgatccatgtgtagtggtatctcattgtggttttaatttgcatttctctaattattaatgatttttgtgcatcttttcatatgattatttgctgtctgtgtattcaaagtgtttaagtagtctttatttcaaacatgatatatgcttattaaaaattgaaatactacagaaatatgttatatagaacacaaaagtttcctatattagtttctagatatagccactgttaacaactacttcatgtatatt

SEQ ID NO: 785801 - DNA, 655 bp, Homo sapiens
cctttctctcctttagggatcccaataacgtgtattaggcttcttagagttgatgctgatgctctatttctcttaattcttttttttttttctgtgtaacatttggatagtttcctttgctttcttcaacttctttaatcttttctgccatgtctattctgttaatttttattacagtaaatttttcatttcacacattttttttaattaagtgagcaaatttacttaagcaattagagatctgtgggtacatattgttgttgtcatctctagtggtttgatttgtgtctttttaaaatatctttcacgtccacctaactttttggacacaatactgtattcatgtccttgtctgcyaattctaacatttgtgtcatttcagtttagttcagttgactggtttttcttctcattataaatccttctcctgcttctttgcgtgtctggtaatttttaattggatgtctgacattgtgaattttgctttgttgagtgctatatctctattcatgttcttgagatttgtttggggatgcaattaagttacttggaaatagtttgatcctttcagttcttgctttttcagatgttttaggcaggaacagttatattaaaaccagagctaattattctccaccactgagacctttctgat

SEQ ID NO: 785802 - DNA, 655 bp, Homo sapiens
cctttctctcctttagggatcccaataacgtgtattaggcttcttagagttgatgctgatgctctatttctcttaattcttttttttttttctgtgtaacatttggatagtttcctttgctttcttcaacttctttaatcttttctgccatgtctattctgttaatttttattacagtaaatttttcatttcacacattttttttaattaagtgagcaaatttacttaagcaattagagatctgtgggtacatattgttgttgtcatctctagtggtttgatttgtgtctttttaaaatatctttcacgtccacctaactttttggacacaatactgtattcatgtccttgtctgccaattctaacatttgtgtcakttcagtttagttcagttgactggtttttcttctcattataaatccttctcctgcttctttgcgtgtctggtaatttttaattggatgtctgacattgtgaattttgctttgttgagtgctatatctctattcatgttcttgagatttgtttggggatgcaattaagttacttggaaatagtttgatcctttcagttcttgctttttcagatgttttaggcaggaacagttatattaaaaccagagctaattattctccaccactgagacctttctgat

SEQ ID NO: 785803 - DNA, 680 bp, Homo sapiens
gaggtttctggcctgatcagcttatgagcctttaacaacaaggcttaggattggtatttatctcagcttcaggagccagccatggattcttagtactgtctgaaagtgtgcacttactccaacaactcaagttcctctctgacagctgatccagtagagtctaacttgtcagaggagattaatctccttgtgaggcaattacagctccgaggttaaggctctggagtccgaccacctgctttgaatctcaaccacttactagcagtgggaccccagcaagtcacctgcgccatctttaaactggaggtgaggctgggcatggtggttcgtgcctgtcatcccagtactttgggaggccaaggcaggtggatcatctgtggttaggagtttgagaccaacctgaccaacatgatgaaacccygtctctactaaaatgacaaaaaattagctggcgtggtggcgcatacctgtaatcccagctactcaggaggctgagacaggagaattgcttgaacccgggaggcattgcagtgagctgagatcacgccattgcattcgagcctgggcaacaggagcaaaactccatctcaaaaaaaaaaaaaaacaccagagacgacagcgtgcctgcctggtcaggttatgtgagactggagggatccacgcccggtgcgcacccagga

SEQ ID NO: 785804 - DNA, 629 bp, Homo sapiens
tctgccgcgatactttttctcactaagagcagtcatctggcttctctgtaaagctgtctttatcttcatgttcagtgtgcttccaagttcataaacaccctcctttccacacctgagcatcaatattgatagacaacgggtggccaaagcctcggctctgagatgctcttgctgccgaggcccttcgttcctgacactgtgtaaatctgtctccctttaccctttcaaaaaggctgagagctctgacttttgtcactgccaaattcctgtgcgagaggacgaccttggtcagagctactttctactttcttttcccaatttccttaacccttcaagccagcctcggctcatcacctcttttgaaggccacccccacmcaccttcccagcctgcctgcctctgttggacgtgctagccacctgtccttttgcatcattgagcggattttattgtgcactcatcatgaacaaggtgaaaataggcacaaaataagcaagacctcccggtgcccagggagcaggccacacagtggaagagagtgaccatgtcacaccaccaccttacagccaaacgtgaagggccaggtggcgtgtgcagcaggctctcagaaacacatgggcagttacctt

SEQ ID NO: 785805 - DNA, 564 bp, Homo sapiens
ctcagcctcccaaagtgctgggattacaggggtgagccaccgcgcctagcccgtaagtttttatttccatatctttaactgctatttaggaacatatttgaatagattgtaaaaatagcaagttattcaaagtaagaattttcaatgttgtggttcttttcttgactgtcacatcatggcatctatttggaggtgaaatcgattctttgaaagcagctcttgctgtggaggaagcgcgaggtagatttgtgggaagaaggctctgctctcccttacctctcttcactgccgagcactcattgtgtgccagggccagcaggaagayattaaaccaaggacttcccggccacccagtcatacttgagataaatattccaaagaaaatgtacagcatcatagaagagcttaaaattaggggcccaattaggactgtaattattttgcagctgagacgtaaaggtttaatgagacatttttcacagtttccaggtaattaattggtgttgcagttaataaggtgactgatgcgtgcttttcccaggatccatttactctcagcaagtg

SEQ ID NO: 785806 - DNA, 574 bp, Homo sapiens
agaggcgagggctcagcaggaatgcgtgctcccaggctcaccgtgcggttttctttataggacaatacatggcttgatatacaacgccctgaagctcttcatggagatgaaccaaaagctatttgatgactgtacacaacagttcaaagcagagaaactaaagtgagttgttcctttcacaagttactgtttccaggatttttttcttaatcctaagtaaacctcttccactgttttgtcctaaaacggtattcttcactcgaaagcaaaaccaagcctttcatacttggaaagcaaattaaaactgtgttataataacgtattttgaaagaacaggtgtttaaaggtagctattctccccccttgtrttgccagattaatcatctttgcaaaaagtgcttatgtaagcaagaatttaacattcagaattttttcttttcttgggctataatgggcttaaaggctataatgtgtagtccattttcatgtttataaggcagggatttgaattatatcctataaggtttatcccagagagcaagaatcttcatttcaatgtagctttattctgatt

SEQ ID NO: 785807 - DNA, 643 bp, Homo sapiens
aatgcacctcagtgaaggtttttgttttggtttggtttggtttggtttgatttggtttggtttgtttgagatggagtcttgctctgttacccaggctggagtgcagtggcgtgatctcggctcaccacaacctccgcctcccaggttcaagcagtcctccggagtgcctcagcctcccaagtatgctgggactacaggtgcacgccaccatgcctggctaatttttgtatttttagtagagacggggtttcactatgttggccaggctggtctcgaactcctgaccttgtgatctacctgcctcggcctcccagagtgctgggattacaggtgtgagccrccgcacctggccttcagtgaaggtttttattcctagtcagaaccctctcctgccagtgcccgctgtgtgaggtttattttgctgtgaacatctggtagcattcttgtgtagggacactctcctttgccccgagggccagagagccgtgctccaagcggaggctgttggtgggtcccatgaagagcactgcttgttgcctggagtagtcaaaagcagaagaagcgttggtgtgaaacagtccccgcaagtctcaggagtcttgcagccacttaggtttctgtatctcccacctgactgtgagcc

SEQ ID NO: 785808 - DNA, 614 bp, Homo sapiens
tccttgcaaaacgcaggatgctggggagggtcttcaccttgcatggtgtcctgtcccacactgctcctcaggttgggagtggtggggagttactgtttaatgtgtacagaatttctctttgggatgacaaaaatgtctggaaatggatggtggtgatggtcgtagagctttacagatttacttaatgccactgaattatacacttcaaatgattaaaatggtaaattttatttatcttttgccacaattttttttaaaacctcagtaaataaaatgcaacttaaggcttctgctttttgcttttcagtaaaggaaactatttttttttttaagtctgtcccttttaagccttttacattcctcaagtaaggcttacccccagaatgggggtcagggatcggtgccgatggggctagagcaccaccatcattgctactgctaatgacaatggtgatagcaacaacagccgtgattgaytgctcactgtgctagcagctgtaccacatggtcccatctgttcttcacacagccccaggggcaggtacgctcatgggaacatagcacagggtagttaacggactcatccaaggtcatgcagctgggagtggcagcac

SEQ ID NO: 785809 - DNA, 633 bp, Homo sapiens
gctacaaagataaatgacaagtgttgtcttcagggagtttccaggcttgtatcagggatggttaacagaagcaggtggtttcagcataatgttaagtaagtgctatgatagcataatctctcagagaaaacaccaagcctgtcctagaatttgaagaaattttgaaagagaggatacctgggctgatctgaaaggatgaagaggagttagsttaaacaaagaaatgcagtaaaaaggatggagagaggaaaagaagcatgaatcaatatgttgtttctacagcagaaattgtgtggcaaggaacagtaaagggtgaacctggcaaggcagacaggatccatggcacctggtgtctcatgcatgtgcaaaggagctgacctttattttatagcagtaaggaaccacttctatttgtttttgagattttttttccccaggactttgtgaaaaatatcttggcctggaaaattatagaagagatataaaggataaaagacagtcattacttcaaaatgcaacctttatatcatagaaatatagttcataaaactagagcagatatttgagatcacttaattctactgcttcaatttacaactaagaaaattggtccaaaggcaatcagtgccttat

SEQ ID NO: 785810 - DNA, 644 bp, Homo sapiens
tgtttgctgttgcctttatagattacaaaccttgagcccaacccttgcaagactcttctcaaagcatgaggatcaaatcagagaatatgagtgatgaatcgcctctatacctggaacacaacccaaaaccatggttcctgacaatgttttaataaaatacaattgaactcacaaggcttatgctataatcccatccccatgagtcctactgcagttacattaaaataataagttttaaagaagtacagagcacatccttgcagaaaagtttatttgtaccctgcttctcaaccagggtttaaggtgtttcacaactataaaacaaaaataaaaatattggcaaaatataagtataaagaagcataaccagagataataagattaagcaaagaaatcaagatcatgaaaaatgccttcctggaattacttttgtgacatctattcaccggaattatttcatctctaaacttttatctctgactgttaattgtctaaacyctggcactctcactgacttattcattgtaaaataagttaggctcaacttgctcaatctaaaatacttattaatccacttaggggctttcccagggaaatataggacatgagcaagtaacactatataaaataatctgcccattttg

SEQ ID NO: 785811 - DNA, 629 bp, Homo sapiens
taagacactaagttagtatcaaaaaatcacttaatttctatgcattagcaatgaccaattagaaaacaaaatttttaaaagaacaatttacactaacatttaaaaacataaaatactttatggtaaatttaatgaaaaatatttaagacttcttctctgaaagctcattgagtagactctaagagtattttagggatagaagagaagtgaacaaagtcctttttctamggtaaaaatgacactggtaaagtggagaaaggagcaaatacagtatttttggaattgccaagtagttccttcacctccgtatcatggttcttcaggttccagatgcgaagagtcttaccccatgacacagagactaaaatcaaaccgccactgggtgtaaagctcagatctgctacaacatcttggtggctggaaagattcaaaagcaggagccccgtctgcatctcccatatcttgatctgcctaacattgagtctcatagcaaggaccaggcaagaaacatctggcacttgagggtggttgtgtgcccagagcttcctgctgggtgggaaatgagtaatgaaataaagatatatagcatgtgtatggattaaagcacttcatttatgaatattttaatt

SEQ ID NO: 785812 - DNA, 614 bp, Homo sapiens
ccccagcaatgtaggaatgttccagttgctccatatcctttccaatgttgatgctgacatttaattttaactattctagtagatgagaagtggtatgtcattgtatttttaatgccatttcacggatgactaaagatatggagcactttttcatacacttatttccaatttatgtctttctttaaattttctgatttttttgtcctaatttggttgaaatttttaaaatgctttattggagttgttcatatatattgaataaaagaagtattttgtcacatatgtgagtttgcagatatgctctcccagtctgtggcttctatgtttttatttccttaatggtgacttttgatgagcagaagtttatggtattaatggagttcagttttatcatgttttgtagttagtgctttttctgacrtttcagttttctaagaaaactttgtttactataaagtgtatactatgttttctttcagaagcttcatagttttagctttttatttgggattatgaataatttcaaattattttacttttatgatgtgagatcagggtcaatatatctccagaatttatgcaagtgctccagcaacacaacctgaaaagagttt

SEQ ID NO: 785813 - DNA, 597 bp, Homo sapiens
aatatgttgtttagtgtagccaccttcttcaatgatcttagctgaatcttctgggtgactttttgcagcttctccacctgcacttgctgcttcaccttgcatttttatgttatggaaacagcttctttctttaaacctcatgaaccaacctctgctagcttccaactttgtttctgcagcttcctcacctctcttatccttcacagaattgaagagctagggccttgctctggattaggctttggcttaagggaatgttgtggctggtttgatcttctatctcgactattaaaactttctccatatcagaaataaagctgttttcctttttgtcatttctatgttgactggagtggcacttttaatttccttcaagaacttttyctttgcattcaaaacttggctgtttggcacaagaggtctggttttttgcctctctcagctttcaacatgccttcttcactaaacttaatcatttctagcttttggttgaaagtgtacatgtgtaactcttcctttcacttgaaaacttagaggccactgtagggttattagttggcctaatttaatattgctgtgtctcagggataggaaggg

SEQ ID NO: 785814 - DNA, 608 bp, Homo sapiens
aaggaaagaacaacacataaaggaaacatttatattcatattcaacaaatttcaaagaaatggtgacaacatttcttgtatcatgtactgatactgacaactagggaaactgctcgaaatgtgttttgcaataacctttatctrtgaaaatgtgaatccccataagtatcacctaaaaaggtaaaatgggaaaaagtaagtactgataactgcctttgctgaacatataaccccttccccaccacatttaaaataatttagtttgcacaaattcaatttagagtcattctagaaataaacttcagttatacatttataaaaactaaaatggaaaccctctagtatgtgtccatattcagcagcagaattggttttaaagaatttttcatgagcaacatgttctctctaaagtatcagtttttttgtatgaatgcccaattttcttccatcaagtcaattctatcattgcattgtgataccaaatattttaagaagcccagcattttatcttggttgttttttaaagaaatgcagctttcctacttcttgctgtactgattctatctccatctctgtttttttctgagtaatttatcatattgataaca

SEQ ID NO: 785815 - DNA, 483 bp, Homo sapiens
tctcactttccagtcattgcctgtggacctctacacctcagagctttctcagcacataaaatctttctcatatttgcaatctgactttccattctgcattgtctttactgacttcctcttcttcctttgtgtttaagggcttatgtgattgctttgggcccatgtggataatctaggataatctcactattttaaggtcagctaattagtaacctaattccatctgtaatgtctgatcacatcagcacctggattagtgtttgactgaatagccaagaaacaggagacatctttcgaatttagaataccacaattgtcacctggatttcmaacactgtgatacataagtctatagatcacttgaaatgtatccagaaataacttaacccattcaagcttttggttttggtaggttatatcttagatttgaccgtattccataagcgtattttatatagttactgttatggagcttatccaata

SEQ ID NO: 785816 - DNA, 618 bp, Homo sapiens
ctggtttacagcatctgaatgtctttaatttggatcctaggagcctggagggaaacttaacaagagggaaaagaagaacctagggagaggtagtggcactgacaacttggttcaacagattatctttggggaccttctctatacctgtactggggaagatgtactacygcccccctcccccacacacagttcaaaatggtccctagcacacacacacacactaaaacttaaaaagttgaagcatgaaaagagtgtatattattgcccgctttgatttaactttctcttttccagtagaatattctctcaaatacttacagaaggtagtttttggacatcatggtgggagatcagataagcaagtatcgagagattgaaatttaatgattacaattgtcttagatttctcatcaatgaaaagaatggagtagatcaagcttgtccaacctgtggcttgcaggccacatgcagcccatgacagctttgaatgtggctcaacacaaatttgtaaactttcttaaaacattatgagattttttttcaattttttttttttagctcatcagctatcattagtgttagtgtattttatgtgtggcccaagacaattcttcttcc

SEQ ID NO: 785817 - DNA, 618 bp, Homo sapiens
ctggtttacagcatctgaatgtctttaatttggatcctaggagcctggagggaaacttaacaagagggaaaagaagaacctagggagaggtagtggcactgacaacttggttcaacagattatctttggggaccttctctatacctgtactggggaagatgtactactgcccccctcccccacacacagttcaaaatggtccctagcacacacacacacactaaaacttaaaaagttgaagcatgaaaagagtgtatattattgcccgctttgatttaactttctcttttccagtagaatattctctcaaatacttacagaaggtagtttttggacatcatggtgggagatcagataagcaagtatcragagattgaaatttaatgattacaattgtcttagatttctcatcaatgaaaagaatggagtagatcaagcttgtccaacctgtggcttgcaggccacatgcagcccatgacagctttgaatgtggctcaacacaaatttgtaaactttcttaaaacattatgagattttttttcaattttttttttttagctcatcagctatcattagtgttagtgtattttatgtgtggcccaagacaattcttcttcc

SEQ ID NO: 785818 - DNA, 572 bp, Homo sapiens
ataggtgatatatatacacacacatacatatacgtacatgtatattgtatacacacaggttatgattttctatttgcttaatttaaagcattttatgttattttaaattgttcttaaagctctatttatatctccatatgaaacagtgaaaatatttctattttaaacttaaaaaggtattcaacttgtaatccaataagtattttaaacaaagatgtaatcaggtttctagctgccccatttactctgggcctattatctaaagaatgggtcttgytaaagtatttcccttacaacttttccaaagttatgccagatgtatagggcttctattaagaatagatttactatgccataactgttttgagtttaccctcatagctttcccacatgttccacattcttggtgaatttttccagtaatgcacctcccagcactgtcaatgggaagaggttacctgtcatgtttctagcctgagcttctgaccaccagataacagaagcccaattgtggagatggatacaacaagcccaatgccgttaaagatctgaactgtataattaattctgtt

SEQ ID NO: 785819 - DNA, 489 bp, Homo sapiens
ctctagccctgcaggtgcagtgctgtggaagggggcagggacaaagagaccctcctgataggtccttaaacgctggagtagaacttctggctgctttcctcgcagttcaggccacaccagcctaaggaggaccacagtcctcaaagccctatccttacactactcaaattcatgccttcctctctctctacccattcgacctggtgatagtcagtggcaaaccaatcacccatgtgagtgactacattctcctataggaggaattgatcaagggggaacacaaggaaacaaagcacagacatgaagatctgtgacagttcccagagcaataggcctgaasgtaaggaagagctgagctgttgactcagtcttgccttatgttgaggtttgcctctttttttctgttttattgctcttggtttttttttttaattgtggtttaaaaaacacataacatttatgtaaaatttaccatcttcaccattcttt

SEQ ID NO: 785820 - DNA, 624 bp, Homo sapiens
cggaattgaggtggtatcatcgttgtaattcagacaggtgcatagatctatttctggacttactcttctgctcatttgttctacttctctaaacttgctctagagtcttgtaactgtggctttataacataccttgatcagctactgtaagattttcrttttgttcattttctttgaggtttccttggctatatatatatatacttttgtgttttcacatatactttagaagaattgcatcagtttccatggaaaaatctgtaggggttttttgggggaattgcatcgactatatacctcagtttagggagaagtgacattgtataatgaatctcccagtaggtgagtatagatagctttccattcctatagatcgtctttaatttttctaagtaacattgtatcagtttcatactgaggtcttccacaacttcctctaggttcatttctacttatttgatttgtgatgctattttagttagtatctttttaaaagtttattttctatttcattgtagcaggcatacagaaatgcactactttttgttgctgttatttttatacaacagcagtacaggacttcaccaaattcatgtgttattgctaatgttttgtcagtagata

SEQ ID NO: 785821 - DNA, 620 bp, Homo sapiens
aaaccaatattgagtcaaaatgctaggctcacttaggaaacaattaaataatatctagagggaattgaatattaaagtcaaatgcattctaatgggctaagtggccttttgagcttgctctctcctcaaatcatatattcatatatttccaagtcttgcaagctctgaggcattcacactagggacagcgcatggtatttgcagaatattaagggcatgatgatgtttctcaatagttcacaaataattcaggagttgagctgcttaaatgggagctgtcgtgctgcaatgtggaatgcggtctctgtgtggtatgctggtctgcaggcttttgctgaatgcaatgccaaagcatcaaaatctagaacagggcaggagccttgccaggaactgcttcaaggcaggagcagactgaaactggaagaaggttgcagacacatcttttgaggtgcagaaagctggggacaggactggaggggmaaaagcatttcctagcaatccacaaagctggcagattggttgaaaatcaggaaaagagattcctatgatttggaaagttgatatctgggccccaaggcacaaggagagtcctggaatctcactggtgctcagatcacagg

SEQ ID NO: 785822 - DNA, 498 bp, Homo sapiens
gggcaagcatctaggaggagccagcagctgcagggctggaagggccatggcccacgcctttctgtggccagtgagcagggatcctgctgtgatgaaatctcaggcaggctgtggcacgggggatgccgaaggtgaatctgtgtagctgtgaggaccctgaagaagagctttgccgggcgggcagctggggcagtgctgggaggtggcacctggctggtgcatgttgtatcctctgtctccaaatccccgttctctgcacagagcyagacattttgctgcaccggcgaggactggagtggagtcaccctcagctctggggaccccgctatgggccaactcctccctggacctcctgctgatgggctgccctggttcctatctccacccctttgctcccagcacctctgctggtccatgtaaccaatgtgccctgcatgccaggccctgggctcagtgctgggggctcagactgggctgggacctggcaggggttggggt

SEQ ID NO: 785823 - DNA, 487 bp, Homo sapiens
tcacttccttgctttgaggtgtgaccacgtctgggctctgtgataggcctgagcaactgttctctattcaccctgcttttacctggccaggctgagaatccctacaggatctgacagcagagattgctggcaggagcttatgaagtctgttggccttgttttatttcgatcttcctaaggggaggcagatggtgcaagcccttcttataccttcccagggwataagatctcccttcggggacactcccgaactgtgacatcacatgtgcttacagccactgttctccaccaccaaccctctaattctagaacttcccaccaatactctctggatgaggccaggtccccagggtcaggtgaccctcacagctggaagtagaggctgacaataggcttaggctgaagcccttcccagagatccgattctgacctctcttttttcttttttgcatgtagatgctctccagcaaggatccagctgtgactc

SEQ ID NO: 785824 - DNA, 678 bp, Homo sapiens
cgagcagcctgggaacccacaacgaggtccaattatccgaagactgttattatgctgggctgtgggcttcacgggcatttcctcatttgacccccaaaaacctttgaggggctgctgttatctcaagttggacagagtggcacctgggccccaagagcctgagccacttgcctgggacacatgcgagtgcctgtcaggacwggattttgagctctggttacagcatcctgcagaatgttggccttctgacccttcctggacccctggcccctccgtgggagggactacgccctgcttatctgtgtccacagctctgagcctccatacccagcattcagttcgaagcctttatcaagcacctgctgtggtcaaggcatcgcactggtgggcgtgtcgggccaggtggtttcgaggttactgcgattgttgtaatttgtatgttattaccctcgttgtgccatctcatcttcatggcatttcggtaacacttatttagtgcctactgtctattgagtgccatccctggctctgaagggaactgtatcctgatgtttacgctgcggagtgatgtggcggagggaggccagggagggtgtcaggagcctgccacactgggcagcaccaggcctcatttctagggcaacgcaggacctctggctgaagcaggggagggatcca

SEQ ID NO: 785825 - DNA, 611 bp, Homo sapiens
cagggtcataaatcccttcaggcagatgttgtataaggcttattctttgagctgttgtattttgcttcagtcaactgagctgcaaatcgagtctggctaggtgttggatggtagagcaaaactggaactttttcctgatgtgrcagcagtggctcctgatctggctgtctcctcgccagagctagcctggtgggactgagatacgtgaagcagagagatgtcatccgaggagtggaattatcagactgcactgtaattgcttgttgaatcagttatctgttattgcttaacaaaccactccaaaacttggtggcttaaaacaacttactatttcccatgatcctgtagcttggttgggctcagctgggagattctcctcgattgtgtacctgaggtcactcatacagttgcattcagctgagaacttaagaggggctggaatttccaaaatggcttctctttttccagcgtctcctctgtatggctctaatcatcctgcagtctcgtgtggacttggcatcaccatgctgggctccaagatgggggagtgaaagtaccagtcctcctgagggatagagtagtaatcccagatattacttccactgcatttg

SEQ ID NO: 785826 - DNA, 611 bp, Homo sapiens
cagggtcataaatcccttcaggcagatgttgtataaggcttattctttgagctgttgtattttgcttcagtcaactgagctgcaaatcgagtctggctaggtgttggatggtagagcaaaactggaactttttcctgatgtgacagcagtggctcctgatctggctgtctcctcgccagagctagcctggtgggactgagatacstgaagcagagagatgtcatccgaggagtggaattatcagactgcactgtaattgcttgttgaatcagttatctgttattgcttaacaaaccactccaaaacttggtggcttaaaacaacttactatttcccatgatcctgtagcttggttgggctcagctgggagattctcctcgattgtgtacctgaggtcactcatacagttgcattcagctgagaacttaagaggggctggaatttccaaaatggcttctctttttccagcgtctcctctgtatggctctaatcatcctgcagtctcgtgtggacttggcatcaccatgctgggctccaagatgggggagtgaaagtaccagtcctcctgagggatagagtagtaatcccagatattacttccactgcatttg

SEQ ID NO: 785827 - DNA, 480 bp, Homo sapiens
tgcaattaattatagaacttatttgaagagagttgcatttatattaaaatacctgcctatatcatgggcacctaaatatatagttgtcttcattatcacattggagagcctaggttcctcatgttttgtaaaataatgattttttcacaggcacacgatcttttagatagcatgcatcaggaagaggtaccagcatgctagtttcttatttaagattccccagccccacgactggtatttatgaaagagaagaaaggatgtcattacttrttcctcaagatgacacagagaggtttatgctgcttgagcagaggcttcagaatgtgaagactcaggcccaggttttgatgtgatttgatggccagtagcaacagagctgccactcttcatggatgattaaagacaaagagagtgagatggcatgaaccacaaagccctgctgccacctgacagatttttcctccgattcaaggaagccct

SEQ ID NO: 785828 - DNA, 503 bp, Homo sapiens
tatcatattatgataagggacactttactcacaaatctcgaatgctggaaaagagccctatccccatgttatctgttaccatgttatccccatgctttcgtctgctgcccttattatcctctgtgagttggttgccttaagatcctcctcctgatgtctcccagcagcgtgacctagattcttgatcagtgtccacaccgaacattcactccaaactgtgyagcaaacattttatagactcaagccacataataggtccataacatcagcataatattaaatggaatgggagagatttttgcagagagaaaaatggtgctaatgcagtgtgatacacttggtgtagtggaaaggcaagcactttacagttagggtcccagtgtagggtaattgtgtcttctgttgcccagaaaataaatacagttaaacatattaataaggaccacccagatatttttttcctccagcattgaaaccaattgccatttctttgttgagcatca

SEQ ID NO: 785829 - DNA, 543 bp, Homo sapiens
aaagaaatgataaaacttttaaattcttttatgagtgtgtttttatcttaatctacatatactgttaatagttttcttattcgattagaggaaatttttttgggctaagtttcctataaaaggcagatgtttttaagagtacagattgtgtataataatgaaatgtatctgtgcaartaacattctgatttgtactttaattgctgtttatatacagtgtgaattaagaataaaacagtgaggtgagggagggaagaaggaatgaggaatataattagcatactcagtagtttggaaatgtaactgttttaattaacagctttgtggtggcaaaacaaacgtgctttgggaaagctaagaataactaggattgtggcatcctccttgggaaaaagttgtttataatcttaatgttttatttccttttggctgacagacaaaagaaaacaaagtatatgaaatatttgtgtcagaagatatttatatgttcagttttaccaattttatgcattattaaaaagatatttacttattaattcaact

SEQ ID NO: 785830 - DNA, 543 bp, Homo sapiens
aaagaaatgataaaacttttaaattcttttatgagtgtgtttttatcttaatctacatatactgttaatagttttcttattcgattagaggaaatttttttgggctaagtttcctataaaaggcagatgtttttaagagtacagattgtgtataataatgaaatgtatctgtgcaagtaacattytgatttgtactttaattgctgtttatatacagtgtgaattaagaataaaacagtgaggtgagggagggaagaaggaatgaggaatataattagcatactcagtagtttggaaatgtaactgttttaattaacagctttgtggtggcaaaacaaacgtgctttgggaaagctaagaataactaggattgtggcatcctccttgggaaaaagttgtttataatcttaatgttttatttccttttggctgacagacaaaagaaaacaaagtatatgaaatatttgtgtcagaagatatttatatgttcagttttaccaattttatgcattattaaaaagatatttacttattaattcaact

SEQ ID NO: 785831 - DNA, 588 bp, Homo sapiens
atctgccagggctccccactgactgaacccaactagagacagatgttaagagagagccttttgatgtcaagtacctagatcagcagccttgggcagagaacaagggcaagtatagagaatgggttttgaggagtaaacaggagctatctggcataaaatagccaactttttattttattttttttttttgagacagagtttcattcttgtcgcccaggctggartgcagtggcgtgatctcggcccaccgcaacctccacctcctgggttcaaacaatctcatgcctcagcctcctgagtagctgggattacaggcgtgtgccaccacacaaggctaatttttgtatttttagtagagacggggtttcaccatgttagccagggtggtctcaaactcctggcctcaggtgatctgcccaccttggcctcccaaagtgctgggattataggtatgagacaccatgcccagccccaatattctttttgaattaaataatcaaaataacccagaagaggaaaacatagataatatgcaaaatattgatatccatttactttatgggcttacataattattttttaattgac

SEQ ID NO: 785832 - DNA, 631 bp, Homo sapiens
tagaagttgtttcctgatggataaagcagtgtgcagattccagtcacttgggtctgttcttgcttctcatgagcacacacctcacacgtacttgacctgagaggagatgctcttgttggaaactaagatttttttgtcctctcgtgcctcacattatgcagtcgctggaggtgaaagatcaaagctggaaaagtcatctttgaaggggaaacacctttcctcactcatgtttacgatttttttctgtcttggtttcatagaaaaactatgcaggtagccagagccctaagttgttgtgccatctgtaaacctgacatcatgtgcaaataacaacagatgatggaatttcacctagggtctgatygtgcccagggagacttcataggctccaaatgcctgcttttatcttatacatcgagaagccattcaaactttcagggctctgccaacttggcaagaagaagagttggcaagcttcccatgctagttttcttttagtttgaaagttttgaagtgggtctgaggttgtgataaatgcttgtgaggtctcttatttgttgactgtaagcttttcatcatttgacatgaatgagaaacatcattcctttgcaaggatattcccttttttctg

SEQ ID NO: 785833 - DNA, 596 bp, Homo sapiens
tgactgccttgctttaagaatttgtagggttttgttcacctgagttgtaccttgctgtcacagaaggatgccctgcagtggtctcgccatccagctacagtggagggagaggagccagaggacacggctgatgtggagagctgtgggtctaatgaagccagcactgtgagtggtgaaaacgatggtaaggaccctttaakggatgggtgagggagccacagcaggcactagggactaacctttattttcctctcttccagtatctcttgatgaaacatcttcgaacgcatcctgttctacagaatctcagagtcgacctctttccaatcccagggacagctacagagcttcctcacaggtaaggaagaggtagagcctagcctgggaggatgaatgatgacaggtataaggcaagatccctccttctcctgtagtgagctgtgaacatgttcagagagtgaagaatagaagtctggtctccagctgttagtagcatttaacagggggccgcaggaaaagtgaacagtaggtttgagcagagtaagttttttctctttctttaccttggctgagtgattttgttcattctttttttt

SEQ ID NO: 785834 - DNA, 521 bp, Homo sapiens
gatagtgccttctatggagacagtcaaaagctaagattgttggagtcagatcgacatcttcatatcccagctcagccagctctcgggctgtgtgaccctgagtgagtcaggagctttctcaggttcaacttctttataatgtggaaattgtaataacattaccttttagggttattgtgagcacaatgattgtatagagattaaggcacataaasaagttcacaatagtagatatggttgtcaaaattatcatcataattataccagagacctgaggttcctgtgtacttcatgaatctattaagaaaccattccagaaagtaggaccagtgggagatgaccataatagccatcgatattgcaaatggagaggggcaaatatgggtgcttctgtgatctgggaggggccttggaaggaggtaaggcttcagtggccttcaaagatagagtcttaaaagaagattgaaaggacagaataaaaatgtactgtctgaactccactatttcaaacacttgactga

SEQ ID NO: 785835 - DNA, 521 bp, Homo sapiens
gatagtgccttctatggagacagtcaaaagctaagattgttggagtcagatcgacatcttcatatcccagctcagccagctctcgggctgtgtgaccctgagtgagtcaggagctttctcaggttcaacttctttataatgtggaaattgtaataacattaccttttagggttattgtgagcacaatgattgtatagagattaaggcacataaagaagttcacaatagtagatatggttgtcaaaattatcatcataattataccagagacctgaggttcctgtgwacttcatgaatctattaagaaaccattccagaaagtaggaccagtgggagatgaccataatagccatcgatattgcaaatggagaggggcaaatatgggtgcttctgtgatctgggaggggccttggaaggaggtaaggcttcagtggccttcaaagatagagtcttaaaagaagattgaaaggacagaataaaaatgtactgtctgaactccactatttcaaacacttgactga

SEQ ID NO: 785836 - DNA, 538 bp, Homo sapiens
cacttacctgatcagcaaaactaactataccctgtatctcaaatgattctcatactgaaataaacaaataaaaattcagaagtgagaaagtggaaaagccagatcttttttttaatgttttttgtattttactaagcagatttatgactgaaagaaaaacattttaagcattttatcctcctctgttttaaataactattgtgggkttttttttttcagaaaattatttaaatacactggctctagttaaaataacttggttttgattcatatattaatagttaaagtaaatattttgaactttcccatgaataagtacaatttagttagtcaagactttattattttatgaattatataaaaatattgttctctttcattcatgaagggaaggagaatctggtcatctagttggccagtgcatataatccactcagctgatgtagatatctgagtgtttatgtcaggcaaatgtgctccaggaggctgggataaagccacggatgtggcctccatgtggctcagcacttgagatgcc

SEQ ID NO: 785837 - DNA, 589 bp, Homo sapiens
ccactgtgggcaagtggagtgtgagctcactgagcaactctgggaaactataaagcacacacctcagcattatcccctgaggggtgagggagctgaggtgttagttaacccaacaactctcagtaatcattggttgaagaatgttttgggggtgccttgttccctggtcctttagacctgccctacatrtggcaaagtgagctctggccaccagaaggagcccttgggtaaaaggggctggcaccagaaggagccctcaggtaaaaggtttaagtcaaagcagcttgcaaggacacagcatatgccaagaagatacatgcagtgcatcgtcagcatctgctcttgttacccaacttatgaatatgccatgttatgtgtataatactcatataccaaagccagatcacaaaacagctgcaactccactctcttaacgacagactgtggccacctcacccttgcctactaggtgcccctttgtgctcctgggcgaagccagtgacacctttttagcattctgctgctgtgctcactgcagtaataggggcagtgtcactcttattacttcacctgttttatcttttgtgaa

SEQ ID NO: 785838 - DNA, 567 bp, Homo sapiens
aaaacagacaaaactaacctttgatcatagaagtcagaatagtggttattttgagggctgggcattgactcaggacaaggcagctttctggggtattagaagtatcttataccttgagctgcataatggggtgtgtgtgtgtgtgtgtgtgtgtgtgygcgtgtgtgtgtgcgcgcgtgtgtgcagtatataaaatatttgcaagcactttcaatacaaaagtaaataagaaaaaaatcatttatttatcgtataagtcaactttcacatttacaacaaaagttaattttatgaatctatgctaatgagtagaaaactaagctttggaatgccagtagaagcacagaatctgtgtgcacctggatacacacacatgcaactccctgcatgcctgaccctaaattattcatggcttgttcagcctcattgaccctcatacttggaagaaatttcccatgtcatctaattcagtgattcatctgaagcttgtctgtagcctcccctccgggtggccattctacttttgtgaacaaaagtcccctggtgaccagaatatgttgtgatgtt

SEQ ID NO: 785839 - DNA, 567 bp, Homo sapiens
aaaacagacaaaactaacctttgatcatagaagtcagaatagtggttattttgagggctgggcattgactcaggacaaggcagctttctggggtattagaagtatcttataccttgagctgcataatggggtgtgtgtgtgtgtgtgtgtgtgtgtgcgygtgtgtgtgtgcgcgcgtgtgtgcagtatataaaatatttgcaagcactttcaatacaaaagtaaataagaaaaaaatcatttatttatcgtataagtcaactttcacatttacaacaaaagttaattttatgaatctatgctaatgagtagaaaactaagctttggaatgccagtagaagcacagaatctgtgtgcacctggatacacacacatgcaactccctgcatgcctgaccctaaattattcatggcttgttcagcctcattgaccctcatacttggaagaaatttcccatgtcatctaattcagtgattcatctgaagcttgtctgtagcctcccctccgggtggccattctacttttgtgaacaaaagtcccctggtgaccagaatatgttgtgatgtt

SEQ ID NO: 785840 - DNA, 617 bp, Homo sapiens
ttgccatggttctatgacaacttgtataatttctctgtggggaattatgtcttctaaaggtgaatgttaatactgatggtcattgcaactgagtgtgattgcagtatttattcgttttttatagccctataattttatgatktaagtacttattcaacatacctaacatttggagaagaattttatgagatgagaataaataagagaagactgagaaataaatctagaaaggccccctggggtcattggaatgtgtaacacaaagctaaggtgcctgtgtttattctgtgttggagagtcaacaaaggctgcctctgttttgtgtaaggttgaggtgtaatgctaactatgcctatgcctaggaagaatcacttgaaagtggcttgcaggatagattggagaagggaaggaagaccaaaggagcacagctgtcaactacagttgtctgggtgagggccgatcagaccttgaatgaaatcaatgggaaagggaggaaaggaaggggcggtggaaaatagttcagagggacaatgcctttaggacttggttaccaacaggggagtccgtcaaacatggcggtaactaggagagaggtaaagccatagacagaaaccaga

SEQ ID NO: 785841 - DNA, 595 bp, Homo sapiens
tgatattgttataagattagagacacaattaaattatttattgtctttttgttttttaaactctgtactggtgtaggaccagccttcttaatgcctgtgtgtaggatcacaggcttcatatccatgtacatcttactgaggcctgtacttattkgttgaactgaatgttgtttaaatgagaaaactccagtatcatagcgtgattagcctcccttttgccttcatctttcgttgttcatttgttttttcctgctcttcatctaggctttcccaacgagcctgctgcagtcattgccctcaacaccattaaggaatggcttgccaagaatcaccatgaggtaggaggaacgacataatcagtgaacatccaagatgatgtaatttgatgctcagttccccccaaaaaagcacataaattttataaatatcaactacacctagtcattgagccaaacctagctgaccattcttcacttgggttacatgagtaattaaatgttttttggtaattgatagaatgcagcaactctattgatctatctggtgaagtgaccagattcatttagccataatctaatttttttacattggtgga

SEQ ID NO: 785842 - DNA, 595 bp, Homo sapiens
tgatattgttataagattagagacacaattaaattatttattgtctttttgttttttaaactctgtactggtgtaggaccagccttcttaatgcctgtgtgtaggatcacaggcttcatatccatgtacatcttactgaggcctgtacttattggttgaactgaatgttgtttaaatgagaaaactccagtatcatagcgtgattagcctcccttttgccttcatctttcgttgttcatttgttttttcctgctcttcatctaggctttcccaacgagcctgctgcagtcattgccctcaacaccattaaggaatggcttgccaagaatcaccatgaggtaggaggaacgacataatcagtgaacatccaagatgatgtaatttgatgctcagwtccccccaaaaaagcacataaattttataaatatcaactacacctagtcattgagccaaacctagctgaccattcttcacttgggttacatgagtaattaaatgttttttggtaattgatagaatgcagcaactctattgatctatctggtgaagtgaccagattcatttagccataatctaatttttttacattggtgga

SEQ ID NO: 785843 - DNA, 621 bp, Homo sapiens
aattttataaatatcaactacacctagtcattgagccaaacctagctgaccattcttcacttgggttacatgagtaattaaatgttttttggtaattgatagaatgcagcaactctattgatctatctggtgaagtgaccagattcatttagccataatctaatttttttacattggtggatagtatgggttatatgtgtgaaaaagagaaggrgatggatttcattaagaataaggagttttcctatgctattttccttaaagctaagttatctttgttgacttgaggttcctggtgtacagtaattgtctggtatctgtgttctttggatttataactaatcacttccctaaagtcacttctgagtgtgagattgaagtgggcttgtataattgatcacaaaatcgttatgagcgggatttcttatgaaactaaataccttcatcagagtattcatcatcctcctattctgcttacttaataagatctttgtgatacgtttagtgatgaataggggaattactcaagtaaacaaagcagcaaaataactagagaccgtggagcgttaaatttcagagatttgtcagtttacatattgtaacagctaggaggtttcaggc

SEQ ID NO: 785844 - DNA, 621 bp, Homo sapiens
aattttataaatatcaactacacctagtcattgagccaaacctagctgaccattcttcacttgggttacatgagtaattaaatgttttttggtaattgatagaatgcagcaactctattgatctatctggtgaagtgaccagattcatttagccataatctaatttttttacattggtggatagtatgggttatatgtgtgaaaaagagaaggggatggatttcattaagaataaggagttttcctatgctattttccttaaagctaagttatctttgttgacttgaggttcctggtgtacagtaattgtctggtatctgtgttctttggatttataactaatcacttccctaaagtcacttctgagtgtgagattgaagtgggcttgtataattgatcacaaaatcgttatgagcgggatttcttatgaaactaaatrccttcatcagagtattcatcatcctcctattctgcttacttaataagatctttgtgatacgtttagtgatgaataggggaattactcaagtaaacaaagcagcaaaataactagagaccgtggagcgttaaatttcagagatttgtcagtttacatattgtaacagctaggaggtttcaggc

SEQ ID NO: 785845 - DNA, 506 bp, Homo sapiens
aggaagcgaagccccacgtggatcctgaaatactggccttagactcgattccacagcaaaggttgcagccacccagcatctgagctgctgggcaccagggcaagtgatggccagtgacaggaaggagctatgcacgcatatakcctctgttgtgtgcactctttaaaagaagagataaggagaaaaaaatatttaaatgatatcatttaagtttcacaataaaccattgactgaaataagacatatgaattctcttttcttccaatcggtccaaattttcacatgttccttagcttctttctgcattgatgtgatgctaagatgtaaagacttttagttgttgttgcttctctgacactgctcctcgatataagcgcaaaacttcaccttttgatcatggggtctttaaaaaaaggcccagcaatctcccctaaagctggagacaaaactgggtttcctggacttactgagatgtgatgtgtcagtttacaacataaggcctttct

SEQ ID NO: 785846 - DNA, 513 bp, Homo sapiens
catgaaggtgccattaagcatagcggcaagagatgattttccggttggtaccctgttgtcctttactgaagccggtttacaccaccctcatgtgaatcagaccctggatgtggagatacgtgccacccacggtgcttctaggtccccccaccgctggcacaattagatttctttaaggaattaggaaatgaaactctatattaaaattcattgctgagaacactacctaccttaatattttytgctgttcaaaattttcctctgaaaacaattagaggctgatggggtgtgcatttgacagtgcaaatggagctacaaatgacctgggtgggcttcagctaagcacagggcagcttaggaatgtattaagtggagtaattatctcatatggttttcccttgggttcagtgacatctacaaagttcgtttttctaagttcctccttctacaaatttaaactcaagggaaataggatccatatgtccctgattaatttgcactaactcatcaaac

SEQ ID NO: 785847 - DNA, 514 bp, Homo sapiens
caggaccctaatagtgactaatttctcagcgatcagtgctgcctttgttgcaaacacatggctcttgagattacagagtaaaatctgtacttactcctgttatctctgctcaaatactgcatctttggtgaatttttccttggccttaggaaaacttttcccttccaaatatcactgtcttttactgtggttgtggatgtacctgtcagctttcccactgactcaaggactgcaattgtgtaaattcatccatgcattgtttttgttttgtkttttaatccaaggagcctggcacataaaaagctttgacaaaaatgcattgaatgaacgaatgttttgaattgtttcttaaatgatggagctgagcatgtataaagccagtgtatctgtctcatacagattaagattcaagccttgaactctgttcctatcctcaaatgaggaaagggactgaaaaccagccctagtgtgcagagattcagccagactctggatgtagcccaggcttggagaa

SEQ ID NO: 785848 - DNA, 537 bp, Homo sapiens
caagaatatcacagagatgatatgaactcttaagggtgaatctctgttaaaggtggacaacactcagcctacttaaatgctgacaaaaaggatccagtagatgggtgatagaaattggaaggaaatttggacggggaaggaaattagaaagatgaatgaagtaatgaagttttgagttggcaagagaggtggagtcagagcacaggcaaaggggtttgccctgacagggagcagacgcatttcgtcggtcgtaacagacgagaaggagaagatgctgacaatgaatgtggtctgaaatcgggagaaggagtgtgtttggatttgatggcttctttttggatttgacggtcttcttctcagtaaaataaggcagcwtctgcgggtgaaactgacagtaagagtagaagagtggaggggagtttagaggaagagaaagtatgacaaagtcattggtggcagtggcaaagcaggcttcctggagaaatataaaaagctaggcatactgttagtgggaatgtaaactgtggaaaacagtat

SEQ ID NO: 785849 - DNA, 626 bp, Homo sapiens
ttctcaggctggatcctagcttttaatgaaatcgtatgacatgtgaactgtgcagttttgcgtgtgccacgaggcaactttctcagccgtgccttgggcaagtcacagcctttttggcctggatgccttaaggcagcccatctgaaaccacttcccattcccatttctagaaaccttcaagggttccctatgaattgtgcacccacatgggttttcctggaggatcactagttctcagaaccatacaagcacacagcaaaagcctctccacacatcaccctgaagtgacccaaattcccatttctcaatgtgggacctatgctctcctgcactccagcaagatagctgtggattcccacctgatgctgttcctcctgctgccaagtgcctgcctgcctttccaggtctcagcacaccacrcaggtcgcagtcagcatctaaacccatccccccaccccagaccactatgaatgcaccctcacatacaggtaaaggtagcaactcactaggtgactgacagaaggggaaaggtgactacatccctgacccagagtgcctcaaatttcctaagtgactgtcaggtgcaatttaatgaaaagccttggaacaaatacagcaggtaaaac

SEQ ID NO: 785850 - DNA, 630 bp, Homo sapiens
agatgaaagatcagtgttagcaacaatgcagagaaaagtgaactcttctacaccgttgctgggaatgtaaattagtacagccaccatggaaaatggtatagaggttcctcaaaaaactaaaaatagaattaccatatgatccagcaaacccacttctgggaatataaaaggaactgaaatcagtatctcaatgggatatccgtacttccatgttcactgcagcattatttacaatagccaaaatacaaaatcaaytgagaattatccatcagtggatgaagacaatgtagtatagatacattatactatccggccttttaaaataacaaaattctctcatatgggacaatgtggatggatcttagaggacattatgccaaataaaataaaccaggcacagaaagacaaacattacatgatctcacttacaggtaaaatcttaagttgaactcctagaagtagagaacagaatgatggttatcagaggatgagggtggggtgctggggaaggtgggaaagagaatgggtagaaggctgcagctaaactcaaggaataaattttgagatctactgcacaacagggtgactacagtcaataatatatattgaaacagcaaatttcaaatgtat

SEQ ID NO: 785851 - DNA, 536 bp, Homo sapiens
aagtatgatagatgccttgtaccctttggggcaagaatgaacagtaccagtttgcagcttgttatggttgcggttggaggtgggtggctgggggagagtgttttccaaggaggcagctgaacagatcctgtggttaggatgggtgacctgatcacatccccagagtctgggtgggaaaatgcaggagggtccacagtctgaaagagagccctagggcaggttgtggtggtagaggaaactcctagcgtgtcaatccaaacagtccaytgggagcccaggccttcagtaggaggggcattgtggctcagatgacatgaacctctctgactgggctaaggcagagagaagctccagttcggtcagaactttccaagaaaccagggacacgcagcccaggaaataatacctgtgggagtcagccccacctgtgacccattcatcttatctatctgcccttgggtttctggccccccagtttctacactgctctccctggatccccagcccactccttggcttccccagcacctcccttc

SEQ ID NO: 785852 - DNA, 522 bp, Homo sapiens
tggtctaggcctaattaactcagtaattaggccagaaagcaaaggtttcacacctcgggtccaaaatcccaagattcaaggttgggtcagagtagggaactgggggacggaagtgagggctggaggcaggggcggaggtgagggctggaggcaggggctgagggtggggaaggctaagcattgtaataccaaggaagtcattggcagagatgcggtcatagtcccagacctgcaggaccagcactgcaggctgccggaactccgcctcctccagggcaaagggtccagacctgcgccrgacgctcacctcccgctccgtgggcaggtagtcaaagcggaacacaaagcgccaattgaagttcccctccccagtcagggagttgaagtgaacgtctgtctcctgcttgtcatgctccaaccccttcacccagctggggccggggtgggtgagcgtcagggctggagctacatggagaacccactcctcaccccgctctcagcaccacggagggcctggggtcg

SEQ ID NO: 785853 - DNA, 522 bp, Homo sapiens
tggtctaggcctaattaactcagtaattaggccagaaagcaaaggtttcacacctcgggtccaaaatcccaagattcaaggttgggtcagagtagggaactgggggacggaagtgagggctggaggcaggggcggaggtgagggctggaggcaggggctgagggtggggaaggctaagcattgtaataccaaggaagtcattggcagagatgcggtcatagtcccagacctgcaggaccagcactgcaggctgccggaactccgcctcctccagggcaaagggtccagacctgcgccagaygctcacctcccgctccgtgggcaggtagtcaaagcggaacacaaagcgccaattgaagttcccctccccagtcagggagttgaagtgaacgtctgtctcctgcttgtcatgctccaaccccttcacccagctggggccggggtgggtgagcgtcagggctggagctacatggagaacccactcctcaccccgctctcagcaccacggagggcctggggtcg

SEQ ID NO: 785854 - DNA, 616 bp, Homo sapiens
ccctgacagccctatggccacaggctgtgccttgtccccaagtggagaaaagagctagggtcaaaatgacagggtcgggtagatcctgggggatgaggatgaaggtggagtctgaagtgtgggttccaggatcaaggttagattaggggttcaaggatgaggtccaggctgggcgcggtggctcacgcctgtaatcccagcactttgggagtccatggagggtagatcacttgagctcaggagtttgagaccagcctgggcaatatgacggaaccctgtctctacaaaaaatataagaactagccgagtgtggtggcagacgcctgtaatcccagctactcccgaggatgaggtgggaggatcacttgagcctgggaggtggaggctgcagtragccgagatcatgcacctgcactccagcttgggcaacagagtgagaccccatgtcaaaaaggaaaaaaaaaaaaaatgaggttccagaaggggaagttgagattaaaagtaatatctggtgttccaaggtccagatcttagggatctggggggaggtcaggttaggaaccccacatctgagtcttggggcccgggggtggggatcctgtaggactagggtcag

SEQ ID NO: 785855 - DNA, 454 bp, Homo sapiens
atactgggaggccagcccacagtttgctctgtggtggctatagaatcggttttccagatcaatgtgggtctccccgatgaggtcgtcagaacccacgaggtcatgatcaaatacggcgaccgtcagctccgtctcagctgggagagagatgcttagctccaggatcctggcaaggagggagagggactgaggtcacttccatgctccaggaggtggtctggggaggaggcgggtgtgtcagcatcccctgtccattcccttgccattcytaggccagctgccacaaggccacagggctggatgctcctgcagctaccccgtttccaccccacagggcccagcctcactctccaaagatggggttgagctgcttggggatgtagcgttccttggtgtcctgccgctcccggccagcgctcaccaccacgtaagggtctgctttgccattggggtc

SEQ ID NO: 785856 - DNA, 632 bp, Homo sapiens
ttctcacatgtagcattgggcaagttttccccattagcttttaatacatctgctaatctctcctattaaaaaaccaagccaaatctgccctcacctcaggcccattcagctactgccccgaattgctcctcctcatttccaatcagacttttcgaaagcactgcacccgtttcttctctccagcctctccctgcacccatctggccccgtccctacccatcctgccatcttcactgrggttaccaattccttctgtgtcaccaaatcaagggatattttctagtcatcactctccttagccctcggtcgcacctcaagctcctttcctctggacacactcccttgcctgacttgcagggtgtcacgctccctgggctttccccccagccctctggccactttctttctctcatttgaagtctccttcaccattttatcctctgaaattaagtattggaattgcttagggctcagcaattccatactttttcctgactccatattttcaccgacatgatctcatcctcttctgtggtttcaatttctgcccccacacacatgaccctcacatttgcgtgctgcctggcatctctcctggagctctaggcctgtattccagctcagtgcccctt

SEQ ID NO: 785857 - DNA, 637 bp, Homo sapiens
gcaagttttccccattagcttttaatacatctgctaatctctcctattaaaaaaccaagccaaatctgccctcacctcaggcccattcagctactgccccgaattgctcctcctcatttccaatcagacttttcgaaagcactgcacccgtttcttctctccagcctctccctgcacccatctggccccgtccctacccatcctgccatcttcactgaggttaccaattccttctgtgtcaccaaatcaagggatattttctagtcatcactctccttagccctcggtsgcacctcaagctcctttcctctggacacactcccttgcctgacttgcagggtgtcacgctccctgggctttccccccagccctctggccactttctttctctcatttgaagtctccttcaccattttatcctctgaaattaagtattggaattgcttagggctcagcaattccatactttttcctgactccatattttcaccgacatgatctcatcctcttctgtggtttcaatttctgcccccacacacatgaccctcacatttgcgtgctgcctggcatctctcctggagctctaggcctgtattccagctcagtgccccttcttagatggtccagaagcacctaa

SEQ ID NO: 785858 - DNA, 618 bp, Homo sapiens
acacggtgtagactcaggtgtagtttgctgagaaataccaccataacgtcatgcacaaatcagaacaaaaaaaatacatggaaatgcaaagaatattttgcttcctgattgtgtaagagaatgtgttcaggacaacaatgatttcttttatatccgagggggaaggaaagggataagtcccctacaaatctttccrtgtgcaagacccacatagggctacggaagtggatttacctggttaaacactatcataaacaacctgagtgatagtaagtggaatgaccatataatttatcatccaaacaggatgcttttgtctgagacaaatgacaaatgtcaatggacaacaggactatcctgggcatacaagtcatggaataatagcgtatgtaatttaatcactttggatgggtcaccataacttttagtcttcaaaagtgtatggcttagaaatatcaccatttggcaaatgccacagcaataattgttgcaagtaaaaattgtcaattgttgctaaaattagtgggcaacagaacgaacaactcagaaagacagaaagtaaattattggtcactagaagctgaggagaggtaataatagggtgtgatggctgatgga

SEQ ID NO: 785859 - DNA, 618 bp, Homo sapiens
acacggtgtagactcaggtgtagtttgctgagaaataccaccataacgtcatgcacaaatcagaacaaaaaaaatacatggaaatgcaaagaatattttgcttcctgattgtgtaagagaatgtgttcaggacaacaatgatttcttttatatccgagggggaaggaaagggataagtcccctacaaatctttccgtgtgcaagacccacatagggctacggaagtggatttacctggttaaacactatcataaacaacctgagtgatagtaagtggaatgaccatataatttatcatccaaacaggatgcttttgtctgagacaaatgacaaatgtcaatggacaacaggactatcctgggcatacaagtcatggaataatagcgtatgtaatttaatcrctttggatgggtcaccataacttttagtcttcaaaagtgtatggcttagaaatatcaccatttggcaaatgccacagcaataattgttgcaagtaaaaattgtcaattgttgctaaaattagtgggcaacagaacgaacaactcagaaagacagaaagtaaattattggtcactagaagctgaggagaggtaataatagggtgtgatggctgatgga

SEQ ID NO: 785860 - DNA, 611 bp, Homo sapiens
tcttaatgcatatatttattttatggacagagtattattatttttctgtccaaaaagtcaaatgctttattatgaagatgccatttaataatctatttttaaaagtttcattgaatataacttacatactacaaaattaacctgttttaagaatacaagtagacaaattttagtatcattacagagttgtcmgtcatcaccaccatctaattttggaacattttcatttctccaaaaagaaaccttgtgcccgtttacagtcgctccccatttccaccccaagcctcgtttaaccacaaatctttccatctctgcatatcccagaactaaaactgctggccttacatagtgtagggtgaccatcctggtctgcccaggactgaaggatttccagggtcatggggtgtccagtgttaaaacctggacggtcctgggcagaccagggcaagtcggtcatttgaccatagtgctttttttaagccaaaactttcagatctccttttcccctcttgcgtttcgtttgacctctgcctcatggggtggcctaatttggtaggtcaggcaaagacactgtacaaagggacacccctaaaaatcaaggactgtaaaac

SEQ ID NO: 785861 - DNA, 611 bp, Homo sapiens
tcttaatgcatatatttattttatggacagagtattattatttttctgtccaaaaagtcaaatgctttattatgaagatgccatttaataatctatttttaaaagtttcattgaatataacttacatactacaaaattaacctgttttaagaatacaagtagacaaattttagtatcattacagagttgtccgtcatcaccaccatctaattttggaacattttcatttcwccaaaaagaaaccttgtgcccgtttacagtcgctccccatttccaccccaagcctcgtttaaccacaaatctttccatctctgcatatcccagaactaaaactgctggccttacatagtgtagggtgaccatcctggtctgcccaggactgaaggatttccagggtcatggggtgtccagtgttaaaacctggacggtcctgggcagaccagggcaagtcggtcatttgaccatagtgctttttttaagccaaaactttcagatctccttttcccctcttgcgtttcgtttgacctctgcctcatggggtggcctaatttggtaggtcaggcaaagacactgtacaaagggacacccctaaaaatcaaggactgtaaaac

SEQ ID NO: 785862 - DNA, 442 bp, Homo sapiens
atatacaaactccatgcaaatattatcttcttaattagctttaagacttacctttattgctagctttggctataaaggacaggacttaaatgagatccacatccatataaaagctgtgtgaccacatgctatctaattttgggggagttccctggtgatatggtttggctctgtgtccccacccaaatctcatctcgaattgtaatccccatgtgttgagggagggaagtgattggattatgcgggtgkttcccccctgctgctctcatgatggtgagtgagtctcatgagatctggttgtttgataagtgtctggcttttcctccttcactctctctcacctgccaccaggtcatatgtgcctcttacccttttgccatgattgccttctcaggtagtattttttatagcagtgtggaaatggactaatataactggtgaa

SEQ ID NO: 785863 - DNA, 583 bp, Homo sapiens
ttctgcagaaatgggctaataaaattggcaagcgagattggcaaatgggttttggctaaagattattggtttgctgctgttgatatcacgatcaaaagcttcaggctatttgtccttggctgcccctgtactgaagtaggcaccctgctgttcaccttctgccttgttcacttacaaatttaggcactcagagtcatctggtaagttctcatatctagtttaaaaggaacagttgagaaaaggcaggccaagggcactgtctgaaggtcttkatagcactttgtccttggacccttgcggagtagccaccctccatacatatgtacgaagcaaatgttctccccacccctccttgttgtctgtgcattattcactactgatgagaactctgtactgatcatttatagagcacatcgggtcattgcctttgatttccttttgctctcaaagggcatttgaaacaaagcacaatattcagtctggatggtttaggccccaggagaggggagtagggtgcccaaatacagcctgctttcattaaatgaaggctcactccaaggggattaaacgatctaattctata

SEQ ID NO: 785864 - DNA, 583 bp, Homo sapiens
ttctgcagaaatgggctaataaaattggcaagcgagattggcaaatgggttttggctaaagattattggtttgctgctgttgatatcacgatcaaaagcttcaggctatttgtccttggctgcccctgtactgaagtaggcaccctgctgttcaccttctgccttgttcacttacaaatttaggcactcagagtcatctggtaagttctcatatctagtttaaaaggaacagttgagaaaaggcaggccaagggcactgtctgaaggtctttatagcactttgtccttggrcccttgcggagtagccaccctccatacatatgtacgaagcaaatgttctccccacccctccttgttgtctgtgcattattcactactgatgagaactctgtactgatcatttatagagcacatcgggtcattgcctttgatttccttttgctctcaaagggcatttgaaacaaagcacaatattcagtctggatggtttaggccccaggagaggggagtagggtgcccaaatacagcctgctttcattaaatgaaggctcactccaaggggattaaacgatctaattctata

SEQ ID NO: 785865 - DNA, 556 bp, Homo sapiens
tattcactactgatgagaactctgtactgatcatttatagagcacatcgggtcattgcctttgatttccttttgctctcaaagggcatttgaaacaaagcacaatattcagtctggatggtttaggccccaggagaggggagtagggtgcccaaatacagcctgctttcattaaatgaaggctcactccaaggggattaaacgatctaattctatactccttttattctgtttcttttaagagacagaataccttattacttatcatattattgaagatctaacatatatttacaattgtgctattaaagctgtrgtttattacaacaaacattgatcaatcacttttatatactctatattgctatacatttaagctgaggaaggcacaaatttaatctgtgatataaaacctgttctcagatgacttacagtggtagaattgggggaagacctggctgatacacaggaaacaataagggagtacaagagtgagtacagaaaaaagtgcaaaaggaaatatacacgatctttgacatgcatgtggcataccatgg

SEQ ID NO: 785866 - DNA, 581 bp, Homo sapiens
gtgtgaccaagggggttagtgaatcttctaatttttggctggtcatcagtcccccttatggtacataagtggaagataatggccctgagaaatgggttggaactgagtaggctgatcctgtatccaataagaactcagtattttttacctgccatatcaagggttacctgaggttcctctgttgagaaggtaaggtgtctagtgtaagccatagaagacctccasccctatgaatccactattctcttggcccttatgggtctgagtggctcaggctcccttttaatcctggggcatccattctacagtggccgtcttgcttctggaaagcacactgattttggcccaggggccagtgagtcagtggctcttgtgtgggcgccctagatgcagatcttacaatattttcttgggataggtaaacctgaggcagcaagagacttaaagcagtcattaacagttgtactattaggccaattattttcattttcacctcttcctgtgccctgttcctattgttataaatgctaaaggccatgtttaagagttggctcatggggatttggggtctcattgcttcg

SEQ ID NO: 785867 - DNA, 581 bp, Homo sapiens
gtgtgaccaagggggttagtgaatcttctaatttttggctggtcatcagtcccccttatggtacataagtggaagataatggccctgagaaatgggttggaactgagtaggctgatcctgtatccaataagaactcagtattttttacctgccatatcaagggttacctgaggttcctctgttgagaaggtaaggtgtctagtgtaagccatagaagacctccagccctatgaatccactattctcttggcccttatgggtctgagtggctcaggctcccttttaatcctggggcatccattctacagtggccgtcttgcttctggaaagcacactgattttggcccaggggccagtgagtcagyggctcttgtgtgggcgccctagatgcagatcttacaatattttcttgggataggtaaacctgaggcagcaagagacttaaagcagtcattaacagttgtactattaggccaattattttcattttcacctcttcctgtgccctgttcctattgttataaatgctaaaggccatgtttaagagttggctcatggggatttggggtctcattgcttcg

SEQ ID NO: 785868 - DNA, 530 bp, Homo sapiens
ttgaactcctggcctcaaacaatcctcctgcctcagtctctccaagtgctgggattataggcatgagccactgagcccagccacaaaaatctttagaaagaaaattctagacacaaaatccatggcttaaaacctacatatttctaattagtttccaaatatctggatattattaatatgctgcttaacctctttagtattcaaaagtatcttattaaagccttattaattagtgtggctgcagaatcaaccaaattaattaaaactaccaaaaactttaaaattctaagtagtatattcaaataaataggtattcaattgtttgtgggctcagctttgtgccgtccagcctattgacacaaacatgtwagatagtcttgcctccttacagcaaggttaacattttaagatcagagacaacaacacattaaatatgaaaagccaccacagatttgacaagtgatcttttgtttcaacatagtaacagtattttcaaactaaccggcctcaatgtgaaaaatgcataggaa

SEQ ID NO: 785869 - DNA, 621 bp, Homo sapiens
cacaaatggaaacatattctgtgttcatgaattcgaagagttaatattgttaaaatgtccatcctacccaaaacaacttacagactcaatgcaatccctatcaaaattccaaaattggctggacgtagtggctcaagcctgtaatcccagcactttgggaggctgagacaggaggatcacgtgagcccaggagtttgagaccagcctgggcaacgcagggagaccctgtttytacaaaaaaaaaaaattaaaaattagccaggtgtggtggcataagcctaaagtcccagccactggggaggataacctgagcccagaagttcgaggttacagagagctactacattctagcctgggcaacagagtgtgaccctgtctaaacacacacacacacacgcgcacacacacacacacacacacacacacacacacacaaaatccaacattatttttcataaaaatagaaaaataatcctaaaattcatatggttaaaacattttaaatggttcaaaataaaaatcagaagactattttgtgatatgtaaaataatatgcaacaaattttagtgttccttaatatttttggaatacagccatattcattcatttatctattatat

SEQ ID NO: 785870 - DNA, 605 bp, Homo sapiens
ttgcaatgacaatccaggagccaattaggttggatggtctctggtacatacagcaaacctaacgatatgtacctaaaaaagatagttctactctaacttagattccagagaaagaacagttatccctacctgtgtaacaaacctgcacatcctgcacacgtacctcagaacttaaaaaaaaattaaaaataatttttaaaaaagaacagttatcccaaataacaattttaagaaattaaaaattgtatcatcagccgggcatggtggctcacacctgtaatcccagcactttgggaggctgaagtgggtgtatcacctgaggtcaggagttcaagaccagcctggccaacatggtgaaaccccatctctactaaaaatacgaaaattggctggacacggtggcgcatgcctgtaatcccagctakttgggaggctgaggcacgagaatggcttgaacccaggaggtagaggtttgcagtgagccgatatccagactgggtgacagagcgagactagtcttaaaaaaaaaaaaaaagtatcaacatattagggtcatcagggtttactgaaaacaatgctgagatgttgcttaagacttttttgtc

SEQ ID NO: 785871 - DNA, 536 bp, Homo sapiens
actgcggccccacgtcgctgaccctagcggggatcccctcggccgccgggaggggatcccggaactggccccggagtgcgcgtgtggccgcggcggggaggggcgaggcggggagtttccgccgccccgcgccaagagggcgggagggcgacacagcggctaggagcggtccccgaggccggccagggacccagcctcctccgccactaccaacccgcgttccccacgcgcgccgccgccagttggccccgcgcgttctccaggtggaggccaggaggcagagaaccgcgggcccgggggccacccgtcactttcaagtcgccccgccagaagcccagggcgaggaaaaggagmgagacaaaagagcgctgcggggggagtccccacaccccccgcggccccgcacacggcccggctcttactcgtagtggcggaagatctcgttggtgactttacagtagaaaacttcctcgtcgggccgcaggtccgcgggcggcttctgtctcacaaacggctttcggtgtagcagcggcatc

SEQ ID NO: 785872 - DNA, 627 bp, Homo sapiens
gagttgcagagagaggcaggactttgcggcctaacagcctgggtcagatcccaattgcaccccttgcccattgtatctgaacttgggccagacccttggcctctctgagcctcagttttctcatctgcacactggggatcatgacacctacctctcaggttgtttggaagactagagggcagaaggtgcaaagtaaaggcacctgcagaaaggagaagaaggggccccatccctaactttcccttctaacctgccaccaaggcatccagctctcctgatgtcttccatcttctcaggaatgctgagcaggtttgatctcggggatagcagagaccagcactaggctgtccctttattcactgcctcttgtattcattgaatggctattactgagcacttactgtgtactctgtctagtgccaggtcctggggatasagaaatggagaagccccatgccttgctttcaaatgtttattatctagaaaggagagagatgtgaacaatcgctgagtgtgcaggtggtgggagacacacatcacaagagcccacagaagaacagggagggccacccttctataaagcagagggtttgggtgccaggatccaaggaacctttccacctgctg

SEQ ID NO: 785873 - DNA, 550 bp, Homo sapiens
ccgtttgtcactgtagcctaaagaatggtcatcattaggctgggcgtggtgactcacgcctgtaatcccagcactttgggaggttgaggcgggtggatcacgaggtcaagagatcgagaccatcctggccaacatggtgaaacaccgtctctactaaaaatacaaaaattagctgggtgtggtggcacgcgcctgtagtcccagctacttgggaggctgaggcaggagaatctctcgaaccaaggaggcagasgttgcagtgagcccagatcatgctactgcactccagcctggtgacagagcgagattccatctccaaaaaaaataaataaataactggtcatccttgttctcttaggtccagcacttagcagtttgcagaacacattcacaagtctttcctatgactgcagggatggggacagattggactgtggcctcagtgtcatggttgagggaactgaggcccagagggcagcctagtcattagctgtgtctcctgccttctcacaaagtggtcaccagtgtcatttcccacctccaggtatta

SEQ ID NO: 785874 - DNA, 491 bp, Homo sapiens
ttctgaaattgtgagaagtttccaaattttataagaatatcagcttaacaaaaattcttaaattatttctgtcacttttcctaatagtcaacataaaaaggcatatttctttccacatggattagtcgctctccataatttccaacagaattcttaagcctaggtcagggctgaggaaacaattgggaggccaaatctgcttcaccaccatttttttatagatcaagttttattgaagcacagccagttattcacttacatattaactatagctgctttcacaatacaagggcagagttgactagctgcaarggcacagatcatatggcccacaaagcctaaaatattcactatctgatcctttacagagataagaggtgtcatggcaataaacaaaagtgggttcatatctcaaatctcatatcacaatacattccaaatggataaaagactgaaatgtcaaaagtgaattaatgggcggggcacagtgg

SEQ ID NO: 785875 - DNA, 655 bp, Homo sapiens
gcaatatcaattaaatttataaatgcccataaccttaaacgtagcagttccttttctagtaatttatgctgcagatatattcctgtggttaaaaatgagttgcatatgagattattcagtacaaaagattggaaacaatcagtatatgaatgatgaaataatggggcatgtataccccatattttggtatgtatatatcatagaattctcaaacttgaccatacagcagaattacttggaaggtcttgttaaaatacatattgcttcatttccagagttactgattcaggaggcctagggtaggacccaagaatttgcatttctagcaacagatgaaaccgatcctgctgggtatagggaacccacttatctgtgtaattaaatattatgtagccttagacaataaartcaaagcattttatggttttgaggtcctaatgaggggaaaaagcaagatacacaacagtgtatatagtatgctgcaatttgtattaaaaagggggaaagaataagaatacgtacatgtatacacatccacacactacactcattcatttgcttgtatttgcgtaaatatacataggaaagataaacaaactgataataataggtgtctttgaagaggaagactctggcagggagacaagtttaaaat

SEQ ID NO: 785876 - DNA, 592 bp, Homo sapiens
atgttccagaaactgacccttatggaaatgaaggtccatgattcagtttggattccaagtaggaaaagaggttttaaaagttcctttccattgtctcagtgagaagaccactaaagagttcaagttaaagaaggaaagrttcggtgctgtacaaccttaaggttagcaagcaaagactaaaaggtatctgctaccagtaatgagggcttaatgacagaaatggacagtcttgtccgaccagcttacgtgggtgaggtcaacctagttatgcactgaaactatacccttacccactttcagtaaaggtgtttaccagctccgtagtgagaggagatctgtgaatttggtgtctgatgtcactgcatggccttgtgtagtttgttcagtgcaactaagtacattctagagtgtgtccttagtcaatgtcagccaatgcttttatcaccatcataaggtcttgagtttcgaaaggtcttcaggttcttctttacagacacctaaagtgattggccctgcctgaccgtggtcaagatgctagcggctaaagtgggcaaagccaggtaaggagatgattcacagggttctgccttca

SEQ ID NO: 785877 - DNA, 592 bp, Homo sapiens
atgttccagaaactgacccttatggaaatgaaggtccatgattcagtttggattccaagtaggaaaagaggttttaaaagttcctttccattgtctcagtgagaagaccactaaagagttcaagttaaagaaggaaagattcggtgctgtacaaycttaaggttagcaagcaaagactaaaaggtatctgctaccagtaatgagggcttaatgacagaaatggacagtcttgtccgaccagcttacgtgggtgaggtcaacctagttatgcactgaaactatacccttacccactttcagtaaaggtgtttaccagctccgtagtgagaggagatctgtgaatttggtgtctgatgtcactgcatggccttgtgtagtttgttcagtgcaactaagtacattctagagtgtgtccttagtcaatgtcagccaatgcttttatcaccatcataaggtcttgagtttcgaaaggtcttcaggttcttctttacagacacctaaagtgattggccctgcctgaccgtggtcaagatgctagcggctaaagtgggcaaagccaggtaaggagatgattcacagggttctgccttca

SEQ ID NO: 785878 - DNA, 592 bp, Homo sapiens
atgttccagaaactgacccttatggaaatgaaggtccatgattcagtttggattccaagtaggaaaagaggttttaaaagttcctttccattgtctcagtgagaagaccactaaagagttcaagttaaagaaggaaagattcggtgctgtacaaccttaaggttagcaagcaaagactaaaaggtatctgctaccagtaatgagggcttaatgacagaaatggacagtcttgtccgaccagcttacgtgggtgaggtcaacctagttatgcactgaaactatacccttacccactttcagtaaaggtgtttaccagctccgtagtgagaggagatctgtgaatttggtgtctgatgtcactgcatggccttgtgtagtttgttcagtgcaactaagtacattctagagtgtgtccttagtcaatgtcagccaatgcttttatcaccatcatarggtcttgagtttcgaaaggtcttcaggttcttctttacagacacctaaagtgattggccctgcctgaccgtggtcaagatgctagcggctaaagtgggcaaagccaggtaaggagatgattcacagggttctgccttca

SEQ ID NO: 785879 - DNA, 544 bp, Homo sapiens
catggttgctatgattgtcttgaacaaattgctatctgttagaccaattaagattaagaaaaataaaaatttttattttacctttacttgttcattctctcatgctcttcctttatgtagatctgagtttctggcctacatcattttccttctctttaaagaacttcttttaatatttcttacaagatgggtctactggcaacaaattatctcaagttttgtttgagaaaatatttctcactcgcttttgaaggwtacttacggaggttacagaattttaggtgctttggttttttctttcaatactttaagtatttctctccatgcctcttgcttgcatggtttctgggaaaagtcagatataattttatatttgctcttctataggtgaggggtgttttcctttggcttctttcaagtcatttttctttacctttgattttttgaagtttgaatatcacatgccttggtatagtttttgtttggttttgggttttggtacttatcctggtttgtgttctctgaatttcctgactctgtggtt

SEQ ID NO: 785880 - DNA, 531 bp, Homo sapiens
tttaattcttggggatccgtgaggaaagcagaagtttttttccaaaacagggtcaatggtgcctcctctgctttttccagggagtcccaggccatcagaagttatcttagggcctctcatgcgtgcataaagagtagcaagacaaaattgagaaaaataatgcagttggctgagaagaacaaaactctttttcagtgaaacaagatccaagaagagaaaaacataaaacccttttaaatatacctatagcatggctatycacttttaattaagctgacttttaaccatagcactctttaagaaaatccttttaaatctcttgttacctgactttagccataccaagtggccaatatttctggcttttgaactttaccaaaagtaacctctcaggtgaaaccaacaaaccttaactaaggtatgatttaacagtgagtgtacaaggtattttcaaagagctggtaagcagtttttacaaaatctagaatctttaaaggtagttcagagaaaggaagatttaagaacggaagc

SEQ ID NO: 785881 - DNA, 531 bp, Homo sapiens
tttaattcttggggatccgtgaggaaagcagaagtttttttccaaaacagggtcaatggtgcctcctctgctttttccagggagtcccaggccatcagaagttatcttagggcctctcatgcgtgcataaagagtagcaagacaaaattgagaaaaataatgcagttggctgagaagaacaaaactctttttcagtgaaacaagatccaagaagagaaaaacataaaacccttttaaatatacctatagcatggctatccacttttaattaagctgacttttaaccatagcactctttaagaaaatccttttaaatctcttgttacctgactttagccataccaagtggccaatatttctggcttttgaactttaccaaaagtaacctmtcaggtgaaaccaacaaaccttaactaaggtatgatttaacagtgagtgtacaaggtattttcaaagagctggtaagcagtttttacaaaatctagaatctttaaaggtagttcagagaaaggaagatttaagaacggaagc

SEQ ID NO: 785882 - DNA, 480 bp, Homo sapiens
taagcgtatttgagtggatgcccagctttcgtttctgatgatattttagatttacaaagataaatcttaatcatttccttgttacttttgtaccttagtgcagaaagaataagctggatttctctgtgtatgagtctcttcaaaacattgttcctccaccccacccaattataaaaagraaatacaatcaagcatcccatagcaacattttggtcaccagtggacccacatatatgacagtggccccataatattgtaaaaccatatttttactgtaccttcccaatgtttagatagacaaatacttaccattgtgttctgattgcctgcagtgttcagtacagtcacatgctgtacagggttgtagcctaggagtagtaggctatataccatgtagctaggtgcatagtaggctataccatctaggtttgtgtaagtacaccctatgatgttctcacaacaacaaaattgcctcaccac

SEQ ID NO: 785883 - DNA, 666 bp, Homo sapiens
tgtagctcctctagggtgaagaggccaaggccctggacaaatgccccttccacctgcaggatggatggagagcacagttagcctgccaccttcttccctgaggacagataccacttgccacaatggacacaaagcgccaactgcagcgcggcctggaatgtagctaaaactgccctctattgcttacctggctcccgcctcagccctgggataacccatccggacttctgccaggctttggctcaggcagagcaaagacattaacacggaaggtcagtgattctaggtgggcatgtttcccactacaacctgccgcagtgcagatggagatgttccttccatgttgctactggggaaatggtgagccaaagctaagaagcaagctcacaggaggatttattcgatagtagattctttgagacttacctccagcctttttgaacgcccacccctgcctgtcctctgggagaaagtgcccccactgcagttcagcttacaggtctctcctagggtaactgccatgmtagacaggcccacacatctgctctctcagccccctgctcagaagcgtgacatggggcactaccatacctcaacgagcattcagaaaagaaaccgactggcaatcatctttgggtctgcagtactggcttggtgcctggccac

SEQ ID NO: 785884 - DNA, 669 bp, Homo sapiens
tattttattttatttatttttttgagactgagtcttgctctatcgcccaggctggagtacagtggtgggatcttggctccctgcaaactccacctcccaggttcaagcaattctcctacctcagcctcctgagtagctgggattacaggtgcatgccaccacacccagctaatttttgtatttttaatagagacggagtttcgccatgttgtccaagctggtctcgaactcctgatctcaggtgatctgcctgcctcggcctcccagagtgctgggattacaggtgtgagccacaggtcccagccctatttcacctattcttcatagtaatcccatattctcytaaagcgattttctctgggacctccctttactacttctgcttaagcctttgtgttttgctcccagggccttccaccactccatgtttggcagcatctgcttcctggggtacaaaagctgtcctaggtggaggaggaatgagaagacagaaaactcttctgacctcagaccccactgtctgggcattgatcccaaactcaatccccattctacgttgtgctcacactcaaattgggtgtgtgtgcatgttcacatgtgcatgccatgtttcctcatttctcatcttgtttttgagttgtgagtgcccttcccaagttgacccatatt

SEQ ID NO: 785885 - DNA, 669 bp, Homo sapiens
tattttattttatttatttttttgagactgagtcttgctctatcgcccaggctggagtacagtggtgggatcttggctccctgcaaactccacctcccaggttcaagcaattctcctacctcagcctcctgagtagctgggattacaggtgcatgccaccacacccagctaatttttgtatttttaatagagacggagtttcgccatgttgtccaagctggtctcgaactcctgatctcaggtgatctgcctgcctcggcctcccagagtgctgggattacaggtgtgagccacaggtcccagccctatttcacctattcttcatagtaatcccatattctcctaaagcgattttctctgggacctccctttactacttctgcttaagcctttgtgttttgctcccagggccttccaccactccatgtttggcagcatctgcttcctggggtacaaaagctgtcctrggtggaggaggaatgagaagacagaaaactcttctgacctcagaccccactgtctgggcattgatcccaaactcaatccccattctacgttgtgctcacactcaaattgggtgtgtgtgcatgttcacatgtgcatgccatgtttcctcatttctcatcttgtttttgagttgtgagtgcccttcccaagttgacccatatt

SEQ ID NO: 785886 - DNA, 614 bp, Homo sapiens
actcaccgcatgggccaaggttccattccttggaatccgtgaggccaagaaccccaggtcagagagcaaaaggcttgccgccatcttgggagctctaagaacaaagacccactggtaacactatgacaggtatataacaggtatatataagtgttagcctacttatcaaattagaagggataaataaaaacagattgtcaattctcaggcccattctaagaattcttatgtccattctataagtaagttagcagcrccaaaagtaacaatgaggtggggtgcagtggctcacaactagcactttgggaggccaaggtgggaggacagcttgaggccaagagtttgagactagcctggacaacatagcaagatcccgtctctatgaaatttttaaaaatagccaggcatggtggtgcacacctgcatttccagctacacgggaggatgaagtgagaggattgtttgagcccagaagtctgaggttacagtatgctgtggtcatgccattgcactccagcctgggcagcagagtgaggccctgcaagttaacaatgagttaacataaatatttcttggatggatgaataaatgaatgaatgaatatgggattgctc

SEQ ID NO: 785887 - DNA, 555 bp, Homo sapiens
ctggtgtacaatcattgacaagacaacatccatgccttagcatctctggggccttgcccagggtctcggctataggaggttcccagtagacattttgcagaatgggagggaagatggggagaggtgaggatccccaagcagcagacaggtttgagcgccttttgtctgagacactctcccggctttgcctaagtcatcactggctgttaactgggtctaagaaagtggcagagtcaaattgccacagatgattcctcatctgagggagacagtaagaccgggagaggcagatcgctcttctttcttatcctccatgtgcagtagttccctctccccactcatgtcagcaactgaatttagctcatgcgtcaaaagctgtctccccttgagggagtgtcagccagygctgtaggaggggtcataccacagggaaccctccagaaccaaatcatgtacttttcttctttctcataaaatccagtaaacagttgtttttaattggaaaatatagaaaagaataaatttaaagaagaaaaaaagtcacccataatccca

SEQ ID NO: 785888 - DNA, 614 bp, Homo sapiens
attgaccgagggatatgacacatggaggtggcatagtcatgcgtcatctgtccatactccaagagggcacagggcaacaagaaatactagaagacagtcagggcaccactgctgccattgaggtgggatctggtcatctcctagggcctgtgaccctgagtcctgcagtcctgagctgccagggtaggggaggtggagatcaacccatggtcccacagtgaagtgtgtcccagctttagcaaaccaaggtatcctcccactgtgcattcctctcctccccaagcctgctcctccagcagctccccactcccctccttttgacttatctgagccaagccctgtccctaactagaaactcagaggtgatgaaaacaaagttttttcctcgcttyacttacttcctgtgaactcgcttaattgttcccagattactaggtcaccaggaggatttggtaccttggatttttttttcttcttcttccttatgctttctggagacaacaagggtcacttggggtcctgccttgtgtggcaagggtatgctgatcggatttctctggaatccatttctgtggtgtttcttgagtgaggggatggactgagtggcctgggtg

SEQ ID NO: 785889 - DNA, 653 bp, Homo sapiens
gcaatatcaattaaatttataaatgcccataaccttaaacgtagcagttccttttctagtaatttatgctgcagatatattcctgtggttaaaaatgagttgcatatgagattattcagtacaaaagattggaaacaatcagtatatgaatgatgaaataatggggcatgtataccccatattttggtatgtatatatcatagaattctcaaacttgaccatacagcagaattacttggaaggtcttgttaaaatacatattgcttcatttccagagttactgattcaggaggcctagggtaggacccaagaatttgcatttctagcaacagatgaaaccgatcctgctgggtatagggaacccacttatctgtgtaattaaatattatgtagccttagacaataaagtcaaagcattttatggttttgaggtcctaatgaggggaaamagcaagatacacaacagtgtatatagtatgctgcaatttgtattaaaaagggggaaagaataagaatacgtacatgtatacacatccacacactacactcattcatttgcttgtatttgcgtaaatatacataggaaagataaacaaactgataataataggtgtctttgaagaggaagactctggcagggagacaagtttaaa

SEQ ID NO: 785890 - DNA, 557 bp, Homo sapiens
gtgaaacctcatctctactaaaaatacaaaaattcgccaggtgtggtggtgcgagcctgtcgtcccacctactcatgagatcgaggcaggagaatcacttgagaccgggaggcggagactgcagtgagccaagattgtgccactgtactccatcctccgtctcaaaaaataaaaagtaaatttcatagaagtagggaccctgtcttgttttctgtaatatctttgtgcaatttgatgaattttaagaaatgaatacatttgtatagwtactatctggatcatgatatagaacattacaagtcccccaaaacctcccttcgtgtccattcagaccctaccagaagtaactggtaatctgacctctaacattgcatattagttttgcctgtttctgaaaatcctgtagatggaatatagtatgtactatcttgttcattcttgttcattgctctcatattccattatatgaatatgtcacaaattgcttaattgttaaggacatttagatgactttcactttttagctattataaataaaactacttctgaacattctt

SEQ ID NO: 785891 - DNA, 552 bp, Homo sapiens
atacacaaaaattagctaagtgtggtggcacatgcctgtagtcttagctactcgggaggccaagggaagaggatggatcacttgagcccaggagttggagggtgcagtgagctaggattgtgcccctgcactctagtgtgggtgacagcaagactctgtttaaaaaaaaaaaaaaatgaggccgggcgcggtggctcacctctgtaatctgagcactttgagaggccaaggcgggtggatcacctgagttcaagatcagcctggccaacatggtgaaaaccccgtctttatacttaaattacaaagattagctgggtgtgatggtgcacacctgtaaccccagctactccagaggctgagacagcagaatcgcttgaacccgggagggggaggttgcaatgagccragattgcaccactgcactccagcctaggtgacagagcaagactctgtctcaaaaaaaaaagaaaaaaagtctaagaagttaattttcattcagacaaatgttcaaaaataatagaaataaaacaaaaaattaattttcaaatatgt

SEQ ID NO: 785892 - DNA, 594 bp, Homo sapiens
tgacccttatggaaatgaaggtccatgattcagtttggattccaagtaggaaaagaggttttaaaagttcctttccattgtctcagtgagaagaccactaaagagttcaagttaaagaaggaaaggttcggtgctgtacaaycttaaggttagcaagcaaagactaaaaggtatctgctaccagtaatgagggcttaatgacagaaatggacagtcttgtccgaccagcttacgtgggtgaggtcaacctagttatgcactgaaactatacccttacccactttcagtaaaggtgtttaccagctccgtagtgagaggagatctgtgaatttggtgtctgatgtcactgcatggccttgtgtagtttgttcagtgcaactaagtacattctagagtgtgtccttagtcaatgtcagccaatgcttttatcaccatcatagggtcttgagtttcgaaaggtcttcaggttcttctttacagacacctaaagtgattggccctgcctgaccgtggtcaagatgctagcggctaaagtgggcaaagccaggtaaggagatgattcacagggttctgccttcatgtctcttacccatg

SEQ ID NO: 785893 - DNA, 594 bp, Homo sapiens
tgacccttatggaaatgaaggtccatgattcagtttggattccaagtaggaaaagaggttttaaaagttcctttccattgtctcagtgagaagaccactaaagagttcaagttaaagaaggaaaggttcggtgctgtacaatcttaaggttagcaagcaaagactaaaaggtatctgctaccagtaatgagggcttaatgacagaaatggacagtcttgtccgaccagcttacgtgggtgaggtcaacctagttatgcactgaaactatacccttacccactttcagtaaaggtgtttaccagctccgtagtgagaggagatctgtgaatttggtgtctgatgtcactgcatggccttgtgtagtttgttcagtgcaactaagtacattctagagtgtgtccttagtcaatgtcagccaatgcttttatcaccatcatarggtcttgagtttcgaaaggtcttcaggttcttctttacagacacctaaagtgattggccctgcctgaccgtggtcaagatgctagcggctaaagtgggcaaagccaggtaaggagatgattcacagggttctgccttcatgtctcttacccatg

SEQ ID NO: 785894 - DNA, 406 bp, Homo sapiens
ccccaggaggatgtgtggcatctacacacttgttcattgcacccgagaaggtggaacgtggaaagacgaggccatggtagcttcgacggttccttccggagggaccagatgggccaaggacccagctgccatgaggtggccggagagarggcccagcagcgtgagggcttcctggaggaagagggcccagcagcatatgagggcttcctggaggaagagggcccagcagcatatgagggcttcttggaggaagagggcccagtagcgtgtgagggcttcctggaagaagagggcccaacagtgtgtgagggcctcctggaggaagagggcccagcagcctgtgagggcttcctggaggaagagggcccagcagcgtgtgagggcttcctggaggaagaggatgttc

SEQ ID NO: 785895 - DNA, 509 bp, Homo sapiens
ggtaagtgctttaaggaagtacacaaggggctgaaacagaatatcattgggatgaggggcaggaatctactttagataaaagatcaggaagaacctctctaaggagataacattttaggcaaaactgataaaccagtcacgtaaagcatcccaagcagaaggaacaacagaggcaaaggtctatgggtagagaagaactgttagttcaaggcattaaaagacagccagtcttttggctggagagtaatgagacagggaaaaattgtttatctaaaaaaatgaagaatttggcaaaacaaggcgagagtgtgatcrtggagggtcctgctgagcacagtaaggagtctgaatgtcattcccaatgcaacaggaagtcaatcgaaggccacaagcagcagttaaaatgatctgacttatgctttagcaaaggccaagaaacacgtctgtcatctaggtcaaaatgactgtccagccaaggtcagtaacctcatgcaaaggccatacctccg

SEQ ID NO: 785896 - DNA, 622 bp, Homo sapiens
tctgggatgactctactgatctcctgtatctataagttagctgggtgttacaagctgagctaagcttggatcagataggcggctctgcctcaagttactctttgggtgagtttgcctctgggtgctggattgagttctggtctgcttctgtgttcattctgtggccctaggctgaagggcagtggctgtctaggaaaagrcttttaatagagatgataaaagcacaaggaagtggaaacacgtgagaactcttaaagctaaggctcagtagggacacactaccacttcttccctatttcattggccagggaaagccacactgtcaagcccaatatcagtagttaggaaaatataatcctcttttccgagtccatggcaagaatgtggatgcaaaatactatgtaaggaagtgaggaacgtggccaatacgtcagtccactatatcttccaactggaaactacgtttctgtggatatacatgacccattcctttataaaattcctcttggcaaagagtgctggctgttcaccaaacatcactttcctacccttcctggatatacagctaggacacatttcccagccttcttcgtacttagatgtgactatgtgactggttttg

SEQ ID NO: 785897 - DNA, 622 bp, Homo sapiens
tctgggatgactctactgatctcctgtatctataagttagctgggtgttacaagctgagctaagcttggatcagataggcggctctgcctcaagttactctttgggtgagtttgcctctgggtgctggattgagttctggtctgcttctgtgttcattctgtggccctaggctgaagggcagtggctgtctaggaaaaggcttttaatagagatgataaaagcacaaggaagtggaaacacgtgagaactcttaaagctaaggctcartagggacacactaccacttcttccctatttcattggccagggaaagccacactgtcaagcccaatatcagtagttaggaaaatataatcctcttttccgagtccatggcaagaatgtggatgcaaaatactatgtaaggaagtgaggaacgtggccaatacgtcagtccactatatcttccaactggaaactacgtttctgtggatatacatgacccattcctttataaaattcctcttggcaaagagtgctggctgttcaccaaacatcactttcctacccttcctggatatacagctaggacacatttcccagccttcttcgtacttagatgtgactatgtgactggttttg

SEQ ID NO: 785898 - DNA, 426 bp, Homo sapiens
ttagatcaagcttactaacacaattgttcaaatcacctgtattccttaaaaatatttaatctacttagttctcagttattgaaagaagtgtgctaaaaatttacaccaagataatggatttgtcaatttctgcttataatttcatcaaatkttgtttgacttatatttcaccaattcttaggagtagcccctagagaagaaatgtcagattacttttagttagatggcagtggaaatgaggagaaactgggaataatattttcaatgtgttgggaaaaaaattcatagaattttatgcccagctaaaacatcttttaagaaagaggtgaaaaaaggcatgttcataaaacaaaacatctaaaatatgggtttacccccagcagaatgttacaaaagattgttcagcaagtcctttagatagaaata

SEQ ID NO: 785899 - DNA, 458 bp, Homo sapiens
aactagttgagtatcttccacaacttcaggtggcagaacaagagtataaagagaaaagaagaaagttagaagagctcagtaatattattacaggtacatatgaagcatttagtaattaaactcaatcccaggtaaggatttcactgtcatcttctaacacaaggaggtcatcagttacaagccaatggtgaaactcaccaaactttccccattacctttagccctctgttctctagtttttgcttcacctactaatttctcctccacactacmatcttaccattgctattgtcaaaattttccttttctcttttaaaaactatttaagacttagtcctttaccatattattttctttctctccatacttgggaaaggtagaactaactcatttgtttgctaccatgtggaattttttttgtattttcttaccgtgaatttgcaaattatatctctttt

SEQ ID NO: 785900 - DNA, 458 bp, Homo sapiens
aactagttgagtatcttccacaacttcaggtggcagaacaagagtataaagagaaaagaagaaagttagaagagctcagtaatattattacaggtacatatgaagcatttagtaattaaactcaatcccaggtaaggatttcactgtcatcttctaacacaaggaggtcatcagttacaagccaatggtgaaactcaccaaactttccccattacctttagccctctgttctctagtttttgcttcacctactaatttctcctccacactaccatcttaccrttgctattgtcaaaattttccttttctcttttaaaaactatttaagacttagtcctttaccatattattttctttctctccatacttgggaaaggtagaactaactcatttgtttgctaccatgtggaattttttttgtattttcttaccgtgaatttgcaaattatatctctttt

SEQ ID NO: 785901 - DNA, 617 bp, Homo sapiens
aagttcaaataaaagccactaattacccaaaatcctaccacccagagttaatcgttgttaagatttgctgaatattatctagatattgcataaaaatgaaactaaagggctaggtaggcaacaaaaacagtgttgataaaataagattgaatatgttacaaaaagtatttaaaataatttaacggaagaagtggacatgaaactgaaagaattgtggaacgtcagatccatgtttctttactatatgagcttttctttcctggaaattgagaaaaagactagataaacatcaaaaggtttgaatcatttttagttacatgttgcagttttagaccctacagakggacactctgcagtgtccaacattttttttaaagattcattgtgggttagaaaggttgacgaaatactgatctaaatttacatcttcaaatctattattgttctcagatttctgtgaatacttgtttcattaaaaaacgataatcctaatattctatgacaaaaatattatgattactatatatcaatagggattgtggatgacatcgtccattatagttaccaggcccttccttcttcatcatttttaaaaagtctctctttccctccttccc

SEQ ID NO: 785902 - DNA, 457 bp, Homo sapiens
tgtgtgacggggcctcccagaccccaggatcctcttcctgggggcggggcttgggcactgggttcccacagatagaatagcttagagctcaagggtgagccagctgcctgggttcaaatcctggctcagccatttagaattgggcaagctattccagctgtactgtggtcctcactgtaaaaagctataatagtagaagtgtgtaagaatacagtacctgggcctagttcggggctctgatcagctcctgtgccatagatcccttttttattatacatttagattcatgtgtgtgtgtgtgtgtgtrtatatatatatatatatatatattttttttttttttgagacagagtctcgctctgttgcccaggctggagtgcagtggggcaatctcagctcaccacaacctccacctcccgggttcaagcaattctcctgcctcagcctcctgagtagc

SEQ ID NO: 785903 - DNA, 606 bp, Homo sapiens
acctggatcccacacctgccaagggttagccaggtgtggagcggcgaggttgtgtgggtgaccaagcgcagggtctggtcaccacgcacagcaggcatgctggctgactggctactatggcagggtggttagctccaggcactggtacaggtgctggctctgtgtgaggctgcagatggaccagatgtaccgcacgcagcttctgctctgagcaactgcgtctggatgagggaaacacagaggcgcccagaaacctggagaaactgggaaccgcagagccccacagagggtgtcacatccctggctcaggagcaactasgtctgggctcttggaagagccacagctcttccctccttctcgtttcccacaacatggtgagtgggggcgacgtgtttcagccccgtttgtgttacagctctttgagtcctgccattcaggtcccaggttcttgtttcccatccaggaagaatgaggttaagtggacaactggagggtaagcaaaggggaagaggagctccattgagtgacagaacagctctcaggagacccaaagtagtagctcctttctgcaggcggcctgatgagtgtccagctctcagcagaga

SEQ ID NO: 785904 - DNA, 581 bp, Homo sapiens
ttaaaggttatatttcattggaatggagcaaattttgcccccttagtatggggatatgcttcatcaaataactgagatgctgtggtattccatggagatgaaatcagattgtagaagaagcttgcccctatcttctacagggctgaactgttcttggaaaagasaatattttctccttgaaattcttacaataagaagagatgtgcaggttgaacgaaataacgagtataaaacaatacctaacactagtaaaatgatgtactactacatcgagatctaaatgtttgtcatttatagaccaaccactagatggagagcttgtcttaccactgagtatcaggtacttctacaaaatttcaaagcaaggattattaaatttaaacttctcagcacatttaacattcatagaatgtggcatccattgctgtcgcagataattaatgtccagttttatgattatgaaataatttacagctaaatagaaatacctatcagttacatgcaaaaaaagttttgtgaatgttgggtgcctaagaaaatagatcataagaaaagaggttataagaaaagatgctaattgt

SEQ ID NO: 785905 - DNA, 624 bp, Homo sapiens
ttgcattttaaatgttgacagatattatacacttcttttcataaaagttgtaccagtttatattcctgccaataatgtgtgaatgtgtttcctacatcctttatgacataatatatcactttttggatcttactaattgaatagctgaaaatgatgtctcrgtgtagttttattttttatttttaccctcatcttctttgtgatggtacgtagttttatcttttatttctcttattatatttttataaacagaaatgtttacttttataaatatttttcatatgtttaaatccattgatatttatttttccatgaattgtttattcacatatggtgccaatttctctaatgcattattggtctttcattgatctgcaggagttctttacagagggaggaaattaacttattttctatgatacgtaagtattttttcagagtttgccttttgacttatcagtggtgacctttttttgccattcagttttatttatttttaaaaagtttccgtatggttgaatggctcaatattttcttttgtggcttctaatgctttgtgatatatctggaaaggccttgcctaatccaagattatttaaaaattatcccatgatctctttcttc

SEQ ID NO: 785906 - DNA, 559 bp, Homo sapiens
acttgagatagtgagaagtctgtgtcagaataatttttgtacttggaatcttggcctggtgtggtggccactttgggaggcagaggcaggaggatcacttgagcccaggagctcgagaccagcctggccaacatagcaggacccccacctctgtaaaataaaataaaaaagaatatttgtatttagaatctttctgatgtctaatgacaggaaaaaatctaactcaaagtggcttaagccactttgaggaaagtgtaggaacttgtatggtgatctctttgtggtgggtgttctggttccaggacccctgaggataccaaaatccaaggatgctcaagtcccttatataaaatgtagtatttgcatataatctatgcacatcctcccctataatttaaatmaactctacattaattatacctaacacaatataagtaaatggttgttatgctgtattatgttttattcttttaaaaaatatttttgatctgcagttggttgcaggaacctgaagatacagagggctgactgtatgttcaagtaactgggaattcaggct

SEQ ID NO: 785907 - DNA, 637 bp, Homo sapiens
tgcaggtaagggtttttaaaggcaagggtaaatttcaggaaaggaggaattataggcaaaatcataaatcaatataaggaggttacacattggttttgacctaaaagcgtgggatatcttgaagtgagggcttacaggtcataggtatattcaaagattttctgatttgccattggttaatgaagagaagctttgcttgaaaatttggggtcagcagaaaagaatgttagctctggttcatgaatgtgactttcttcaggctcctcaggaagaaactgagaacaaagaatgacggtcagagttcagtccccagttcccttttatctgaggtctactgtggggacgagttgtttgttggggatctgggttcctgaaaaaaaaactcagagacatatgtgaagatgttatctttagtctctattggggaaccaaacatcttgtgattctagcttccttggctattgttttaggttactattttaccttyatgcttatcaagttgcttaacttctcaaggctagctaggtacctgcaatttctcttgaaagagctcaatattttcccttatttccatgcttgggaggcctgcaggccactgagaggaaagtctctgctgtgtctcacaagcactttggag

SEQ ID NO: 785908 - DNA, 519 bp, Homo sapiens
gggctccatggggtgggatccactgagctagacaacttggctccctggcttcatccccctttccaggggagtgaatggttctgtctcactgacattacaggtgccactgggggggggaaataacctcctgcagctaactcagtgtctgcccaaatggctgcccagttttgtggttgaaaccctgggccctggtggcataggcacccaagggaatctcccagtctgcaggttgcaaagaccatgggaaaagcatagtgtctgggctggagagcaccattcctcatggcacagtccctcacatcttcccttggctgaaggagggagytccccaaccccttgcacttcccaggtgaggtgacaccccaccctggttcggctcaccctccttgggttgcacccactctctaacctgtcccagtgagattagccaggtacctcagttgggaatgcagaaaccacccgccttctgccttgatctcgctgggagctgcagactggagctgttcctattcggccatc

SEQ ID NO: 785909 - DNA, 583 bp, Homo sapiens
tagaacacaatgaaataaaaattaagaataaaatacttctaaaccaaacatagcctgtcattgatcatttagcaagaacttcagtattttattatacttgaaggtcattgttatttgtatcattttttactgcgtattagaggtattaaatatatatcaggctgartctgtatggacttcataaaatatcctggaagttagattttaagataaatctgtgactagataatttatttaacagttggttctaaattattagaaaaacactgcaattcagagctattcaaggtctctaattcaagataaaatgagaatatgttgaaatgaaaaccttaaaatcagttatcacactggaaagatatgaaacacatttctcagtacacatggtggtcacttaggtgctgtacaattatctgcttgggttcagtcttcatgccaccacttggtatgaagtggtcatacaccacttggtatataaccttggacagggattcttgcttcttagtgcctcagtttccttatctgtaaaatacagattataataaaacctacctcataagttattctaaggattaaaataatt

SEQ ID NO: 785910 - DNA, 565 bp, Homo sapiens
gctctgcctgtaatgtcaggcagtggaaatgctctaggatgagagggaaagctgaaaatgacagaagggctgaaaacatgactcgacttgattagagcaaagagaagacattattgttgcagcacagaaagaagaggaataacgaatagggagacttgctgacaaaaatagaatcaagtgactagattggaagttttgaggtaaaatgcaatttcagttatagaaaacaagaatraagagaaaagcagataggatagaaggcaaaagaggaaagtttggaaagctttcattcataatcgtaattaaatattcaaaataccctacttatcccttattaatacaatataaaagaacatgctttagtattaaaatctaagtctgattttttaagaagtttataaactttgttcggaaagtttacatttcaaaggaaatgagatccagaaaaataacaatttagagcacttaacgataaagtaaaaggaaaaggtgttatttcagacacaaaaacttccattaatatctgaagatctctgtgctatagcagaaattgtgtagaataaaa

SEQ ID NO: 785911 - DNA, 665 bp, Homo sapiens
aagaggaaagtttggaaagctttcattcataatcgtaattaaatattcaaaataccctacttatcccttattaatacaatataaaagaacatgctttagtattaaaatctaagtctgattttttaagaagtttataaactttgttcggaaagtttacatttcaaaggaaatgagatccagaaaaataacaatttagagcacttaacgataaagtaaaaggaaaaggtgttatttcagacacaaaaacttccattaatatctgaagatctctgtgctatagcagaaattgtgtagaataaaatatcacatatgtatgtgtgtacatatatatatacatagcatgtataaaactaaataatttgtaacatgtctgcagctttcagagatcaaaaccaaataatatcttcgttgatttaaaaccttcttctcatgatttcaargcatgttattgcatgataaaattcatttgttacacctactcaggtggtaatacatgttatagcaattttgtagaaaaggaaattgagtatattttgtgggacttctctaacttaaagcaatgaatcaaatcaagcaaaaaagttatagtctcaagccagaagacccagttcaccaagtcttttctctctcttactttcaataactaaaactaatataatattgag

SEQ ID NO: 785912 - DNA, 634 bp, Homo sapiens
cctaggaaacgaaagcagatgatgtcacagtgtatgtacctactaaaactatgatgttgataaccagaatcatacattatatactatttttctatttggcttcatttactcagcatggtgattttgagattccatatagttccatgtatcaatagttcattcttttttatggctaagtagtattccattgtatggatatatctcattttgtttattyatttgcctgctatgcacattctggtacatgcctttgtgtggataatatttttatttctcttagctataaacctagagattgtctaagtcatatggtaggtgaatgttgacctttttaagaagttgccatgttgctctccaaagtagctataccattttacatttccatcagcaatgtatgagagttccagatactccacgttcttgtcagcacttggtgttgtcaaattttagtcactcttgtgggtgtggcatggtgtgtcattgtgttttttttaatttgtgctttcctgacaattaattatgtttggtatcttttcgtttttttagtagccattagtatttctcctttttgtgaaatgttcaagctattataaatgtatttaaaattttgaaatttccagttgatcactgcagg

SEQ ID NO: 785913 - DNA, 634 bp, Homo sapiens
cctaggaaacgaaagcagatgatgtcacagtgtatgtacctactaaaactatgatgttgataaccagaatcatacattatatactatttttctatttggcttcatttactcagcatggtgattttgagattccatatagttccatgtatcaatagttcattcttttttatggctaagtagtattccattgtatggatatatctcattttgtttatttatttgcctgctatgcacattctggtacatgcctttgtgtggataatatttttayttctcttagctataaacctagagattgtctaagtcatatggtaggtgaatgttgacctttttaagaagttgccatgttgctctccaaagtagctataccattttacatttccatcagcaatgtatgagagttccagatactccacgttcttgtcagcacttggtgttgtcaaattttagtcactcttgtgggtgtggcatggtgtgtcattgtgttttttttaatttgtgctttcctgacaattaattatgtttggtatcttttcgtttttttagtagccattagtatttctcctttttgtgaaatgttcaagctattataaatgtatttaaaattttgaaatttccagttgatcactgcagg

SEQ ID NO: 785914 - DNA, 634 bp, Homo sapiens
cctaggaaacgaaagcagatgatgtcacagtgtatgtacctactaaaactatgatgttgataaccagaatcatacattatatactatttttctatttggcttcatttactcagcatggtgattttgagattccatatagttccatgtatcaatagttcattcttttttatggctaagtagtattccattgtatggatatatctcattttgtttatttatttgcctgctatgcacattctggtacatgcctttgtgtggataatatttttatttctcttagctataaacctagagattgtctaagtcatatggtaggtgaatgttgacctttttaagaagttgccatgttgctctccaaagtagctataccattttacatttccatcagcaatgtatgagagttccagatactccacgttcttgtcagcacttggtgttgtcaaattttagtcactcttgtgggtgtggcatggtgtgtcrttgtgttttttttaatttgtgctttcctgacaattaattatgtttggtatcttttcgtttttttagtagccattagtatttctcctttttgtgaaatgttcaagctattataaatgtatttaaaattttgaaatttccagttgatcactgcagg

SEQ ID NO: 785915 - DNA, 592 bp, Homo sapiens
tctacaatcatttaaaacattcctctatatgtcattttccattggctgctttcaaggtttgctctttatccttggtttttagcaatttgatgctgtgggtattctgtgtttattatgtctctaagcatggtttgttttttttktttttaatttgtcttgtttggcgttcactgaacttctcgaatccataaatttatgattttcactaaattttaacaagttattggccattctttcttaccctattcttctctcttctcttcctgggattccaattacatatctgttaagagttttttatattgttccctggggctctaaggctctgttttttcagtctcttttttctctttctcactattcttcaaattggacagtttctattcatataacttcaagttcactgactctttcctctatcatctctatttttctattagggcataagatgactgcagctcacccttttataaaaaacctctaaattgaggccagacacagtggctcacgcctataaacctagcactttgggaggccaaggtaggtggatggcttgagctcaggaattcaagaccagcctgggcaacatggt

SEQ ID NO: 785916 - DNA, 592 bp, Homo sapiens
tctacaatcatttaaaacattcctctatatgtcattttccattggctgctttcaaggtttgctctttatccttggtttttagcaatttgatgctgtgggtattctgtgtttattatgtctctaagcatggtttgttttttttgtttttaatttgtcttgtttggcgttcactgaacttctcgaatccataaatttatgattttcactaaattttaacaagttattggccattctttcttacccyattcttctctcttctcttcctgggattccaattacatatctgttaagagttttttatattgttccctggggctctaaggctctgttttttcagtctcttttttctctttctcactattcttcaaattggacagtttctattcatataacttcaagttcactgactctttcctctatcatctctatttttctattagggcataagatgactgcagctcacccttttataaaaaacctctaaattgaggccagacacagtggctcacgcctataaacctagcactttgggaggccaaggtaggtggatggcttgagctcaggaattcaagaccagcctgggcaacatggt

SEQ ID NO: 785917 - DNA, 589 bp, Homo sapiens
aatgcagaaaaatatttcaaaagccgagtagaatataaaatctatacctaatcccaccacccagaacctattttagatgattgcactatgaaatgaaaagaattgaaggggaactgcgatttcctcctagaaataagacctgcagcaagcttgcagacagcacagctctccttcctgggtgccaggcagaccctaactgcagccccgcacacctgtctcgtacaggtgaggcaagggagaaccagagtggccgggctttccacgtgccacaaccaagacagtggcaccaataggaccagaaccagagtttcctgrctttctgtcaagtttccttcatacaggacaaataggagtaggtttgccatcatgcaatgaccattctttagtaaaagcagttgttgtgtttgactcatcatttacctattataagaagattggccaaaaaaaaaattatgtttgggacaggagaataattttgctctctgataaaatacctcagaagatgcccaggataattcatgtgtggaggaagaaaatattagaacttctgtttataattttatctttaaaaaaaaaacagaaatcatgt

SEQ ID NO: 785918 - DNA, 557 bp, Homo sapiens
tcagctcactgcaacctccacctccctggttcaagtgattctcctgcctcagtctcctgagtagctgggtagcaggcatgtgctaccacaccctgctaatttttgtatttttagtagagacggggtttcaccatgttgcccagactggtctcaaactcctgatctcagatgatccacctgcctcagcctcccagagtgctgggactaccaccacacccagcccttattagttaactttggaacctactgcagcttttgtgtatctggttctggttttaastaaactaaccctccacaaaattgacatgagcatttaacggattgttcaaaagaaactacagaatgcaaagcctggcaaagcagacacacatgaaccaggaaagggcagggccagatcatctcctcttcctcagccacactgtaagtaccatggttcgtctctcagctaaggttccactgcagacagcagaatcctctctagctggtttaaacagaaagcaatatactgccagttatgggtgctttatacaattccttcaatgggctggaggagcagg

SEQ ID NO: 785919 - DNA, 617 bp, Homo sapiens
agtatattctcagatccattatcagattttaatctcacaagtctgaccagaaaattcatgggagacctctatgactattcacatgtgggacggacattcagaaaatgcgttgcaaagagcatggaggcaaaggccaccaagaagtcgctggaatcaatggcagcctttgcaaaaacgttccaaattcttaacaaccatgacttatattttcacaacttagtttttaaggaccagatgactgagtctcaaatattgaaatttccagtaaacaatgaaaagtctaagtgttcagtgggttcaaaggaacacaccagtaacaaatatttagaaaaattaatgtcagataatttgatgggattttatagaagtgttggttctcacagatttagtaatgtttaagatgatggcccatgagttcgctttctggttccttgaataaaatgcccgacagtgcattgtcctatctyatctctgtgtttaggccactgccgtgcagaagcatcctttctttcataggcaggcaggcagcgtccacaggtgtgaatccagaagtcaatggcatctgcaccttcagaatatctacctgactttccctacaagactgaggtttcagaacc

SEQ ID NO: 785920 - DNA, 564 bp, Homo sapiens
cttttcacaggctaccatgtggtataaattagcatctaagcatctttctcagtttgttttctgctatgttgatggaatatcatggactgggtaatttataaaaagtagaagtttatttggttcataattctggagaccgggaagtccaagagcatagtgctggcayctggtgagggtcgtcccatggtggaaggcttcacgtggcaattgagaacacaagataaagagaaaaaatggaggccaaactttttttttaagatgaggtctcactctattgcccagtctggagtgcagtagcaccatcacaagtcactgcagcctcaaactcctggtctcaagaaatcctcctgcctctacctcccaaagtgctgggatcacaggcatgagacaccatgctcagtcgaacttatccttttagcaggagcccactctcacaacaactaacctactcccccaagctaatgacattaattcgttaatgaaggcagaaccctcatgaggtaatcacctcttaagggttcccgtttttaatacctttgcaatggcaattacgtttcaacatga

SEQ ID NO: 785921 - DNA, 564 bp, Homo sapiens
cttttcacaggctaccatgtggtataaattagcatctaagcatctttctcagtttgttttctgctatgttgatggaatatcatggactgggtaatttataaaaagtagaagtttatttggttcataattctggagaccgggaagtccaagagcatagtgctggcacctggtgagggtcgtcccatggtggaaggcttcacgtggcaattgagaacacaagataaagagaaaaaatggaggccaaactttttttttaagatgaggtctcacwctattgcccagtctggagtgcagtagcaccatcacaagtcactgcagcctcaaactcctggtctcaagaaatcctcctgcctctacctcccaaagtgctgggatcacaggcatgagacaccatgctcagtcgaacttatccttttagcaggagcccactctcacaacaactaacctactcccccaagctaatgacattaattcgttaatgaaggcagaaccctcatgaggtaatcacctcttaagggttcccgtttttaatacctttgcaatggcaattacgtttcaacatga

SEQ ID NO: 785922 - DNA, 564 bp, Homo sapiens
cttttcacaggctaccatgtggtataaattagcatctaagcatctttctcagtttgttttctgctatgttgatggaatatcatggactgggtaatttataaaaagtagaagtttatttggttcataattctggagaccgggaagtccaagagcatagtgctggcacctggtgagggtcgtcccatggtggaaggcttcacgtggcaattgagaacacaagataaagagaaaaaatggaggccaaactttttttttaagatgaggtctcactctattgcccagtctggagtgcagtagcaccatcacaagtcactgcagcctcaaactcctggtctcaagaaatcctcctgcctctacctcccaaagtgctgggrtcacaggcatgagacaccatgctcagtcgaacttatccttttagcaggagcccactctcacaacaactaacctactcccccaagctaatgacattaattcgttaatgaaggcagaaccctcatgaggtaatcacctcttaagggttcccgtttttaatacctttgcaatggcaattacgtttcaacatga

SEQ ID NO: 785923 - DNA, 574 bp, Homo sapiens
tccaagtcatgcactttccgaaccccctgcaaaaaaacccaacgccttgagtctcagttggctgagcttaccaccagccaagcccgcccgggcgtccgagccctggaagggagaaggactggctgggggaggggcggtgagcggacaggagtggggtgcggacgctgaggaggggagccgggcgcggyccccgggtgggcgcgctccctacctgcggcggccggcgggccggctggcgggcgggctgcggagcgtccagctcgcggagggaggaggccgactgctccgagccgaggcatccccgcatttatttgagctcaaaccaagcgactgttgactttagcacacaaagcaaagatttcactgcccgctagtttaaaaatgaatattttaccaagatatcgatcagcgttataaaattcagttaagtacaatgggatcctggcaaaaaaaaaaaaaaaagaataataaaggaggggggaggcaatataatatctgtgcaaatttgctgaagtgtgacgtggcatggaaagtttaccctcctggaattcggatctagaatgtttttttcggt

SEQ ID NO: 785924 - DNA, 546 bp, Homo sapiens
gtttaatactgtgtgcacctgcatgcaatttatctctccaccgcaagatccacaggaaaagatgaaacatacatttttaaaatgagaaaataaaatgaattaaataaatacgatgttagtaaccttgattatgtttgggtggtasaattatatcttcaatctatgtttttagaagtatgggtggtatcattttatatcactactttattattacattctcttttactattttatggtgaaatatgtaataaggatattggatctgatgttaaggaaactttggcaaaataacttgtgcaaatattcattcagttctcatccttgaaaggagatcagagaagccaccatacaaactgacgacaggtttgagttctgaaaaacaaggcattattattttgtcttactggtatcaggggatgaactgtgattttccctgagttgagagaggaagagaagaaatattcatgtcaaccacaggtattgacttaccagggtggtttctgcatattgtttaggggaaggagacagactctgtcctctgggtgg

SEQ ID NO: 785925 - DNA, 603 bp, Homo sapiens
acccaagaaggtgactgtatttggagatagataggatcttcaaagaggtaactaagtttaaatgaggtcatttaatggatggggcctatttaatattaggatgcagacacacacagagagaagaacgtgtaagatgtccatctgcaagacaaggagagaggcttcaggagaaagcaaccctgckcacactttgatcacagacttgtggcctccagaatggtaagaaaatacatttctgttgtttaagcctcccaggctatggtactttgttatggcagccctagcaattgaatacagagagtaatatacctattagacatacatgtcaatgttccctttacaggaaatgatgaactcagcagtaatttaataagagatgacttagaattgtaaattcttgcccactcatatgatgaatatttattggggaccctctgtggatgagctgtggcacacatgatctgctccctcacatgtacacctataaattcacccaacacatggtgatttgggttgctagatgagagtcaagcaaattgcttttgagagaggaggctcagtgaagtggcatttaagctgggtttggatgggagagacagaaga

SEQ ID NO: 785926 - DNA, 603 bp, Homo sapiens
acccaagaaggtgactgtatttggagatagataggatcttcaaagaggtaactaagtttaaatgaggtcatttaatggatggggcctatttaatattaggatgcagacacacacagagagaagaacgtgtaagatgtccatctgcaagacaaggagagaggcttcaggagaaagcaaccctgctcacactttgatcacagacttgtggcctccagaatggtaagaaaatacatttctgttgtttaagcctcccaggctatggtactttgttatggcagccctagcaattgaatacagagagtaatatacctattagacatacatgtcaatgttccctttacaggaaatgatgaactcagcagtaatttaataagagatgacttagaattgtaaattcttkcccactcatatgatgaatatttattggggaccctctgtggatgagctgtggcacacatgatctgctccctcacatgtacacctataaattcacccaacacatggtgatttgggttgctagatgagagtcaagcaaattgcttttgagagaggaggctcagtgaagtggcatttaagctgggtttggatgggagagacagaaga

SEQ ID NO: 785927 - DNA, 548 bp, Homo sapiens
gaatggaatggaatagaatggaaggaaatcaaatggaatggaggcgaatggaatggacccgaatggaatggagtcgaaagcaatggactggaatggaatggaatcgaatggaagggattagaatggaaaagaattcaatggaagacaataaaaaatactgggctggaattgaacgtactggaatggaatggaatagaatggaagggaatcgaatggaattgaaaggactagagtggaatggattcgaatgcaatggactcgaatggaatgcagtcraatggaatggaatctaatggaatgcagtcaagtgcaatggaacagaatggaatggactcgaatggaatggacttgaacgcaatggactggaatggaatggaatctaacggaaaggaatcgaacggaatggaattgaatttaatggaatggaatcgaatgtaattgaatggaggggacaggaagtgaatggtatcgaacggtatagaatggaatggaagtcaatggaatgcaattgattggaatggaatcaaatggaagggaattgaaaggaa

SEQ ID NO: 785928 - DNA, 548 bp, Homo sapiens
gaatggaatggaatagaatggaaggaaatcaaatggaatggaggcgaatggaatggacccgaatggaatggagtcgaaagcaatggactggaatggaatggaatcgaatggaagggattagaatggaaaagaattcaatggaagacaataaaaaatactgggctggaattgaacgtactggaatggaatggaatagaatggaagggaatcgaatggaattgaaaggactagagtggaatggattcgaatgcaatggactcgaatggaatgcagtcaaatggaatggaatctaatggaatgcagtcaagtgcaatggaacagaatggaatggactcgaatggaatggacttgaacgcaatggactggaatggaatggaatctaacggaaaggaatcgaayggaatggaattgaatttaatggaatggaatcgaatgtaattgaatggaggggacaggaagtgaatggtatcgaacggtatagaatggaatggaagtcaatggaatgcaattgattggaatggaatcaaatggaagggaattgaaaggaa

SEQ ID NO: 785929 - DNA, 573 bp, Homo sapiens
taactcgtcatttacattaggtatatctcctaatgctatcccacccccatcccccaccccacaacaggccccagtgtgtgatgttccccttcctgtgtccaagtgttcccattgttcaattcccacctatgagtgagaacatgcagtgttaggttgcttgtccttgcgatagtttgctgagaatgatagtttccagcttcatccatgtccctacaaaggacatgaattcatccttttttacagctgcctagtattccatagtgtatatgtgccacattttcttaatccagtctatcattgktggacatttgggttggttccaagtctttgctattgtgaatagtgccacaataaacatacatgtgcatgtgtctttacagcagcatgatttataatcctttgggtatatacccagtaatgggatggctgggtcaaatggtatttctagttctagatccctgaggaattgccacactgtcttccacaatggttgaactagtttaccatcccaccaacagtgtaaaagtgttcctatttatccacatcctctactgcacctgttttttcctgact

SEQ ID NO: 785930 - DNA, 573 bp, Homo sapiens
taactcgtcatttacattaggtatatctcctaatgctatcccacccccatcccccaccccacaacaggccccagtgtgtgatgttccccttcctgtgtccaagtgttcccattgttcaattcccacctatgagtgagaacatgcagtgttaggttgcttgtccttgcgatagtttgctgagaatgatagtttccagcttcatccatgtccctacaaaggacatgaattcatccttttttacagctgcctagtattccatagtgtatatgtgccacattttcttaatccagtctatcattggtggacatttgggttggttccaagtctttgctattgtgaatagtgccacaataaacatacatgtgcatgtgtctttacagcagcatgattyataatcctttgggtatatacccagtaatgggatggctgggtcaaatggtatttctagttctagatccctgaggaattgccacactgtcttccacaatggttgaactagtttaccatcccaccaacagtgtaaaagtgttcctatttatccacatcctctactgcacctgttttttcctgact

SEQ ID NO: 785931 - DNA, 602 bp, Homo sapiens
atatcagtcactatgacatcagactttttactctctgtgatagttatatatcaacttagctggagtatagtatcaagttattcaataaaacactaatctaggtgtcactgtgaagggattttgtagatatgattaacatctacatttagttgacactaagtaaaggagattttccttgataatgtggtcaagcctcatccaatcaattgaaaggcctgagcttttctagaggaagaagtaattttatctcaggactccagcattagctactgctggacaatcccagcatcccaacctgcccaacarattttagactagacttaccacctcatatgagcacatagcagattcccagaaatcaatctatctacctatgtatctatcaatctatcatctctctcctactgcttctgtttctgtagatgacactgacagatgtgaatattcacataaaagctgtcaatatgcatgttccttcctactacttgtaccaattaagcaaagagtgtaacggatgcatatttttctaaagaatttctgtatgtgttctccgattattggtcagaaataaaaatatgtttataatgcaaaattcataaaat

SEQ ID NO: 785932 - DNA, 642 bp, Homo sapiens
aattagtaaataacataagataaacgtgaatataatcagtaacattcttttccaatcaaggagtgacatgtagtgttacttgccacctcagttcagtgtgtgcccttactaaggaaccccactgggggtatgttaaccccttccagccaagcagttacgttattagaggctgggaagggggtgtccrcccaggtaatagggtggaagaaaagcagatttagaagatgggcccaatagagtgtagcaggtactggttgcaggcagagtgagggaattaaacaaggttaataaagcatagtaaggaataaattatctggagtgaatggtgtttgtgtccagagcaggattcgttcagcctcctgagttgtcttcttcagcatcccccaggtaatgtctggggcttgtgtcgtctgaggaagctgcatcatccagggctgtgggtcctgcagggacatttccttcatttctggtaccaggttgggtcctagccacaccatgttaaggtttgatgcgttgtgctggaatccaaagaggacctgaggtgatgtgaacacaaccatatcctcttccccatgttggcaactcatttggaccacaccatacattactgtttacatctttccataaaactgtgggttttat

SEQ ID NO: 785933 - DNA, 542 bp, Homo sapiens
acttttttttttgccctgcttacctgtttgtgttttttatataaactggttgccaatattttttaaatggggaccttttcattaaaatacaattcctggcttctcttggggaaaacaatgggaatgtggggccatcttgggaactgcgagggtgggtcacagcactggctctgagtatctgccagccagcgttcccatcccaggcccatgctctacagctgtaaaatggtgtcttccttgcaggctgtagcctagatagaatgaggtgagccaggtaatgagctgggtcaagggccaggaacacagcaggcacttggtaaaccctagaatgcgttgtgtaccctttttaggtagsgcttgtgctgagatgtcaggcacacttcctgtttctctcatcttattacctgcctggaccctaagtttgtagctggtttaagagaggcttaaccctctcagccccatcagccccctccccaagggactctgttgaaaaatgtattcctttcagaattttagtttaaatttaattgctctgtggcctt

SEQ ID NO: 785934 - DNA, 637 bp, Homo sapiens
aaataatggatgtcaccacaccccgaccctaattagtgaggactttcatgttctacttgtcttcatttaatcatcattgtataagagttttacaatatcaaattagtagatgtatattactgaaagggaaggactgttagaaatttacttgaggaatgtctgccactgggggctgaacacaaaagatcctattgtgacctgccagattattcaytcacttagcaattcaacaaccatcgctgaatgcctactataggccaggtgccatgcaagacagatgtgctcccaccctcaagggttcacagtctaatagaggagagagatgttaaacagataactgtacagatggcatagctaattatattcgtggaagttcgttgtggcaaagacaggcatctcaatatttcaggagctcccctatattttctagcctcccttacagtcacatgactagttctgaccagtggggtgtgtgtaggagtggcaggctgaagcaatggagagctggtgagcctcatccctctcttcccctgccacagccaccttgcgcccacaagttcccttagctacaagctggaggagagccaccagatccaccttagatttcactgagcaagaaataaagcttcttgtgtta

SEQ ID NO: 785935 - DNA, 637 bp, Homo sapiens
aaataatggatgtcaccacaccccgaccctaattagtgaggactttcatgttctacttgtcttcatttaatcatcattgtataagagttttacaatatcaaattagtagatgtatattactgaaagggaaggactgttagaaatttacttgaggaatgtctgccactgggggctgaacacaaaagatcctattgtgacctgccagattattcattcacttagcaattcaacaaccatcgctgaatgcctactataggccaggtgccatgcaagacagatgtgctcccaccctcaagggttcacagtctaatagaggagagagatgttaaacagataactgtacagatggcatagctaattatattcgtggaagttcgttgtggcaaagacaggcatctcaatatttcaggagctcccctatattytctagcctcccttacagtcacatgactagttctgaccagtggggtgtgtgtaggagtggcaggctgaagcaatggagagctggtgagcctcatccctctcttcccctgccacagccaccttgcgcccacaagttcccttagctacaagctggaggagagccaccagatccaccttagatttcactgagcaagaaataaagcttcttgtgtta

SEQ ID NO: 785936 - DNA, 545 bp, Homo sapiens
ggggaaactgatcagctgtgatctaaagcagggatcctcaaccccccgggccatgacaggtaccagtctgtagcctgttaggaactagaccaaacagaagaagatgaggggtgggcaagcaagggaagctgagctctgcctcctgtcagatcagtgatggcattagattctcacaggagtgcgaaccctattgtgaacygtgcacacgatggatctaggttgcatggccccttacgaaaatgtaatgatagaccaggcacggtggctcatgcctgtaatcccagcactttgggaggccgaggcaggtggatcacaaggtaaagagatcgagaccatcctggccaacatggtgagaccccatctctactaaaaatacaaaaattagctgggcttggtggcgtgcgcctgtagtcccagctacttgggaggctgaggcaggagaatcgcttgaacccaggaaacgaaggttgcagtgagccgagatcacgctactgcactccagcctggtgacaaagcgagactccgtctcaaaaaaaaaaaaagaa

SEQ ID NO: 785937 - DNA, 545 bp, Homo sapiens
ggggaaactgatcagctgtgatctaaagcagggatcctcaaccccccgggccatgacaggtaccagtctgtagcctgttaggaactagaccaaacagaagaagatgaggggtgggcaagcaagggaagctgagctctgcctcctgtcagatcagtgatggcattagattctcacaggagtgcgaaccctattgtgaaccgtgcacacgatggatctaggttgcatggccccttacgaaaatgtaatgatagaccaggcacrgtggctcatgcctgtaatcccagcactttgggaggccgaggcaggtggatcacaaggtaaagagatcgagaccatcctggccaacatggtgagaccccatctctactaaaaatacaaaaattagctgggcttggtggcgtgcgcctgtagtcccagctacttgggaggctgaggcaggagaatcgcttgaacccaggaaacgaaggttgcagtgagccgagatcacgctactgcactccagcctggtgacaaagcgagactccgtctcaaaaaaaaaaaaagaa

SEQ ID NO: 785938 - DNA, 545 bp, Homo sapiens
ggggaaactgatcagctgtgatctaaagcagggatcctcaaccccccgggccatgacaggtaccagtctgtagcctgttaggaactagaccaaacagaagaagatgaggggtgggcaagcaagggaagctgagctctgcctcctgtcagatcagtgatggcattagattctcacaggagtgcgaaccctattgtgaaccgtgcacacgatggatctaggttgcatggccccttacgaaaatgtaatgatagaccaggcacggtggctcatgcctgtaatcccagcactttgggaggccgaggcaggtggatcacaaggtaaagagatcgagaccatcctggccaacatggtgagaccccatctctactaaaaatacaaaaattagctgggcttggtggcrtgcgcctgtagtcccagctacttgggaggctgaggcaggagaatcgcttgaacccaggaaacgaaggttgcagtgagccgagatcacgctactgcactccagcctggtgacaaagcgagactccgtctcaaaaaaaaaaaaagaa

SEQ ID NO: 785939 - DNA, 601 bp, Homo sapiens
ggcaaggaacaattggctattgaactctccacataaagatagacaagcatgagcatgtcagccccagactcaaggaaaggccataaatgactgtctcctgtgagaggccatcttgggaacaatgaggaacttgtcctggtctggactagctaagtgccttccagtagtagtgactgccaggatgggctgtaggagcaacaaagagggagtcaatcttctcagttattctgttggaatttccttatgctgagaaaatgagctgggaatctatcctgaggaggcaactttgctgcagtcagaattaaatattcagaaaagcagagagggwaggactagtctatgacatgaattctaagaaattcctgaaaatggggaaggagtgggcctaagtgctaactgattttgcaattgcacttacccggaaccagatatattctaaccatttgagatttcagagtctgaaaacttgacacaaaataatcattgggtatttatgtatgtatgtatgtatgtatttatattcatttagagatagagtctggctctgtggcccaggctagagtgcagtggcatattcctagctcactgcagcctcaaactt

SEQ ID NO: 785940 - DNA, 616 bp, Homo sapiens
gtattcaagtgcatatgttccaaagtgctgttctgttgatataataggaaaaaaaaccctattatcacaaaggaattgggctgtgtgtacagttaactccaaatcattattttaccctatatagcattatttttgagatttgacacaattttccagaggaaaaattttaaatgcaagaattagatcttaccctttaggacaacctgcttgctgtctcccagacagtgtatcttatttcacatgtgccctgtatawtatggaattgcctcccttggaaaaacaaccagaaagccccagaagcacgtggtagaggtagtcaggttcatctccaagtaacaaaggaagctgagacctgggttaataaaacaagcccaatttagtctgctcttgtttggaaatttcaccttcaaaggtgttttctggcttgagttagatttaagtttctgggtataagtagtggaagttgtttagatatccagcatttagtagactcctttgtgtatttgaggaattccctaattaggtctttgtattagtctattttcatgaagctgataaagacaatttacaaaagaaagagaggtttaatcaacttacagttccacgtggctgaggt

SEQ ID NO: 785941 - DNA, 640 bp, Homo sapiens
tccattctcctaagactgagccaaccagactggtctgactcactgtgcccaccccattgggaggccccaattactaccatttcttctgcccaagccctgctctccattccttccaaaggcatcttgactcagggctgtgtctctccccttgcgtccctacctctgctcccactctcaattagctgctttgctggtgtggtcaccaccctcttacccaatgtcttcagtggccccarttccctgtgtgctaaaatcccagtctcatcagcatccaccacctcctttggtattgtgaccaagcaccaaggcacttcttgcctctgggctttgtgtacactgtccccatgcctgcccccctggattgccctactccccatccctgccaatatctagttttaagccaagacccaacagtcaccttctctagggagcccttcctgaattactccccctcccactctctactccccagcaaaatgagcccctcctccttgctcctggcacagtacctgcaggactgctttgctcttgcttattgcctgggggtctccctacaaccaggcagtgccctaagatcaggggccgtgtctggcttccattgtaacctgagtatcaggtgcagtgcctgccataaaagaat

SEQ ID NO: 785942 - DNA, 640 bp, Homo sapiens
tccattctcctaagactgagccaaccagactggtctgactcactgtgcccaccccattgggaggccccaattactaccatttcttctgcccaagccctgctctccattccttccaaaggcatcttgactcagggctgtgtctctccccttgcgtccctacctctgctcccactctcaattagctgctttgctggtgtggtcaccaccctcttacccaatgtcttcagtggccccaattccctgtgtgctaaaatcccagtctcatcagcatccaccacctcctttggtattgtgaccargcaccaaggcacttcttgcctctgggctttgtgtacactgtccccatgcctgcccccctggattgccctactccccatccctgccaatatctagttttaagccaagacccaacagtcaccttctctagggagcccttcctgaattactccccctcccactctctactccccagcaaaatgagcccctcctccttgctcctggcacagtacctgcaggactgctttgctcttgcttattgcctgggggtctccctacaaccaggcagtgccctaagatcaggggccgtgtctggcttccattgtaacctgagtatcaggtgcagtgcctgccataaaagaat

SEQ ID NO: 785943 - DNA, 524 bp, Homo sapiens
gactggaatccacccccaaatcaaagcatcatggtaaatcttgcttatccttataaagtcaaatgatagacatttcccatcacctatttctattcaacaagagcaccagattcagttagctaatctgcttccaaagagtagaactgcattgagctcaaataatttcaaaatactgacttttwtttatttatttatttattttttagatgtggtcttgctatgttgcccgggctggtctctaactcctgggctcacacgatccacccacctcggcctcccagcatgctgggattacaggcgtgaaccaccatacccagcctatttctgcgtatgttaaacatgctttacaattttaaaaatgaactgttttgaaggtaaaattacaaatcttgaaattaaaaaagcaaatatgtaaaggagcaaaaactataaatcaaacatttgagaagagaaaattggaggctaacttgtattaaattcacaaaaacttctatactttctgtaaatacttttttaaaaaacta

SEQ ID NO: 785944 - DNA, 607 bp, Homo sapiens
caacctccttctcctgggttcaagtgattctcctgcctcagcctcttgagtagctgaaattataggtgtctgccattatgcccagctaatttttgtatatttagtagagacagggttttgccatggtggccagactggtctcaaactcctcacctcaagtaatctgctggcctcggcctcccaaaatgctggaattayaggcatgagccactgcacctggctgatatttgttaatttttaagagtgagagactaaaatgctgattaagcacacgaacggggcttaccaattgtgacattgacagtgaggtgatttgactgggccatttagtggagaaatgccagtgtcagtttttttaggatcttttctgcttctctgctaatctcctgctgggaattctgagagctaagtggagaatgaagcctgggggctaaatagtttctcagcaaccaatatacatgcttcagctaatcctcccattttctgcttactaagtttatcttcagtgatgcttggaatccccaggttcagagagcctctgttttacccttgctacaaaagccgttaagtctttttttttttcaggattggggtagtatagtatgat

SEQ ID NO: 785945 - DNA, 607 bp, Homo sapiens
caacctccttctcctgggttcaagtgattctcctgcctcagcctcttgagtagctgaaattataggtgtctgccattatgcccagctaatttttgtatatttagtagagacagggttttgccatggtggccagactggtctcaaactcctcacctcaagtaatctgctggcctcggcctcccaaaatgctggaattataggcatgagccactgcacctggctgatatttgttaatttttaagartgagagactaaaatgctgattaagcacacgaacggggcttaccaattgtgacattgacagtgaggtgatttgactgggccatttagtggagaaatgccagtgtcagtttttttaggatcttttctgcttctctgctaatctcctgctgggaattctgagagctaagtggagaatgaagcctgggggctaaatagtttctcagcaaccaatatacatgcttcagctaatcctcccattttctgcttactaagtttatcttcagtgatgcttggaatccccaggttcagagagcctctgttttacccttgctacaaaagccgttaagtctttttttttttcaggattggggtagtatagtatgat

SEQ ID NO: 785946 - DNA, 625 bp, Homo sapiens
acagcattcaaaaaaaaaaaagagagagagagaaggcacggtgactcacgcctgtaaccctagcactttgcgaggctgaggcaggcagatcacctgaggaggtcagaagttcgacaccagcctggccaacatggcgaaaccccatctctactgaaaatacaaaaattagccaggcatcgtggcgcatgcctataatcacagctactcgggctgaggcaggaraatcgcttgaacccaggaggcagaggtttcagtgagccgagatggcaccactgcactccagactgggcgacagagtgacactccgtctcaaaaaaaaaggatttgggtatcatctaggtatgcgaattttgtctgcaagcccatgtgagggtttaattatatttacaagtccttcccccatctctattcagtgtcgagactcaagataggccattttctctatgattctctcaatggggcatgtattcttatttctaattcaccttcacactgatgtcatagccctttgaagcccaagatttacacagaggggtctccactaaaggttccccaatttagctttcttttctgcttgttgcatcacttaatgttataaaaaccaagtagtgtatgagttaagttg

SEQ ID NO: 785947 - DNA, 607 bp, Homo sapiens
gggtggagttctagcaatctctaacatacctgacattaaatattaaataatatttaataaatatctgtagacaaataaatatagcttactttaataaataattatagataaataacttatacattgagtaaggctatgagaagtgatctagtggggaggaaacccaagtccctgtaactccagggctttgggaggccaaggggggaaccagattgagcccaggagttccagaccagcctgggcaacatatgtgacctcatcactacaaaaaaattttttaattagccaagtgtggtggtacacacctgtagtccctgctactcagggggccaagatgggaggattgattgagtcttggagttcaaggctgcaaaacattcaattgttgtttttctgccttccctgcagctagaatatggacacgtgggtaggttcagccaatcagatgactccatmctattttttgaatcaggtgctcaagattccaggaagaaggaacagtagataatttatcttaacaaaggagtccattatgatgtccagtttccaggggcaatagggaagcagggcaaataggggtagagtttagggtcctgagcaatggcgt

SEQ ID NO: 785948 - DNA, 543 bp, Homo sapiens
gatataaatcattaaggtacttccttaggggaaactgggattggcttccagttagctgtggaaggatgtgaaggaattgaggctggggtgttagggcaatctaggtgtatgcatggagtgagcaaagacacaagacagaaatagcaaggaattcagcttggctggagtgaagggtatgtgaagcaaggatggaatgtgatgttcactgagtgcttactaagtgccaggcacatgtgctagtaggtttcacatatttaaggttcaagaagaactagaggaaatgagtttggagaggtggtctggagtgtgatcgtagaggaccttacaaagcaaaatggtggttctgagaagcaaggcagaattacacaagagtcaagttcagcccacagttcctccatttttcytaggccctctgcatcatcccatcaagcagctctgctagagagtgagcaggggaccatgaggtgacagaaggtgcattcttattccagaagtctcactgaggcaacaggcatgccagggaccgctgataagggtaaactg

SEQ ID NO: 785949 - DNA, 542 bp, Homo sapiens
ctggccatcattaaataggactgagactgccaacaccaccttatgtccactgtgcactgctacagagttgggtggtaagtacttgagggcatgtgggaacattcagctggatgaataccttaaaggctgccgatctcactctgggcagctgtgatattgtgaaatatatagttggtcttcaactcccttcctggcatacaactcctaaaatctttggcctttccaaagtggtgtcattttgtatgctaatrattggtggctggcgcacttaggtagcttcagggtaggggctggtcactgaaaaaccaagggaggattagaaggttaggactttctgtcccatctcccaacctccaaggagggcagagaggctgactgatttccaatggccagtggtttaatcagttgtgcctacataatgcagcttccataaaacccttaaaaggactgggtttggggcacttccagatagctgaacaggtggaggtttctggacagctgcacaccaggaaaggtatggaatctcctcaccccttccccca

SEQ ID NO: 785950 - DNA, 643 bp, Homo sapiens
tagattatatatgttacataaattatataatatatataattacatatagcaaacatatttttaattgcatcgaatacgaaaaagaaagttaatgactacagataaaaatcataaattggtaagaaaaatgagttcccaatagatgaatggagaaatgccataagcatacaattttcacaaactgaaaaacaactgatcaatacagaaaaaatacataaccctgagagctaaacaaagaaatacaaggtaaaacaaggtaacatttcytacccaatttatttaagttaaaaaaaactcaacttgagagaggtaataatgaaaaactacttatacatacattgctggtggcagcataaattaaaacaaccttttgaagaggcaaactgttcatactctgacccaaggtatgccttcctaggaattattaataagtaattaaaagtaagaaaaaatatgtgctaagacaatggtaagaaaattaaagcttataatggcaaaaaaaaggaaatgattttcatatcaaaggctaagtaaataaaatattatatggtcattaaatttttaattacaaagtctatcaaaacaatatgaataatgtccactctaataagtgaaaaggtaccagaatataaacttctgtgga

SEQ ID NO: 785951 - DNA, 583 bp, Homo sapiens
tggaagagcacgtgagttagcatgcattcattcattaatttaataatgtatgtatgctgaaagccttggtaaactgcagaatgctctgcaaatgtaaggaattataagtaataacttctggtttgtttacataaaaccaaaaccagttccaatgctttacagccatggataattttcaaaaatgaaaggattgtgaagctcaaggctggaaaatgtagactggatgtaactaggagtgcaaaccatgacctatcccacacacyttcaaccagggctacattagccatccatccttggtgttctcacagctctctgggcatattttctgcctgggtacacacgtggtttagagctgcttatgcacctgtctctcccattagtctgggagctactcaagggtcataggaaccatgtctgattaatctcggcacccccatcatctggtccagagcctaacccagagcaggggctaagacaggcttgctggtaactgaatttttacaagggcctgtgtactacgccatgcatagcatgttctatccaactagtgttttaggggattttcttcttcttcgcctttctt

SEQ ID NO: 785952 - DNA, 615 bp, Homo sapiens
actttctgacccagcaattcaataatggaactggctgtttcacagagtagtgaactccctgttactggaagtatttggcatgtcaagtccaacttctgacctctaaaaccgcatgtgaccgtcctacatatgttcaaagatgatggtcctgttctcctaaatcttttcttctttttttgagacagagtctcgctccgtcgccaggctggagtgcagtggtgtgatctcggcccactgcaatgtctgcctcctcagttaaagtgattctcctgcctcagcctcctgagtagttgggactacaggcacgtaccaccaggcccagctaattttcatatttttagtagagacagggtttcaccatgttggccaggatggtctygatctcttgacctcatgatccacctacctcagcatcccaaagtgctgggattacaggctgtgaaccaccgtgcccagcaatcttttcttctccagattaaacatcttactttcttcaagggttccttatttgatgtggcagttcagtaacctgctattgttcttctggacttgttacaatttgtcaatttctcatgcatttatttaaaaaaatttattgagtcgggtcactagaat

SEQ ID NO: 785953 - DNA, 490 bp, Homo sapiens
aaggaggaagaatcacatttttcttcatgtcccataattgtcagacaacaactcctcaatggagttaaacttcacatttttatgtggaaggtcactggctccttccttttctctcaaccttccccttccccttgtatacctgggtccactgggagtagaaagtagcactatctcttagtaactgtcccctcagctctgctaagattgacattgaaaagctttgcaattgccacatgaaggctcaattaaagtcttggccaagggctaccctcttttgcaatctaggatggggagagtrtgtggttttcctcttcctgttccatagcaatatgacagaacaaatgagctggaactttcaagttcagtgatttttttttttttaatgaaggaaaaaaaaatgggggctgctcttctagacatgtgttcaccagaaagtgtgggatgtggtttggttaaatgtgtgtatttccattgccatccttcttttcca

SEQ ID NO: 785954 - DNA, 615 bp, Homo sapiens
acagggatccttcagtagtacggccagaggtgtggggaaaatgccacagagagaaggaagcctccagctgaactttgtaacaattcgaaccagtggaaaagccttctggccagaacccagggagagcgtgagtctggcatgcagactccacaggtgagggaagaactaaagctcttttcttttgcagctgggaggcaggtagcctggggcamgttctcagccctgcttgcccacagcctggaaacagacttggtgctgttaggtgatgcatgttaggagtgagactggcccttctgattgcatgggagctgggtgaggcctgtgactggttactttccctcacttctctgacaatctccatgactcagcagaggcagccataatcctcctaggaacacaactccattgacctgggaagctcacccccgtctcccacatcagccgcagcaagacccacctaaggagagtctaagctcagacatgcctagccctgcccccaactgatggtccttccctacccaccctggtagctgaagacaaagggcatatactcttgggtgttctagagtcctgcccactgccagttcctctccatactaccacagctgatgctct

SEQ ID NO: 785955 - DNA, 615 bp, Homo sapiens
acagggatccttcagtagtacggccagaggtgtggggaaaatgccacagagagaaggaagcctccagctgaactttgtaacaattcgaaccagtggaaaagccttctggccagaacccagggagagcgtgagtctggcatgcagactccacaggtgagggaagaactaaagctcttttcttttgcagctgggaggcaggtagcctggggcacgttctcagccctgcttgcccacagcctggaaacagacttggtgctgttaggtgatgcatgttaggagtgagactggcccttctgattgcatgggagctgggtgaggcctgtgactggttaytttccctcacttctctgacaatctccatgactcagcagaggcagccataatcctcctaggaacacaactccattgacctgggaagctcacccccgtctcccacatcagccgcagcaagacccacctaaggagagtctaagctcagacatgcctagccctgcccccaactgatggtccttccctacccaccctggtagctgaagacaaagggcatatactcttgggtgttctagagtcctgcccactgccagttcctctccatactaccacagctgatgctct

SEQ ID NO: 785956 - DNA, 615 bp, Homo sapiens
acagggatccttcagtagtacggccagaggtgtggggaaaatgccacagagagaaggaagcctccagctgaactttgtaacaattcgaaccagtggaaaagccttctggccagaacccagggagagcgtgagtctggcatgcagactccacaggtgagggaagaactaaagctcttttcttttgcagctgggaggcaggtagcctggggcacgttctcagccctgcttgcccacagcctggaaacagacttggtgctgttaggtgatgcatgttaggagtgagactggcccttctgattgcatgggagctgggtgaggcctgtgactggttactttccctcacttctctgacaatctccatgactcagcagaggcagccataatcctcctagraacacaactccattgacctgggaagctcacccccgtctcccacatcagccgcagcaagacccacctaaggagagtctaagctcagacatgcctagccctgcccccaactgatggtccttccctacccaccctggtagctgaagacaaagggcatatactcttgggtgttctagagtcctgcccactgccagttcctctccatactaccacagctgatgctct

SEQ ID NO: 785957 - DNA, 615 bp, Homo sapiens
acagggatccttcagtagtacggccagaggtgtggggaaaatgccacagagagaaggaagcctccagctgaactttgtaacaattcgaaccagtggaaaagccttctggccagaacccagggagagcgtgagtctggcatgcagactccacaggtgagggaagaactaaagctcttttcttttgcagctgggaggcaggtagcctggggcacgttctcagccctgcttgcccacagcctggaaacagacttggtgctgttaggtgatgcatgttaggagtgagactggcccttctgattgcatgggagctgggtgaggcctgtgactggttactttccctcacttctctgacaatctccatgactcagcagaggcagccataatcctcctaggaacacaactccattgacctgggaagctcacccccgtctcccacatcagccgcagcaagacccacctaaggagagtctragctcagacatgcctagccctgcccccaactgatggtccttccctacccaccctggtagctgaagacaaagggcatatactcttgggtgttctagagtcctgcccactgccagttcctctccatactaccacagctgatgctct

SEQ ID NO: 785958 - DNA, 590 bp, Homo sapiens
aacccacagagtgggagaaaatcttcacaatctctacatctgacaaaggactaatatccagaatctacaatgaactcaaacaaataagcaagagaaaacaatcacatcaaaaagtagactaaggacatgaatatacagttctcaaaagaagatatacaaatggccaacaaacatatgaaaaaatgctcaacatcactaatgatcagggaaatgcaaatcaaaaccataattctataccaccttactcctgcaagaatggccataataaaaaaaatcaaaaaacagtagatgttggcatgaatgcagcgatcaggaaacacttctacactgctggtgggaatgtaaactagtacagcyactatggaaaacagtgtggagattccttaaagagctaaaagtagaactaccatttgatccaggaacctcactattggatatctacccagaggatgtttataacagcaaaaatcacaattgcaaaaatatggaaccaacccaaatgcccatcaatcagcaagtagataaagaaactgtggtatatacatatgtatgtgtgattatatgcgtatatacataccacatatatatat

SEQ ID NO: 785959 - DNA, 483 bp, Homo sapiens
ttatccagctttaacaagcttcatcttattttagcaacatcatttggcatagtgaagtgttttagtgaaaacagcacaggctttgggtcaaacaggctgaataaatcctgggttttccctggattggctttggggtctgrgatgaattattcaatctccctgagatttatttcctcaaatgcaacctggaataagatgatacttactttgcagggctactgtgaacactaaatatggcaatttttgtaaaatgctttgtgtatagtaggcgttcaataaatacttgtgtcctgttattattcttaagcatcctattataccaccttgggtttccatcttgtcattctgcccaagaacatacaatactctcagagctcttcattccaaatagctcacggtttaggtgaaggaagggcttatggcccccagacagaggtgggagcctttctcagggcagttggcaagaatttgcttcccctccca

SEQ ID NO: 785960 - DNA, 516 bp, Homo sapiens
ctgttcaggatagagtgttgcagttattagctttcgacaatgctaatcccgattgccaggctgctctgcgacctatcagagggaaagcacatttagttgattatatcaaggcctgtgatggtatcggaggtaatctgcataaggctactctgctagcacaggcartggcaggactgagagtggataaaggaaatactctatttcctggagtttgttttaactgtgggaagcatggtcatactaaaaaagaatgtagaaaaaatcagtgagtcaggccaccagataggggaaaaaagaaaactgctgagcccaaaatatgtccaaaatgtaaaaaaggaaaacattgggctaatcagttcactctaagtttgagaaagatgggaacctgatttcggaaaacaccatgagcggcccgtcccgggccccattctaaactggggcatttccagctcaggccattccctgacccctgtacaatgtctgtcccctgacacagctggtagtgctgcagtagat

SEQ ID NO: 785961 - DNA, 525 bp, Homo sapiens
tgctgaggaagagattccaggaggatcccgaggaccccccatttgcagtcatgtcgagactgatgctgaggaggaccccaactgtcacaagcaacacccgttgaacacagccacccacctggggacagatcaagaagctgtcatagatggtggaagaaaacctgaggaaagcaggacaaccagtyacaatgagtaatttaatggtagctatgatagcggtgatcaccattgccatgagtattccttcaacaacggctgacacagagaacaattatacttcttgggcatatttatcaatcttggctggcaataatgcctggatataatcactctatgatgcagttacacatgctttctgatctcagtatttaccgtaataaatctgctcctataattgaggcataccaccctcaaaaaactacttgtaaacaaaatagaacctggccagaaataatgaacatacttgtttaggaagattgcattgcagaacgggcagaggtgctgcgcaacgaatcctatggaatc

SEQ ID NO: 785962 - DNA, 525 bp, Homo sapiens
tgctgaggaagagattccaggaggatcccgaggaccccccatttgcagtcatgtcgagactgatgctgaggaggaccccaactgtcacaagcaacacccgttgaacacagccacccacctggggacagatcaagaagctgtcatagatggtggaagaaaacctgaggaaagcaggacaaccagttacaatgagtaatttaatggtagctatgatagcggtgatcaccattgccatgagtattccttcaacaacggctgacacagagaacaattatacttcttgggcatatttatcaatcttggctggcaataatgcctggatataatcactctatgatgcagttacacatgctttctgatctcagtatttaccrtaataaatctgctcctataattgaggcataccaccctcaaaaaactacttgtaaacaaaatagaacctggccagaaataatgaacatacttgtttaggaagattgcattgcagaacgggcagaggtgctgcgcaacgaatcctatggaatc

SEQ ID NO: 785963 - DNA, 639 bp, Homo sapiens
gcaaaatatcacaaggacagaaaaccggacaccacatgttctcgctcataagtgggagttgaacaatgagaacacatggacacgcggggaacatcacacactgggcctgctggggggtgggggctgggggagggatagctttaggagaaatacctaaagtaaatgacgagttgatgggtgcagcaaaccaacatggcacatgtatacctatgtaacaaacctacacgttgtgcacatataccctggaacttaaagtataataataataataaagaaaattgtcttctgaatgtccttggacatcttattttccaaagacaaaattttctggacaacagttggtactgtgagcccaagtstggttcataatgaaactcagagaatgcatagatttcttttaaaaataaatctcaagtcttgcagagatccagcttacctcctgaaaaaggtgcgttaagcacccacaccacgttatttcctatgtactaccttgtttataaaaatcactcagatatagattttgtgaattctgttttgagaatgtcccaggcttagagtccaggcaggctgacttatagttctgtgccaaccaaaaggctccatatatttagaggtatggacatccatcttcttggccat

SEQ ID NO: 785964 - DNA, 599 bp, Homo sapiens
tgccttggtccccagcaccacatagcagcagatagcaaagcatttaaagaacatgcagctgtcctcgcagtgagctcttctttgccctgtaacatgtgtctccctgacacagctgtgccccgtggtggacagtgtgctgggtgtggtgaatgagctcctgggggctgtgctgggtaagtcagggctcaatgccctcctctttgccccttctacccgtctctgtatgaccccaatggggtagggtacgaaggggagccagaagcggcaggatctcrgggtcctttagttcctcctcacactgacaggctgcccctttgaggagcctcatggaggaggcctgggctgaggccgcctagcagggcatgcagacccagaaccatcagttctctctatgttgggtgctgcagaccaacacttactgagcacctagtgtgcgcttggcactgtcagaaacagggggaagatataatgattacctggtcagactagatgaccgaggcccagagagctcaagtaaggaacccaaggccccgcagccacagcagaccccagtctctctgtgccttatggagacacaagtgccttctgtgttcacaaaa

SEQ ID NO: 785965 - DNA, 546 bp, Homo sapiens
tcccttgaaatgcttgtttctggcttctggctggaggctacgattctcagcctgacagaatggccactctgcaggctgcagcgctttatgcaaaataaagctcacctttccaaatttatgaaccttgtcatccttcagttgacaacactgtgggaagatcgagtattacaacatcaagtcggacacttaaatttgttaagagagtaagtctcgtgtgttttttaccacaattaaaaaaaaaaatactcaggcaattgcttttttttttttttaagctggggtctcactatattgcccaggctggtctaaaacccctgggctcaagcaatcctcctgactctgcaggcgtgaaccacstctcacccagccagacaattgcttttaaaaaaatctgtgaacagcctctatgtttttataaaccaaaactcataatctaagggaagcttcatggtattgtggaaaagacaccaggggctcggttttgcttctaaccttctcctttggcaaattttttaactactgtgctcagttttcttatctgcaaga

SEQ ID NO: 785966 - DNA, 652 bp, Homo sapiens
gagcatggatccccaatatttagagaacaaggtcctttttgtccactccaacttccaaaggctgcatgcaacctgctccaggaacatatgcatggctgcctgccatggggcttaggggtggatgatgggtagctactgtgctaagagctaaaattggccaaaattaactgcaatttatcatctaaaaccttcccctggaagtggaaagccttcagtagactccagagttccaaaatagttataccagatagattctgccaatgyaattgttacctaggtaggaagacagatttctggtgcttcctattctgccatcttccagaaattttttaattggaaatttcagatcttgctttggaataatttttgtaagaaacgcatgccttcacttcgtgaaataatatgtggaccttgagttgatccgtggagccagccagagtttcaccaaacagcatccacttcctgttggatactgactctaggatgagtggtttgagaagcagagggattgaggagagataatgacagttcctgtgttccctgtggtttcatggaggatggcacaaagcaccaaagcaacatgaccccaagacattcccagaaagggcaatagaaggaagcacagaacagcttctgaggtaaaactcaaaac

SEQ ID NO: 785967 - DNA, 572 bp, Homo sapiens
tcccagctacttgggggactgaggtgaaaggatccattgagtctgagagttcaaggcttcagtgagctgtgttcatgccactgcactgcagccagggcaacagcaagaccctgtatcaaaacaaacaaacaaaaaaagctgatgcattcatgaggattgctaactcaatatcgagcagaacaagagttaattacatgggactaaactaatagaggactgaaatttttttcttacttttgggtttgaaacattgctaattcttttgttttccagtccagaaaacttttttttttttttgagacagagtcttgctctgttgcccaggctggagtgcagtggcacaatctcagctcactgcaacctycacctcccaggttcaaatgattctccagcctcagcctccaaagtagttgggattacaggagcgtgccaccacactcagctaatttttgtattttttagtagagatggggtttcaccatgttggccaggctggtcttgaactcctgacctcaggtgatccacctgcctcggcctcccaaagtgctaggattacagatgtgagccaccac

SEQ ID NO: 785968 - DNA, 612 bp, Homo sapiens
cccggctaattttttgtatttttagtagagatggggtttcaccgtgttagccaggacgatctcgttctcctgacctcgtgatccacccgcctgggcctcctaaagtgctgggattacaggcgtgagccaccgcgcccggccttctttttctttttaatttttttgtagaacaaattttattttaaaaatagggacgaggtcttgctatgttgtccaggctgatgttgaattcctgggctcaagcagtcctccyaccttggcctcccaatgctagattacaggcatgtgccaccagtagttttctttaaatcaacagaataataaatttggtcatgcttccagcccacccacacaggtagacacagcttagttcagtctccacatagagaagactcctatatacgaaaaatgtaaagacgaggcattcctccgcttgctttctgaggacaccctaccctgtatttgagtagccgtcaataaaccttccctccccactgaactctgtgacttgcctggaattccctcctgcacgagatccaagaactttctcttagggtctggattgggacctcttttttttttggcaacacaaggacatgccaattgtaactt

SEQ ID NO: 785969 - DNA, 612 bp, Homo sapiens
cccggctaattttttgtatttttagtagagatggggtttcaccgtgttagccaggacgatctcgttctcctgacctcgtgatccacccgcctgggcctcctaaagtgctgggattacaggcgtgagccaccgcgcccggccttctttttctttttaatttttttgtagaacaaattttattttaaaaatagggacgaggtcttgctatgttgtccaggctgatgttgaattcctgggctcaagcagtcctcccaccttggcctcccaatgctagattacaggcatgtgccaccagtagttttctttaaatcaacagaataataaatttggtcatgcttccagcccacccacrcaggtagacacagcttagttcagtctccacatagagaagactcctatatacgaaaaatgtaaagacgaggcattcctccgcttgctttctgaggacaccctaccctgtatttgagtagccgtcaataaaccttccctccccactgaactctgtgacttgcctggaattccctcctgcacgagatccaagaactttctcttagggtctggattgggacctcttttttttttggcaacacaaggacatgccaattgtaactt

SEQ ID NO: 785970 - DNA, 612 bp, Homo sapiens
cccggctaattttttgtatttttagtagagatggggtttcaccgtgttagccaggacgatctcgttctcctgacctcgtgatccacccgcctgggcctcctaaagtgctgggattacaggcgtgagccaccgcgcccggccttctttttctttttaatttttttgtagaacaaattttattttaaaaatagggacgaggtcttgctatgttgtccaggctgatgttgaattcctgggctcaagcagtcctcccaccttggcctcccaatgctagattacaggcatgtgccaccagtagttttctttaaatcaacagaataataaatttggtcatgcttccagcccacccacacaggtagacacagcttagttcagtctccacatagagaagactcctatatacgaaaaatgtaaagacgaggcattcctccgcttgctttctgaggacaccctaccctgtatttgagtagccktcaataaaccttccctccccactgaactctgtgacttgcctggaattccctcctgcacgagatccaagaactttctcttagggtctggattgggacctcttttttttttggcaacacaaggacatgccaattgtaactt

SEQ ID NO: 785971 - DNA, 606 bp, Homo sapiens
gagtggtttgtcagaaagctttaccataccaaggtattgagggagaactttgtaacataattagggatgtgggtaatgaaatccatcatttagatctgctgagggtttccaacaagcaactacctctagcaacgtgagctatatgtgagttttaggttcttgaaaaagggggaaagatttctctctggagtggaratgccacatatccatcagcctttcctttccgcttagagactttgagttcatttacctggcagaaatcagttgcctctaattcatatcagaggccaccagaagctgcaaaattggtaagatctaagaaacttagtgttttttgttttttttttttctggaaggggaagaatatgaataagagggaaaggcaaaagagagaggaagtcgcacacaaaaaattttccattcctgttggacacctgtggagagagaggccatgtgtgtcatcaatttggtgacatataaatattcaagtcgattccaaactgtgttactcacaggagagtcacagccagagaacacccaaaaaggtgacatttggggcaaggctttgggcttttttcacctttgatcagaagcaaagctgtagag

SEQ ID NO: 785972 - DNA, 673 bp, Homo sapiens
agctggggtctgtgcctatactcactctttcaatgaatctacgtcggatcccaggcaggcccccacaatgaagtggtgttgttcaactgaggtaatacccaaggttcgttgtctcatggccacagaaaactaggactcggacacaccagagtgaggttaagagcagaagtttaataggcaaaagaaagagaaaagctctctctgttgcagagagaggggtcctggcgaaaatgggttgcccccaagttcattcttgttgttcgcaatgttcagcgtcttgcggttgtgggactgaccgtaacagacgatttttttgttggctagaagccacctgcattccttgatgtgtggcccctccatcttcaagtgagcaatggtgttttgaatcctccttatgcttcatgtctttgacttcctcttctgtgaccaaccrggaaaaactcactgctttaaaagggctcttaggattagatcaggtactgtgttagttcacttttgcattgctataaagaaatacctgaggctgggtgatttataaagaaaagtggtttaattggctcatggctctgcaggctgtaccagcatagctctagcatctgcttctggtgaggcctcgggaagcttctaatcatggtagaaggtgaagggagagcaagtggtgtcacatggtgag

SEQ ID NO: 785973 - DNA, 618 bp, Homo sapiens
ttttagcatggaagtcttgtacctccttaattaagtttatttctaagtattttattcttattggtgctattgtaaatggaaatatttttctaatttcatattcagacagtttgttgttagtgtatagaaacacaactgatttttgtatgttgattttgtatcctacaactttactgaattcatttattaattctaacagtatgcatctgtgtgtgtatgtgatctttagagttttctatataycatgtcatctgcaacagggacaattttacttggatttgaatagcttttatttcttttccttgcctaattattctggctagggctttcagtactgtattaaacagaagtggcaagagtgggcatccttgtcttgttcgtgatctcaaaggaaaagctttcagctttcaccattgagtatgatattagctgtgaactttatatatgtgacctttattaagctgaggtaatttcatcctatgtctagtttattgagaggtttttattgggaaggggtgttgaattttgtcaaacagttattctgtgtctattaagatggtcatgtgatttttatctttcattctgttactgtggtgtatcacattgatttttatatgt

SEQ ID NO: 785974 - DNA, 611 bp, Homo sapiens
ttattgccccatgagttatacaagggagaggttgattactaaacaaaattggggtcccatgaaaaggaagaagggagatggacactgagtaggcaactgcacgattgctaaatttggtccaaagaaaggttagtagatgcagagaacagccaaagggactgaatctggagacarctctaccccagcaaggtgtttgtcctgtgactggtgggttaaaatgggaatgcaacaggcaagttgtttgtgatgaataggtattgctttcataatcagaaaaaaaattaagaccatctttcagaaatgttctaaaattcgattgtgtgatggttgcacaactctgagtatactaataaaaaccattgacgtgtacattttaagttagtgaattttatgacatgtgagtcatatctcagtagagcagttaaaaaaagaatctcttgaattccaaagcttaaaaaccatggaccgcagctctgtggtgcttgctgtttagaggcaagggcgcctttggctgtgtggctagcttcacggctttcacggatggccttggaaatcttcccataatgggaatgcttttaatgaccatttctttttacatatgtgctaaatat

SEQ ID NO: 785975 - DNA, 625 bp, Homo sapiens
gacatattgaaagtgtgctactaccaaatatattgcaagccaaatttatattggaaccaaacctgaattctgatttttgttccttttaaccaaaataaaaaacttttcaacattgaaagctttgatggaatccccatagaaggaatttagatgaaactaaamataatcttcattttcattttaaaatttaaattgggtgctatattacaaagatatattccacaaaatacaatttcaatgccaaatcatccaagaatatgggaaaggtgatcttctaaaggtttgggttttttattttctcctggagcactttgtctagataaggttgattcctgccttctgtgactatgatttcaaatatgacttctctgaactttatacccttattttgaaggaaagcattttaagagcaaaggataaaattcaattaattgagatgacagaaaataatctattaagtgaatatatcaggcaattggaagctttcatacctttcaaaaaggaaataacctatttcttgccttgttatctaatgacacaggagtttatttctcttgaagctgttacaaatctacctaatgaggcctgaacactgttgccaagcaattagagtttttattgtgtc

SEQ ID NO: 785976 - DNA, 625 bp, Homo sapiens
gacatattgaaagtgtgctactaccaaatatattgcaagccaaatttatattggaaccaaacctgaattctgatttttgttccttttaaccaaaataaaaaacttttcaacattgaaagctttgatggaatccccatagaaggaatttagatgaaactaaacataatcttcattttcattttaaaatttaaattgggtgctatattacaaagatatattccacaaaatacaatttcaatgccaaatcatccaagaatatgggaaaggtgatcttctaaaggtttgggttttttattttctcctggagcactttgtctagataaggttgattcctgcsttctgtgactatgatttcaaatatgacttctctgaactttatacccttattttgaaggaaagcattttaagagcaaaggataaaattcaattaattgagatgacagaaaataatctattaagtgaatatatcaggcaattggaagctttcatacctttcaaaaaggaaataacctatttcttgccttgttatctaatgacacaggagtttatttctcttgaagctgttacaaatctacctaatgaggcctgaacactgttgccaagcaattagagtttttattgtgtc

SEQ ID NO: 785977 - DNA, 605 bp, Homo sapiens
tgggcatgtctgcatatacataatgacatatcttggaggtgggacccaagtctaaacacaaaattcatttatgtttcatacacaccttacacacatagcctgaagataattttatactatgtgatatggtttggctgtgtcccacccacaccccaaatctcgtcttgaattcccacgtgttgtgggaggtacctagtaggaggtaattgaattatgggggcaggtctttcccatgctgttctcgtgatagtgaataaatctcatgagatctgatggttttaacaaggggagtttccctgtgagagctctctctgcctgctgccatccatgtaagacatgacttgcttctccttgccttccaccatgattgtgaggcttccccagccacgtggaactgtaagtccaattaaacttctttcttttgtaaattgyccagtcttgggtatatctttatcagcagcatgaaaatggactaatactatgtactatgcatataaaattatagtgtataattttatactatgtgtataaaatacacacatatactctgtgtgtgtgtgtgtgtgtgtgtgtgtgtgtgtgtaaaatatatatagagatggagt

SEQ ID NO: 785978 - DNA, 559 bp, Homo sapiens
gagcagggacaaatggttaaccagttaaataagccaaacaaggtgtcagaagatcaaattctggtttgatccttgggtagccttgggaaagaatttttgccttgctaggcctcgggctttttacgtgtctgttagcatggagagcttgaggtggaaatgcaaacagaaaacagtgcacccgggtagaagttgcatgtggttgccttgcagttagaactgggtcacacaaacaaaaagcctgatcraatatttcctgaacatataggaagtataattccttaacctctgcataaaagaggattgccagccatattctgttgagacaagaggacattgatacaattcctgatgcatctgaataactgaaagaagatttagaaaatttgcaaatttcaggatgaataagagaaaagtaaataaaaactaaaaacaagacaatattaagttgttcaagagaggaacatttatcataatatactgtgtatttcagtgatgaatacaatattggcatgattgcaatataatcatgtagagaaaatggagacatagtcatatagag

SEQ ID NO: 785979 - DNA, 628 bp, Homo sapiens
cattgattgttccaggttcccatacgaatccatgaatttgactaatacttggaaactaaaaatatattttattgacagtacattttgaggccattccactctctcagccattacgcccacttgcgtactttaatattcccaactcaactgttgtgtttggaacaagttcacaccaacgcatggactcatccacatgaagcatccattaacatacaaatatgctgttggcattaagmagcattgagacacaatatgttttttccttaattattcaaggaaatagtcattgagttacacctggcatgttgttagcataaatatgccagagaatgggaattcagaaggacaggcaggaagcaaaataagtagtttacaggatcagggtgtgaattgaatgtcaagatttcaccaaagctaatactgccttatacaaaagtgcaaatcgacatcattcatgctcttatggtttaggaggtcctgcagttctgctatgacttggagtggtgatatttgtaatagccacacgccgtacttaatgttttgtatacatatcttcccatttggagctcatcatgccccccatgaggttcactaagatcaacctattatacaaatgagcgactgaggc

SEQ ID NO: 785980 - DNA, 523 bp, Homo sapiens
gcctatcttcatatttaattgttcacgtgtttattgtctgccccccgttggatgataagtacattgaaggaaagatttgatctgtttcatcacatatccacagtaccaaggacagtgccttgccaccccttaggtaatcaaaagttctatatttaaaaaagaaatgactccaggctcagtggctcacacctgtaatcycagcactttgggaggccgagatgggtggatcatgaggtcaagagattgagactagcctggccaacatggtgaaaccccgactctattaaaaatacaaaaattagctgggcatggtggtgcgaacctgtactcccagctattcgagaggctgaggcaggaaaatcacttgaacccaggaggcggaggttgcagtgaaccaagatcgcaccactccactccactccactccagtctggtgacagagtgagactctgtcaaaaagaaaaaaaaaaaaaaagaagcactatgtttaaaacaacaaatatactttccaaatgactggaga

SEQ ID NO: 785981 - DNA, 596 bp, Homo sapiens
aattaagcgtgtttgttctaaactgatgtaatttaggcaccatccatagaaaagaaaatatattgtatattcagtactgatttgcctgtccatattagaatatttacagtctagtgaaaattagcctgatgttacatacagaaaagtataaaacctctaataacattatttttttcatttaaaggcaaaggtttaaaataaactttatatattataaagtcagctaaagttatttttatttctcttaactaaatacattgagattttagaagcaaaaatataaatttctgaaattgtatacattatcaaaacaatttcactgaakaatggggtttcgatcaggaatcagagtgtttctaagaagcctattgattactttcctccacatattataagtaaataataaactatttttgctacgtttgaaatattaaactaatattaaacataactgaaccaactcaatggatgaactctagcattgaggtaggtctatgtaacatatttgtgattatagcaataaaagaaatgcatttcaatttttttttagtttctactatatactagctatggattagctttgtagtagtaagttg

SEQ ID NO: 785982 - DNA, 596 bp, Homo sapiens
aattaagcgtgtttgttctaaactgatgtaatttaggcaccatccatagaaaagaaaatatattgtatattcagtactgatttgcctgtccatattagaatatttacagtctagtgaaaattagcctgatgttacatacagaaaagtataaaacctctaataacattatttttttcatttaaaggcaaaggtttaaaataaactttatatattataaagtcagctaaagttatttttatttctcttaactaaatacattgagattttagaagcaaaaatataaatttctgaaattgtatacattatcaaaacaatttcactgaataatggggtttmgatcaggaatcagagtgtttctaagaagcctattgattactttcctccacatattataagtaaataataaactatttttgctacgtttgaaatattaaactaatattaaacataactgaaccaactcaatggatgaactctagcattgaggtaggtctatgtaacatatttgtgattatagcaataaaagaaatgcatttcaatttttttttagtttctactatatactagctatggattagctttgtagtagtaagttg

SEQ ID NO: 785983 - DNA, 596 bp, Homo sapiens
aattaagcgtgtttgttctaaactgatgtaatttaggcaccatccatagaaaagaaaatatattgtatattcagtactgatttgcctgtccatattagaatatttacagtctagtgaaaattagcctgatgttacatacagaaaagtataaaacctctaataacattatttttttcatttaaaggcaaaggtttaaaataaactttatatattataaagtcagctaaagttatttttatttctcttaactaaatacattgagattttagaagcaaaaatataaatttctgaaattgtatacattatcaaaacaatttcactgaataatggggtttcgatcaggaatcagagtgtttctaagaagcctattgattactttcctccacatattataagtaamtaataaactatttttgctacgtttgaaatattaaactaatattaaacataactgaaccaactcaatggatgaactctagcattgaggtaggtctatgtaacatatttgtgattatagcaataaaagaaatgcatttcaatttttttttagtttctactatatactagctatggattagctttgtagtagtaagttg

SEQ ID NO: 785984 - DNA, 643 bp, Homo sapiens
ttgttttacagtattgtaaagtcgaaaaattgtaagacaaaccatcattaagtcaaggactatccgtatatttaaattcttttatacagacacacacacatgcatacatacacacggagaaagaggggaagagagtgacagaaagataaacagtgagacagaaagaaagaccagaaattaccagtgtgagaaattaataaaggagaggacatcgctacagtttctatagacatcaaaacaagtataaaagatttatagtggccccagctagtgggatamggcaattaaaagaagttaaatttgtaaatattgaaaaggaaaggtaaatgctaatttggagatggcatggttatgtacaaatgtcaacaattatctacaaacaattagaaataaaagccagtttggtaaggtgactggatttataacaaatgcacaaaaagcaaaaatcaattgtatacctgttacactttttgtttgataaagtagaaataattcatcacaaacaaggacagaaaggaaagggattaaacatgtccttaaattgtgtaccctagatgcctctcttgcttcacccaaggctcagtccagatgaaaatggctcattatttgttagagaaatttaaattaaaactgtagtgacata

SEQ ID NO: 785985 - DNA, 345 bp, Homo sapiens
gatataatttataactttagttttccatcgcacattttttaaaaagtctttatttgaggttttcggcaaagtgctgacaagggtaaaactagcgttataagatcatgctggttaccaagtggagtattccagatgacagaggaggaccaargatggtgacaatgggaaggaggagacagaggtaaaaggagactccacaccacaggtcactggtgatcgccctgtgagggcagggttgttttatacatgctgttcttcagcaccatgaacagggcctggctgttgaagatgcccaataaatatctgttgacagagaaaggttgacaggggcagacggatccagga

SEQ ID NO: 785986 - DNA, 572 bp, Homo sapiens
ggaggcctgtagtgaaaaactgaatattatacgatagaaactatagaagctatatgtgaaaatgctttgcaatttgcggtttcatctcatacagtttaaaatttcttttgattcagctaagttggaaacactctttttgtagaatrtatgaagggacatttcggagcccattgaggcctacagtgaaaagctgaataattcgtgataaaaactagaagcaagctatctgagaaatagctttgcaatgtggggatttatttcacatagttaaacttttgtttctacacagtaggttcaaaactctcttttagtagaagctaagaggggacaatttagagccctttgaggcttatagtgaaaaattcaaagttttgtgattaaaaactagatacaaattatctgtaaaaatgtttggtgatgtgaaaattcatctcacagtgttaaacatttgttttgattcagtacattggcaaaaatttttgtagactgtacaaagggacattttggagcccattgagaccaatattgaaacaatgaacatcctgctataaaactagaaaagttcttggtga

SEQ ID NO: 785987 - DNA, 572 bp, Homo sapiens
ggaggcctgtagtgaaaaactgaatattatacgatagaaactatagaagctatatgtgaaaatgctttgcaatttgcggtttcatctcatacagtttaaaatttcttttgattcagctaagttggaaacactctttttgtagaatgtatgaagggacatttcggagcccattgaggcctacagtgaaaagctgaataattcgtgataaaaactagaagcaagctatctgagaaatagctttgcaatgtggggatttatttcacatagttaaacttttgtttctacacagtaggttcaaaactctcwtttagtagaagctaagaggggacaatttagagccctttgaggcttatagtgaaaaattcaaagttttgtgattaaaaactagatacaaattatctgtaaaaatgtttggtgatgtgaaaattcatctcacagtgttaaacatttgttttgattcagtacattggcaaaaatttttgtagactgtacaaagggacattttggagcccattgagaccaatattgaaacaatgaacatcctgctataaaactagaaaagttcttggtga

SEQ ID NO: 785988 - DNA, 613 bp, Homo sapiens
ataacattattctaaaaggaaatcacaagccattgaggataaaattgaaatatgtatggcaaaaatccagtctaaatattgagggtaattgagtattaaattctgatttctcgttaccaaggcaaaagggaaataaagcttgaattgcctcattaaggtaaacccaacaagcaatctcaatagatacatgtattcctaacactaaaatctggaagaactgtaccatggatattaacttggagaatgtctaagaagcccccagccaccggttcatcttctgcttcagatgctagagaaatttctccaaaatgcagatctgactgcctcaccctctaacctaaaacctttcaacagtgcaagtggagattaactgcaaatgagcacagtgtatcttactaggatgatgaacatgttctggactgctttataatgatggttgcacaattcaataggttttctwaagtcatgggattgcacacttaaaataggtggattctgtgatatgtacattttaccttaataacattgttaaaaaaaaaaaaaacaaaactttcaatggccccaggccaagacaatgtggagaaatgttcctctaagcatgctttatggattg

SEQ ID NO: 785989 - DNA, 590 bp, Homo sapiens
aaattaagagagactttttttaccctatcagcccaaggagacctgtataagacaaggaggaggatttgatgcttagtggagagaagtgggatgggtaaggaagcagatggaatagaattccaagagtggtagagtgggcccctcattgtgataaactccacttcattgtgagtgaatttactaaatctacagagtgccacatagcacsgttttccagggaaagggactgagtttaaagtccagttgaaccaaagctgggtgagtccttaatttcaggggcctatatagcgataataactaccaaataaaagataatttttcctaggcaggtgatggagactagggcaagcagatggctgcaaaattaacagaagttcttttatttttttaaatcttgaaacagaaaattcagaatcattagaaaatatgaaatcaaattaacatcacctagaaaggagctgtgatctgaagtacacgtgacttaacagtcattcagcactgagtggtgaccacatttaataataatatattgtgcatttcaaaattgctgaaagaatagatttttttaatgttctcactatacaaaaaaa

SEQ ID NO: 785990 - DNA, 530 bp, Homo sapiens
ctgcataaactgaatttgtgaaggactacctcttcctccattttctcctaatcaaagcaagttccccccttcaggtttctgagcagcatgagatcacagctttgttcaccgggttgaatttgaaacctaacccaaagaacttgagatttctttgaacctgtatagtgtaggcacaggcatcttgaaatactaaaagcgcttcaagcactaccacttctccttcccagattcccaggtcctcaagttgaaaagcactggactaattgattcttctgaagccctccaattactaactctgtcattttaacgtccgaaccggaataactaaggaaaatcaggcccaacctgaaaaggcatttgttaacrtgagatggactgtggctcattatggcaagggctggatatgtaaggatggaggcattttatttatgttaggagactgggccattaaccagtgttgtgaatgtgccttctacaggcgagtcttttggcatcccccagtggtaggcagtcagtcctttttgttcagt

SEQ ID NO: 785991 - DNA, 584 bp, Homo sapiens
cttctacaggcgagtcttttggcatcccccagtggtaggcagtcagtcctttttgttcagttgctatacacccactgcactgcagtgtcaaccccaaaggcagtggcacttacacattcctttgtgaggccagctgctggtttaacccatggccaggcctggtcctttttctccaagcaacagggaaggtgcttagaggcccatgggcttatctgcaaagctattttcctggagctcactttggagcatcccctcctgaccatggtagtgatttgagatcaggtgtcttcaaagagcagcccttggaccagtctacctcctgacgccctttcttctcatcagatggaaaactcacagaygggaaaaaacaagctgattacccgggtctcactccccacagacatcttccatctttggtcctcattagggctcttggtagctggctcgttgctaagtcaaacttgcaaggcacagtttttctgccacttctttagatctgcacttaattacagctgttccttcctgttggccattctccactgtttcaaacatccaagatactagtcttctaatgttcttatcct

SEQ ID NO: 785992 - DNA, 555 bp, Homo sapiens
tcttccctttctcctgtgaaatcttgaccctggccttgacccctttcctagcttcccaaacacccagtggttctcaagatcaatgtactaaaattgcctgctgtttcctgggccccatcccagtgccacatgttgggataggacccaggaatctgctttttaaaaataccctcggtgattctgatgcagatgttcagtctacctgctcactgagacccaaggtctggtaagcatcaaacactgggccaacactttcacttgctaagaacccagtattgtgggcacagaggtagggtctctgcatgwgcatcctggccatttttagcacacctctataggtatgtgtgtaatatacagatgaggaaatggaacccacgtggcttggctagagtcacagaacttcaaagaataggcacctgactccacacccaaatccagtatctttgttcatctctttcaccaagttttcttgagctcaccgatacctccaacccccttttcctcctccccatttttacagctaacatccccattcatgcctgatcagttccctcc

SEQ ID NO: 785993 - DNA, 540 bp, Homo sapiens
agccgattcgatcaactggaagaaagggtatcagtgattgaagatcaaattaatgaaatgaagtgagaagagaagtttagagaaaaaagaataaaaagaaacaaacaaagcctccaagaaatatgggactatgtgaaaagaccaaatctatgtctgattggtgtacctgaaagtgacggggagaatggaaccaagttggaaaacactctgcaggatattatccaggagaacttccccaacctagcaaggcaagccaacattcaaattcaggaaatacagagaatgccacaaagatattcttcaagaagagcaactccaagacacataattgtcagattcaccaaagttgaaatgaaggaaaaaatgttaagggcagccagagataaaagtcaggttacccrcaaagggaagcccatcagactaacagctgatctttcggcagaaactctacaagccagaagagagtgggggccaatatttaacattcttaaagaaaataattttcaacctagaatttcatatccagccaaactaagcttc

SEQ ID NO: 785994 - DNA, 432 bp, Homo sapiens
tgaatggataaattcctggatgcatacaccctcccaagactgaaccaggaagaaattgaatccccaaatagaccaataactagttctaaaattgaggccaccaaccccccaaaaaagcctaggattactcagatttactgctgaattctaccagaggtacaaagaggagctggtaccatatctactaaagtcttttaagttaaagtcttttttaatttttgcccttcaccctcatatcagttcttctaaactaagccataaacttmtaaacttatttctctagatgcatatctagtgttaccttgttaataataaattctccctttaaaaatgcagatagtaaggttgacccttgaacaatgttggggttaaggataccaaccctctgcagagtctacaatccgtatataacttttggttccccaaatacct

SEQ ID NO: 785995 - DNA, 600 bp, Homo sapiens
catcaagattatactaattacctcataagatttatataagggtaagttgaaataatccctgtaatgtcctaatatatataaagtggttggtattataagctatcattattgttcccactttaattgatattagtttataattccttaaagagatgctccccagtgtcaatggtaatgaacccatttcccaacctataaagtttctattgattacggcaggtgcttgaacccaatccagaatgaaattccagagattcgctggaacaacattgagcaacagagactactatttgaaattcttgcttgtttccttactgtttatgaactaaaatgttgcaaccatggttgttactatttataaggtratcatgaaatactagtcctgtctatgatgacaaaatataggattctgagtttcttgcagaaaatcctgcagaataggagacagcaaaacaccatgagtagtgatctaagtgagagtgagcattgctagctagcatttgttttggccctgccatccaactatatgaccttgggtatgtctccttacatctctgattgtcctgtaaaataaagaaattgggagtcatcattttaata

SEQ ID NO: 785996 - DNA, 687 bp, Homo sapiens
acaccacattgagacgataatggataaaaatcacacaatcatttcaatagacgcaaaaatagtatttgacgaaagtcaatcccctttcatgataaaaactctcaacaaattggctatagagtttacctcaccataatgaaggccatataagaaaggcccacagctattgtcatgtggaatgactacaaagtgcaagcttttcttctacgatttagaacaaggcaagggwactcactcaggccacttctacgtaatattgtactggaagtagcagccatagtaattagggaaggaaatgaaaaataagaggtctaaatcagaaaggaagaagtaaaattatctctttgcagatgacataatgtcatacatagaaaatcctaaagactcaaccaaaaaactgttggaactaataaacaaattatgtaaatctgtaggacacaaattaacatacaaaaatcagtagcatttctacacattaacaacacattattcaaaaagaaaattaagaaaataattccattcacaatagcatcagaaaaaaaaaatactttcatataaacttaactaaggaggtgaaagccttgtacaataaaaactacaaaatagatgaaaaaagttaaagcacacacaagtaagaagaaaggcattctgtgcttggatagaaagaatcaatattgtgcaaatgtc

SEQ ID NO: 785997 - DNA, 581 bp, Homo sapiens
atacatagaaaatcctaaagactcaaccaaaaaactgttggaactaataaacaaattatgtaaatctgtaggacacaaattaacatacaaaaatcagtagcatttctacacattaacaacacattattcaaaaagaaaattaagaaaataattccattcacaatagcatcagaaaaaaaaaatactttcatataaacttaactaaggaggtgaaagccttgtacaataaaaactacaaaatagatgaaaaaagttaaagcacacacaagtaagaagaaaggcattctgtgcttggatagaaagaatcaatattgtgcaaatgtccataccactcaaagtgatctacagattccaatttaattctagycaaaatcacaatggtattttttacagaaatagaagaaataaccctaaaattgatattgaaccacaaaggagcccaaatagccaaaacaatcctaagaaagaacaaagctggagacatcacatgtcctgattttaaaatgtattataaaactacagtaattaaaacagtatattacttgtagagatacagacacatagaccagtggaacagaatt

SEQ ID NO: 785998 - DNA, 641 bp, Homo sapiens
aatttgggaaacatacaacttcccaagactgaacaaggaagaaactgagtccttgaatagaccaataacaagatctgaaattgaatcagtaagtaaaagcctactaaccaaaaaaagccctggaccagatagatttacagctgaattctatcaggcataaaaaagaagagctggtaccaatcctactgaaactattccacaaaaatgaggaggaaggactcttctttaactcattgtatgaagccagcatcattctgataccaaaacctgttggagacacaacataaaaaaaagtcacttcaggacagtatccctaatgaacataaatgcagatatcttcaacaaaatcctagcaaaccaaatccagcagcaaacaaaaaagcaaatccaccaagattaagtgtgctttattcctgggatgcaagtctgtttcaacataakcaaatcaataaaagtgattaatcagaaacagaactaagagcaaaaccaaataaccctctcaatagatgctgaaatggcttttgataaaactcaatatcccatcatcttaaaaactctcaacaaactagagattgaaggcacttacctcaaaataataagagtcatctatgacaaacccacatccaacatcatactgaaga

SEQ ID NO: 785999 - DNA, 549 bp, Homo sapiens
agctggaagcattccccctgagaactggaataagcaaatatgcccaatctcatcagtcctattcaacattgtactggaagtcttggtcagagcaatcagcaagagcaagaaataaaaagcatccaataggtagataggaattcaaacyactgctcttcacaaatgatataattttatacctaaaaaatcccatagtctcttccgaaaagttcctagatctgataagcaacttcagtagagtttggagatacaaaatcaatgaagaaaaatcccattttgggaggccgaggcaggtggatctcctgaagtcaggagtttgagaccagcctgggcaacacggtgaaactggtctctactaaaaacacaaaaaattagctaggcatggtggtgggtgcctgtaatcccagctactcaggaggctgaggcaggagaatcgcttgaacccaggaggcagaggttgcagtgaaccaagatcatgccattgcactccagcctgggtgataagagcaagactccatctcaaaataaaataaaataaaaattaaaaaa

SEQ ID NO: 786000 - DNA, 617 bp, Homo sapiens
caagggtaccaaaaatacacaatagagaaagggtagtcttttaaaaaatggctctgggaaaaccagatacctgcatgcaaaaaaaaaatgagattggacccttaccttacactatacacaaaaattaaccgaaaatagattaaataattaaatgtaacacctgaaacagttaaaatcctagaataaaacataggtggaaaaccttttgggaattggtcttggcaaataatttattggatatgacaccaaaagcatagacaacaaaagcaaaaatagataactggtactaacatgtgtctgmacagcaaacaacaaggacaacaactaaaacctacaagaacagagcaaaaaggcaacctacaacatagaataaaacatgtgcaaaccaggtatctgatagttaatatccaaaatatataaggaatttcttcaacttaatagcaaaaaatcaactaacctaattttttaaatgggcaaaggatttcagtagacatttctcgaaagaacacataaaaatggtatatattatatataccatttatatatctatatctatatatataccatatatatatttgatgcccaacatcattaatcatcagaaaactaaaaatcaa

SEQ ID NO: 786001 - DNA, 617 bp, Homo sapiens
caagggtaccaaaaatacacaatagagaaagggtagtcttttaaaaaatggctctgggaaaaccagatacctgcatgcaaaaaaaaaatgagattggacccttaccttacactatacacaaaaattaaccgaaaatagattaaataattaaatgtaacacctgaaacagttaaaatcctagaataaaacataggtggaaaaccttttgggaattggtcttggcaaataatttattggatatgacaccaaaagcatagacaacaaaagcaaaaatagataactggtactaacatgtgtctgaacagcaaacaacaakgacaacaactaaaacctacaagaacagagcaaaaaggcaacctacaacatagaataaaacatgtgcaaaccaggtatctgatagttaatatccaaaatatataaggaatttcttcaacttaatagcaaaaaatcaactaacctaattttttaaatgggcaaaggatttcagtagacatttctcgaaagaacacataaaaatggtatatattatatataccatttatatatctatatctatatatataccatatatatatttgatgcccaacatcattaatcatcagaaaactaaaaatcaa

SEQ ID NO: 786002 - DNA, 571 bp, Homo sapiens
gattaaaaaagtgtctgttggatctgaagagccagaacactgagtcagaactgtgtctgggaggtgaattgctttcctgctgtcctggcaggggctctgaggtgggtctcatatttccctctgataagacttcagtgcatttctctgagcgctcctccagccacctctgtcaaggtggtgacatctgccaacaacttattattgcatttatttacctgctttagccacaactggtttctacccaggaacacgtcccctattggcatgaagcccraactattcaacccagtaaataaaatattggggtaaaataaataaattaaaaatgcaaaccacgagggaatgagataagcttcaagagacctctgccattccaaccccataggagataatctgctcacataccagcatattgccagtacagccagtatctgagaaagccattattaaaagtttctctataaccaaggaacctgtacatgttcttcactcctaaaagcatcacaagccaaattagggtataatacactacacatattaaagtcacatccttgagggggggaaaaagaaa

SEQ ID NO: 786003 - DNA, 526 bp, Homo sapiens
acagcttggaaatttctaaaaaatctacacataaaccttcccacatgactcagcaattcttcccctaggtatctacccaagggaaactaaaacatctccatgcaaaaattgtatacaaatgttcatggcagagttactcatgttaaccaaaaactagaaataactttatgtccaacaaytggtgaatgtataaacaaaatattatatttccacacaatggaatattattttgcaataaaaagaagcaaaccagcaaaacataaatacatgctaccatatggatgaacttcaaaaatactatactaatggaaggaatttaaacacagacgaatatattttatatggtttcatctttatgaaatgtccaaaaaaagccaaatctagtaaaaagcagattaagggtacttaaggctgagaatgaaagcaggcattaactgcaaactggatgacagaatttggaagttgacagacgtgttctatacttggcatgtgatgatggttgcatagttctataaacttactaaaa

SEQ ID NO: 786004 - DNA, 554 bp, Homo sapiens
agtaacatttactactaaaatatttccgtaatgtgattgtctttttttttttgagacagagtttcgctctgtcacccaggctggagtgcaatggcgcaatcttggctcgctgcaacttccacttccagggttcaagtgattctcctgcctcagcctcctgagtagctggaattacaggtgcccgcctccacacctggctaattttttgtatttttagtasagacggggttccaccatgttggtcaggctggtctcgaactcctgacctcaggtgacccacccgcctgggcctcccaaagtgctgggattacaggcgtgagacatcgcacctggcctataatgtgattctcttttttctctcttttcttcaacatttattaattagaattctactacaaggaagttatcttttctatttatttatttaacccatctatttatatcagcttgaactcatgaatattttatttcaaaagttagcaaactttttctggaaagggctagagagtaaatgttttacgctctgtgggccatacagtttctgtcacaactac

SEQ ID NO: 786005 - DNA, 623 bp, Homo sapiens
gtaatcccaagtgggttttgaaggtacaaaactcactggtaatagtaagtacacagaaaaacacagaatattataacactgcaactgtggtatgtaaactactcttatactaagtagaaagactaaatgaaccaataaaaataataactacaacaactttttaagacatacgcagtacaataagatagaaataacaaaaagttaaaaagcaggaggatgggccrggcacagtggctcatgcctgtaatcccggcactttgggagctgaggcaggcagattgcttgagcccaggagctcaagaccagcctgggcaacatggcaaaatccatctctacaaaaactacaaaaattagctggacatggtggcacacacctgtagtcccagctactcaggaggctgaggtaggagggtcacctgagcctgggaagtcaaggctgcagtgagtcaagactgtgccactctactcctgcctgggcaaaagagtgacatcctgtctcaaaaaatacagcaaatttttaaaaatgaggggaccaagttagggcatagagtttttgttttctctttgtttatacaaacagtgttaagttgttatcagcttaaaataatggatgatagtatttg

SEQ ID NO: 786006 - DNA, 582 bp, Homo sapiens
accactgcactccagcctggtgacagagtgagactgtctcaaaaaaaaagacaatgatagtagtgaaatgtcacatatattttaaagtcacagactttactgggaaataaaaccattgttttattagtcaacaattgaaacattatctccaaatgatagctttacattttgcaatatttttattttattctgcatacccctatgagcattcaataatacttgatttacatattttgtcaccatttaaaagtaagtatacttgtaataaatgtttctgaatatagacttgctcataatttaatctgcaatataatacagtgtaattggatgggaccagataaattcatttaaaatttcttctaaattataacttacattattacaagtatggggtggtcacctgycaatataaaatattggaatatcaccgagcacttcaaatcttactcccttatttgtgatccattctagtataccctaggttatcttcaaaaatttttctttaaaaatatgacaaaatttacatcattcaaaggcattcatatataaaatacaaacactgggagatctgaattatatgtt

SEQ ID NO: 786007 - DNA, 592 bp, Homo sapiens
atttagcctggttttgaactttatatatatggaataatactgtattactctgtggcttactcctttaatacattttttgtgggaattgtccatgtcaaaaacgaaaagaacttgtagctatggttcttttagtttttattactctgtrttccattatagtaatatgctacaatccatttatccattctgtttttgatggacatttggattgtttcttttcttttcttttctttttttttgagacagagtcttgctctgtcgccctggctggaatgcagtggcacgatctcagctcactacaacgtccgcctcccggattcaagcgattctcctgcctcagccttctgagtagctgggattacaggtgcctgccaccacacctggctaattttttgtgtttttagtagagatggggtttcactgtgttggccaggctggtcgcaaactcctgacctcgtaatccgcctgtgtcagcctcccaaagtgctgggattacaggtgtgagccaccgtgcccggcccatttgggttgtttctaagatgataatgcacttccatgagcattatttttgtctttctatgaacatttttaa

SEQ ID NO: 786008 - DNA, 608 bp, Homo sapiens
tggttttgaactttatatatatggaataatactgtattactctgtggcttactcctttaatacattttttgtgggaattgtccatgtcaaaaacgaaaagaacttgtagctatggttcttttagtttttattactctgtgttccattatagtaatatgctacaatccatttatccattctgtttttgatggacatttggattgtttcttttcttttcttttctttttttttgagacagagtcttgctctgtcgccctggctggaatgcagtggcacgatctcagctcactacaacgtccgcctcccggattcaagcgattctcctgcctcagccttctgagtagctgggattacaggtgcctgccaccacacctggctarttttttgtgtttttagtagagatggggtttcactgtgttggccaggctggtcgcaaactcctgacctcgtaatccgcctgtgtcagcctcccaaagtgctgggattacaggtgtgagccaccgtgcccggcccatttgggttgtttctaagatgataatgcacttccatgagcattatttttgtctttctatgaacatttttaacgtgtatcctggtgaacatgtgca

SEQ ID NO: 786009 - DNA, 664 bp, Homo sapiens
tcctaacccctctccttcagaaggattgggatgaggcctgggtatctgtatgcttgacagactttttgggttgttcaatcagcacttggtgcttgcaaacctctgctccctaccattttttaatggtcacataatatttcattatagggttgcatcataatttatttgctatgttactggatgtttgttaatgatttttttttttttttgagacggagtcttacgctgtcacccaggctacagtgcagcggygtgatcttagctcactgaaacctctgcctcccaggttcaaacaattctcctgcctcagcctcccaagtagctgggactacaggcatgtgccaccacgctccgctaattttttatatttttagcaaagatggggtttcaccatgttggccaggctggtctcgaactcctgaccttgtgatctgcccacctcggcctcccaaagtactgagattacaggcgtcagccacagccctgctgttaatgattttttagatatcataagtaatacaccatagtagcttttttaattggcccgtgcgaacacattatttctctatgccagccatcctgaagagctgccagaataacttgtttcaacaccatgtggaagggctttttcttccttttttcagattatttatttcaatgtgga

SEQ ID NO: 786010 - DNA, 509 bp, Homo sapiens
tagggtgcccattggagtatttatgtataatcacatcctggagaggccagcgatgggctcagggattacggaaatgaccttcatgaacaagatagtccctgcaacaaaacaggttttttgatcctccgtgagatctcttttgattgtctacgtgtggtggctctgggtggaaacctttctcttaaaccgcacagtctgtaagtcgtaaagttgtaaacttttagatctcacagtstgtaaataagctgtgtgcctattctgaataggaaggacatggaaaattgggatttaactgcttctttcgctaattcatgatgaaaataagcttgcaatcctttctttggaaaagttacatgcttgctggtgatggaccagcaaccagtcccaccagagccaatgagaggaggtgtgctcccaagaaaataactgctgtgcctccccctcagccagaaatgacctcagacattcaccggcacactgcagactgtggtaatgtgacactctagagc

SEQ ID NO: 786011 - DNA, 443 bp, Homo sapiens
gctttgaggggaccgcctgcttcaggcagggaaggtgctggtggagggcagcgggaggatggctttgggttttgggtggtgatgggatgttcaatgtcagagaaccctgggatcggtggctgagggagggtcgtgtgtttcctgtggacgtttgaactggtgggactgggccatctcgcagagccctctcagaagaggaaggaggggctgctrgggtaaccctgtggcctgagaggtgggatgcccggaggggccggacaagcagatcccaggggaaagcaggggcgtgggcaacaatgggaggagggcaggtggctagggggcccagcctcaggaggctgaggcccacagtgagcggaacctttacgttctccagaaaattggggaggagttcctgactgacctgagccagctgaagaagctgctgccgctggtcagtgacg

SEQ ID NO: 786012 - DNA, 563 bp, Homo sapiens
ccacctcaagatgtttgcaactgcagggccgcagtgggcgttgccaaagaacacgaggccgacgttggggaaaggttgtcaaattccatcagactcagagagcttagagccactttactacagtaccaatcaagtgcaaattttcttcctctttctccctgctttccctcctcatgctccatcccagatgggccagaaaccagaaacagaagtgagcaaaccagggaggaaaaaggagggagagaaggacactgtctgctgtccccaaggggggtgatcttcctgcaggtggctgtggcaagagcaggggcagaaggctcatctgtgagtcaagacttaagygtggattggactggagatttgattttctgagtggagaccatgtttgcaaacaaagctagcttcaggtgaggcgcagcggctcacgcctgtattcctggcactttgggaggctgaggtggatcagcctgaggtcaggatttcaagaccagcctggtcaacatggtgaaaccctgtctactgaaaatacaaaaattaccccagcatggtggccggtgcctgta

SEQ ID NO: 786013 - DNA, 666 bp, Homo sapiens
taggatgcaggtaaatcttttgttacttgctgtttacacatgttcactgtgtgaaaattcgctgagctgtactcttaatgatttgtgtgctcctctctgtattgtatctaatttttaaaaaattcaaacagtaagaaaaaagcctttgctaacacaaatttcctgtcttgctgtcagtttggagtttacaractatggtcaccatacttaataccatatatagcaatagtgacatccaaatatttgattaaaattctctctataaaaaatagctttaaattatgaaaaataagtacttgaaatcaaacttcatcaaagaaaaactgtattgctacaggaaatatcaagttctgtacttctaatatgatttaatggaaggaaaggacaaactgttcagtacaaatttaaaaatcacttaaggctaggcacagtggttcatactataatctcaactgtttgaggggctgaggtgggaggatcacttgagcccaggagttcaaggctacacggagctaagattgtgccactgtattctggcccaggtgacagagcaacatcatgtctctcaaaaagacacaaaataaataaaaataaaaacaaaaataaacataacttaagtcataggacggatcaaattccacatggaccaaaagaattgtacaatga

SEQ ID NO: 786014 - DNA, 593 bp, Homo sapiens
ctgtattgtatctaatttttaaaaaattcaaacagtaagaaaaaagcctttgctaacacaaatttcctgtcttgctgtcagtttggagtttacaaactatggtcaccatacttaataccatatatagcaatagtgacatccaaatatttgattaaaattctctctataaaaaatagctttaaattatgaaaaataagtacttgaaatcaaacttcatcaaagaaaaactgtaytgctacaggaaatatcaagttctgtacttctaatatgatttaatggaaggaaaggacaaactgttcagtacaaatttaaaaatcacttaaggctaggcacagtggttcatactataatctcaactgtttgaggggctgaggtgggaggatcacttgagcccaggagttcaaggctacacggagctaagattgtgccactgtattctggcccaggtgacagagcaacatcatgtctctcaaaaagacacaaaataaataaaaataaaaacaaaaataaacataacttaagtcataggacggatcaaattccacatggaccaaaagaattgtacaatgacaatgagcccacgtaagattatg

SEQ ID NO: 786015 - DNA, 612 bp, Homo sapiens
gctgagctgtactcttaatgatttgtgtgctcctctctgtattgtatctaatttttaaaaaattcaaacagtaagaaaaaagcctttgctaacacaaatttcctgtcttgctgtcagtttggagtttacaaactatggtcaccatacttaataccatatatagcaatagtgacatccaaatatttgattaaaattctctctataaaaaatagctttaaattatgaaaaataagtacttgaaatcaaacttcatcaaagaaaaactgtattgctacaggaaatatcaagttctgtacttctaatatgatttaatggaaggraaggacaaactgttcagtacaaatttaaaaatcacttaaggctaggcacagtggttcatactataatctcaactgtttgaggggctgaggtgggaggatcacttgagcccaggagttcaaggctacacggagctaagattgtgccactgtattctggcccaggtgacagagcaacatcatgtctctcaaaaagacacaaaataaataaaaataaaaacaaaaataaacataacttaagtcataggacggatcaaattccacatggaccaaaagaattgtacaatgacaatga

SEQ ID NO: 786016 - DNA, 588 bp, Homo sapiens
ggttgtcagtgaaaataagcaactcacatatccaaagctgggcaggtctaagactgcgcattcttctcccagccctgggatgtgagggggcccttcccccaaaactcaggaagaagctcatcgtccatgagaggaggagtcaggcatgtgggcagtgagagcccctgcagagatcagaccactctgcccagtctgtgtcacttcatcagttattgctgatccatctccatcctattgcccctaaggtgtctgtcctgatggtcttacttttaacatccttatggagatataattcacataccacacttcatccatttagtgtgtatcattcartggtttttaatatattcgctgttacacaactatccccacaatctaaggttagaagattttcatcactccgcccctattagcagtcactccccattcccctctcttcctagtccctggaaaccactactcaactttctgtctctctagatttgcctgttctggacatttcatataaatggaatcatacaatatgtggtcttttgtgactggcttctttcccttagtataatgttttcaagatgcatccctgttgta

SEQ ID NO: 786017 - DNA, 591 bp, Homo sapiens
cacacacacacaccccaatcactcagctgtcccatcccacctgccccaccacaggcatcttcagtggtgaagtgggggtgcccatccttgtaggcgattctttccccctatgcagagccctctcctctttccaccgatctggcctgaggcctgtgggtcagtgagtctggatatggagctggttctggggcaagaacagacttgaaggaagcctgcaaaattgaggagaatcccagggctttgagtaacagaggtcagccccccaacttgtcggaaaggaggatgagccagaggcctggctcaagggacagggagagcccaagacagcagctgccagaggcctagggcatgcgcctcargaccttacctggagcaggccccttaggactccatggggtctgtgcagggagcctgggaggctgtcacccaggcttagggagctgctctggggagcagctgaccgagaagaaagcaagaattcagcacacggcttgcacggcttccccctgcatgtccccgctgtggcaggctgcactgggggccaagggagccacagatccttcctgcagcccacctctccaggtgtcccgt

SEQ ID NO: 786018 - DNA, 591 bp, Homo sapiens
cacacacacacaccccaatcactcagctgtcccatcccacctgccccaccacaggcatcttcagtggtgaagtgggggtgcccatccttgtaggcgattctttccccctatgcagagccctctcctctttccaccgatctggcctgaggcctgtgggtcagtgagtctggatatggagctggttctggggcaagaacagacttgaaggaagcctgcaaaattgaggagaatcccagggctttgagtaacagaggtcagccccccaacttgtcggaaaggaggatgagccagaggcctggctcaagggacagggagagcccaagacagcagctgccagaggcctagggcatgcgcctcaggaccttacctggagcaggccccttargactccatggggtctgtgcagggagcctgggaggctgtcacccaggcttagggagctgctctggggagcagctgaccgagaagaaagcaagaattcagcacacggcttgcacggcttccccctgcatgtccccgctgtggcaggctgcactgggggccaagggagccacagatccttcctgcagcccacctctccaggtgtcccgt

SEQ ID NO: 786019 - DNA, 482 bp, Homo sapiens
accaaacatgccagttgacatgagccctatttgtctttttttgtgttttgttttgttttgttttgtttagacagagtctcactctgtcaccccggctggagtgaactggctcaattttggctcactgcaacctccgcctcccagattcaagtgattctcctgcctcagcctcctgagtagctgggattacaggcacgtgccaccacgcctggstaatttttttttttttttttgcatttttagtagaaatggggtttcaccttgttggtcaggctggtctcgaactcctgaccgcatgatccgcctgcctcagcctcccaaagtgctgggattacaggtgtgagccaccacgcccggccgacatgagccctatttgtaaaatttgttcctttaaaaagtttagtatacttggcacatctcatcaaaacagaaaacaatcactgaaacaaaaccctgttcattccttcacagttctttagtga

SEQ ID NO: 786020 - DNA, 612 bp, Homo sapiens
tcctatttctccacatcttctccagcacctgtagtttcctgactttttaatgatcaccattctaactggtgtgagatggtatctcattgtggtttttgatttgcatttctctgatggccagtgatcatgagcattttttcatgtgtctattggctgcctaaatgtcttcttttgagaagtgtctgttcatatactttgcccactttttgatgggtttgtttgattttttcttgtaaacttaagttctttgtagattctggatattagccctttgtccgatgggtagattgtaaaaattttctcccattctgtaggttgcctgttcactctgatggtagtttcttttgctrtgcagaagctctttagtttaattggattccatttgtcaatttggcttttgttgccattgcttttggtgttttagtcatgaaatccttgcccatgcctatgtccggaatggtattgcctaggttttcttaaatcagagcgcctcttctcctccaaaggaatgcagctcctctccagcaatggaacaaagctggacagagaatgagtttgatgagttgagagaagagatgaatggctaactagagtaaacagcatagagaagac

SEQ ID NO: 786021 - DNA, 584 bp, Homo sapiens
taacctaagattataaggctattaaaaaaggaaagccaaacacattgagcattaaaaaatattattaataacaaaatggggaaaatttccttggcttgtgttactttacatacttttacttgttcctttatctgcttgagtgtctactatgtgccagactttgtttttggtgctggggatgtaatggaaagcaagacacacttccttttctcaagaagcttgagagggctgggtgtgatggctcaagcctgtaatcccagcactttgagaggccgaggcgggaggatcatttgaggctaggagttcgagatcagcctggtcaatatattaataaaaagaccatgtctccaccaaaaaaaaaaaaaaaamcaaaaaaacataaaacaaacaaaacaaaaaacaaaaaatgtagccagacatgatggtgcacacctgtagttccagctacttgggaggctgaggcaggaggatcacttgagtccaggaattcgatgttgcagtgagccatgattgtcactgcactccagcctgggagacagcgcaagaccctgtctcttaaaaacaaaacaaaaaaagaatgggag

SEQ ID NO: 786022 - DNA, 574 bp, Homo sapiens
caaagttgtccaggttgtccagtaatagactatccttttaaccacagacttaaatctgtgtttttggagacagggcactaggaaagtgttcatagggcatgctggtatggacaaagttggatactgttaatcagcacagcccttcccactggagctctgcttttgattttacacaactccagggggcaccattcacatcaaagtcatcatagactcagtcatcagaccattttcaacatatggcgttaaggtgtcttgagaaagtgagaggcctttttctagcggggctgctttccatatgctctggtccacccttccaagaaccacagatagcccatgaacccttcttagacttactcattcattcagcatatgttgggtgacacccactgtgtgccaggcattgttccaggcactagagatgcatcygtggacaaagtagacaacagtcaatactcacagtgagaaagacagacaaaaatcaatatttgtaatagaataaataagtacattgtattgtagggtgagaaacgctatgaatgaggaacaaagtagagtctttcgggggggtggg

SEQ ID NO: 786023 - DNA, 524 bp, Homo sapiens
aaaaacaaaataaaataaagctgcacacattattgtttaattcgtaaaaggttgaccctactttcaaggtaactgtcagttccaaacttagagacacaagtattatgttcacttctctaagagcactgttcttcattcaagcttgagatgatcgctccataaatgtagtgttgaaatctatacttgtggaaacccaggtcattgtatatctgttttcttcatatatatttattatttattgtgtcagggaaaatacatgcactatctcatttaattttctcaaaaattgcaggaggtgggtgctaatgttaytcgcattgtacagatgaggaaactgcagctcagaggaatatgcccagtgtcttggagctcaagactggtagagatgggattggagcagagtctctgactccagaatatggggtgtttgatcatttggctatggtgtctctgggacatgccaccacataccaagacctactcaagtgcaaggtctttaaatgctattggcagttgaggccatg

SEQ ID NO: 786024 - DNA, 583 bp, Homo sapiens
gcccagtcagagcagattttgaatgtccccaacataaagaaatgataaatgtttgaggtgataggtatgctaattaccccaatacattgtatacctgtatcaaaatatcacactgtaccctataaatatatacaattattatgtgtcaattaaaagttttttttttwaagattgggccattccacataggcccaggtgcctgcctcagccctggagaaagagaggggcataaagaaatctaagttgctttctcctcagtctacttaatccctgacaaaacctggtacatcttccacagtgagatcatatgtcgcctcttccatgaagccttccctgattccttcaggcagagtgggtgaggatttcctctgggctcctcattgccttgactaccttgtcgcatcctaccacgtaacagcaaagtctgattttccctttacatgcctgaagcagacactctcagggccttgcccacatccccactcttactgcttcagtgcacagctggactgtgggtttctagctgccaacacctgtgtacctttacccatgggccttctctcaccaccagagagcctgcttt

SEQ ID NO: 786025 - DNA, 621 bp, Homo sapiens
gtcagatgctggatatttttatattcctataaatacttttgagctttgttctgggatgcagttaggttacttagaaactgttgaatgcttttgagtcttgctttcagccttgccagttgggatcagagcagtgtttggtccaggagaaatttttcccactactgaggcaaacccttctgagtattctacccaatgccccatgaattgtgaggttctgcaattctggcaggtgggaacaggaactattcccagctccattatgagctctgaagcttgttgcttctgatcttttccagtggttctctctcagccctgggtagtttcsttacacccatgtgctcatcagttctcaggtggccactcaaggggaactgtgagcaaacctccagagcgctcccagcacaactttctttttctgggagttctgctctgccaattccagccacattagcctccgctgacttgcagctccatctccccagctcagagagaccacgggcctccacctgggttttcccttcttggaaactctatcctggggcaatcatacagctcaccatctgtttctcctcttgcaaggatcactgtccatgcctaaggcccaatgtcttggaaacctag

SEQ ID NO: 786026 - DNA, 546 bp, Homo sapiens
ctcaaaactgtcacccacatgaaggatcagctttgaactagagtagcaactggccatgcctagcaggaacttcttagagacttggatgacatccttgtcaatgtcacactggaccacagactccatggagaggtgcttccccaccttgtgcaagacacccatctctgcccacgatgatcagcacctttcgtggcttggggtggctgcagagaggcaggatggctaccatctcctggcaggagaactcatccctccctatgcccaggacgatgccatccaacaccagcatattgctgtaggttttactgcagaagacaaggatgttctggtagtgcgagtgctggtcgtggagcagagacaaggcctgcccggaccacaggctacacgtctggtggaacgagmcttcggggatggcagtgaggctggaggcagcagggcccttagggtcaggctccatggcaggcaggcaatgtggggcacggacttgggactacaggccacgtggagccacagcacactgggaccggctgcattatacttttgaac

SEQ ID NO: 786027 - DNA, 531 bp, Homo sapiens
gcatgtgactactgagcacattaaatgtggctgatgtgactggacgtggtggctcacacctgcaatctcagtactttgggaggccgagatgagagaatagcttgaggccaagagtttgagaccagcctggtcaacatagcaggacccccatctctaattttatttaattttatttatttatttattttgagactgagtttctctcttgttgcccacgctggagagcaatggcatgatagcggctcaccacaacctccgcctccgggttcaagtgattctcctgcctcagcctcccaagtagctgggattacaggcatgtgccaccacrcccagctaattttttgtatttttattttttttttagtagagacagggtttctccatgttggtcaggctgctctcgaattcacaacctcaggtgatcagcctgcctcagcctcccaaagtgctgggattacaggcttgagccaccgcgcccggcctccatctctaacttaaaaaatattttttaaaaatgtggctgatgtgact

SEQ ID NO: 786028 - DNA, 494 bp, Homo sapiens
agcagcaccagactctaaagggagcgagcactgatcaactggaagggtgagtggctcttttcaaggtgaactggtggctgtctgttcacaagaaagactctttgggcatcatgtgttacaggcttattgtctactattgaggggtgagtcttagggctggttcttttctctctggactagtgggctttgccgcagaaactcttacagtacatggtaacacacacgcgcgcacacacacacactyacacactctctcacacacatgtccttatgctgcttcctttccttctcagatcagctgaagagaagagtagaggggacttgtcccttggcacctctccgactggcttacaggcctcccaggatcaaggtttccttgtgagtgtgtctggtgagggtgtggcgtgaggggcacctttccagaaccagccagtgtttccaactctccatgagtgggcggggctttgggcccatgcattaggggatggttagga

SEQ ID NO: 786029 - DNA, 646 bp, Homo sapiens
acataatttcaagactaactattaagctacgatagttaagaccatgcaataccagagcaagaacagacaaagaaatctatgaaacacaagaaagagcctggaaatagaccctcacttaaatagtcatttaattttcaacaaaggaaatccaatggagaatggacaatcttttcactaaatagtcctgagacaaatggatatgtacatggaaaagaaaaaaacctcaacttgtacctcataccatatataaaaattaattcaattatataaaaaaaaccccccgcattcctatgtttgttgtaataccattaacaatagcaaagtcatgaaccaacctatgtgtccatcagtggtckattgaataaagaatatgtggtacatatataccatacaatagcacacggccataaaaggaatgaaatcatgccctctgcaacaacatgagtgaagctggaggctgtgatcctaagtgaactaactcagtagcagaaaaccaaatatcacatgttctcacttataagtgggagctaaacaatgagtacacacggacagaaagttggaaacagtagacactgtggactccacaaaaaggagggtgagaggaagatgaagagtgaaaaattacctgctggatacaatgttcaat

SEQ ID NO: 786030 - DNA, 646 bp, Homo sapiens
acataatttcaagactaactattaagctacgatagttaagaccatgcaataccagagcaagaacagacaaagaaatctatgaaacacaagaaagagcctggaaatagaccctcacttaaatagtcatttaattttcaacaaaggaaatccaatggagaatggacaatcttttcactaaatagtcctgagacaaatggatatgtacatggaaaagaaaaaaacctcaacttgtacctcataccatatataaaaattaattcaattatataaaaaaaaccccccgcattcctatgtttgttgtaataccattaacaatagcaaagtcatgaaccaacctatgtgtccatcagtggtctattgaataaagaatatgtggtacatatataccatacaatagcacacggccataaaaggaatgaaatcatgccctctgcaacaacatgagtgaagctggaggctgtgatcctaagtgaactaactcagtagcagaaaaccaaatatcacatgttctcacttataagtgggagctaaacaatgagtacacacggacagaaagttggaaacagtagacactgtggactccacaaaaargagggtgagaggaagatgaagagtgaaaaattacctgctggatacaatgttcaat

SEQ ID NO: 786031 - DNA, 611 bp, Homo sapiens
atttcattaattccctctctaatccttattatttcctctttctacttgctttgagcttcgtttgctcttctttctccattgtcttaaggtagaatgtttggttgttgatatgggatctttcttcttttttagcgtaggcatttaaacttccctgtgagcactgctttcaccgcatcccctaagttttggtatgttgtgtctttgttttcattcatctcaaaatattttcttattttcctctgcttttatcttagacctgttkgttatttagtagtgcgctgttaaatttacacatgttcgtgaatttcccaaatctttctgttacttttaattttattctcttgtgatcagaggacgtatattgtatgatttcaatccttttaaatttattaaggcttgttgtatagcctgacatacagtctattctggtgaatgttccttgtgcacttgagaagaatgtttattctgttattgggtacagtgttctattgatgtctattaggtctgctttgtgtatactgttgttcaagtcttgtatttccttgttgatcttatgcctcattattctatccaatatttaaagtggaatatttaagtatctgaatattaat

SEQ ID NO: 786032 - DNA, 620 bp, Homo sapiens
accatagcttagttgggccagttattaaacttcatataaatagaataattcacttagtactctttcatgtctggctttgttcactcaacataactttgtgaacaaagttaaagttatgtaggaaaattatttagctttgtgagggtttacccttggcccaagaagatcttattaaagttttataaaaaggccaggtgtgcagtggctcacacttgtaatctcagtgctttgggaggccgaggygggagtattgcttgaggccaacagtttgagattacgccagcctgggcaacatagcaagacctcatctctacaaaacatttaaaaattagccaggcctggtggtgtacctatagtcttagctacttggggagctgatgcaagaggatcgtttgagcccaggaatttgaggttacagtgagctatgattgtgccactgcactccaagtgggtgatacagtgagatcctgtctctaaagtaagtaagtaaataaataaattgcattatttaggtaaataggatgattttatgaggttttcagacattaaagctgacaaaagttaatagtcatcacatcaagatttacatacataatcacattcaaaatgattaagaataa

SEQ ID NO: 786033 - DNA, 506 bp, Homo sapiens
atgaatctactaatttagctgcttttccatcttttccattgctgcatatatagatgttactttagcaccttctggagcagcctcacatacagatcagtgagtttcctcttcttttatctgggtgtatcatatggttgattcattaacaatgaattcaccactaatagcactataatttctgcctaaakgaagcttatccaaaatgcacatttttccccatgagacactaccatcttctcgcactctgaaacaccagacagcacttcagtactatgcttggcgcaattttaaatggcaaaatcaccattaaaaagtgcaaaaatgtggaaaacatggcacaaaataggccacaaaatggatacatttgtagtaccagagctgagacaggaaggcagaacatcatcttgtttacctcagctgggaatgtgcacatgaggtgactcaaaatgtttaccagttcatgcatgtccacaagtgactatgagagtgctgaaatgctgattcat

SEQ ID NO: 786034 - DNA, 506 bp, Homo sapiens
atgaatctactaatttagctgcttttccatcttttccattgctgcatatatagatgttactttagcaccttctggagcagcctcacatacagatcagtgagtttcctcttcttttatctgggtgtatcatatggttgattcattaacaatgaattcaccactaatagcactataatttctgcctaaatgaagcttatccaaaatgcacatttttccccatgagacactaccatcttctcgcactctgaaacaccagacagcacttcagtactatgcttgrcgcaattttaaatggcaaaatcaccattaaaaagtgcaaaaatgtggaaaacatggcacaaaataggccacaaaatggatacatttgtagtaccagagctgagacaggaaggcagaacatcatcttgtttacctcagctgggaatgtgcacatgaggtgactcaaaatgtttaccagttcatgcatgtccacaagtgactatgagagtgctgaaatgctgattcat

SEQ ID NO: 786035 - DNA, 473 bp, Homo sapiens
gagaaatgttgtcctttgtccacggcacctgcactaacccctcccagaaagtgggcatgcagtttcccaggccaggcgagtgttcgttgctcaccgaagaccagtgtttactagcaggattgtcgccagaagcagctgcattctccccggatgcagacctgcccgttggtagggactctgctcacacggaacatggacggttacacctgtgccgtggtracgtccaccagcttctggatcatctcggcgtgggtgttgtggaagggcagcccatccacctccatgcccacgatgcccgagacgccactccggactttgtgctgcaccaagatgcccagcattttttcttcctggaaaaaaatagggcagaaatagaaggagtggagggggaggaaaaagaaatttcttttatacacatttataagtgagaaggatcctttgccttgacatacttgctttttaaaaaagtaaaa

SEQ ID NO: 786036 - DNA, 585 bp, Homo sapiens
aggaaatgctaaatgtgagttgaggttatgaaaataaaattgaggctgggcacagtggttcatgcctgtaataccagcactttgggaggccaagaaggttggatcgcttgagcccagaagttcaagaccagcctgggcaatacagcgaaaccctgtctctaccaaaaaaaaccaaaaccataaattagctgggtgtgctggcacatgcctatrgtcccagctactcgggaggctgagatgggaggatctcttgaacccaggaggttgaggctgcagtgagctgtgactgtgccactgcaccactccagcctgggcaactgagcaagaactgtcaaaaataaaaataaaaataaaataaaataaagaagggagggagggaagaagggaaaagaaaaacgtactttttttcccatccaatatcatggagcctctgaatttctctagggactgcaagggccatggaccaaaggtaaacagcctctggtgaatcacgggcagagggaggcaagggagaacatcacaggaggagctggtgttcactctgcctcctgaatccacacaagcaacaagcctgtccccagaccc

SEQ ID NO: 786037 - DNA, 613 bp, Homo sapiens
catggtctctttctggagaggatggtggactctggaggcctcacctttttggaggatactttatggtctaatgtgatttgtgcatcccccagctgccttgggctccatggaaggcagtaacacttttctttgtagataaactgagtgatttctctgagtccttttacctcaaaatcattttttttaacttaatgacaagagagaggaaaaaacaccctttaacatttctaatttgattgaaagcccccagaagacagctccaagctggagtttcccagctstttggtaaaatgagcttctctccttgaggagcatttcacggcagcggggaacagctcaggtgcccctcccgacagtcccactgggaaggttctgctgctactttcattgtgtaggtgaggcttagaaaggtcacagtttgctagtaaagagcgaagctgggactcatactcaggctgtctccctccaggctccaagaccctggctgctctgctctgttgcctcccagggtcctagcaagcagtcgtcaacctggggttaagctggtgttcgctgctcgtatataacaggttgctgtagactaataccttggtggctctctctgtatatatta

SEQ ID NO: 786038 - DNA, 570 bp, Homo sapiens
taaggggatccgggacacttgcaacttcctgctcactaggtctgatattgtcaatattgtggatcaagacccctttatactatattgtctcaaacagcaggagagtccttgggtaagactggatgttcactgtcactgctctaagtgaatacaaattgcttccgatcctctttcttgatagggattkaaaaggatgcacacattgccagatcatcagctgcgtaaaaaatacaagagactgtgtctatctagtaaagatcccatctgcacagcagttgcaactgggactaccagcttgttaaatttgcagaagtctaccctcatctggtgtgctctgtctagcttctacaaaaagcaagactggagaaataagcaggattgtacatcttttaaattgtggttggtatcactcttcattcagaatgatttactcttgggtatcttgcccaggggtggaggacccagtatgcaatgtcatgagcttccacttggccttttctttttctttttttattattatattttaagttctggggtacatgtgcagaacgtgcagttttgttacatagg

SEQ ID NO: 786039 - DNA, 626 bp, Homo sapiens
ttattataaaggcaagttaacccctcttgccctggctctggctcttgcactcttttgttcttccaccttccacaatgggaaacacagcacaaaggccctcaccggatgccagtgccatgcacttggacttcccaggctccaaataaacttatttctgtgaaccaaatgaacttattttctttataaattacctagtctgcggtattctgctatagcaaaagaaaatgaagagagtgggcaatggcgaggggaaaactgctccccccaaccctcagatgtgggtcacacatgatatatgcttgcttcagagttgactatgcaatgcagatgagattgtgagctatgatcttccatggaccactgcagcatcagagaacaaagaggcatgtgcactgcagggatactrcatgaatgttcccaagtgagagctggaagtgatagtaaatattaaggaaactgtcaatgcttaggagagttgtataagactgagaacctcatccatggagcacattaagctacaggccttctccacagggttcctggacaatgagctagggactgaaaccatgcccagttaggtcaggaggcagtctctctttccttatcatccatatttcccacccata

SEQ ID NO: 786040 - DNA, 638 bp, Homo sapiens
tgatgttggaagcaagattagctaagtccagtggtcaaaggtttaaatatgttacatggtttggctacgtccccacccaaatctcaacttgaattgtatctcccagaattcccaagtttgtgggtgggacccaggggggtggtaattgaatcatgggagttggtctttcccgtgctactctcrtgatagagaataagtctcatgaaatctgatgggttaccaggggtttccacttttgcttcttcctcatttttccttttgctgccaccatgtaagaagtgtctttcacctcctgccatgattctgaggcctcctcagccacgtggaactgaaagtccaattaaacctctctttcttcccagtctcgggtatgtctttatcagcagtgtgaaaatggactaatatgatatgactgaagtatttttttctctagctacccaaatataacaattacattttttacagttttatattacacataatttgctaacatttattcagtgcctgctgtgtactatgccgtgttttatgtgacttagcagcattgtaatatgaaatacttataccagccctatgaggtagagaaatgaaagaattggtagactcccatacttttaagatccaattgccctgtcctt

SEQ ID NO: 786041 - DNA, 638 bp, Homo sapiens
tgatgttggaagcaagattagctaagtccagtggtcaaaggtttaaatatgttacatggtttggctacgtccccacccaaatctcaacttgaattgtatctcccagaattcccaagtttgtgggtgggacccaggggggtggtaattgaatcatgggagttggtctttcccgtgctactctcatgatagagaataagtctcatgaaatctgatgggttaccaggggtttccacttttgcttcttcctcatttttccttttgctgccaccatgtaagaagtgtctttcacctcctgccatgattctgaggcctccycagccacgtggaactgaaagtccaattaaacctctctttcttcccagtctcgggtatgtctttatcagcagtgtgaaaatggactaatatgatatgactgaagtatttttttctctagctacccaaatataacaattacattttttacagttttatattacacataatttgctaacatttattcagtgcctgctgtgtactatgccgtgttttatgtgacttagcagcattgtaatatgaaatacttataccagccctatgaggtagagaaatgaaagaattggtagactcccatacttttaagatccaattgccctgtcctt

SEQ ID NO: 786042 - DNA, 656 bp, Homo sapiens
ttcccggaagctgcccttgctacacccgtggggcctgctcccggcgcagtcccgcagtacctgagcggcactcggtcctttgaccacgcttggctgcctcagcttacacttcccagcaggatctggctgggagccccttcctcagatattcaccaggcaggtagaagcagagggagacgacggcgaaaggtggaaggagaggccgcggcctcgggcctcgggccccgggcccagacggcggcctctcgcggcgacagggtccttcctatttagcaggaccgcagggttggcagacagcagggcctgggccggcggggctctgcggtgcccattcgagtctctccagggcttccctctgtggctgtccctcgcctgccccctttccttgcctacccttccctggacggggttgttgtcaggtgacggcttcagcaacccagccatgcttggtgtggagtggttcgagttcctccgcgggcccccaccccccacmcagataagaagcttaagtcctccttctgcaggggagaatcggatgcaatgaaactaagacctgtggtcgttaacgcggttcaaagccgaccccaactgggacacggctcagcttagaagtgaggaaggcctgggacgctggaaacaaggggtcacacgtgcgt

SEQ ID NO: 786043 - DNA, 604 bp, Homo sapiens
tgccgtgggtgcctgagtcatctcctcctcctcctcttccttctcctcctcctcctcttcctcccccttcctcatctccccctttcctccttctcttcctcttcctcccttcctcccacccgtctccctctcctgagccccagctctgctctgccaccaggccttgtcccttttagggtccaaaagagcaggtcctgccctggggccagtcagcatgaaaagggatgaccatctcttcctccagaggacagggactctatgccccaggcactccaaggtcaaacctggctcccactcagactatgaagacagcatccactgggtcagagtcatgaagccacgggtcccaggggacagctcaggtggccacagggccagactggcaggctgccctctgcctcctgttagcacaaacacccctcccctcaggcstgaactctgacatgagccagtgggcaccgggccctgtcaggaacaggaggaggccacagccatcctcaggagagaacaaaggacacacaggcctccggggagagcagtgggtggcagtgacaggaggggctactcagaattcatgagcgagggccaggcagcttggccacct

SEQ ID NO: 786044 - DNA, 523 bp, Homo sapiens
ctggaaaggtaggggcctctggggggctaccctgttcacagatctttctaggggagaccccagagacggcctccctggagccacattgcgagtggccagagccgcatcccgcatcacgccctctgaggggccagcagacagctccaggcggagctcaaagtgtcctcggactccagcaggaagtgctggactggatgtcggtgggggcctttgagatcccgattctgcaacctcagctcccggggctctccaggcccacagtcctgctgactgaaatgtyggcaatggtggccactgcgcctccgctcaagagtttgcaggaagttccatgcgggagatcaagtgagagtggccaggggcctctagcagtgaccagcagacaaagcctggtctccaggcatcaccaggccactgggccaggagcctgagctgtgggctctgtggtgggtggatgctggttttcttcactggtacgggagaaaatggggatcctgagagatcccatggagaagcttccagcaag

SEQ ID NO: 786045 - DNA, 665 bp, Homo sapiens
ggtaggaggatcccttgagcctaggagcttaagaccagcctgggcaatatagggagactccgtctccattttttgttaaataatacttataaaaattttttaaaaagagaatttgaccaaggaaacataaggcagaaggagaaactgaggcaagttttagtgcaggaatgaaagtttattaaaacactttaaagcaggaagcaaaggaaagaaagtactctcagaagagggccaagcaggtgacttgaagcatggtttaactttgtgacttggggttttatatgttggcatgcttctgggggtcttgtgttccttctccccggattctaaccttggggygggctgtctgcatgcccagtggcgtgctagcacttgggaggggagcaagttacagtgtgtttactggatttatacacaggctcacttgaggctttctcccttaccagtcggatgtccttaggaggtcatataccagttaaactcctccatttttcctcttaatgcacatgcttgagcccacttgcccagtttctgagatcttatgaggaagctgctgatcaccaattttaggtgtttctgtttattgagagattgcttttccctggtgctggctgcgattaagtattattttagagacacagttaacaaccacctgaccatcacag

SEQ ID NO: 786046 - DNA, 695 bp, Homo sapiens
cagggatccttaaggtctgggacagatcccccattggtctagaggagttagggttaattgtagtcctgcttggagacaaaggtactaaaatgtgactactggctttttcagctataaaattgaagagtctctgcatggtctgttccaggcatctccctgagccagcccaaggaactgcctttaggtctcttccttatcccttctctctctcacgccttcttttgttccctgcccttcttcctggcctctctctcttactttcatttcttctggcaattagtggacaagccagaagaaaacaattaagatggtcatcaatttgggcagtattctgttcacacttatttgagacttgttctgtagtatatgtgaacatactcaggacrtaaatgaaatagaatagtgagccagaaaattgtgataaataaaggtgcttctacccatattttgtttacattctgggtggtgcatgagattaaaagctgtgagactttgcaaatagaatgaggtagatgactagtttttgctgtgcataaggtcaacaatatcacccaacaaatagccagctccttgccacactcccttccttcattctagtcatctatcttacaagcataattgaattagatcctcataaaagtcttacaaggcacatactactgatggtagtggaggcctgtctggagcggctgctg

SEQ ID NO: 786047 - DNA, 578 bp, Homo sapiens
aaaagtagggaacactgaactcactgcggcttcttaaatctttctcttttttttgccatttcacttttttttttctttgagatagactctcgctccgtcacccaggctggagtgccgtggttcactgcaacttctgcctcttgagttcaagcgattctccggccttagcctcctgagtagctgggattacaggcacatgccaccacgcctggctaatttttgtatttttagtagagatggggtttcaccatgttggctaggctggtctcgaactcctgacctcaggtgatccgcccacctcggccttccaaagtgctggaattacaggcatgagccaccgcgcccagsctcatatcactttttaaagaaagaaaatgaaacaggtactgaagttttttggctttttaaaatctatgatccttgagtattctttccccccagaagccattgctctaaatttggtgtttataattatttttgcacattttatacttgacttatgaatctgcagacataagtatttatccatgagtagtataagtcaagttttgcatgtttttaaaatttatataaatagc

SEQ ID NO: 786048 - DNA, 539 bp, Homo sapiens
agagacctgtccctgaggttgtgcctgtttccccagccatgtgcagttacttgggtcgacatgtagagtaggggagacgttgcggttttgttaggcgacggcagagtgagtgagtgactgcctgtggactttaaatggaaaataaatgggaagatatatcacactactggaagttgtttgtctacattatgccagagagcacacccccttgaaatctctgaaatttgtccaaagtgaatgggacagaaatataattctcatgtcatccaaaaacaatcccctgtgccactggatatcatactcctgccatgggcatgtgccccaaccttcgatcccatctgtacmcagatggtatgagcccagagagggtgtgattgtgggatagtccttattccccagtggctgaagggatgtcttaccaccatcctcatgcttcccctagcatccagtcattgtcttttcccagcgcagtgaagactttggttcctcaagtagcaggagctctttggtggtgcctgcaacattccttcctccctata

SEQ ID NO: 786049 - DNA, 626 bp, Homo sapiens
caattatatatgcttttgtctaggtgtattctcttgatggttattccaaaataattgtattacagctgctcacagttgaaagttgctagaagttaaattgctccctttcagtttccaattttgggggagatcactaaattaagctgaatacttaactgattttttttataagcaattgccaattacttcaggaatcaccatcactgatataaaatgttttgatattgttgtttttaactaagtttctctttcatggaatggaaaaaatcccagggcactatgtggtcattctagagaaggaaagctaacataaggaatttttgattctgtatgaaaagtaattgaggaggagagaaatggagggtgaattccatccygggaaagtggcctgaaggcagagttcatatcagaggcttcatcaaggagatgacccaaaggaaattcacagtcttaaccctctccttaaggacagaggaaagaaaagtaagtaggaggagagcatgagtgctgttttaaaaaaatacgtatgcctttgattttctcttttaaactttgggacacgaaaaattgccaacaggaataagaattctgattcaaatatgaccatagaagttatgatttatttt

SEQ ID NO: 786050 - DNA, 598 bp, Homo sapiens
ggaggttgcaatgagctgagattgtgccactgtactccagcctgggcaacgggcaaaattctgtctcaaaaaaaaaaaaaagaggccgggcacagtggctcacgcctgtaatcccagcactttgggaggccgaggagggcagatcacaaggtcaggagatcgagaccatcctggctaaaatggtgaaaccccgtctctaccaaaaatacaaaaaattagcgaggcattgtggtgggcgcctgtagtcccagctactccggaggctgaggcaggagaatggagtgaacctgggaggtggagattgcagtgagttgagatcacgccactgcactccagcctgggcgacagagagagactctatctcaaaaaaaagaaaagaaaagaraaaacaagaaagaaagagtgaggtcaggaaacagtgggtgactgtcaggcacacaggcctcctgacatgcaggtcagcaggtctccacttacaggtaccgccccatctcaaaaagaatagaatctccagaaagaaagggtccaaagataaagtttctgcattaaatgactcataaatggaaaatactcaaataatgtaacatacatttgtggt

SEQ ID NO: 786051 - DNA, 575 bp, Homo sapiens
ttagaagttcttgtcagtgaggtgggaaaggccagctagtgttttgatatgccaacagccacgtagatccctcacactgggacaggccggtaggagaagaacaaattaaattcattctcttttccagcctgcactgagattcaacccagatgcctcggtctgttgaccacagtctgtgtgccccagtgccttggtggggagaaggcacgttgctggaatcrcttgagggatggaaatggccaggggttttggaataaaggatatttgcagtagaatgaaaatgattgttgacttgctttgctagtttttctcaatacttaaataagaatatgggtgtttttaactgattttaaaagtttggaggaagaggagcctcactaggcacgctgtttacagcgttaatttcctgggtaccattgttcttcctcagaaaacccagatgatacaaacaaaatgaccattttttttttcactgttgctgagaaagaatttgatttgtaacaagaagtatactccacttataggtgacatttttatttttgtttttcccattatacaagtaattttatagaaac

SEQ ID NO: 786052 - DNA, 536 bp, Homo sapiens
ggccatcagatagcatgggacccatctgggctaacgggaagaggaacgggacggtggtgtgctgaagcttgcattggcttgtgaaagctgattggtaaattttcaggaattttgcaagctggctgtggaacacagccattgttaaaaattaaatgatataaacatataattaattatattttaaaaaggtaataaatactaacaacagatcagatcctaatttttttaaactacagtttactatcatctatgtgcttgagttatgtttattacacatatggtgggaagactgtagcgtagtatactactgactctcttcccaattccacagtcagtaacatcacattggyagcttgaaattggccgtggtgagaatatttacaccacagaaattggcacactctatactcagggcttgatttattgttgtgttgattatctagacttatggaagtgctagagaaaatgttaatacagtaagattagacgtaaaagtgtgccgtgtctgtagcagtgacattgtgaatcacataata

SEQ ID NO: 786053 - DNA, 650 bp, Homo sapiens
tctgtcacccaggctggagcacagtggctagatctcaactcactgcaacctcaaccctgctggtttcaagcaactctcctgcctcagcctcctgagtagctgggattataggtgcgcaccaccacgcctagctaattttttgtatttttagtagagatagaatttcaccatgttggccaggctggtctcaaactcckgacctcaggtgatccacccaccttggcttcccacagtgctgggattacaggggtgacccaccacgcctggccccaccctcctgtctcttgctggtgcctcccactggcagaacccaactgaagccagagggcaagggtgcccagtaatgcggtccacaaggtcagcttcctggggtacagagcagtggggaggaggatggggtggctgtggaggggcaaatggagatgcccagcataatgaattaacacgtacagctgtctgaaggcttctgctttgaactcagggttaatttctctcatctacaaggaaagggatggcttatgaaggcttaggaaagaaagtgatgatcgttaggaatcagcatggatttaccaagaaaaaagatgactactcactgtacttttttggagggaggagacaggattcctaagttggtagcacatggcattgtg

SEQ ID NO: 786054 - DNA, 650 bp, Homo sapiens
tctgtcacccaggctggagcacagtggctagatctcaactcactgcaacctcaaccctgctggtttcaagcaactctcctgcctcagcctcctgagtagctgggattataggtgcgcaccaccacgcctagctaattttttgtatttttagtagagatagaatttcaccatgttggccaggctggtctcaaactccggacctcaggtgatccacccaccttggcytcccacagtgctgggattacaggggtgacccaccacgcctggccccaccctcctgtctcttgctggtgcctcccactggcagaacccaactgaagccagagggcaagggtgcccagtaatgcggtccacaaggtcagcttcctggggtacagagcagtggggaggaggatggggtggctgtggaggggcaaatggagatgcccagcataatgaattaacacgtacagctgtctgaaggcttctgctttgaactcagggttaatttctctcatctacaaggaaagggatggcttatgaaggcttaggaaagaaagtgatgatcgttaggaatcagcatggatttaccaagaaaaaagatgactactcactgtacttttttggagggaggagacaggattcctaagttggtagcacatggcattgtg

SEQ ID NO: 786055 - DNA, 628 bp, Homo sapiens
tgccatgctgcaccttccttgctgtgtctgtgaaaaattggggcctggctggtcctctcaggggtgggggacctgggggcctaactcagtcacccgcccaggcaggcccaaaggtcacactgccggcctgcggtcgccttttcaattataggaccctgagagcgagctctgggccagagcgcaggagaaaggggctctgtgtgggagtcccggagctgctctgcacccctcacagaggccagctctgtgtagtactgcccagagaggctgggaggggtggcaatctctggcagcacacagcagcctccctgttctgatacaggctcctgcatgttaggcctcagtcctcagttaccccatygagaaaagggggagaagaatctgagagctggacaaaggttttatattttgggattctgtgcacaaatcttacttgagtttctcagctgccctaggaggtaggcaggatacctatagtcatctctgtgggtgggctgagatgaccaggctcaagagaaccctgccccagattgtccagctagatggcagcagaggaggaggctgcctgctgccaggtgagcagggtccaggcttttcaaagtcactgacagtgctcaaatctggtttt

SEQ ID NO: 786056 - DNA, 558 bp, Homo sapiens
tctctacctttaaagaagaaaatgggaaagagaggtgggttttggggttcttattttgcaaaccccctggagacaatgcaaaaactcctcctctgcagcagcaggtaaacacctgagctgggaaggaaagctacctggtagtcccaatgaatgccagcaagacaagggcagggaagaggcggggcagcttcyctgtcagctgaaggcttacttttgtttgaacaatgtcccaacctcaggagggagggacaaaaccaagaatggtgtgatttcccctgggggccactgctaaaatgaagttgggcatcgtgtggggctggaagctgtggctgcaggaagccaggggtgatggccttcctgcagccgtctctcgagccccgaacttgcgggaagaaaggactgcccccttccaacccgttcgggttggtttgcgctggaacgccacgcttttcaaagtgtctgagtgataggtactttctaaatatgtacagcgatggcctgataagcaactaagcgtctggcttcgcgggttcatgcccgaggctgtgcggtcggggg

SEQ ID NO: 786057 - DNA, 558 bp, Homo sapiens
tctctacctttaaagaagaaaatgggaaagagaggtgggttttggggttcttattttgcaaaccccctggagacaatgcaaaaactcctcctctgcagcagcaggtaaacacctgagctgggaaggaaagctacctggtagtcccaatgaatgccagcaagacaagggcagggaagaggcggggcagcttctctgtcagctgaaggcttacttttgtttgaacaatgtcccaacctcaggagggagggacaaaaccaagaatggtgtgatttyccctgggggccactgctaaaatgaagttgggcatcgtgtggggctggaagctgtggctgcaggaagccaggggtgatggccttcctgcagccgtctctcgagccccgaacttgcgggaagaaaggactgcccccttccaacccgttcgggttggtttgcgctggaacgccacgcttttcaaagtgtctgagtgataggtactttctaaatatgtacagcgatggcctgataagcaactaagcgtctggcttcgcgggttcatgcccgaggctgtgcggtcggggg

SEQ ID NO: 786058 - DNA, 481 bp, Homo sapiens
tgtacactgctgggggccccactttccaatgtttacttctgagattggaagaagaagacaagaaacacctcctcaccccctaccctctgcctccacgcccgcgactcagcccaggtgacccaaacggcagagtcaacttggcgcaaccggagcgtccccatcgcgccggccacccccagcccccttcgcccctcgcttggccccacaatgcgccsttgtgccgcgcctgccgtcaggccggggatttggagcagggatggggggaatattcgtcagatatttaaaacagagccgagagaacaaagcaggcctttgtgcagcagggcggcccgggagctgggagccgccggcccccaagcactgtgctgggccaggagagtgcgcatgcgcgcggcgacctgtgcgctcgggttctgtgccggcttttaccccaggtaagcggggcgctgcgttaaccccttcccatcccgcgccccggggc

SEQ ID NO: 786059 - DNA, 481 bp, Homo sapiens
tgtacactgctgggggccccactttccaatgtttacttctgagattggaagaagaagacaagaaacacctcctcaccccctaccctctgcctccacgcccgcgactcagcccaggtgacccaaacggcagagtcaacttggcgcaaccggagcgtccccatcgcgccggccacccccagcccccttcgcccctcgcttggccccacaatgcgccgttgtgccgygcctgccgtcaggccggggatttggagcagggatggggggaatattcgtcagatatttaaaacagagccgagagaacaaagcaggcctttgtgcagcagggcggcccgggagctgggagccgccggcccccaagcactgtgctgggccaggagagtgcgcatgcgcgcggcgacctgtgcgctcgggttctgtgccggcttttaccccaggtaagcggggcgctgcgttaaccccttcccatcccgcgccccggggc

SEQ ID NO: 786060 - DNA, 642 bp, Homo sapiens
actggtgagacgtggctatgagatcaactacagggtccaaggcttcagagagtggccgcaagataatcccagagggatcttggggccaggtgtggggcttggggatcaggtcttttgtctgctctgtcttggactacatgggaacttaagcagcttacttctgcttacttatttactaccagcaaatgctgagaccaaacaataacaaaatttccaaactcaagaaagcatgcactcagtttgtgtttcacgggtacccacacacaagaattctctagagctgtaaagtaaggaaatacctcaatycttatgcttcaggctgtgcaaaacccaaccatgtgctcagaagcaaaatgctctttaaacacaaagaatatccaggacagcccactaagaagatgatttggccacctctggtgatgatgatgacacctgccaccagcttttccctaaaggaggctgggagagtgaattaattgacatttttgagcacttggagttctctggacaaaggcctttataaatataaggcatgattaaagggtatcagtttgctaactctcagagcttgggttttatcaggccatgaaaggaaggaaatgccaggggtcccaatggcagaggtgatccacaaagccctct

SEQ ID NO: 786061 - DNA, 568 bp, Homo sapiens
atttcagaaacttgtatttccttgtttcttcataccaatttccagtcttgaactgtcagataacttatattacattatattagtaaaaataatcaaagtagaaataactcaatagtgatttctcacccaggaaatttgaaggtaaggtatttccaatttacaataagcttcttcagttacatataaaacaaatttatgaattaaagtgataacttaccacatactttaatccatgtaaataaaatgcataagatgtgcaaactaattgttaacgccattaaaaaaaactagatcataacttttttactaccttaaagagaaactcaaatattaaataacaatataaacagaaactcaggtaatcttttgatattcatcactttaamtgaaaaacattcatatctccattaattacctgaaattagcaaaatactctttctttccccaaatcttggattattctgggaagataggcagaccaacacttatcaccattggtcctcagaaaaatgaactgggagaacaagaaaattgacattattttaaaagtgctttgacataggcagta

SEQ ID NO: 786062 - DNA, 620 bp, Homo sapiens
gcaacatagtggtactctggcagtactcttcatagcctgaggtagtggtggctacagggtgaggctcctctttctttataaaggagagggaagacagagagaaaaatgtgtcttgcggcttgtgtaccagctcaaatgcaatagagtagaataccaagtagacttctaaagtcaatgacggtagaccctgactcacagatgatacttcaggacctacccagggcttgggggacctcactgccttgaagggaagaacacaagcctggctggctttgccacctgataattgtagagcsccagggccttgaatgaacataggcagtagccagagagtagtttcagcaggccttgggtgagacgaaggactatgctggcttcaggtctaacccagtgcagtcatagtggtgatggccacaggggtgcttgcatcactacatccccagctttagctggcttagaacagagagagagagagaaagagagagagagagaatgtttggaagaaaataagggaagagaacaggagtctctgcatggtaatctagagatctcccaaatcttgttcaagacaaccaaggctatgagtctgcaagatccacagagttagtggtcttgggttt

SEQ ID NO: 786063 - DNA, 543 bp, Homo sapiens
tgcttcataattgcagcagttttccagtgagcttttgagaacactgaaagtcttcagtgttcgtgttcggtggtcttcagcttttgagaaaactgaaagtcttcagaggttcgtgtttcagttgtagcttctctaattgtccaaaatgacttatatgacattcactcccctagctcttccaatattcatgcaagccctaattcccagactaaaacttattcccaaaatattttaaatgcctctttttgctgtcagttgcagactcttagcaaccagatagacagacaggtaggtagayaggtagataggtaggtagctaggtaggtaggtaggtaggtaggtaggtaggtaggtaggtaggtaagtaggtggatcgatcaatcaatcgatagatgaagagtttagattgactgattggtttatatgttcatcaaatacccgggagggtacaaaataatctagtaatggcaattgcctttggagaggaaaactgaatggctagaagaatagaaggaaaacagtttttactgtacactctttttg

SEQ ID NO: 786064 - DNA, 573 bp, Homo sapiens
gctgggcatggtggctcacgcctgtaatcccagcactttgggaggccgaggcgggcggatcatgaggtcaggagaccaagaccatcctggctaacacggtgaaaccccgtctctcccaaaaatacaaaaaattagacgggcatggtagtgggcgcctgtagtcccagctacttgggaggctgaggcaggagaatgtcgtgaacccaggaggcggagcttgcagcgagccaagatcgtgctactgcactccagcctgggcgaccaaacgagactctgtcaaaaaaaaaaaaaaaaaaaaatgctcgacatcagtaatcatcagggaaatgcacattaaaaccacaatgagacaccactgtatcccagccagaatggccattattaaaaaaccaaaaaacaatagatgttgacatggatatggtgaaaagraatgcttatacactgctggtgggaatgcaaattagtacaacatctgtgtaaaacagtatggcaatttctcaaagaactaaaagtagatctatcatttaatccaacaatcccactactgggtatccacccaaaggaaaagaagtc

SEQ ID NO: 786065 - DNA, 601 bp, Homo sapiens
gaagccacaggacagagtgaagaagctgttctcatgtggatcccatccctccatgagggtcttcaaactggttgctggaatttggggtctgaaaaacatcttaaggaatcaacaaaagcctcatgactgtaatatcagggatcgcatctgtgggaacacagtggtcacgaccgagggcaacgtggtgatgtttagcagcgagaaagcgggccamcgtgcagtctgattaatgcttaattataataatatttctgtccagaacccgacatgcaattcttgtcagccctgtggagacagttttgttacaggaaaggggtccggatccagaccccaagagagggttcttggatctcctgcaagaaagaattcagggtgagtctgtaaagtgaaagcaagtttcttaggaaagtaaaggaatcaagaatggctactccatagtcagagtagccctgagggctgctggttgcccacttttttggttatctcttgatgatacgctaaacaaggggtggattattcatgcctcccctttttagaccatctagggtaacttcctgatgttgctatggcatttgtaaactgtcctggcgctggtggagag

SEQ ID NO: 786066 - DNA, 616 bp, Homo sapiens
accttggtgagaagcccctgcctgtggtgtcgcagagcaaatgccattggcagagccaaatccacattcttttgtgagtggagaggccagccgtgctgcggtccctgctggagcccctgtgacacggggttatcgtttctctgacttggcagctggccgaaacggggctcttctgctgataaagtgatgtccactcgtgggttccacaccctcgtgggtgcctcaccctcccgtggcaaaccaaagacctctttgggaagaggacacccctgctcctgcacttgggctcatggtttccccctggacttgttaaaatcgaggcctcctgtggagattatctggggtcacagcagagcggggggcgtgtggtgagctkggtgaatccctgaagggccacgggtgtccactcagccgtgcgtgggggcgtttgtttaactccagattctggagctccaccctcagagactgttcagtctggggtgaggcctccaaatctgtggcttccaccagccattgctggcagctctgatgcaggcggccccagagtgcccggagaaatgtcagcttagagccacttggcccagggctgatgtggagggtcagggttccccaccgc

SEQ ID NO: 786067 - DNA, 601 bp, Homo sapiens
gaagccacaggacagagtgaagaagctgttctcatgtggatcccatccctccatgagggtcttcaaactggttgctggaatttggggtctgaaaaacatcttaaggaatcaacaaaagcctcatgactgtaatatcagggatcgcatctgtgggaacacagtggtcacgaccgagggcaacgtggtgatgtttagcagcgagaaagcgggccaccgtgcagtctgattaatgcttaattataataatatttctgtccagaacccgacatgcaattcttgtcagccctgtggagacagttttgttacaggaaaggggtccrgatccagaccccaagagagggttcttggatctcctgcaagaaagaattcagggtgagtctgtaaagtgaaagcaagtttcttaggaaagtaaaggaatcaagaatggctactccatagtcagagtagccctgagggctgctggttgcccacttttttggttatctcttgatgatacgctaaacaaggggtggattattcatgcctcccctttttagaccatctagggtaacttcctgatgttgctatggcatttgtaaactgtcctggcgctggtggagag

SEQ ID NO: 786068 - DNA, 601 bp, Homo sapiens
gaagccacaggacagagtgaagaagctgttctcatgtggatcccatccctccatgagggtcttcaaactggttgctggaatttggggtctgaaaaacatcttaaggaatcaacaaaagcctcatgactgtaatatcagggatcgcatctgtgggaacacagtggtcacgaccgagggcaacgtggtgatgtttagcagcgagaaagcgggccaccgtgcagtctgattaatgcttaattataataatatttctgtccagaacccgacatgcaattcttgtcagccctgtggagacagttttgttacaggaaaggggtccggatccagaccccaagagagggttcttggatctcctgcaagaaagaattcagggtgagtctgtaaagtgaaagcaagtttcttaggaaagtaaaggaatcaagamtggctactccatagtcagagtagccctgagggctgctggttgcccacttttttggttatctcttgatgatacgctaaacaaggggtggattattcatgcctcccctttttagaccatctagggtaacttcctgatgttgctatggcatttgtaaactgtcctggcgctggtggagag

SEQ ID NO: 786069 - DNA, 579 bp, Homo sapiens
agaccatggggggatattattaggggtccccatccttgacaggccctggacctccaaattgtgttctcagagttccattaggctataaaaagatctgctcagtttttcagcctctcagctgcctgttctggtagctccaagagctacacctctctgagtttctttcctctctggaatgttagccttgctatgcttcattttttaaaaactgccctgttcagctgttgtagttgttctctataagaggttgacctgcacgttatagtccactgtcagcagaagtcaacttttaatattcacaaggactcaatacagacacacttacaggatcatttttagattcaaagatgtctgataagcgaactaatatcaaagtggaagctgamcagtagaggtttctggataggaaaaggtaatggaagggaagaagagaaaagcaaacaaaagaatgaaagaaaaatcatacaatactttatggtgtaggtattctttgttttacaatgaggacactgtggtttacattaaaactgagctgctcacaatttatgcagatcagaggtgctgaagtccctttcaaat

SEQ ID NO: 786070 - DNA, 579 bp, Homo sapiens
agaccatggggggatattattaggggtccccatccttgacaggccctggacctccaaattgtgttctcagagttccattaggctataaaaagatctgctcagtttttcagcctctcagctgcctgttctggtagctccaagagctacacctctctgagtttctttcctctctggaatgttagccttgctatgcttcattttttaaaaactgccctgttcagctgttgtagttgttctctataagaggttgacctgcacgttatagtccactgtcagcagaagtcaacttttaatattcacaaggactcaatacagacacacttacaggatcatttttagattcaaagatgtctgataagcgaactaatatcaaagtggaagctgaccagtagaggtttctggayaggaaaaggtaatggaagggaagaagagaaaagcaaacaaaagaatgaaagaaaaatcatacaatactttatggtgtaggtattctttgttttacaatgaggacactgtggtttacattaaaactgagctgctcacaatttatgcagatcagaggtgctgaagtccctttcaaat

SEQ ID NO: 786071 - DNA, 628 bp, Homo sapiens
gggctctgtgagcccctctgcacaggaagcctcagagacgctgcatggtgttcccggggcatcctggccaaggtgggagaacgcagcctccgtgaggacccgcgggatgccctcgggggccgcctcctggttctcgtctcctctgaagtgcagacgacgctggcccacatccttgtcgggcagaggggctgccgactggcccctggccatggctcttgctgggagccgtgtggcctgggcttggacccacatccacctcttgctggctgcctgctcttgccagtggctgagcctggcttctcccatgacagtggccgcagacagaggggaccygtgccaccaggcaaggtgagctcagggaacgctagctctcctctcccttggctctgaggggttcggcggtgcccttggtgtgtctgggggcttttgggaagtcccaggtctgggctctgggtcaggaagcaggagcgaggagagacactgcacccgagcctccccggctgtaggaaatgggggcagaaaagctaagcggacggaagatgcattgtgcgcaagctatagcaggccggttcaggcccggttgctgctaggatgtgatcattggcagggatgagattgacggggacgg

SEQ ID NO: 786072 - DNA, 623 bp, Homo sapiens
attgttccaggttcccatacgaatccatgaatttgactaatacttggaaactaaaaatatattttattgacagtacattttgaggccattccactctctcagccattacgcccacttgcgtactttaatattcccaactcaactgttgtgtttggaacaagttcacaccaacgcatggactcatccacatgaagcatccattaacatacaaatatgctgttggcattaagmagcattgagacacaatatgttttttccttaattattcaaggaaatagtcattgagttacacctggcatgttgttagcataaatatgccagagaatgggaattcagaaggacaggcaggaagcaaaataagtagtttacaggatcagggtgtgaattgaatgtcaagatttcaccaaagctaatactgccttatacaaaagtgcaaatcgacatcattcatgctcttatggtttaggaggtcctgcagttctgctatgacttggagtggtgatatttgtaatagccacacgccgtacttaatgttttgtatacatatcttcccatttggagctcatcatgccccccatgaggttcactaagatcaacctattatacaaatgagcgactgaggc

SEQ ID NO: 786073 - DNA, 454 bp, Homo sapiens
tcaccaagtaccaggagtaagaatgagcagtgtagatgtggaggaaaaacatttgttttcatgatcttagtcccccagttctactgaaaaggccttgggtattttgattactgacaatatacctatttgatcattcctcatcccttgcaaaatgaatatgggctgtcacgtagagccagttgaatactgtgaaaagatcacagtggaaagtcttaagggcgaccttggacaagaacctggattcctgcttctaactgaaaacatcctacaaggttatacaaactggtaggaaatggctgaccyactggagatctgcagattgatcaggagcgaagccacttagagcgtatcagattctcttgttatctgcaaagcaggagtgagtcatttcattgagctgttggcatgcaacaggcacttaggaaagatctgacgaagtgaaagtatccatttg

SEQ ID NO: 786074 - DNA, 563 bp, Homo sapiens
acttaaaatttactatttcatgtagtacaatgacaaaatgagggacaataacaaggcaaaatatgcttaatgttataaatatttgttaataacagttgcagggcttgagatttggaaaatagctacctatccaccatgctttctatttagacaatgtcagccatgggggagaaaaaagcaacagtgttttcttgaatgcttactaaatgtgaggaattttcccccartgaaaatcagagtcacaaatggtaaaatctgcacaatacattagtaaagtatcatgctagcagcctcgcagaagacctcagtgcatttttttcaatgtaaactatgaaccatgcctgagacggcctggcctgaccagggataaacagcagtgatgtctgcaactggaaaacctggccacacatatcaggcatggaagtcacccttgaccaggggtcctttgacatgtcttaggttttgtttttactttatttctatttttttattttttttatttttatgggcacatagtagaggtatatatttataaggtacctgagatatctgatacaggccta

SEQ ID NO: 786075 - DNA, 631 bp, Homo sapiens
taagctgagaccagatgtatacatattgacctatattcagcaacgtgtatgaaaggcttgctgctttcaaagagctcttttaggtgacaaataacagagaggaaggggcattttccctttaggtgaggagagaagagaaagatggttgacagccttawgcagcatagagaatgtctctagaccaggaaatatccgtcacctagcaccgtctgccttctccttactatcctggccgtttgcatcaaatatgtctttaaaaatgaggcaggtgagtttcacagatgtccatgactgtctttaactgttcttggtttacacacaggtgggagtctttagtccttgtgctgatgtatcttatctacattgtcatcatgaagtaagtaaaatttttcatttcttatccaaaactgtttcttgcattccacattatgtgatgatgtgggaagaggattggggtgggtatctgactggtttttcagtgtgtatcatcacagtcacttggctccctgccagactgttgtgagtcactgtaattttgattagtatcaattgtagtgacccttccagcccatatttgatgatagactcaaagcttcagtgtttcacttgagaactctctagaacccctaat

SEQ ID NO: 786076 - DNA, 530 bp, Homo sapiens
tccttgagagggcatttaataagggaagaatccctatgaagagaagaaccccaaatgctccccacatcctaaatcttctaatccttctaagctctgcccaaatacatcctcacactgcacataatctctttccacatccctgctggcccatccacgttcytccttgtttcacagttattaaccacatctctctctgctgttagaatctgagtttaagacctcatccacttaatgtctgccactcacactgcaccagtatccatctgacacatagaaggacattttatttgtttaaatagagaataaattttattttttcaactgcagcagcaagcaatccctttgtacatcaataactcctgagatctttgccatgtgtcagcccagttaaataatttatattaatggtggtgatcctgagtcattcaagaaaaagttaagttagatctcatatcctctaggataagcatcaagtgtatgatctatttcaaagtgaaatatttcatcaaaaatagttaaggaactagcct

SEQ ID NO: 786077 - DNA, 530 bp, Homo sapiens
tccttgagagggcatttaataagggaagaatccctatgaagagaagaaccccaaatgctccccacatcctaaatcttctaatccttctaagctctgcccaaatacatcctcacactgcacataatctctttccacatccctgctggcccatccacgttcttccttgtttcacagttattaaccacatctctctctgctgttagaatctgagtttaagacctcatccacttaatgtctgccactcacactgcaccagtatccatctgacacatagaaggacattttatttgtttaaatagagaataaattttattttttcaactgcagcagcaagcaatccctttgtacatcaatarctcctgagatctttgccatgtgtcagcccagttaaataatttatattaatggtggtgatcctgagtcattcaagaaaaagttaagttagatctcatatcctctaggataagcatcaagtgtatgatctatttcaaagtgaaatatttcatcaaaaatagttaaggaactagcct

SEQ ID NO: 786078 - DNA, 530 bp, Homo sapiens
tccttgagagggcatttaataagggaagaatccctatgaagagaagaaccccaaatgctccccacatcctaaatcttctaatccttctaagctctgcccaaatacatcctcacactgcacataatctctttccacatccctgctggcccatccacgttcttccttgtttcacagttattaaccacatctctctctgctgttagaatctgagtttaagacctcatccacttaatgtctgccactcacactgcaccagtatccatctgacacatagaaggacattttatttgtttaaatagagaataaattttattttttcaactgcagcagcaagcaatccctttgtacatcaataactcctgagatctttgccatgtgtcagcccagttaaatwatttatattaatggtggtgatcctgagtcattcaagaaaaagttaagttagatctcatatcctctaggataagcatcaagtgtatgatctatttcaaagtgaaatatttcatcaaaaatagttaaggaactagcct

SEQ ID NO: 786079 - DNA, 601 bp, Homo sapiens
ggcccacagggtccacgatggagaccttgggaaacctcagtactcagcccaactctttgtgggcggcagtggggaccagcccctcctctgctcacaggtgggcccccaggtgggccctaaaaaggccagcaggcctccgagggtcatgccacaccccagggccacccaccacacctcctcgggaccctgacccgccagtgcccactcctccggagagtttctccccacagcaggtacgccygggaacagctgggtgctgttggccaggtaggcctggaagcctagggccccaagggggagagtggggtcccccagagctgcacaagacctacagtcatcccactggactgagccggactgagactgctgtggggtcccccatgaaaagaccacagacccctcatagcttcagcccttgggggcaccagctgcccagactccaggtagggggcaaggttccaggactccagacatcccaggtccaaatcccacccttctcggagggcttggcgttgcggggactgtgggagccaagcgcagccttccggggtgggggcggggcacaggcctattcaccggctgccaggctctgaggtcatcg

SEQ ID NO: 786080 - DNA, 601 bp, Homo sapiens
ggcccacagggtccacgatggagaccttgggaaacctcagtactcagcccaactctttgtgggcggcagtggggaccagcccctcctctgctcacaggtgggcccccaggtgggccctaaaaaggccagcaggcctccgagggtcatgccacaccccagggccacccaccacacctcctcgggaccctgacccgccagtgcccactcctccggagagtttctccccacagcaggtacgcctgggaacagctgggtgctgttggccaggtaggcctggaagcctagggccccaaggrggagagtggggtcccccagagctgcacaagacctacagtcatcccactggactgagccggactgagactgctgtggggtcccccatgaaaagaccacagacccctcatagcttcagcccttgggggcaccagctgcccagactccaggtagggggcaaggttccaggactccagacatcccaggtccaaatcccacccttctcggagggcttggcgttgcggggactgtgggagccaagcgcagccttccggggtgggggcggggcacaggcctattcaccggctgccaggctctgaggtcatcg

SEQ ID NO: 786081 - DNA, 614 bp, Homo sapiens
atggcagggcctgcagaagagcagagacagctggttaaggcaccttcctctctacctttgggctgggaacagccccagttggcttcccccggggagccaggactggagcagagtagggcagaggtttagaattctatgagggtttcttgctggttcctgacctgttgggtgtctgagctctctccacaacgtcagggactgtgcctgccttatgtgccatccctgggccaggctgaatgtgtaatccatgcttattggatgaatcaatgagctgatcaccrctttttacatcccagggctgtctctgtagggtagaggtaataatgtggctgtagtgcctgactggagaccctggtcattgggcctcctgtgacatctgaaaaagagaatgaggcctaaaagcatccagctctgggctgggcacctgcatgccctggtctgaattcattcagtcattcaggctatacctacagagaccctgacatatagctggggtccagccctctagaggccttcaacccagggtgagacaagatcttctctgtgcgatgtcacatcacagcaaaggacaatgaaaccttgtcaggccatgtcagattagaagtatgagaaaa

SEQ ID NO: 786082 - DNA, 532 bp, Homo sapiens
aagcatcaaaactaggctcagatatagtagagattttggaattatcagagcagaaacttaaatatgattaatatgttaagggctttaatggaaaaagtagacaacgtgcaagaacagacaggtaatgtaagaagagagaccaaaactctaagaaagaaaagataataccagaaataaatataacagaaatgaatgcctttggtggggtcattaatacactggacacagctgaggaaagaatcagtgagcttgaagatatgtcaacagaagcttaccaagctgaaaagcagaaaaaagaccagggacaaagtaggggtatcgggtrgggaccaccaggggaaagaacagaatatccaagtaatagggacagttacaaaaggcaaatcatatgcataatgggaataccagatgaagagagacagaagaaatatctggagtaataatgactggagattttacaaaattactgacagcaaaccataggtccaggaagctcagagaacacaaaacaggattttaaaaaaagtctaca

SEQ ID NO: 786083 - DNA, 577 bp, Homo sapiens
tggagagctgcccaatccaattgtgctagaaatatgctctatttaggtaaggttattagcattttaaatgaagctgcctatataattatctagtctaaactctcatggaatgagctatatgcaataagcaactttggctacagagaggcaaacaagaatattggcaatgccataccaaatggtgaacagagaaagagccctcagcwctaatgtgacaggtaagccagaaggctcccttagctcctccatggttgtgtaacccttttacaagatcactgtagcctgtgatggcagtaggaggcactgccaaactgagggccccgaatctcccacgggtaacttctatcatcactaagaaaattgagggttttttttagtctgggcttctgaaccagttctgcacacctctcctgcaactgtcatagaataaagcagatgggagccatcacctactggaccagaggcaggagctctaaggtacaagccacacagaggcacccagtgtgctggtacagtctgctaacgccaatcaagtcaaggcagtgtctcaggggcaaaggctagtggctatagaaat

SEQ ID NO: 786084 - DNA, 577 bp, Homo sapiens
tggagagctgcccaatccaattgtgctagaaatatgctctatttaggtaaggttattagcattttaaatgaagctgcctatataattatctagtctaaactctcatggaatgagctatatgcaataagcaactttggctacagagaggcaaacaagaatattggcaatgccataccaaatggtgaacagagaaagagccctcagctctaatgtgacaggtaagccagaaggctcccttagctcctccatggttgtgtaacccttttacaagatcactgtagcctgtgatggcagtaggaggcactgccaaactgagggccccgaatctcccaygggtaacttctatcatcactaagaaaattgagggttttttttagtctgggcttctgaaccagttctgcacacctctcctgcaactgtcatagaataaagcagatgggagccatcacctactggaccagaggcaggagctctaaggtacaagccacacagaggcacccagtgtgctggtacagtctgctaacgccaatcaagtcaaggcagtgtctcaggggcaaaggctagtggctatagaaat

SEQ ID NO: 786085 - DNA, 577 bp, Homo sapiens
tggagagctgcccaatccaattgtgctagaaatatgctctatttaggtaaggttattagcattttaaatgaagctgcctatataattatctagtctaaactctcatggaatgagctatatgcaataagcaactttggctacagagaggcaaacaagaatattggcaatgccataccaaatggtgaacagagaaagagccctcagctctaatgtgacaggtaagccagaaggctcccttagctcctccatggttgtgtaacccttttacaagatcactgtagcctgtgatggcagtaggaggcactgccaaactgagggccccgaatctcccacgggtaacttctatcatcactaagaaaattgagggttttttttagtctgggcttctgaaccagttctgcacacctytcctgcaactgtcatagaataaagcagatgggagccatcacctactggaccagaggcaggagctctaaggtacaagccacacagaggcacccagtgtgctggtacagtctgctaacgccaatcaagtcaaggcagtgtctcaggggcaaaggctagtggctatagaaat

SEQ ID NO: 786086 - DNA, 470 bp, Homo sapiens
aattgtctgtttcctgaatgcttgataaaaggtcacctgttaaaatcttttgagtctgtttttttctttgtaaaaggatttttgattactaattatatttctttagtggaaataagagtattcctttattcctaactgcsatttaatatcatactgtgtattatcattttgggagtttatatttctctgtttctcttttcctatatcaccaaatcacatattgagatgaataaacatgactttccacacaagagaaaaaatatatgaaaagtgcaaacctttctaaaattaagatttaggtaaatttttgttatgcttatccaacaaatgttagttttctgttttgtcatataacttccttcctttaaggattaagttatttattttcttgtttcctatattatttttccctatttattgacagtaacattccttgacagtgcaatgataattggtgctcataaatggaa

SEQ ID NO: 786087 - DNA, 640 bp, Homo sapiens
tcttttacccagtactttctgaactagaatcaattctgattctaaagtccaacttgtataccaggggctccaaagacgatttgcaagatgaatccaatcatggagaggcctggaataaatgacctagaccagaccttctgtaaatatgttaatggtatttactagcaaaaggagaatctctatctacaaatgattttagaaggwtatatctggtctaactaggttgattaaataaacctaaaattcatggggtgtagttggatgaagattagggatagtcatttaaaccatgtaattagtgcaatgtaaaagatgttagaaaatggaaatgacttccttttgtaagatatttctccatatattgttcaataactaatcatttattccaaagccaaaacatactgtaacgaggagaaaagggatacttttgggtgttgcatcagatgcgttcagactcttttaggaaaagaatgctttggctgtatctgatgcttgcctatatcctttggatcatttgtcaatttgttgctggttaagagctgtgattctcataagtttgctttaataattcaactctgttaatatagtggaaaaaggatgactgaatattcacaatgaagaaaaaaaggctaagtgattt

SEQ ID NO: 786088 - DNA, 551 bp, Homo sapiens
ggacgtggagaaacaggaatggttttacactattggtgggtgtgtaaattagttcaaccattgtggaagacattgtggtgattcctcaaggatctagaaccacaaataccatttgacccagcaatcccattcctggttatatacccaaaggattataaatcacrctactataaagacacatgcacatatatgtttattacagcactgttcacaatagcaaagacttcgaaccaacccaaatgaccatcaatgatagactggataaagaaaatatggcacatttacaccatggaatactatgcagccataaaaaagaatgagttcatgtccttttcagggacatgaatgaaactggaaaccatcattctcagaaactaacacaggaacagaaaaccaaagtctgcatgttctcactcataagtgggagttgaacagtgagaacacatggacacagggaggggaacatcatacactggggcctgtcaaggggtcgggggctaggggagggatagcattaggagaaacacctaacgtagatgatgggttgatgg

SEQ ID NO: 786089 - DNA, 596 bp, Homo sapiens
attcttcttcctttgatttgattgtttgttgctacatttaacaacaacaaaaagaagaagcaagccacccacatcaaaatcctcccttcttcctttaaaattaagcattaataataacaaaggctgagagaacagtgaagccactgaatcccaaagcatatcagtaaaatgtagaatgaagttttttttttttatcaacaaggtgggtctgctggcttcctggcattggactgggctccagccacagtgcaccccagccggggagcaattcttcatggtaaattatgctaacttgtaattctagagctcctcttgatgtgtctatgttttagatggtgccttarttctcatatcaattctgaaagccaagagaaaaagaaaggttgcaggagtttgagcttcccattttgtcaatagaagactaaaacatgaaagacatgaaataaatactttaatatatctggttgaatagctacatagcaacctatagaaaaaaaatgcactggtctacagaagttagtggcagtatggaaagtgtatatatggcctttagaacagcagaccttggataagttacttaagcttgaagacccttg

SEQ ID NO: 786090 - DNA, 480 bp, Homo sapiens
tacataaatgccattatgccttagtcagctagatttctgttgcttacaactggcaaccttgcctggtgcaatctttatgtatacatagtgcaaaatctcgaagatacagttcatgaaaagcaagatgcagaataatgagaagagtataatcacacatggggcaaaagaggatatrtctttgtatacgattacacatttcaagatagaagggtatacaaaaaattgttaataatgttttttacttttcatattgaacaaatcttctgtattatggtattgtgttttttattgctacatagcaatgtgttgtatagtttaataaaacagtaaataaataatataaagtggtacccagtgtcctgacttgaccacagaattgtaagatattttattccgaggtttttaattctctggagctcctattactttcatatgaactgagttttctttggaaggcctggtggacattaaccagagctg

SEQ ID NO: 786091 - DNA, 601 bp, Homo sapiens
gccacataaatgtattctttgagaagtgtctcttcatatccttcacccactttttgatggggttgtttgttttttttcttgtaaatttgtttaagttcctggtagattctggacattcgccctttgtcagatggatagattgcaaaaattttctcctattctgtaggttgcctgttcactctgatgatagtttattcygctgtgcagatgctctttagtttaattagatctcatttgtcaattttggcttttgttgccatagcttttggtgttttagtcttgaagtctttacccatgcctatgtcgtgaatggtattgcctaggttttcttctagggtttttatggttttaggtcttttgtttaagtctttaatccatcttgagttaatttttgtataaagtttaaggaaggggtccagtttctattttctgcataaggctagccagttttcccaacaccatttattaaatagtgaatcctttccccatagcttgtttttgtcagatttgtcaaagatcagatggttgtagatgtgtggtgttatttctgaggcctctgttccattccactggtctgtatatacctgttttggtaccagta

SEQ ID NO: 786092 - DNA, 544 bp, Homo sapiens
tgcaaaaatgttctcaactctaagcaaaagctccataggcaaagtcagcatacgatctttcaaatgcaaacagtgtgactctgtaggagtctaactcaggaatttgagaaaaggactttgtgagagtggtaagtttgtggcatttattactgtttttaaatctgacccaaaaaagttactaaaactcccataaaattactgtatttaactctcagataagacttctgacatacgaagttcatttaatttaccaaaatttctcatagactaaatacatatcattagctatactgcaaaagaaatrtcaaaagcttggagcaagttgttcaggggcaccctatgttagtgccaagttggacatacaacttctaggcttctaatccaaagttgatagtactgggagtatccctatagtaaaatattgataacacacagacttttcctgatagattgaatttatttcctgttatctcaaaaagcactggaatttgatgtgttggaatttgaataaaatgaaaatttaagaaaagttctgcagatgttg

SEQ ID NO: 786093 - DNA, 549 bp, Homo sapiens
agttggacatacaacttctaggcttctaatccaaagttgatagtactgggagtayccctatagtaaaatattgataacacacagacttttcctgatagattgaatttatttcctgttatctcaaaaagcactggaatttgatgtgttggaatttgaataaaatgaaaatttaagaaaagttctgcagatgttgcataattatcatcttgtcaaagaagtctgatgaaaataaaaccaaatttatttcctttatcttcatcaaattttgcaaagacttaaccagctgctctctaaactacaagaacctgacaaatttcagtggaagtgggtcctgcaccctgaacatgattcaaaaggactctaaactaagacaacatcagcatcaggattttattgccttctatttataatgatcatgctgcaaagtaagtgattctacctccccctcgcaaatgtttcttttcatttgctctcaatttattttattaaattatcatgaaactatatcctgtattgcaaaatgaaatttcattacacaatgggtttaca

SEQ ID NO: 786094 - DNA, 646 bp, Homo sapiens
gaaaaataaaattttagattaactcttaacagtttcatataactttatggaggttaattcaaaatgtgtttttagtttcataaccaagaaacctggaatttctttacaaatagcaaatctaatatctaaatattttagctccgtcttaccacttccatatcatcataacttggacttaacaaagatcagtgccttttccactgtgagtcgggcctgatgtcactaagaagaacctttcattgactaattttactttggctatgggaaacgatttgcagtaatgacgcacactcttttcctaagcatgactgttttatcaaggaaggtgtctatatggagaaaacrttgacttgggtgggtaggagtgaacaaagtagtggtgggtacaagaagcctcagaagagaaatggaatatatgaaagaaggcagtcttccaccagtcagtaattcacttgggctaataaagttccaaaatacctccttctttttcagtaattctataatttctctaatcccttactcatttcttaatctttaaagcaaatttatgaacacctactttatacttaatattttacttcaatatagtgggatagcaaaaagcacttcattttaaaaatggttatgattagtaatatttgctaaa

SEQ ID NO: 786095 - DNA, 616 bp, Homo sapiens
ggaaagtgaaactgtggacatgagaggactactgtataatacttcttcagccaaaagttttaagtctttcaggctatttggaattcaaagatagtctcaaaaatcagagtgagaaagtaggcataggaatttctgatttttcaccctggacatctaggaatttttcttgaaaaaaaaatccatttccaaattcaggagtccagaaaataagaacccatattacctggcacattctgtcaatattttcttcagttggcattacaaagtatactgcaggaacatctggaataggatctcgatcagagtgtaaaagcctagaagacataaggaactaaaacttatttttttattcacttatttaaaacaatattcctcaaaatgggagttcactagctcaaggacagtaaccagtgctctaaaagctcttgttgcaattaatcagtgagttaacctakctttctcccatgtcagtgttgttattatttattagcattagtaagaccctaatttcttgttagtcttcatttgttctattctgctcacacttttagcactgcttatggtcagacattcttttctaccaacactctccttgaatgagaactaaaacatattc

SEQ ID NO: 786096 - DNA, 612 bp, Homo sapiens
agtactccacaaagaagaaacaaatacaaaggctcgaaggtgggagcattcctggtgggttcaaggagagggaagagaaatagggagtgaggtccaaaagctacatggaaaccagatcgtataaagccttgtagaacactgtaagatcactttggcttttatcatggttgaaatgggaagatgctggaagattttgagcaaacatatggcatgatcagtttgggtactgtgtgaaaaataatgaaggagaacaggattgtaaaagcaargagaccaaataggttactgcagaaattcatggtggacaggacctcggaatagcaatgacaacagtcagatcctggatgtattttcagagtagaactgacaagatttactgaaagatcttacatgagacatgaaagagacaagtcaagaaaacttcaaggtttttgacctgaacaactaaaaggacggaactgccattaactgatatggagtagactgagttcagatgggacggccagactagggatataaacctgggaatcatcaacatacagataatactgaaagctaaggcgctagatgagaacactaatgggaccctgcaatgttgagaagctgggaaga

SEQ ID NO: 786097 - DNA, 605 bp, Homo sapiens
gtaagtttgtatattacagacctttgttgtttagattctgtcacagatgtcaagattggatgtggtaaggagaatgaatactctttagtctcttaggaataacacattaatagtctcacacctgaagaaacattgttttcttaaaaatcgagttttaaatacattaaggcctttctaataacagcagcaaaccagagggctcagagattttcctattcccaaagccatcccaagtcccaggcatgagaaaagtacaacatgattatagattaaggccagcagtgtgccttggaattgggaaagcagaattgtgtttgctccaatttagcagagagtaaaaactctgatggcaaaccttgaatagcatgggatattctgcagagcctggagaggtggccagaccaccattgcctttgtgtgactgtygatttgcccagggaattagacaaaagccaacagagacataacagtgtcctcaagatggcagtggaaggctccagctaatgtaatagtttgttatcagtgctttttgctgcccaactcccaggagtgttagaatctcattgtcagataagaaacaagttcatgagtgtgtataaattgat

SEQ ID NO: 786098 - DNA, 590 bp, Homo sapiens
aaattaaactggaatatttgaaaggagttgggaaaaactacttcaatgttgcttctccctcgacatcaattttctggatctatctggagtaaatctatcagattatggagtttcctattgatatgaaaggtcgagtgtgtaagcaagtagaggaggaaaataaaacattaggtgagaagggcgattccccgaagaggacaaagaacaaaggcccctttgaggcgggagtttatttttactttttgaaaaatatttttatttttaycagcttcagattcagagtgctctccttcaccctcacctttggattgcttttcctctaaacacaagcagctcattagaaacctgagcatgaagcattctggagccccaggattgtctctgaggtgacatccactctgctatcagcatcagggttgttggccaccaaacatttctctgaattctgggagcctgggtgccaggacttgtaaggctgagtcttggtgtttgttgagacctggagcagcctcttgatgtcatgtcaggcttcagagtctgtgccaaggcagatgcacgggggtggacactggcacacttggccatgaggg

SEQ ID NO: 786099 - DNA, 594 bp, Homo sapiens
tgtttggggattgtgttctttctaggatccttttttagggatatgactttaactagctggctgcataggataaacgttacttatgttacttacaaaaactgcttgatgtattctcagtccttccattccaccacacacttttgtctcaggaataagtcagtcagattaacrgacccctacctatctagaattatttttcttgacctgtgaatcttgtatgtattgtcagtaacattacagattcctgttgatatgaggctcattaggagggaaggctccctggcctttataataggaagtgtttatttttcttccctttcaagcaattggcttgctttttatcttacagacgtactgaacggtatgactgatcaatacttcttgtcagtactgcataccaaagaagcttggaatcaagtttaacactaacttttacgtattatttacaactttatgagatgactgttttgtatttgtccattccaaatcatgttagtgttgccttgatcaccattacatgaaggagggactttatgtgataaaatatacataggtgtgccagaagaagggaacttaaagtggcttaaaatctcc

SEQ ID NO: 786100 - DNA, 542 bp, Homo sapiens
atataaatggaatcatacgatatgtaatcttttgtggttggcttctgttaaagaaaaccagagccagacaataggttcaagctgcgaacagcgattttatccaggaactatgacaacggggaaaaagagacctcagtgtagaatggtgcttaattccgaatataagacaagtggagccggttgaaggtgaaggggtggaggaaaattactagaggagacatcaagggtagggggaattcttgctaaacctacctaatgggattcttgcagaaggcaggctaaggtgatgatcagacgtcatgtgtgggatgatggaagatgaggaatttggtcagatattgaggataatcaggttttgagggtgagagattytgctaaattgacttaacaggattcttgctaaatctgggctatgcagtcctgagcacaaggtccaagggtgaggcctagttgagaaaagagcttagaggaagctgactaaagttggttcaggagaggctctttgttacttctttcacttagcatactatttcaagttccat

SEQ ID NO: 786101 - DNA, 526 bp, Homo sapiens
ctggataccagttaaatttagaaaattgtgaaacttatttaaatttagaacctttaggggtcagtgttccctaagaaaggttacaaaaggttactgtgcctaccaaaattaaatattaaatctgctatattgtaaatatatatatattttttaccaatttaaggtaaraaatgatgagaattataccttgaagaagcttttgaccaaaacctttcaatttaatgagtttgttcaatattgtttttaggtttattatttggggggatcatcatatgtaatatatattttacacacaagtagttatttttatttatgtattatctaaatttagatatagattacatatttttaatttatctttaagcttaaaacatgatcatgattctaaatcaggaatcattgtacttatttgaaataaggtgaaaaagcacttatagaatggctgtgtaaatagaattcttacatttttcagtttattggaggctagtaaatatttaacaattttttatcctactgaatttaagta

SEQ ID NO: 786102 - DNA, 562 bp, Homo sapiens
ctgcaattctgtaattgaattataactaaaactattccatgatttgcagacaatttgtaagtgtagacactgaagaaccactgtaggaaaacataattgatgcttttaaatgttgttgatcattatgactaaaatatgattgtagaatctcatatcacttttataaactattttatgtttaaggcggagaagaaggaaatgacaaattgcttagaatggacattcattgctaccagyaagataagctggtagaaaaaaagctatttcctagacattatgattatatactccttgaaattaaaggttttgaaaatgtctagataactaatcattctgtattaaattacaggacttaaattttaataattggctttctagtaagtaatggtatatttttcatgaagaagaaatatagttagtggttttagcttattgcctatattttaaagtagaaagaagactgtgttggaaaaccaatacttttaataatgtcagtaaaatgttatggtggaaagaacacaggtttggagctaaacataagttttaatttttaaatctttca

SEQ ID NO: 786103 - DNA, 582 bp, Homo sapiens
tttgaaacatgacatatatgtttagggcattacatgagaccacactttttctcacacatggtaactatatttcctttttcttttttttcttttcttttttttttttttgagacagagtctcaactctgtagcccaggctggagtgcagcgatgtgatytcagttcactgcaacctccgcctcccgggtacaattctcctgcctcagcctcccgagtagcagggattgcaggcactcaccaccacacctggctgatttttgtatttttagtagagacggggtttctccatgttggtcaggctggtctcgaactcctgacctcaagtgatcggtctacctgggcctcccaaagtgctgggattacaggcatgagccaccacccccagcccttattttccttatgtattttgcttatatgtttttcctacatatggtaactgtgagtcttttttcattcaacttgcccgcaaatgtgattttatatatactgtcatatatttctaacttatataaataatgcaaagtaaaagatgtccttgagtttataaggtaaaaaatatttttgtgtgtagctacacattgt

SEQ ID NO: 786104 - DNA, 595 bp, Homo sapiens
aagatttggatataatcaaaggaaaatgaaagaatcccacaaagaaattgatattggacttctagccaactctgctgagtgagagctcatataggatgtatttgttttctaattgaatccacatagattctattgcactttaaaaatgaatatacatggcagtttatttctaataattgataaatctaatatatggagttaaaagccaacattgttctagcttttaaatgcactgattctgaagctgcamtaagtcctgcaataaaacttcaggttccacacctcaaaattgccccgaaatgtaactttcaaaaatatgtatatactaacaaagcttatgttttacaaatttatgccaacactagcatttacctaaaacaaagcaaagccatagttcacaataaaatactattttctctatttcatgaatcagagaatcgattttattttaattaagcacttaaaatatagattaatttttaattaaatttttatttgagatatagattcatatggaattgcaataaataatacagagcatggaaccttcattcagcttcccccagtgggaaatagtacaatatcacagccatga

SEQ ID NO: 786105 - DNA, 602 bp, Homo sapiens
gacttactagtgaaatcagatttttttccagaagaggtagactactcctaatttggggataaggatgctagtgctagaagagacttatgtggcatggtggcatttggtttaaatagtttctttataattctccctcatcagactgcgtgttttctctgttatattttcctaatgtcagggattggacctctaagaataggtgaaaagtgtccctggcagaaggaatataacttatgatggtcttgaagtgaaaaggagcttggcataatcaagcagcacaaaagtggccagtgtggctggaacacagggactgagtggcagaaacgctagatgagcctgggggcaggagggttgtggtagtggtgaactaattcagagcctccacagtacttggggtgagtttagtgggacagtgttaygaatgaataaataataataggtggagattctcccttactctcagtgaagtaaatcccttgaatatattggacatggcctctttgttgaattatctgctataatggactgtgttctaaggaaatccagagtgcagtcaggccctgaattatactcagaatatcttcttaaagaacgtagtctct

SEQ ID NO: 786106 - DNA, 654 bp, Homo sapiens
tcctattcaataaatgttgctgggataaatgactaacgatatgcagaagattaaaactagatcccttccttacaccacatacaaagattaactaagatggattaaagacttaaatgtaaaatccagaactaaaaaacctggaagacaaaataggtaataccattcagaacatagatacggrcaaggatttcatgattgaagacaccaaaagcaattgcaacaaaagcaaaaattgacaaattggatctaattaaactaaagagcttctgcacagcagaagaaactatcaacagagtaaacagataatctatggaatgaaaatatttgaaaactatgcatctgactaaggcctaatatctagaatctataaggggcttaaatcaacaagcaaaacacaaacaatcccgttaaaaaataggcaaagaacattagcagacacttctcaaaagaagacatacatccacccaacaagcatatgaaaaaaagcccaacatcactgattattagagaaatgcaaattaaaaccacaatgagataccatctcacaccagccaaaatggttattattaaaaagtcaaaaaataacagatgctggcaagtttgtggcaaaaaaggaacacttatacactattggtgggaatgtaaattagttca

SEQ ID NO: 786107 - DNA, 654 bp, Homo sapiens
tcctattcaataaatgttgctgggataaatgactaacgatatgcagaagattaaaactagatcccttccttacaccacatacaaagattaactaagatggattaaagacttaaatgtaaaatccagaactaaaaaacctggaagacaaaataggtaataccattcagaacatagatacggacaaggatttcatgattgaagacaccaaaagcaattgcaacaaaagcaaaaattgacaaattggatctaattaaactaaagagcttctgcacagcagaagaaactatcaacagagtaaacagataatctatggaatgaaaatatttgaaaactatgcatctgactaaggcctaatatctagaatctataaggggcttaaatcaacaagcaaaacacaaacaatcccgttaaaaaataggcaaagracattagcagacacttctcaaaagaagacatacatccacccaacaagcatatgaaaaaaagcccaacatcactgattattagagaaatgcaaattaaaaccacaatgagataccatctcacaccagccaaaatggttattattaaaaagtcaaaaaataacagatgctggcaagtttgtggcaaaaaaggaacacttatacactattggtgggaatgtaaattagttca

SEQ ID NO: 786108 - DNA, 626 bp, Homo sapiens
tgttctcatcatggctgggaactaagtttttaaggtgtttctggggtccccttggcccagaggggacaagacttaggatttcatttatagtttacacttcttatgcctgacactttttcctaaatattatacttaatataaattccccaaagagaaagataacaggcccagagaagcaggagtaggagaccttaatactgtggatgcattatgaaattcctgtgctctggtgcacgtagaaaggagtggaatagtttaagataacattttctgattcactgtttttcytgaggcttacattgtatcactgtgtagaatcataagtctcctaaggcattggaatacatgtttagaggaaatgatgccttgttttcaaagtggcagctccaagaattttctactctattttaggtgatagaactttgtagtcacttgatatgtacaattctatgtagaaatcagtgctttatttatagttgcagctgatccctccttcctagctgtgagaagcatgtgtagtttgataagggaggttagtattttttatttcaatactttttgggaaacaggtggtatttggttggatagaaaagttatttagtggtaatttctgagattttggtgca

SEQ ID NO: 786109 - DNA, 644 bp, Homo sapiens
acacagacaggcagaacaaaacccagttaccacaagatcctttatttgccaatctcctatttggaccattggccttttggtgcttttaattcctggggtcccatgcgaaaaacagaggactctccactctcatgtgttcattaaaagtgccaaggaaaaatggagaaaaataattcagttgactgaaaaaaaccctcttttttccaccaaaacaaggtccaagaaaggaaaaacataaaggccttttaaatataactataacttggatatccacttttaattaatctgagcactccttaagaaaatccttttaactcccttatcacttgacaaacggccaatatttctggctttcraactttactaaatattcagagaaaagaaaatccaatgcagtttgtggaggggaagggaatcaacaaatagcaaaaggtcatgcagatataaaatcagaaagggcacatttctgaagtcaggattgaatccctggctgtgcagaggctaaacaaagcctagacatagggttacagtccactcccccaggacataaaacaagatggagccctgaagcgaagtttgctacagacggtacagaaagacgtgcaaaacacaccagattggctacagcttaaaaccagcctcat

SEQ ID NO: 786110 - DNA, 644 bp, Homo sapiens
acacagacaggcagaacaaaacccagttaccacaagatcctttatttgccaatctcctatttggaccattggccttttggtgcttttaattcctggggtcccatgcgaaaaacagaggactctccactctcatgtgttcattaaaagtgccaaggaaaaatggagaaaaataattcagttgactgaaaaaaaccctcttttttccaccaaaacaaggtccaagaaaggaaaaacataaaggccttttaaatataactataacttggatatccacttttaattaatctgagcactccttaagaaaatccttttaactcccttatcacttgacaaacggccaatatttctggctttcgaactttactaaatattcagagaaaagaaaatccaatgcagtttgtggaggggaagggaatcaacaaatagcaaaaggtcatgcagatataaaatcagaaagggcacatttctgaagtcaggattgaatycctggctgtgcagaggctaaacaaagcctagacatagggttacagtccactcccccaggacataaaacaagatggagccctgaagcgaagtttgctacagacggtacagaaagacgtgcaaaacacaccagattggctacagcttaaaaccagcctcat

SEQ ID NO: 786111 - DNA, 655 bp, Homo sapiens
aaaacaaatctctttattttactttttgaaaatagccattctaaatggagtaagatgatatctcattgtggtttaatttccatttttgtgataattagtgacataaagcatgttttcatgcacctgatggtcatttgcatgtcttcctttgaaaaacatcttcagaatttgtgcccatttttagtagggttgtttgttttttgctgttgtgttcttggagttcctcgtgtattctggatattaacatattgtcagatgtatagcttccaaatattttctcccattatgtaggttgtctcttttctccattgtttcctttgctgtggattagtttcttaatttgatgtaatcccatttgtctcatgtttgcctttgttgcctgtgcttttgatatcttatccaaaatatccttgaccacactaacatcatgaagcatttgccctcagtttccttctattaagttcacagttctgggtctttcayttaagtctttaatccatttggggttgctttttgtttgtcgttcaagataatgttccaatttcattttcgtgtgtgtgaatattcagttttcccagcaccatttactgaagaaactgccctttccccagtgtgtgcttctggcatctttactgagaatcagttggatgcagat

SEQ ID NO: 786112 - DNA, 607 bp, Homo sapiens
taacttttttttaattaaaggaaggcaaggggttatcggattcaaactggagtgtttcgtaacttttaacttcgtatctctatcaccatttactttcagaatcttttgattttggtcaaactgggtacaattctgggttctcccagaatttctgtcatgtaatcttaccggtgatctaacatgatatattcgagcttattgttacatggattaggataggctgtggttcacaccttccttgaagtaagtgtatatgggtacaacgtgggtagcctttaagccaggtactggcccggtttactagcccstaaaaaacatcacctttgtaatgatgaagatgccctttgtgcagtcagaatcagcaatgacctacctggtgttaattgagggattgagggtcttcctgaagaacccctgtcctcatagatcaaacctgtcagcttgctacagaacctggagttgctgtcattggcatcgccctactgggccaaggctctatcattgtcttccgaaggtttctgctgaaaacacacatttgtaagctgtgagggaagacgttaagcacattagctagctgttacctcagtgagatcgtggctctgatctc

SEQ ID NO: 786113 - DNA, 602 bp, Homo sapiens
aatttaaaatccgtgccaaaatttccattgggcatgtagttgattttacttgtcattgattcaaaataacaagcagccacttagtagatgtgtgggaagacatttgggtattttgtaattaactcaaaggcttttgtatgaaaaaagtgatgtcaaaaaaatctgaaaattatgttcatgtgtattgagatgagtgcattgggaaatttatgaaaacagaatcatttgcaggattaagaaaaaagaataaataaaatgctacataatatgatctacatttctgaatgtttatgactaatcaaatattgatgcttgttaaatgagcctttaaaaaaatacaaatagagcaaaggaagagcaagattgtgaaatataagcctasgctgtttatcccccaaaaggaataccaaattttaacaagtatctttacacacacacacacacacacacacacacaccactgtcataagaaccaaaatttaagtgagcaatcatagtacatggttttaatatcatatcattaaaagaggcactgaggaggggagaagagacagtcttgaattactggtgccacctctccttcatctaatagcagaggtctt

SEQ ID NO: 786114 - DNA, 530 bp, Homo sapiens
acacaaccatctagatatgaaggttcatttcagagaacagtatctttctaacatttggcatctgccatcttcaggaccattgtagagaaaagggactgacctggcaagagaaatgtaagataaggtgatctatgataggcacgactgggtgtttttctgacaatgacttgctaaataaaagaatgactttttgtgaaagattgtgagaaygtaagcctggattgatttatgtgaggtattgtccaggctgaatgtgaactaaataatgtctcacagtacccaagattttattaattgtttcccatcaagggcaaattggagaatagataacaataatctgaatgattcgaaccttccctattctaccctatcctataacttttatcctcccttcttttgttgcaattgtctgtgcatttaaaaaacccaaaatacaaaaaacagagcttgagtgtgtgtgtgcgtgcataccaaatttcaaatgtgagttggaattgcatcagagatctctctgaaagccaattcaggct

SEQ ID NO: 786115 - DNA, 588 bp, Homo sapiens
catttacgcaagtatattccctttaacttaaaaaatagtatatctgaaagtgagctttagatactgcccttatattgggtctatgtctgcaggggcaaacagaccacatatcatctagtcagcactcaattattatatttcaaaggcttgttgcctgaaatacccatcttttgttctcctcactgtgtctttgcaacrcgccttagcacagtatcttattgacctccttggagcactaagatcattcactgcatgggaagaaatgattttcctcctcagcatggacatatttactgcacctttagggaagcccagcaaaaaagaagcagcttccagatagttttgttagaaaatactattacagaaattctgcataaattccgttttaggaattgttaactctttctgtgaatttaagcagtattaaggtgatttggcaagaactgtgaaaattaatgattgatttctctattggctcataactgtcaagattcttggataaactatttagaacatgacataaaagataagagattagtagtaaaaggaaacggttataaaataaaacatgttgaaataatagcagat

SEQ ID NO: 786116 - DNA, 608 bp, Homo sapiens
tgatattttactttcctggtttgctatattgcttggtattttactctttttgtgtctattgtgaatggaattgtgttgatttggctttcagcttggatgttgctgttgtacaggcatggtactgattactgtacattcattctgtatcccaaaacttttctgaagttgtttatcagatcaaggcacttttgcccagaaactatgaggtttctaggtacacaagtatattgtctgtgaacaagaattgtttggcttcctgtcgtcatatttgaatgccttttatttatttatgttgcctmattgctgtggctaagacctccagtactatgttgaataggaggggtgagagatggcatccttgtctttctgtttctcaagggtaattcttccagcatgtgcccattcagtgtaatgttggctgtagttttttttatagatggctcttattatttttaagtatatttctttaatgtctagtttgttgatggtttttaacatgaaggaatgttgagttttatcaaaagccttttctgcatatattgatatgattatgtggtttttgttcttagctctgttaatgtgatgaatcacatttatttatttgaata

SEQ ID NO: 786117 - DNA, 614 bp, Homo sapiens
taaggccaaaacacaaaaattaatcatattcctaatatgtccacattcagtggacaattgaaaatcagaatctaaagataacatataccacttacaacagctctcaaagtaaaatatttaggtataaatctaccaaaatatgtgcagggcctatacgttaaaactacagaatgctgatgaaataaayataaggcgtagatgtctgactagacagccaggaagtactgctcccaccgagagaccaaaatatggagtaaaccaacatgcttcaaacacatcttcagagagaaaacactgagaatctatagagagacaatataaatactgaggccaaagagggaggaagtagggaaccctacatggaactgcagaggaccaggatgaattcccggccctgaatggctcctagggaagagatgagtgaaatgatggcagggcagcccacactcgctgtggacttctggaatcctagctgcaaagatcctatgctccctcaccaccataggcatttgaattgtaagggatatctgcctgaagagtaggcagagacagagctccgagttccatggagaccaggaaaatttgcatgccagaccgaggcagcacagcacagt

SEQ ID NO: 786118 - DNA, 619 bp, Homo sapiens
tctgatgtatcttttatttctgtggagtcagtagtaacatttccttcatcacttctaattctgcttatttggatcttccctctctcttcttcttaattagtatagctagtggcatagtttcttaattttttcaaaaaaccaactcctagatttattgaccatttgaattatttttcatgtctcaattttcctcagttcagctctgatttttgtatttctcatcttctgctagctttgaggttgatttattcttgcttatctacttctttcagttgtgaagttagattgctcatttgagttctcactttttgaagttggcatttagtgttacaaatttctctcttaacactgtcttagctatgtcccagagattctggtatgttgtatctttgttctyattattttcaaaaaaaattcttggatttctgccttaatttcattatttacctaaaagtcattcaggatcatgtttaagttccatgtaattgtatggttttgaacgatttttattgtgttgacttctatttttatttcactgtagcctgagagtgtgtttggtatgatttcagttcttttacatttgttgaagattattttatgtccaattatgtggtcaatt

SEQ ID NO: 786119 - DNA, 569 bp, Homo sapiens
ttgattggattgaaggatgcaaagtatcggtcctggctgtgtctgtgagggtgttgccaaatgagattaacatttgagtcagtggactgaaaaaagcagacccaccctcaacatgggtgggcacaatctaatcagttgccagtgcaaccagaataaaagcaggcagaggaatgtgaaaagacaagtctggtttagtcttgtgtcatacatctttcttcagtggtggatgctccctgcccttgaacatcagactctaagttcttcagctttgggactcaaactagcttacttgctccgcggcttgcagatggcctactgtgggacctcaccttgttrttgtgtgagtcaatactccttaataaactcctctttatatatacatctatcctattagttctatccctccagagaaccctgactaatacaaattttggtaccagaagtggttctagagcaatagaatattaagatggagttattttgttggtttggggtttctggagttggctacttaatatggattaggcctcaaaatgctaaggactctacttctaattgtatgaagaaca

SEQ ID NO: 786120 - DNA, 430 bp, Homo sapiens
attaccccttcacccttgccttcttatttatttgtattttttaatttaatataaaattttgttgacactctacttctacacttcaattcagaagagttatatttcacaataccttagaacaaggattcagcttaggatcagacaagtacacatcatgtaaaaattgtaatattattgtgaatcagcgtcattctctgtrtcttcaacttcacacatagtatcagaacatggaagcaaaatgctgaatagaaaaaaatagaaaattaatattaatatgggaatctaggaaaggactaaatttgttgcttgagatttaaaatactgtagaattctggttttgtgctcacatatttgtttgcaacttcatttgtcgttcatttcttgaagaaggaaggtaattttttaaatgaggtattttccaaagtcgtct

SEQ ID NO: 786121 - DNA, 640 bp, Homo sapiens
aactcacttctattaaagcatagaacaaagaaatgtatcagaaaagattgaggatatggcacttttttcatattgtattgatcacctagtcagctagaggaatactgaaatattaaacaattcctaaaagctggacttacaagtttcttttagaaggtataggagacccttaataacagtccaaaattttaaaaattacttgctaagcaaaatatgtctcttatcttactgacacatcagatgagatatttataataaaacaaagtgcaccagwgggcttggaaaattttttgcaacagcgtgaattgtattgaataaatgcaatctcaagtttatcaacaagttgcattcccaatgttcattggcttgtttgaaatttagaaagcatttggtcacagaaccagtgttgtacatggtaagtaagtccccaagacaaccaaaaactcatatttaatacagagaaaagctgtattatgatcaatttcagtgaaaatatagaaaaaaatagagtcaaacagaggcatctgaagatttttttgtggttgacttagagtcgaataacataatataaagttgaaataaagtttctttatttgtctatagtatggatacatatcgtaacaattatttgtaaggcttt

SEQ ID NO: 786122 - DNA, 588 bp, Homo sapiens
gtagaatttaatattaatgtattatatctctacaaggatttataattttcaaaacaatgaattagtaaacaataaagcaacaacttctaactcatatttttctacatttgaatggatggataattgtgagcactgtcttctcaaccacttggaaaagagctctgcactggagtctcatcttctcaccatgtactttaagaatagagaacatgtggtacatggcatttaagagatggtgaaacaattggaaatagtcaaaaatccattcattgtgtagagacgaatcaagtgtctcatgacatttcatttaaggctgtctctgattttgactctactaattttgtkcatcaggttgacttcattcatcttctgtaatttaagggtaacatttctaataagacttccgctgagttgatataattaagtaagaaacaaaatattaagttactgttaaaggtgtgtgttttgttttgagaccacagtcttgctctgtcacccaggctggagttctgtggcgtgatctcggctcactgcgaccatggccagctaacttttatatttttagtagagatggggtttctccatgtt

SEQ ID NO: 786123 - DNA, 588 bp, Homo sapiens
gtagaatttaatattaatgtattatatctctacaaggatttataattttcaaaacaatgaattagtaaacaataaagcaacaacttctaactcatatttttctacatttgaatggatggataattgtgagcactgtcttctcaaccacttggaaaagagctctgcactggagtctcatcttctcaccatgtactttaagaatagagaacatgtggtacatggcatttaagagatggtgaaacaattggaaatagtcaaaaatccattcattgtgtagagacgaatcaagtgtctcatgacatttcatttaaggctgtctctgattttgactctactaattttgttcatcaggttgacttcattcatyttctgtaatttaagggtaacatttctaataagacttccgctgagttgatataattaagtaagaaacaaaatattaagttactgttaaaggtgtgtgttttgttttgagaccacagtcttgctctgtcacccaggctggagttctgtggcgtgatctcggctcactgcgaccatggccagctaacttttatatttttagtagagatggggtttctccatgtt

SEQ ID NO: 786124 - DNA, 613 bp, Homo sapiens
atgaatgagtctggcatctcattgtcttgagtgtggtgatctggtgagttttagttctttgatgctttttgagaggcctaaggattgtttcctgaggaaggatctcagataaggcaaatgtaagttataagctttaaggctagaagagcaaatttctatttttattaaaaaaaactgtctataagattatgagattggtttcaaaagaactcaggaaaaatatgtcarcagcatcacatattgtctttctttctaactttcttcaactccaaacataccctttgaagggtgcaaagttttccaagggcatagctctaggtgagttcgtaagaatatgaattgttcaattgtagttttaattttctacacggcagaaaaatattgtatggagcgaataattgtggggtactgagtttagagagaacgaactcttttatgtgtaataagttataaatttaaaacctcttgaaaatataataggagcatatctgatctaaccaacttgtattattaatttagttatttcatatattttaaaaaatatttattaagctagtgaactttccctaaaaaacagacattccccatcatgtcccaaacactatactgtgaa

SEQ ID NO: 786125 - DNA, 639 bp, Homo sapiens
tggtatcagttgtaatatcacctgttttcatttcaaattgagcttatttcgagcttcgctcttcttttcttggttgatgccactaatggcctatcaactttatttatcttttcaaagaaccagttttttgtttcatttatctttttattttttttgtttcagtttcatttaactctgctctgatctttattatttcttttcttctgctgggtttgggtttggtttattcttgtttctctagttccttgaggtgtgaccttaaattgtctattgttgctctttcagactgttttttgtttttgtttttgttttttttttgagatggagtctcgcactgtcacatgggctggagtgcaatggcgtgatctcagctcactgcaacctccacctcacaggttcaagcaattcccctgcttcagcctccsgagtagctgggattacaggcactgccaccatgcctggctaattttttgtattttttagtagagacggggtttcactatgttggccaggctggtcttgaactcctgacctcatgatccacccaccttggcctcccaaagtgctgagattacaggcgtgagccaccatgcccagcctctttcagactttttgatgtaggtgtttaatgctatgaac

SEQ ID NO: 786126 - DNA, 679 bp, Homo sapiens
gcccaggaattgcagtccttgtggcctaaactggttttaaagtttattttgtaccccagagcactttagcccatggtgacagggcttgttgagacttagcttctgaccgctgggttggatgatttgcccctggctagggcttgtctaaatgccccttccatgggtactgagttctgccctatattgctttctgccrtgacagggcatcactgaattccaatgcaaagtccacaatcactgcactctcctccccaaaccacttgattctctctccatttgacatggttgctgccagggcatggaggagggttggtgattcaggactgtctttcataccctctttagtgccttttcccttaatatgatcttaaaaccaggtactgtaattgcgcccgcaaattaaaacctttcagaggagacaatgatttttactgtccattcaactggattccgcacaaaaagagaggccaggaggccaactgggaaggaattcttacccttttactggctttttgggttcctgaattccttcaactgcagcttccagaagagcagagttttgaccaccctgatcgctaattactaaggaaaaccattttcattattttcatgggttcataggtgaaagccactcaattttataagacacaagggatccaattaacattccccatatcag

SEQ ID NO: 786127 - DNA, 640 bp, Homo sapiens
ggtccatagtaaactttgctgcagacctccctcttgttttacatccttggggcatggcctgcaacctcttggcaaggctttgtttagccatgtggcccagattcatcctgccttagggaatgagttctttctggtttgatacctgcrtgaccttttgctatttgtcgattccccttccttccatgtaccaccttggattttcctttctccaagcctttagtaaagtctgaaagccagaaatattggctttttggcatggctaaagtgaggtaataggaaattttaaaagaaccttattaaagagtgctatggttaaaagtcagcttaattaaaagcagatattcaaactctaacaggctgggactccatgggaaaaacaggaggcaccagagaacccattttggaaaaactgttttcctcatgaaacaccaggaattagaaatggataaatacctctaaaaattaaggttctgttctgttttacattgtgttatctgacattttttacttttggggtaccagaaattactttgtagtatgagaaactcaaaaactgacaaatgaaaaatcttacaactactgaatcttcttctgtctgtctttgtagctatatatgtgttgtgtgtgatgtctacttaaa

SEQ ID NO: 786128 - DNA, 669 bp, Homo sapiens
tgccaaagccagcctggactgagttcttcctttcagtgtgtcaagttctcccaggcctttgttgagtgcacagatgccatctgggagccagagactactgtcaaaaactttagaagtatatctggtgctctattgtactgcagctgagctggtacacaaatcagaagacacagtccttcatactatttcctccgcatggaaacacaggcaaagaaacctcactccacagccaactccccgaccggcccacagtgagtactgctagactgctgctgatgttccctggaggccctagggctcagcttgtggtgaaggatgcttggcctcgtactcacccttaagggcagtgggctcccctgtagcccagggaaggtccagaaatgccatctcagagccatgtcctggaatcagggatccaagggacccagttggtgctcttctctcctatggccgagctggtacctaaggaccacgacaaagtctcctttattttccttccacttttktttttttcaagcaaaacgagtatcgcctctcaaccaccacagctgggaatatgctgggtctcacctgaagccagcaagtctcagagtgtcacccaacacccttgacatagtacctgggtaccactgctggttattcggggtccaaggactcttcggttagcag

SEQ ID NO: 786129 - DNA, 537 bp, Homo sapiens
aacctggctgcagattagagtgacctgtggagctctttaaaactaccaatacctatccccatctcagtccacttaaattagaatactggggatagggtctggttattcacagattttttaaatctttgtagataggtctaatgtccagtgttggacactgctgtgcttgaagctgaggaacccaggattgtcagatggtgttcatgctgaaattaaaacaggagaggagatgatgtacaactgtgatgtcaagaacttgaacacatgaattaaattcaagttgatatgaatccatgaagcagaaaggagcccagatcsgcagacaagtgatagcacatggagtaaaaggctgagtaatgtgaagttcagtaataattgctggataagagtcagaagtcagaaatacagagatcagagatgttagagagaaacttttctaatgacaatcagttgctagacattatacattttttgaggcataatttgtaccctctatcttgacagatttacagtatctcacctttgcagtcaagatgc

SEQ ID NO: 786130 - DNA, 584 bp, Homo sapiens
gaatgctttgtgttgagctacagtcaacatttcaaggaagcttttttatcattgtaaattgacaaattataattatatacatttatttgcaaaaagctttaaaaacatcatcagggatgtaaaatatgtatagaattatttacatttacactgatatccccttctgtaatgtttaaaaatgagatggcttacataaatattctactacactaatttaaataaactccccaaacaccttacatttccaaccactacaaaatgcatgaaagtaaaattataccaagatgcctccaagtaaaaaaaaaaaaaaaaaaaaaaaaargaatgcaaaaataaactcacatcgccaaacctttaaaagttcagtttgtctttggcaagggatttgggtgaaaagtcagctatttaatctgaattagctcactcatctcattttgccataaacagtatatgggggcatgccaaatatgtattaatatagcaaaaggaacaggaagataaggaagaataattattttgtttacatgaaactattctggccccaagaccaaaaacacaaagaaaggaacggaagtctgacctat

SEQ ID NO: 786131 - DNA, 649 bp, Homo sapiens
gcaacctgcttgggtccccttccacagcgtggaagctttgttctttcgctcttcacagtaaatcttgctgctgctcactctttgggttcacactacctttaagagctgtaacactcaccacgagggtctgtggcttcattcctgaagtcagygagaccatgaacccactgggaggaacaaacaactctggatgcgccacctttaagagttgtaacactcactgcgaaggtctgtggcttcattcctgaagtcagtgagaccacaaacccaccagaaggaacaaaaaactccagacttgccacctttaagagctgtaacactcactgcaaaggtctggggcttcactcctgaagtcagcaagaccacgaaccccccagaaggaagaaactctggacacatctgaacatctgaaggaacaaactctggacacaccatctttaagagctgtaacactcaccacgagggtctgcgacttcattcttgaagtcagcgggaccaagaacccactggaaggaataaattctggacacactatgatgtgaaaaagagatcctaatattttaaaagtttaagggatcaccaatctattcccaattcctcagttcacagatgagaaaaaataattacaactgaatgaggttattgaaga

SEQ ID NO: 786132 - DNA, 649 bp, Homo sapiens
gcaacctgcttgggtccccttccacagcgtggaagctttgttctttcgctcttcacagtaaatcttgctgctgctcactctttgggttcacactacctttaagagctgtaacactcaccacgagggtctgtggcttcattcctgaagtcagtgagaccatgaacccactgggaggaacaaacaactctggatgcgccacctttaagagttgtaacactcactgcgaaggtctgtggcttcattcctgaagtcagtgagaccacaaacccaccagaaggaacaaaaaactccagacttgccacctttaagagctgtaacactcactgcaaaggtctgsggcttcactcctgaagtcagcaagaccacgaaccccccagaaggaagaaactctggacacatctgaacatctgaaggaacaaactctggacacaccatctttaagagctgtaacactcaccacgagggtctgcgacttcattcttgaagtcagcgggaccaagaacccactggaaggaataaattctggacacactatgatgtgaaaaagagatcctaatattttaaaagtttaagggatcaccaatctattcccaattcctcagttcacagatgagaaaaaataattacaactgaatgaggttattgaaga

SEQ ID NO: 786133 - DNA, 660 bp, Homo sapiens
ggttttacttctgatgtcttaactatggccaattggatcaaatagaccctttatttattttaaagacccttatgagctcttccacacacatcttgctcatttttcatctgagaaaaatacacactccaagttcttttattcaatgataatatcagtgagtccctggaatatgtcaagtacaattgtgaacaccttatataaatcaactctggaatcttcacaatcatgttaacatgttggattctgagttccattaagacaggagccacatctattttgttgactgttgaatatctcctagcagaatgactagcacataataagtggttgataaatatttgttgaatgaatgataattttcttttttctaaaaggaaattgaggctcagagagattaacttgcctgatattatttagttacaaaatggagaaactttggtttcaaatattatctgcactgggcagcatggtgtcrtgcttaaaagcatagacttggagggtggatccaagatggcctaataggaacagctccagtctacagctcccagcgtgagcgatgcagaagacgggtgatttctgcatttccaactgaggtaccatgttcatctcactggggattgtcagacagtgggtgcaggacactgaatgcagcacaccgag

SEQ ID NO: 786134 - DNA, 660 bp, Homo sapiens
ggttttacttctgatgtcttaactatggccaattggatcaaatagaccctttatttattttaaagacccttatgagctcttccacacacatcttgctcatttttcatctgagaaaaatacacactccaagttcttttattcaatgataatatcagtgagtccctggaatatgtcaagtacaattgtgaacaccttatataaatcaactctggaatcttcacaatcatgttaacatgttggattctgagttccattaagacaggagccacatctattttgttgactgttgaatatctcctagcagaatgactagcacataataagtggttgataaatatttgttgaatgaatgataattttcttttttctaaaaggaaattgaggctcagagagattaacttgcctgatattatttagttacaaaatggagaaactttggtttcaaatattatctgcactgggcagcatggtgtcgtgcttaaaagcatagacttggagggtggakccaagatggcctaataggaacagctccagtctacagctcccagcgtgagcgatgcagaagacgggtgatttctgcatttccaactgaggtaccatgttcatctcactggggattgtcagacagtgggtgcaggacactgaatgcagcacaccgag

SEQ ID NO: 786135 - DNA, 644 bp, Homo sapiens
ccagattcttgtgaaactacagagaatggattagacagtccaaaacataacagattgtacttgtgtttgctctggtaagtggagctttagtttgatgtagagaaataagaggaaccggcatttctttcacctggacattatgaaagagaggtatctgaatcatccaattaagtgagcaggaaatctggaatattgtaggtgttttacatgctcattctttctttctacctgcttaattgtatctgtgctatttctgttaaatgcatctgcggtgaactttgcagttgctaaggagagcgtttgccaattccatatgcctagtctaaggtaggctgaagctaatctgtcattctggagaagcaagagargctaaggttttcataatatttagttgataagggatgagaactttagatacatgttatctcttactttgctatttttccaaaaatgtatttgaaacactgttaagcagagcaataatatttatgcagcattttacatttttaaagtcctttaaatattacatcatgcatcaaaaattatcgataccaagatgtgattgtctcaattttagagacgataaaattaaaaataagaggttctcaaaatgtcattattttataataactgaacaaaagttt

SEQ ID NO: 786136 - DNA, 605 bp, Homo sapiens
aaagtagaaatctggcttcctttgaagggtattgtagtggactttgcgttttatcacacaacttttaactgccatgacacttagtcaatccttatgctctatattaactacatgtctttgttctgtatagttgaaccactcaattattgaaatgagggcacctcatgacattcctaattgtgccaacgacaatcgctatggaacagagagttcaaccatttttttctttagataaagaatatgaacatctgccaaatacaaaaagaagggggagatgattcatgaaaraacattaaacaactgtgaagaacctcttgaaaagtaaccatgtaatacataaagagagttactgatgattcatccaatatgacaggagagagtatataaatgaggatattttgacagagaaagagtgggtcagggacagataaaacagggcaatttgggtatgtttactgtattacctacaaatgtattcagaaatcattaaatagaatattaacaaatatagagtgggaacatgcttgcaggattgaagtcttccacttgaagggaaaaacgttagagagccaacaaggaccacataacctgatccttgatatttt

SEQ ID NO: 786137 - DNA, 559 bp, Homo sapiens
tgtaatacgcaggtgaggaacatttgtcgctcttgatgtagaacaatttattaacgtttgtcaatagctgacaaactatttactaccactgagttaatgcagaaagttgcagggaagtcactgagaatgtattcgagttgaaatgaaaatgatgaaattccacttttttcttgttttactcaatggaaattaaaagcagttcttattaacagttgctggttgccaggcacagtggctcacgcctgtaatcccagcactttgggaggccaaggcgggcggattatctgaggttgggagttcgagaccagcctgagcaacatggagaaaccccgtctctactaaaaatacaaaattagccaggcgtggtggtgcatgcctgtratcccagctactcagggagggtgaggcaggagaatcacttgaacccgggaggcaaaagttgcagtgagccgaaatcacgccattgcgctccagcctgggcaacaagagcgaaactctgtcaaaaaaaaaaaaaaaaaaaaaaaaaaaaaaaacagtttctggcatttccctacagtag

SEQ ID NO: 786138 - DNA, 575 bp, Homo sapiens
tgggaatgcttgaataaacatttttgttttttcccaccagataaacatgttggagtatgtagatgtgggaactgatgaaagctaccttgaaactccttgataatggagtcaacaaagagaagcagggcacgtggtgggagtgattctgaagatatcatttaatagcctttatttaggcacaccagaagcaagatatatcccttcattgttaaattacttgagccaataagtcctcatctttacttaaatttgagaccagatttcagtcactcttaggaaaagtgaatcctaagatgcaattgaaaataattacaatataagctaccactgattgtctgcatatgtgacacatactatgctgaatactttgcttttaatatttcatttaataccgatgacaaccctatgagtcaaattctagtcttyctgttttacacattaacaaataatttcataaatgttgctgttgctcataataataacaaggctatcacttattgagcacatagagttttccaggcattatactaagattgatatacacgtttatatattcattatcaaataatatattg

SEQ ID NO: 786139 - DNA, 548 bp, Homo sapiens
tttttactctattccttcattcaacctgttgctctttagaaaaaaacccttcaaaagtgctgtctatatttttggtttcaaattacctttttagtctactccagttagactgtggatctcattattccatttttaaacagtttttttcagggagaccataacctccatcttgccatgtccaatggtcaagtttctttcctcattttattcaacwgccagtcacatttgacatcacagatcacacactctttcttgaaacacttccatcatttgtcttctgggccactactctgttgattttcctcctacctcactggcaactccttctaagactcttgttggtttctttcataaacctcaaaacaactgggtgccccaggactcctcccagaaggaatcctcttctcttttcagtttatatgcactctttagactatctcaacaagtcacatagttttaaataccatctgcatactagtagctttcaacttgcaaatgtacaattttagcccagaattttctcccaaatctggacatgtatatcgaga

SEQ ID NO: 786140 - DNA, 499 bp, Homo sapiens
ccaacagacatgaaaaaattctcaacatcactaatcatcaaaaaatgcaaatcaaaaccacaatgtgataccatctcacaccagtcacaatggctattattaagaagacaataaataacagatgctgaagaggctctgggaaaaagagaacacttacacattgttgatggtaatgtaaattagtttagtcattgtggaaagcagtttggagatttytcaaagaactaagaacagaattaccatctgactcagcaattgcattattgggtatacacccaaaggaaaacaaatccttcaaacaaaaagacatgtgcacttatatgttaattgcagcactattcacaatagcaaaggcatggaatcaaccatggatggactggataaagaaaatgtggtacatatacaccccggaatactacacagccataaaaagtaacaaaatcatgtattttgcagccacatggtgcagataaaggccattataccaagcaaattaatg

SEQ ID NO: 786141 - DNA, 560 bp, Homo sapiens
gtttttcctatagagttgtttgagctccttatatgttctggttattaattctttgtcagataggtagtctgtaaatattttgtcccattctgtgggttctctcttcactttgttgattgtttcctttgctaggtagaagctttttaactagatgtgatcccatttgtccatttttgttttgtatctctctggttatgggatactacccgagaaatcctggttcagtctaacatcctggagagttttccaaaagatttctcttagtagtttcatagtttgaggtcttagatttaagtctttaattcattttgatttgatttttgtatatggcaaaaaataggagtgaagtttcattcttctgagtatggatatccaatttttccyggagactatcctttattgatggattattatttaagagactatcctttccccattgtatgttcttggcacctttgtcaaaaatgaatttgctctatatgaatggatttgttatttcaggttctctattctgttccatttgtctatgtgtctgtttttatgccagtaccctgccattt

SEQ ID NO: 786142 - DNA, 570 bp, Homo sapiens
gagttgatctaaagcataacttagataggtttcgtgagaaatgattgtccgttcaaaccagaatcttggacttcgcatctaagcccttaaacagagatgctgtcactacaaaaggcattgatacttctctctctccctttctttcttatccatgtggcctcatttgctgcctccttccaattccttttttccataggaagaagcatctccagtgctcttcattcctctttagatccatatttccatctggttccttctgaaggccatcctttaaccatgtagtgtgggcttgctggtgatgagttctaatttttatatttttttgctaatttttstatttttttgtagagatggggtttcgccatattggccaggctggtctcgaactcctgactcaaatggcctgcctcggcctcccaaagtgctgggattacaggcgtgagctgtaatccagctgttattcctttgtagagagtctctttagttatccctcaaatttgacaggctgtatggtggtgtggtatttctctatttttttcccccccggctttcatatcagactaaagattc

SEQ ID NO: 786143 - DNA, 490 bp, Homo sapiens
ccctgttgggaaatagtcctctgtcagttttaaagttgattccctggttttttacttctcttggcaattctcatttttctagaaaagtgtgctgttatggactgaattgcatccctctcaaattcatatgttgaagcctgtgacccccaaatatctgagacaggtctcagtcgatttagaaagttycttttgccaaaattaaggatgcccccgtgacacagcctcaggaggtcctgacgacatgtgcccaaggtggtcggggctcagcttggttttatacattttagggagacatgagacatcaatcagtatatgtaagatgtacattaattccatccagaaaggcgggacaactggaaacaaaggcaggacaacaacaaaggtagggagggggcttccaggtcataggcagataaaagacaaacagttgcattcttctgcatttcggattagtctttccaaaggaagcaatcagataggcatttatctc

SEQ ID NO: 786144 - DNA, 587 bp, Homo sapiens
aggcgtggcggtgcgcgcctgcaatcacaggcactcggcaggctgaggcaggaaatcaggcagggaggttgcagtgagccgagatggcagcagtatagtccagcttcggctcggcatcagagggagaccgtggaaagagagggagagggagaccgtggggagagggagagggagagggagagggagtgggagtattttttagggtaaatttctcagcattgaaatttctgggtcagaggtcttccaacagatgggttaccaaatgtaatgtgttaccagatgtctctcagggaggtggtaccacttacagtccctatgagcacacacctttttcctctcttgccagcatggagtattctagtaaacatcgtatctctttcttttaatttgcatttttttaaattattagtgcataggatgacmtttaaagtctattggctgattgtatttcttctgtgaacttcatgttcattgctttttggccatttttcaattgatggtttgtcttttcgcattcatttataatacctctgtactttgaaatattttacccagtaaaaattgacattcttatgtagttaaagcat

SEQ ID NO: 786145 - DNA, 615 bp, Homo sapiens
tcccttgctccctctcatccctgcgactttctttcacccgtcctccacacgaacgagaccacgccaccgagaagaagcctctggggcgcggggctggttagagccccagagccgtcgcagcccggctccaggtgtacctgcgcacaggcgccccacggtgacgtcagggacgcgactcccgcgatgccccgcgggccgcctgatcccaggcgcgggctcagactgggatctcggagttcccctgcgccctcctgacggtgcagtctggcggcccgtggcgcgggcgctgccatggagcatcctggagcctttggcctcggtttacatgggaggcccctcgaaacagggcaygtcacttgccccgggtcacctgcgggcggcgagactctcgggttgactccaaggcctgacattcccctccggttttcacggaggagggtgaggatgttgccaggagctgccgtaaggctggaggagcttgcggttgggtccacccgcctctgggcaggccttagcgttcacccgcggtttctccctgactttgaacccaaactccctaccccgcaagtccttccctgtttgattgctgaactccaagtgacagaagaactgaac

SEQ ID NO: 786146 - DNA, 610 bp, Homo sapiens
ctttctaactctccagcccaaatgttagctttgtaacattgcatccactcaatttaaatggaatgtgtagaaccccttccatgagtacctaccagaagccaagctatagtaaaggtctgaagcttaaaatgtgcacaggctgtcctttctcttgagagagaaataaaatggtggaggaagtgtgatgaggacaagaatgataaggaggatgctctggaggtggagggggaagactccagccagaagggccatgtgattctacttatcatcaattagtgtttggtgtccaagctggtgctgagccctgagcatttaataaattgatttgacccttatcttcccaacacagggtcaggcctgggggttggggcaaattgtggaataaccaaatacctggagcctccctgtccaaggagggcgtgttcaggaaaagtttcccagcagagataaattctgtatgttaytagtccagagtccagggaccactcccaggtgtggtttcactcgggacactgggaatcctctctccaggggatatctgttggtatgatgataactggagaggaaatgtgtggagatcatcagattccatctggcactagggtgatct

SEQ ID NO: 786147 - DNA, 623 bp, Homo sapiens
gactcagaggatgtttgaaaacgaagactctgcatatcgaggtccctggggaaaagggggggagatgcaaatgtgtctctgagtgtactccagcaacagaaagggattaattgggatatttttggttgcaagaaatagaagacaacttgagctagtgtaagccaggagaaggagggttcatacaaaggaccccgcatctcatgaggcccaggtcagaggcgcaggcccaggaaaggggtggcgggcagaaasaggcaacaccaccagcctctcttagcttccaagccacgcttggcccctctgtggctgtctctgctgcccattccaatggcggtacgcaccatggcccctggtccctcagtcggcgtcctgttgtgctggagagacacttatacaagaatccctcagagccaggtccaaattcccaggacacagaatctgtcccaacttggatcgtgtgttcacaccatggtccaaccagctgtggccaggtgtgagatcaggtggtgggaatatggcaaatgggccccaccagggggaggggaaggagaagggtgaccaggtatgctgagccaagaccccaagaagccccttccccgagggttaagacaggaaaatctagg

SEQ ID NO: 786148 - DNA, 623 bp, Homo sapiens
gactcagaggatgtttgaaaacgaagactctgcatatcgaggtccctggggaaaagggggggagatgcaaatgtgtctctgagtgtactccagcaacagaaagggattaattgggatatttttggttgcaagaaatagaagacaacttgagctagtgtaagccaggagaaggagggttcatacaaaggaccccgcatctcatgaggcccaggtcagaggcgcaggcccaggaaaggggtggcgggcagaaagaggcaacaccaccagcctctcttagcttccaagccacgcttggcccctctgtggctgtctctgctgcccattccaatggcggtacgcaccatggcccctggtccctcagtcggcrtcctgttgtgctggagagacacttatacaagaatccctcagagccaggtccaaattcccaggacacagaatctgtcccaacttggatcgtgtgttcacaccatggtccaaccagctgtggccaggtgtgagatcaggtggtgggaatatggcaaatgggccccaccagggggaggggaaggagaagggtgaccaggtatgctgagccaagaccccaagaagccccttccccgagggttaagacaggaaaatctagg

SEQ ID NO: 786149 - DNA, 559 bp, Homo sapiens
tttttttttttaatctttactcttgtgtaaagtgcttcagctctggttggcttatccagccaacttcatgagaactggctgatggagtaactgccacctccaaggaagattccagagtcatcctcacatcagatccatccaggtgtagggggtgccagtccaaccatggggaaatcctagtgtgtctgggcatagtattataaccaaattcaggacacagaggaaaccagsgatgattgggattgaactgtgggagggtgcctgacatgttatcacaatctgcaccaccttagcaatcatttgcctaacaaagccattcagccaagaaatctcagccctcctgtctgtagtcaggtgcaccagaaccatccttccactcacctctcggccagtgaaagagaataaaatcccggcattccccaagagaaggaagtcacacagattaaagttcctagcaactggtctattgatagaacaacaggacagaatttttagcctaaaataatcatgatcaaccgtccttggcatttttcactcattgagtaatactcattggaat

SEQ ID NO: 786150 - DNA, 629 bp, Homo sapiens
gactatagtgaggggtgtggaatgaggccaattggggagcccaagcaccttctaaaggagcatcggcccctcagcttcagcctctgttactgtgggaaaatatgggtccacattttacagttttataggttttcaatgactgcctcaaatctggacctttttctctctctctgctttaatttaatttaatatatctctcttggttgtgcatcatttaattttattcttaggtaatttttttattgttatgtcatccatataccctaaaattcaccattttgaagtatgtagttgaatggttcttagtatattcacaaacttgcatagccatcaccactatctcattctagaacattttatttatttttatttatttagaagtggagctttsctatgttgcccaggctgatctggaactcctgggctcaaaggattctcctacctcagcctcctgagtagctgggattacaggcacaggccactgtacctggcttcaattctagaatattttaatcatccccaaaagaaaccccacattcaccgggtacagtggctcatgcttgtaatctcagcactttgggaggccgaggcgggcctatcacaaggtcaggagttcgagaccagcctgg

SEQ ID NO: 786151 - DNA, 508 bp, Homo sapiens
tgagagttttggcaggactctcccaccccaactctgggctcaccttgcctctctgtgagcttcactccggcctgatgttttcctggaggtggcagggaaggcctcccattgcggtcacccaagcagaaggaggacacatctttcccaacactcacgccaatgtcctggggttgactccatctgcaccagttcgagtcccctgtgcaaccctgagccaatcactgtagtcaagggaagaggatgacctgattggtcatatcttgatcatgtgatgactggggccaccaatgactttgcactgccttctgcccccatgattcaccragagcaagtaggttgctaagcaaccagctccagctcttttgtggcacttgggactgggaaagccaccccagggtcctgcatgttgaattacagggaaagtcacaccagtgtcctgcatgttgaattacagggaaagtcacaccagggttctgcatgttgaattacagggaaagtcacacagggg

SEQ ID NO: 786152 - DNA, 503 bp, Homo sapiens
gctgtacatgaagcatggatgggagacctcaggaaacttatagtcatggtgagaagtgaggaggaagggagcacgtcctgcattgctggagcatgaggaaaagagagagatggaagggggaagtgctacacactttcaagaaaccagatctcatgagaactctatcaccagacagcactaggsgggtgttaaaccattagaaatcaccccattattcaatcacctcccaccaggttctcctccaacactgggatttacaagttgacatgagatttgggtagggacccagaacaaaactgtatcaaatcccaaactccacttccatagccaagaacttggtggttattgattgagggcctcctaggggccagccccttgctacatactttgcatgaactctcttgtctcatgtgtaagtaccacaggctaatgtctgcacctgtgcaccctctataatgatatctctcattttcatgattgagcagactgtaatggttgttgtg

SEQ ID NO: 786153 - DNA, 522 bp, Homo sapiens
tctccctgcccgggatgctctttgcccttccaatgctcatggccacatctcactcccatctctgctccaacatctcatttgcaaagagaaaagaaagagcccacccacagtcccacactaggatagtgcttggcacaaaataggtgctcaaataaatatttgttgaaggaatcaataaataaaatgaagacctgcccccttgaactttcggttaactcaccccagcctcaaattgaaatcaaagaagttattagaaacctggawgagagcagaaaagggaactgagggagtgagtctgggactgggtgttggagctctgggttcacatctggttgggtcagcagctttcagatgtgtccctggataggtattttcctactctaagtctcagattatttgtaaaatgggcaaagaagccattcattcagtcatgtcttcattcaataaaaatttattgagcaactgctgagccaagcactgatgcaggtgatggggatccactaggaaacaagacagttcctt

SEQ ID NO: 786154 - DNA, 500 bp, Homo sapiens
ccaaacagccatgacagaagcctgcctgagggcttcaggggagactgaagagtcccaaatgcatctcttgtctaggatgatgaaaagttgattcgggcttgctaccaaatgttacttatcagatgccaagtggcattgtctatgcatggcgcctggtcctsccggggagctgattgagggtgagctccatccagagagcaggaggggtatctgggcactaagctaggtggatttaggacccccagcacagtttttggctgggaccattgtttggttctgacaaacagcagggcaccatggagacaggaaaataggcaaagaaaatgactcatctggctggaagcccagaaaatgtatgctaataccttcacgcagacaaaaataagattataaagagactggtggcaaaaaaaaaaaaaaaaagccagcctcaaatgatgcttctctttaatccatccacttagaagcccaacaagttgccgagatccaccgtgccaaag

SEQ ID NO: 786155 - DNA, 541 bp, Homo sapiens
tggcagagtgtttcttgccaacccttggtatagtcagtcttttttttttttttttttttgatacagagttccgctcttgttgcctagcctggagtgcaatggcgccatctcggctcactgcaatctccgcctcccgggttcaagtgattctcctgtctcagcctcctgagtagctgagattacaggcacctgccaccaygcccagctaatttttgtgttttagtagagatggggtttcaccatgttaaggtgggaattctcaaagcatggtccctgtaccagcaacatcagcatcacctgggaacttgttagaaatgcagactttggctgggcacagtggatcacaaatcctgtaatcccaaaactgagggaggctgaggtgggaggatcttctgagcctaggagttactggacaacatggcaagaccgtatctctaccccccaccaaaaaaaaaaaaaaaaaaaacaattaggtgggtgtgatggtgtgtacctgtagtcttaggtcttgtgaggctgaggcaggaggattgcttgagtc

SEQ ID NO: 786156 - DNA, 523 bp, Homo sapiens
agaatggagcttggcacagagtaagcttcaatcaatgtcagctcttcattacccaaccttggcgctgcatgacgaacacctgtggatggttaaaaactgcactgcaggttacttccctcagagcctctggggtgggacccaggcttccgtatttttttttaagccccttaggtaatttcattgtgtgcacagggctgaaaactgcctgaggctgcagtctctcaagtgctagttcacacagatatttatttatttattttttgagacagagttgcgctcttgtcatccaggctgaagtgcaatggcgcaattttggctcactgcagtctccgcctcccaggttcaagagattcttcttccacagcctgccgaatagctgggawtacaggtacgcgccaccatgccgggctaactttgtatttttagtagagacggggtttcaccatgtttcaccatgttgtccaggttgctctcaaaatcccgacctcaggtgatccacctactttggcctcccaaagtgctg

SEQ ID NO: 786157 - DNA, 572 bp, Homo sapiens
caagtagtcattttaatggccaattccaatggcttctggtaactctgtggagaaggagggaagccactgaaaacacccctcgcagtggcagacctctccagtggaactcaactccttggtgaggccagccagccatttatgcttttctccctgacagtcgtggccatgwaaaattgttagcccgacagggatagggtcaccctctgggccccttttgctgtcaaaatcagtaggagccacttgcaggagccaggcatactaagcgtcctgcaacatctgagtggatagttgctgcacagtgaagatctgtcatgggccttgtaaatgtctattatctcagcttagcccctaactcagttttacatattaacacaaagtatttttaaacatggttttcatatatgctaaattttctaggaggggaacttccatgtaagccagaggaaggtcatatattgttttgttcagacctttaccaagagatgcccaccatttctgaaaatcacatcaccgagagcaaagctctccacctcggtcagtctgcatttgtagcagtctgcattccacatgcg

SEQ ID NO: 786158 - DNA, 504 bp, Homo sapiens
aaggaatcagcaactaaggacaaacaaccacatctaaacaagaataagaattttaattttagagcacgtgaaaagatgtgttggaggaaaaatcctgaaatataagtgaagctttgagagccttttttttttttgacagggtctcactctgtcagccaggtgggagtgcactgacacaatcacagctctctgcagtcttgaccttctaaactacggtgatcctcccacctcagcctcctaagtagctggactacaggtgtgcatcaccatgcccagctaattttttgtatttttagtagagatggggttttgccatgttgctggtctggaactcctgggttcaagagatcacccaaagtgctgggactacagacctgagtcaccacacttggcctttttttycttttttttttttttttgagttagggtcttgctctgtcatccaggctaaagcacagtggtgtcatctcagctcactgcagcctcaacctcccaggctcaaca

SEQ ID NO: 786159 - DNA, 613 bp, Homo sapiens
ttatatggtgcttgattagagctggacggggaggtgttccacaaaaactgcctggaaatcttcagcatatcacaagagccagggatcacaaatgactgggtcagaattggtgccagatactgaaaaaagggtagatgaagaatgagtggcttctacctataaaagcatccaaatttacacattataaaaaacaggttgaaactacactgctgtctactcaaataagttcaatgctagtaaatgcccaaaccacatgacagcatatatcaaggataaattctgcggtctgtgtaaaggcctaggaaaacccccaacccagggtacccgtgggcagttcctggactgctgctcaccagacttccttcactgtacaaggcaagcagtgacrgctaaagaagagacggtgctccgctaacatttgataggaagaaggaaggcagatttctagaaagaaggctgggaacaaaagtgagcaactccttccatctctttgatatcaaggcaaacaggtcctacctgaagaatgtttataaaaactgctatgctaacagcactaagtaaaaagtgggatctggtataaaagataattagttggctgggtgtgggtggctca

SEQ ID NO: 786160 - DNA, 621 bp, Homo sapiens
ataaacctcaacagtgatcatgttgaccttgagtgacagggtataatgtttgggaaggtgctttgtaaactataaggggcaatacaaacatgtagtacaccttctctgagatccgggaaaggacaacctgagcataggytggggctggtcataggccactctcccctactgtttctctagagtgtgtgtagtccctagcaagtctcagatgcctcgagtcgtggatggaaacaaggtcccaggaccattgtcctgagcctcctttctccgtgctctacctggggaatgcttgactatcaacccacagaagctctctctggagcctcactgcctaaagagcttcttgtcgtaattgtaacctgtcatggttaaccccttgcaagcatgccctgccccttgtctctcccaagctttggctgctgcagcttctttccacaaaatcccagcagatagccgggcgtcgtggtgcgtgtctgtaatcccagctactcgggaggctgaggcatgagaatcgcttgaacccaggaggtggaggttgcagtgatattgcgccactgcactccagcagcctgggcaacggagtgagataccccctcaaaaaaaaaaaaaaaaaaatcccag

SEQ ID NO: 786161 - DNA, 555 bp, Homo sapiens
aactaatcattaagaaacattaaacaaaacccaaatgagagatatttgacagctgtcttgtccaataccatagctactagctgcatgtagctattttaattaaaattaaataaaatttaaaattcagttccaagggtaaaaaaatttcaggtagacaggaagaattttttcgtagttctattgcacaacatagtaaatatagttaataatggagtattgcacatttcaaaattgctaataaattttaaatgttttcactatgaaaagtgttaagtatttgagatgatgggtgtattaattagcttgacttaattattctacattgtatttataaatcattacattactttgcattccataaatttataaaattataaattgtcaagattgtcaatttataataaaaaattaaytaaataaaatttaaactgggtatagtggtccacacctctaatcccagcaactcaggaggcagaggcaggaggattgctggagcccaggagttcaagtccagcctgggcaacataccaagactcaacctctatgaataaataa

SEQ ID NO: 786162 - DNA, 657 bp, Homo sapiens
gatcatctgctcactttggggagatgcacctcaacttgtatttttaatgtaaagctaaagactatttggattataagccaacccacaagctgtgaatttaaaacatttgcagagagttttaaaaacaaaagaaaatgcctgtggcattatgttgactggaaaaaacaagttccacattgtatatatgggatgttctcaactgtgcttaagtctggaaggaaatctgccaggaggttgacagtagctgcttctaggtgataggattttggggggcttttcctcctttgtttgcttctattttcctggacttgccaatttttctacattccrtatgtattactttattgataatagccaaaataataaacctaaataaagtctttggctttatttagactattaactattgatgagataggtgaaatctcagcctttaatttgcagggcaaaacttaagaaatggttttcatttgtgtgtttttggctaggcatggtggcttatgcctgtaatcccagcactttgggagactgaggggagaaaatcacttgaaaccaggagttcaagaccagcctgggcaacataaagtgtgcttttaaacatttagaagttacaatagcttaaaactgctctaaaaaatattttttaagaggacagaa

SEQ ID NO: 786163 - DNA, 559 bp, Homo sapiens
gggctctctattcttgtccattggtctacatgcctgtttttatgctagtaccatgctgttctgattactatatgctgaatatctctaatctgaaaatctaaaatctaaaatggtcctaaatccaaactgacctatgtgatgggtcacagttgaaatgcagtcaaaactttgtttcatgcactatgttatttaaaatattatataaaattaccttcaggccatttgtataacgtgtataagaaacataaagaatttcatgtttagacttgggtcccatcatcaagatatctcattataaatacataaatattccaaagtccagaaaacctaaaatccaaatacttctggtcccaacyatttcagataagtgatactcagcctgtatagctttatagtagctcaggaagtgtgatgtctctggctttgttctttttttttttttttctcaaaattgatttggctattcagggtcttttgtggttccatacaaattttaagatttttttctatttctgtgaaaaatgtcagcaaaattttgatagggattgcattcaatctg

SEQ ID NO: 786164 - DNA, 529 bp, Homo sapiens
tcctatttgcctaagtctctgtattccctgctccacatgatgctgggtgttagggactaaactgtgccccccagaattcattatattgaagccccagcccccaatgtgattgtatttggagataggtcctttaaggaggtaattaaggttaaatgaggtcattacagtgggactttgatccaatatgactgatgtctttataagaagaggaagagacaccagggttgtgtacccagaggaaaggccaagtaaggacacatcaggaaggcagccgtctgaaagctgaggagagaagcctcaccagaaaccaaacctgctggcgccttgatcttaaacttccagcctgcagaactatgagaaaataaatttctgttctttaagccacacartctgtggggttttgctgtggcaaccttagcaaactgatatacctgggaaacttctgctatcccaatctcattaaacacaggccactactgaggccaagctttaagcagtcaaccaagcaagctgttatagccaccgcagc

SEQ ID NO: 786165 - DNA, 625 bp, Homo sapiens
ttatttctagaatatatttccttattatacccaggatatgagcagagctatcaaatgagtaggaaacatttatttatccatgcatgcctcattaaaacaataagattccaatcttttttaagcccgtgcttctggcaggccacacaaaagacacagcattgcaagtaagtttttccatgcttaagtaggagtgtgtaagagttcaatcagccagtaattcttcaacaagtatttatatgtgcagttcatgtgtaccaagcactgtgttactgctgcaaataaagatcagatcaacsaatgaaagatgtttttaagaattctgctgctcacctgagctccttctgggggtgggagacgacagccaaatatgggtgggacaggagagccacattcttgacagaagcgagcaaagggatctgatggccggggggcaaggcagtgggcacacctacaacaaaacaggttcccgattggccatgttctggtgggcccacattaagaagactgataaaaatctaaaagcggtcaaacagttttaaacacaaaacaaaagcagactgctctcaatggctatggaacaagttcaagacaggaaatacttatctaggtcatttggtcattttat

SEQ ID NO: 786166 - DNA, 611 bp, Homo sapiens
tctagccaaatttttttctttttttttttttttgagacatggtctggctctgtcacccagactggagtgcagtggcacaatcacagctcactgcagcatcaacctcctgggctcaagccatcctcccaccacagccttccaagtagctgggactataggcacgtgccaccatgctcagctaatttttgtatttttgtagagacagggttttactatgttacccaggcctgtcttgaactcctagacttaaagatctgcccacctcagcctcccaaagtgctgggattacaggcataagccaccatgcctggcccaaattcttcatgtttacaacccagtgaaatttgggttcctcagtgttggrgtgagtagttacagacaaacaaggaaagttagaatgatccatgtagtaatggattagacttgaaaacatcagtatggactcttgtgtaatttaatataaataatatagatggttatatttagaaatattgagtatagctatgtatatatacaagggttaatatgcgcacataaatctcgtgctgccaactgagaaggcctagaagtgatgacatcccgatggcaatgaacacatctagtgcccaagt

SEQ ID NO: 786167 - DNA, 640 bp, Homo sapiens
tttcttaaaaatgctgaaaccatcctgacagggttaacaagattacaagccagcctttaggcaggttagttaggcactgaccagggtgcattggtgcccttcaattcacttccctgcagctgctaactaaccaaaagccttgcagcacactgatcacctactccctgattgctcctatccacagaatctctgacactagctctttgtacccaggaattgcttaaggtatttttcagatcctgaattcccacaaaacagctgatgccaaactgtctagggatccccaccaggaagggcacagtggcwcacgcctgtaatcttagcactttgggaggccaaggtgagaggatcgcctgaagcccggagtttgagactagcctgggcaacaaagtgagaccctgctttacaaaaaaaaaatttttttaaataaataaataaagacctccaccaagaaacaacactggaatgaagtttcttcatctccctgtcccatgacttcacctctcacttcctgaccaatcagaaatccccacactttagcccattgcccctccagacttcttaaaaatgccatctctaatctcttggggaggtggatttgaggattgctcttgtctcctcatttggctgccacttgatt

SEQ ID NO: 786168 - DNA, 577 bp, Homo sapiens
tgtgaatgttggtgagtgtaactgtcctcagttgtcatgctgggcctgagaccatgggtggtcctacctaaagggcagtgctctttctaggcatcgtttgcacctgaatcacatcatggtagacccatcttgttcttactgatcrtttataaaaggtgttacctttttcattctttcacttagtttagtaaatattcattgaacacctatgatgtgagattctgactttaacgaggtaaaagttccatttgtgctttcaagaagtcctgggtctgtaaggagaaagccatctaaacagctatttcaacacagcgtggtgcaggtcatcacacgacactaaaaggtgcagacgctagtgccgtggctccaaccctgggggtctcctgaggcacatctggggctttaacaccaatgctgcacccatgtctctagcatggatgtctccagcatgaactcctgatgaacctccaagtccatctcagtgcccttctcctggatggctccagacccctcaggccacccaggccttcagctgtacgttgggcccacccctccatctccctcgctcccagcctct

SEQ ID NO: 786169 - DNA, 624 bp, Homo sapiens
aaattggagtcagtcctctcaaaccttgtcactgctttatcatctaagtttacataatagtttaaatcctttgttgtcatttcaacaattttcacaacatcttcaacaggagtcgattccatctcaaaaaacggctctctttgctcatccacaagaagcagctcctcatctgttcaagtgttatcatacgattgcagcaatccagtcccatcttcrgctctacttttcaataagtttttatttatttgcattattatttcaatagcttttggaatacaataggtttttggttgaatgagtggatggatgaattatgtagtaatatagtaataaaacagttcctggatgaattatatagggtgaattctgagattttagtgcacccatcacctgagtagtgtacattgtacccaatacgtagttttttatccttcaccccccatcccagcctcccatttctgagtctccaaaatccatcatatcactccttatgcttttacatacccatagcttagcttccatttatgagttagaacatgcagtatttggttttcttttcctaacttacttcacttagcataatggcctccagctccatcaaagttgctgcaaaagacatgattt

SEQ ID NO: 786170 - DNA, 594 bp, Homo sapiens
cccataaattgcaaatgttcttaatagcatttagaatggataatcctttccagaaggtttcaatgcacttttccttgatccatcagaggaatcactatctatgccagctgtagccatattaaatggatctcttaaataataaaacatgaaaatcaaaattactccaggatctatgggctgcagagtggattttgtgatagcaagcatgaaaacaaaattaatctccttgcacatctccatcagagctcttgcgtaaccagrtgcattgtcaatgagcagtgattttttttaaggattttttttttttctgagcagtaggcctcaaaattgggcttaaaatactcagtaaactatgctgtgaacagaaatgctatctttgttttatctgtagagcacagatttatcataattagtaagggttgtaggatttttgaaacggtaaatgaacattggcttcaacttaaagtcaccagctgcattagctcctaacaagagagtcagcctgtcctttgaagttttgaaaacaggctttgacttttcctctctagctacaaaagaaggtggtaacttctttcaatagaaggctatttcttc

SEQ ID NO: 786171 - DNA, 610 bp, Homo sapiens
tctccatacttattgttaataagtgacctatggggagatgcttggagacattataaaataccctgtgcaccagtcactccccccagtggttttagtgtctactgatgactccattcaagtatgttattgttctgtggttgcttccaggcttttaaatgtgttctttgattcagcctgcagcaggctgttagggaaggctcttccttcctaacacagagtcccaaaacactgggcttcaagggaggtggtggtatatccctgtctacaaaatattttgtgcacttcctttttcctgagcaagatataaggtattctgggcatgttttgttaggacacctctttttaagacctgaaggtcttatggaaaatggcagccttccgttttagctgtcaaagtctacaggctttaactgtgctggctkgtggctggaagtgggtccaggcaacagttcaaagtcagaagcctgagatctgtgtccttcagagggctggtggcagcttgtgcctgggcatctcagccctggaggggagtcaggaaggagcccctgaaggggcgagccagtagctgactctgggccagtccaaggcccccacacacgacccaggccca

SEQ ID NO: 786172 - DNA, 614 bp, Homo sapiens
gaaaggaaatggaatgtgtggacatagaggctcctgagacacctctaaattgtctccttctctaccaaggccgtgttagccttggccacaccaggaaggacacagacatatatcaaagaggcttcatgcagtgtagcttgcccttccaccttctaccacgtgaggacacagcagggaggccctcacaagatgctggcaccttggtcctgggcttcccaacctctagagctgtgaaaaataaatttctgtttcctgtaaattaaccagcctgtgttattctgtkatagcagcacaaacagaagaggacagttcctttcctgggctcagcaggggccagggaagaaccagaactccaactcacaggaggtatgtggacatgagggactctgggtcttgggacctgaagtggagatttggagtgagtgggagttgtcctgagaccacatacagggccaggactgacagctgagatgtttccttgtgtatgtatcccggcagttccctgccctccccaggctccaccccatcttcccttcctctgcctcaaggagagaggtttggggagtctgcaaaaacctcacattttcctcatcactttgtgttcattattatgg

SEQ ID NO: 786173 - DNA, 446 bp, Homo sapiens
cctctaaaccatacgttctccactaggagggcattttaattgtttgtgcctgcagcccagatgaatggcacattcctgaatcatttaatgattccattaaaaggagaacattttaggattaaggaccatggactgtggaagagtgtaacacaacattcaactcattaagtgtagatgcagggaggagcccagagcaggtggaaatcagagaagaactgayttcacagcggcctctcagggccgatggtgcttcttttttacttctgaattatcagctctctttgtctctctgtctctctgtctctttctgtctatttgtctctgtctctctcttccctttcttttactctgattgtctcttttcctaattatctcttttttaatttctttgaaatgtttctcagtttctgtctgtggacgtttttttgtgtgacccatttcctcac

SEQ ID NO: 786174 - DNA, 580 bp, Homo sapiens
agtttgtgaacattttctcccagtctgtgggttttctatttattctgctaattatttcttttgctgtgcagaagcttgttagtttaatttagtttaattaggtcccatctatttatttttgtttctgttgcatttgcatttaggttcttggtcatgaactctttgcctaagccaatgtctagaagaatttttccagtgttatcttctggaatttttatggtttcaagtcttagatttcagtctttgaactatctagagttgatttttgtataaggtgagagatgaggatcctgtttcattcttctacatgtggcttgccaattatcccagcaccatttcctgaatagggtgtactttatctactttatatatattttgtrtatataaagtaaaaacctttgtcaaaaattagttggctgtaagtatttggctttatttctgagttcactattcacttccattggtctacgtgcctatttttatatgagtaccatgccattttggtaactatagccttgtagtataacttgaagttgggtaatgtgatgctgccagattctttctttttgcttagtcttgc

SEQ ID NO: 786175 - DNA, 378 bp, Homo sapiens
ttttggtgggaactacattgaatccgtagattgcttttaacagtatgatcattttcataatattgattctacccttccatgagcatgggatgtgtttccacttgtctgtgtcatcaatgatttctttcagtagtgttttgcattttttcttgtagagttctttcacttccttggctrggtatattcataagtattttatatttttgcaactgttataaaagggatagaattcattatttgattctaagcatggtctttcttggtgtatagcaatgctactgatttgtgtacaatgattttctgtcttggaactttaccaaatttatcacatctagggtctttttagatgaatctttagagttttccagatatacagtc

SEQ ID NO: 786176 - DNA, 378 bp, Homo sapiens
ttttggtgggaactacattgaatccgtagattgcttttaacagtatgatcattttcataatattgattctacccttccatgagcatgggatgtgtttccacttgtctgtgtcatcaatgatttctttcagtagtgttttgcattttttcttgtagagttctttcacttccttggctgggtatattcrtaagtattttatatttttgcaactgttataaaagggatagaattcattatttgattctaagcatggtctttcttggtgtatagcaatgctactgatttgtgtacaatgattttctgtcttggaactttaccaaatttatcacatctagggtctttttagatgaatctttagagttttccagatatacagtc

SEQ ID NO: 786177 - DNA, 594 bp, Homo sapiens
gcagggagaagttcccaggccctcaagagcacagagatgcccaggtctacccctggacctgggcagctgcagctgaatccagggcctcctgcctcccacaactcagaagctgcgtggctcctgcttatcctggagtcctgggcccactttcctgctgcagccggcgtcttggcagtggccactctccatgtgccgctgctgccatcaccaccaacacaccaacactcacccrcgcgcgcgcacacacacacacacacacacagagttagtggcttaaagtaaaacgaactcattatttctcactattctgcaacctgtgctgtgttctattggggcaggaatattctagatagctactttactcatgtgtttggcacctccactaggatggctgaaacaatgggggggctggctaggcatccttctcatactgctcagggactagccatggggcaaacttgtagagtgatcagtcatcctggtttgtcaaagactgtaggctttcctgggatgtaggcctttcagtactaaaaccagggaaattttggcaaaccaagatgtgttggtcatcctatacttggacattctcacaac

SEQ ID NO: 786178 - DNA, 619 bp, Homo sapiens
ttctatgacattcaactgaagaatgacttcaaaataaggactactaaagagatgaagctactgagttaaaaaaaatatatggactaaaaatgtccataaagacagattgagaagtacttcaaattttatgtcaaagacataaaatgacaacagatacttagaaaaatgggaaaactggagacagagtgagagagagagtgagagatgcagattcagaagcaataaggaacccccatcagtcctgagaggctgctgtgcggtcagttcctcttctctgatttccacctgctctgagctccttggtgggtctgcacttaatgaactgaagggttttttacactctttctcagaccacagctttyaatcctaaatgattttcttttaatcaagtcactacagaatgcaatcaggaatgcactgtttatctgggctgcaggtatggacaatgaaaatgatctcccaatggagcacttttggttaggagggagaagtcggattgctcttcctccttcagcactaagatcctgcaagaagggcagagggactccaaccctgcacagagcttaagcctctggaaagactctgtgcaatgccctggctggttctctgccccctgctc

SEQ ID NO: 786179 - DNA, 493 bp, Homo sapiens
ttattgctttatttagaattttttgcttatatgtttataagtgagatggtctctaattatgtttttttcatactgaccttgtgtggtttgtttcaaggtaacataaggtagataacagaagtgagtttctctttctacggaatgggatgaaaaaggtaaagtttctcttttacatgaaggtttagtaaagctagaaattatcctttatttttatagatctatttgaatagcatactgtattattttaaaaatttatattggtttcgtagttgttcccttttcacctccaacattttttcttgatcagtcttgcctgtttgtctatttttattagtgttttcaragaacaatttttagttgtcttctaactattatttgctttctagtacatgcatgtatgctctcagctttattagttccttttttattaacatgtatgttattctgttattcttttcctaatttttgaatagaacacattgtgttaatttat

SEQ ID NO: 786180 - DNA, 640 bp, Homo sapiens
atggggtagtaagagggtggcaggaggtgcagctgaaagacaagctgggcctgggcacaggaggcccgaatggcttgaggcaaggaagcaacatgatgtcacttaagttgctatattgcccttagaggaactgcaccactaaggagggtcctgagtgtcctctagtttggaagaggtcaaggctgactggcatctatacgttcaatcaatgggcttgtccaaatatttcaataccttacttattctttgcatttttcagaagtggatgacatacaacttttgggcatgtggaagaggtaagaatgctacttgcaggcttgaaatgaccagaacttctgagaatgaccttaagcataaccaggaaggactatggcatggcagagagagggccaygctgggtgacacacacaccctggcgtggagggaagaggaaatggagcagaagcaggctctccggtgaggcagagaatgaggcactacacacaaggaggcaggcacgaccctcccacaggacagatactgggctcacagatacttataaaaatgagatgagttaacagcagctgtggattgaggaatagtaccctgtttcgaatgtgtgaaatacacccacggatgcgttttaaacctagtaaaaaaa

SEQ ID NO: 786181 - DNA, 618 bp, Homo sapiens
cttccttgtgctccaattattcttccaactcttaatcccttttgcttttatcctcatggaacatggggtacttaatgtgaaacaactttaacgttcattttttccaatgtattaactttataatggctagatgagaacacaaatatagtccctccccagtttggatgggggtaagtaaaaattgtttttgaaaaatgaatattcagatgtatttttcaccattatagraataagagttaatattgtgatgaaaagagctgaatacaacatgaatgtagaactctatcatatttcaagacagaaagaattttttctaggacttgagagtacttgaccgagtagagtgtagtttaatctcaatgttaaatagtctttaagaaaaggcagataatccataggttgtccggttgttaaaaatcaggattaagctcctggtcttagttaatagatgtgttaagtaaatgaatgtggctagttttatgctatctgccatataatatcaaatttatcaggtctttgaagaggtgccaacaaaacacctctaaatccagacagaattttagaacacactaataattaaacagataatgaaatttaaaaaatatattacttgagtgt

SEQ ID NO: 786182 - DNA, 539 bp, Homo sapiens
ctacataaagcatggctaaaataccactaaaggtatgacaaggatcgaaactgcagccaatttagtacacagcacacagatcattggattgttccagctcttcccatgatcaataccaattgacatggctgaattgattctgcagcaaggtgctccaattgttgaaactcatcacgtgggccgtgctccagagtcccggcctcttcgtggacatgcctgcaattctgcaggattgaccccattagcacagtcagaggcttggcaagtgcccgacaccaggcaaggmtggattccatacccacggttctccacaaaatgctagatgtgatatggggttccttcaactcttattattaatcaacataaccaaaatttcaagatacaatttttcaaaagtacaaaatttagaaaacttaaaacatttacaaaataataaatttgacattataatttccaaagaggcctagtaatacaataatacaattttgtgctcatgatgaaaaattctttgaaaatcccaattcatatttaattcctat

SEQ ID NO: 786183 - DNA, 594 bp, Homo sapiens
ctgatgaagtcattcagttaacagatgggatccagagatggaaagtgactttttcaggaatgaacagaacatggggtggcaggagatgagctggagaaggacctgtcctcagggctatttctttttttgtgtttttttctcactccgtcgcccaggctggagtgcagtggcacgatatcaactcaccgcaatctccacttcccgggttcaagcgattctcctatctcagcctcccaagtagctaggactacaggcatgcaccaccacgcccagctaatttttgtatttcttagtagagacggggtttcaccatgttggtcaggctggtctcgaactcctgacatcaggtgatctgcccgcctccgcttcccaaaacactgggattacaggygtaggccaccaagcccagccagggctgtttctaactaaacaaacgagatcaatgactcagcaagtggcttgggggcactatggaaggcctggcacttacttgagtttcagctccctggtgagctcattctgagtctgctctagctcttggcgctccttgatgtgttcttcttggaggtcatggatctcagccttcactgcctg

SEQ ID NO: 786184 - DNA, 658 bp, Homo sapiens
tttggcaattctttcattattactatgattattaattggatgctatttaaaaatttggcttttaaactctcagctgatgttttaggagattatactatacagggtacagaaattgctggggctgactgtaactattcatggccaattaaggaacagcattggcaagaaatgcagggtggatacacttgtgctttgtgggaatcctggtggctatggcttcatagtatcaggggactagcttgctgggcttccttctgcaaaagggatcttaatttggttacctggtggatgcttttataaatgagaagaataaacagtcttgagggacttaactttgttggaragttaaagggagaaagaaaagaacaaagtgaagaaattactctttatttgggagcatttccttgagaagtctttctgaagtttgcttttagttttatttggtatcacttttatcttttcccaggggatgcagatgtgttttgaaataacgcatgcagaaaaaacaagctgtaggaggcagaaataaattcttgaaagtttagtaagtttctgaaggacagaactgcttggagaagctgggctgtaccacatctttaaggttgatgtctgggagaaccaactactgtgtttcctggtatgaccattgatgtgtttg

SEQ ID NO: 786185 - DNA, 624 bp, Homo sapiens
tgttaatgttaatgatctcacatatctgtagtagtgatcaaaaccagcaagttactgttggtaacatagcattaactaataatgaatctgcaggccttatttgaatattgccattgtcccactgggtccagaatccaatctagaatcccaygttcatttaggtgtgtctcagcctcctccagtcttacgatcttgatacttctgaagacacaggccagttattttttagaatgtcccttagtttgggaatttgatgtccttggtgtgccatgtcagggcacatggtattgatgtgtctcatgactactgatgctgaccttgatcactcacttggtcaagatggtatcagtcaggtttctctgctggaaagttactatttgtttgtttctcaagagaacatttcttaaatggacttcttaaaacacaggttctttttagtggctcatcatttgactgtcttcagtagcctctgttgatgtttttaaaaatcaaaagaacatccacttggttagaaaattcaaagacggaagattattaaaaaataaaattctcctcattgtatatcctcctgaaaaatttcctgtgcaaatagtggtgacctttttttttttttaatttttgatt

SEQ ID NO: 786186 - DNA, 487 bp, Homo sapiens
agcagcaccagactctaaagggagcgagcactgatcaactggaagggtgagtggctcttttcaaggtgaactggtggctgtctgttcacaagaaagactctttgggcatcatgtgttacaggcttattgtctactattgaggggtgagtcttagggctggttcttttctctctggactagtgggctttgccgcagaaactcttacagtacatggtaacacacacgcgcgcacacacacacactyacacactctctcacacacatgtccttatgctgcttcctttccttctcagatcagctgaagagaagagtagaggggacttgtcccttggcacctctccgactggcttacaggcctcccaggatcaaggtttccttgtgagtgtgtctggtgagggtgtggcgtgaggggcacctttccagaaccagccagtgtttccaactctccatgagtgggcggggctttgggcccatgcattaggggatg

SEQ ID NO: 786187 - DNA, 526 bp, Homo sapiens
gtacttgttgtctatggagtagtcttctaggcattgggaatactgccaataaaacaaaaattcctgttttcatagagcttatgtgttagttagggaagaccaacaataacaatgttagaagtaaatgatatggccgggcgtggtggctcatgcctgtaatcccagcactttgggaggccgaagtgggcggatcacctgaggtcaggagtttgagaccagcctggccaacatggcgaaaccctttctctattaaaaayacaaaaattagccaggcatggtggtgcacacctgtaatcccagctacttgggaggctgaggcagggacaaattgtttgaacccaggagatggaggttgcagtgagattgtgccactgcactccagcctgggcaacagaacgagactccgtctcaaaaaaataaaaaacaaaaaagaaatgaagtaaatgatacattagaaggtaatgagtgctatgtaggaaaatgaagctggaagctcctattaattggatgttggaacagctggatt

SEQ ID NO: 786188 - DNA, 508 bp, Homo sapiens
tgattggtccatgtcagtatttctcaaagatggcactgctggcattgtggacaggatgatccattctgtaggctgccccaggtgttgcaagagcttgagaatttcaagtcccctggacactgaatgctaccaacarcctcccaggtccagattttcctccgtacacacatctcgtgcaccctggagaactgtctcccctgcaggtgagaacctcttgtctgagccagtcttgggtgagagtatgccccgtctcccttaccagtaattcgcataagcatggtggtgtgacctcatcctggcgagttaagtaggagggcctctgagcaagatatcctagcttcagtggaagggccaggaagagatggtctgctgttcatcaggacattgtgtctgggtggggtgcctagaacagccacagccatctctcaggcttgtggggtgcccgagaaaagccaacatgctggggtgacagagcagaaagagggaaagaactgggttcctgatcttg

SEQ ID NO: 786189 - DNA, 609 bp, Homo sapiens
aagagagagaagtcaacgatgactccaagagttctgcctgcaccactggcaggatggagtggtcagtaaccaagacaggcaaggccatgagaggagcaggtctggggaagagccagtccagtgttgcatgcgctaaacttgagaagcccgtgagacatcggagtagggggctgggggtaagtttggaagctgtcagcagacgaaagacgtttcaaccaaagaggastctgaaaactgagcctgggacatgctggggtgaagttgggtgaagatgaggagaaaccagcaaaggagactgaggaaggaggtgagggctggaagacagagacggacggcagggttgctccagcccgagcttgcctggtgctcacatggtcaggtgcctccacccgctaggcccctggtcaagaccatcgtggagttccacatgacgactgaggcccaagccaccatccgcatggacaccagtgcaagtggccccacccgcctggtcctcagtgactgtgccaccagccatgggagcctgcgcatccaactgctgcataagtgagtgtcgctggccaccagccgggctcccatcctgcctggaaggaacgccaggcagtggac

SEQ ID NO: 786190 - DNA, 569 bp, Homo sapiens
tacctttattattattattttttgtatttatttatttttgagactgagtctcgctctgtcacccaggctggagtgatgcaatcatggctcactgcaacctccacctcccaggttcaagtgattctcctgcctgagcctcccgagtagctgggattacaggcacgcgccaccacacccggctaatttttgtatttttagtagagacagtgtttcaccatgttggccaggctggtctcgaactcctgacgtcaggtgatctgcctgcctcggcctcccaaagtgctgggattacaggcgtaagccaccatgcccaacctrcccttagtttaaaatattaaattaagtgagttacttggcatcacaatattcgggggttttaagtccatgatgggcctgcatccctttcctctcagcttctcccaagccttagcataatcctgccggcccctctaactcacagaaattcttgaattacagagaatgtgttttgttccacaaagtagaaccttcagggatcttggggcagagccatctctgagtctcctttccttgtccataattcttatatt

SEQ ID NO: 786191 - DNA, 569 bp, Homo sapiens
tacctttattattattattttttgtatttatttatttttgagactgagtctcgctctgtcacccaggctggagtgatgcaatcatggctcactgcaacctccacctcccaggttcaagtgattctcctgcctgagcctcccgagtagctgggattacaggcacgcgccaccacacccggctaatttttgtatttttagtagagacagtgtttcaccatgttggccaggctggtctcgaactcctgacgtcaggtgatctgcctgcctcggcctcccaaagtgctgggattacaggcgtaagccaccatgcccaacctgcccttagtttaaaatrttaaattaagtgagttacttggcatcacaatattcgggggttttaagtccatgatgggcctgcatccctttcctctcagcttctcccaagccttagcataatcctgccggcccctctaactcacagaaattcttgaattacagagaatgtgttttgttccacaaagtagaaccttcagggatcttggggcagagccatctctgagtctcctttccttgtccataattcttatatt

SEQ ID NO: 786192 - DNA, 569 bp, Homo sapiens
tacctttattattattattttttgtatttatttatttttgagactgagtctcgctctgtcacccaggctggagtgatgcaatcatggctcactgcaacctccacctcccaggttcaagtgattctcctgcctgagcctcccgagtagctgggattacaggcacgcgccaccacacccggctaatttttgtatttttagtagagacagtgtttcaccatgttggccaggctggtctcgaactcctgacgtcaggtgatctgcctgcctcggcctcccaaagtgctgggattacaggcgtaagccaccatgcccaacctgcccttagtttaaaatattaaattaagtgagttacttggcatcacaatattcgggggttttargtccatgatgggcctgcatccctttcctctcagcttctcccaagccttagcataatcctgccggcccctctaactcacagaaattcttgaattacagagaatgtgttttgttccacaaagtagaaccttcagggatcttggggcagagccatctctgagtctcctttccttgtccataattcttatatt

SEQ ID NO: 786193 - DNA, 569 bp, Homo sapiens
aaaaccctttccaaaggaggcaatcacaatatgcatctatttcagtgagcagagggatgactttgaatagaatgggaggcaggtttgccctgtgcagtttccagctagaattttccttttagcttagtgatttgggggcccaagatattttcctttatttatttatttatttatttatttatttwtttattttttatttttttattttttttattgatcattcttgggtgtttctcgcagagggggatttggcagggtcataggacaataatggagggaaggtcagcagataaacaagtgaacaaaggtctctggttttcctaggcagaggaccctgcagccttccgcagtgtttgtgtccctgggtacttgagattagggagtggtgatgactcttaacgagcatgctgccttcaaacatctgtttaacaaagcacatcttgcaccgcccttaatccatttaaccctgagtggacacagcacatgtttcagagagcacagggttggggtaaggtcctagaacaacaggatcccaaggcagaagaatttttcttagtacagaacaaaat

SEQ ID NO: 786194 - DNA, 627 bp, Homo sapiens
cctaaaatgacagtatcaacaatagcaccactaagcaaacactcgttttggctactgccttttattttatttttcccccctcttcttagctccacccagctcgctcttgaaaggccttctgttctgtcagccataatgacatctgctggcggacacaggaagtcataaatctgtaggttctctctcaaccaaaccttgttaatgctgccatttatcacwggggctggggtgccatctctggagagctggacgcagagagtccattttctcccatacccctttcccaagagagcaaccattttaaaaacagccactttttcatctcgcatttgcagacctaaatgtcaggcagatgcaaaccccactgtcaatgtgcagctcttggaaagaagccatgattccaggcaacaatagactcgacttgatgtttcaggattgaagcaaggcagttgtgactaagctctgtccttcctcattttaaataggcccctgacggcttggaggagagggatggaggattctgtccgtccaagcccctcttctccaggacttttctaagggcaaaacttacgacagggagagttgaaagaggattatttaaattcagagttacttttgttctgaact

SEQ ID NO: 786195 - DNA, 609 bp, Homo sapiens
gcttccctatttgtaagttggttcaagtggcatgcagaaatattgataaagcgtggattcatatattttctgatcgtttccctaaaagcaaaataattaaaatatttttagtgaggtacgtatttggaacttgcctcatcagtgaggttttcttttttcaactctagttacttctttggaaaacaatgtctctttcctaccgttgtctctttctgcatttaactcactgatttcctaaaacttaggctgctttgcaatctgacagcgtgtggatgtgttcaatggcctttgagacccaggaacagtgagcctgctgcatctagttctgkcaacataagtttaagtgtagctacattattagagataacgtccttattgttgtcccgaaagagaaccctgggctacggtccagcaagaagtgatactgccctgaaaattactctttttttttttctggttgttccggtaaagactatcaacaactaggcagtaatttaaattaccagaatgactggacatgtctcctttagtaagctcattacaaaaagtgcattgctcagaattgctcgactttgattataattatcctacgatcgataaggatccagg

SEQ ID NO: 786196 - DNA, 623 bp, Homo sapiens
ttctgtcttctatttttctcctccagttatatgtaagggtcttactgcaaattgtcagtctatcgttctctgagccaaagtggaaaccaataaaagtgttgggagctgcctacattctagaactgaccgtacagggaaagaggccacacttttccacgcatatttcctggagtcctggaatggcttcttcacatatttctccacccccattagacaactcagtcactaggcaagaggatggatcttggagtctgacagacaggcatgggttcaatttctctccaacgattatttcatctcggtgcgacctcaggcatctttgctttcccagactttgttttctcattagcaaaacagacctaataaaaggactcatttcataggttttttatgaggattaattgagataaaccagataatacgcttaacaccgtggtacttgcaatgaaraaaatggtgaatggtacatacatggtaagtggtcaatacattttagtcattctattaacaagttaataatcctctccatgccttgatttccttattggtagaatggggataataaaacccccttctgggtagttgggagaagtcaagcattaataccagtgaagcacttcaaa

SEQ ID NO: 786197 - DNA, 616 bp, Homo sapiens
taagttctctttataaagtcttaaattacaaattcaagttcttcaataaccagggttattcagatttttctatttctttttgtgtctcttagataatttgtggctttcaaggaattcgtccactcactctaaattgtcaaattgattgtcacaatgtcgttcgtcatagtcacttattatcaacttaatgtctgaaggatctgtaggaattcctttctttaaaatcctaatactggtaattcagttctgctctctgtttttcctgataaatctagcaacaggtttcaatttttttaatcttttcacagaaacrgagaagtattgaagtctccaacactagttgtggatttgtttttccttttgcttctggcaattttgtttaatgtattttgcaactctgcttattgggtgcatacatatttagaattgtcttgccttcttaatgaaccgaacattttatcattaaaaatggcccttctttatccttaaagtctacttcaaatgatattaatgaactcactccaattttcttattaccatttgcatggcagatccttatttatcctttcttttaacttatctgaatctgcagattttaagagcgaatcttgtagat

SEQ ID NO: 786198 - DNA, 608 bp, Homo sapiens
ttctccatgcctagggtggagagttgcctctcttgaactcccctgtgcccagcacacttctcatcatttctttcaccccaaatggctattcttacctgctgagttgtctgtctccccaaccagaacagcacagttcccaacgcagtggctggcaggtagttggtgctcagtgatgtgtttttaataaatgaatggttaggttgggcgcggtggctcacgcctgtaatctcagcattttgggaggttgaggcaggcaaatcatctgaggtcagaagttcgagaccagcctgaccaatatggtgaaaccctgtcyctactaaaaatacaaaaagtagccaggcatgatggtgtgtgcctgtagtcccagctactcaggaggctgaggcaggagaattgcttgaacctgggaggcggaggttgcagtgagctgagatggcaccactgcactccagcctgggagacagagcaatactctgtctcaaaataaataaattagttaattaaatgaatggctaaacattgaagaattattaccctatatccataacactaacccatatttttaacagtgtattagtccattttcatactgctatgaagaactgtct

SEQ ID NO: 786199 - DNA, 608 bp, Homo sapiens
ttctccatgcctagggtggagagttgcctctcttgaactcccctgtgcccagcacacttctcatcatttctttcaccccaaatggctattcttacctgctgagttgtctgtctccccaaccagaacagcacagttcccaacgcagtggctggcaggtagttggtgctcagtgatgtgtttttaataaatgaatggttaggttgggcgcggtggctcacgcctgtaatctcagcattttgggaggttgaggcaggcaaatcatctgaggtcagaagttcgagaccagcctgaccaatatggtgaaaccctgtccctactaaaaatacaaaaagtagccaggcatgatggtgtgtgcctgtagtcccagctactcaggaggctgaggcaggagaattgcttgaacctgggaggcrgaggttgcagtgagctgagatggcaccactgcactccagcctgggagacagagcaatactctgtctcaaaataaataaattagttaattaaatgaatggctaaacattgaagaattattaccctatatccataacactaacccatatttttaacagtgtattagtccattttcatactgctatgaagaactgtct

SEQ ID NO: 786200 - DNA, 634 bp, Homo sapiens
agaaagaaagaaagaaaaagaaagaaagaaaaaaggaatgttcatttcagtgatcctaattgaaaacaatctaagttatgctcatttgggcattggagaaataaacaatagaacaatcatttattaaataccatctgaccatgaagaaggttggggagattcctattgctggattgccaacaatctacgaaatgaaaaaggggtgttcatcgacttcccgcatccaaaacatcatgacatgtggccagccacatcccctcagcaacccctcgagtgaccacgtgtcacgacggccatcatgcgtttacctccacgtggaagcatccctctctcttcctcctctttcttgattgctcctctagcaaaaaagtcttcacacaacaaccaaactgagcctgtaraaacacaaaccagaggaggatacatccaaaccatttcctgtggtctgcgaagctctatctatgctggcctctgcctgtcacttacagtcatctcgccctacactccaccccgacactggctgtcttgctgatccttgaagcaccaatgtcatttctatccttcagcctttcaggggctgttcctctgtaggggattgggggtggggtgggactcatttcctagctctaaaaag

SEQ ID NO: 786201 - DNA, 619 bp, Homo sapiens
aattataactagaaattttattttggtgaataagctgaggacttcctagagaagctgtatgatgtgaaatagttgcaaataatgacaaagtaactcgtagataagttactttaaggctttatttgttaagttactgcatagagttgcaaaagcatcgacaacatatttcctcaaaatgtagagtttacaagttttctgagctccctgaagtttgcaatctattccagtctcagtgtcctctaattttacatcaatcttctaatgatctagattgcccattgcatgcagctatcttttcatgtttgatttggttaaaggaaaatcagctttacattgtgaaaatgcatattgttagcgaattgtgaaattgtgaggaattgggctgtaattactgaatattggctctccatgaacatgttgctaaaaygtgggaagatgtgccagagaaattgtctctctcctcagtagtccatcgttacagcaacaattgtggaaatcagatgagatgtggaaccatttttgattgccttaaatggcgcatttgtatatgccagcaagaatctatgcttctatgtaaattgaaaaagggaaatgaaacagtctgtggatgtggactctc

SEQ ID NO: 786202 - DNA, 630 bp, Homo sapiens
ttgttatgtcaaaaaaggactgcaataagtcttaacatcattgataggttcttgaaaactggtaataggtatatatatttatggtcacatgtgatgttttgatacacgaatacaggagggataaattggggatggttaattggtgcaaaaatacagtaagcgaaacccattttaccgtagattgacataaaaaagagttaagcttctayggcttttggtaacaaaaacatcaacaaacttgtaaataaagatcaaaacacttctaatattaaatgctgaaataaatttgagctattcatacatttaatattaataaaaactagtaaaatcattatttacctacttatttcagtttagggttgcagttgaccacagcctatcctgtcagctcaggatgcaatgtgggaaccagccctggacaggacgccatcgcattgccggtgcactcacacatacccacagttactcagactgggaccacacagacatgtcaatcgacctcacatgcacagccttgggaagtgagaggaaactggagcatccagagaatatccatgcagacatggggagaatacataagctctacacagacagtgaaccccaactggaatctatttgttttttctcatc

SEQ ID NO: 786203 - DNA, 592 bp, Homo sapiens
aggtatataaatacatatgcatttccaggattgcccagcccgttggtgtctaagcagtcattagcttctcccaagactagaaaagcaatgtgatctgagcctccatgttattcccagacagctcacacccttkcactttctcctgaatacagtccccctagcctagcctttgcacagtgccccaggcggggggggcaccctctccttcccagtgccccaggcagggcagataggtcaaggttctgaggtggacccaatatgagtgtccctaagaagggattgcctcattgctgactacataaaataaagcagtagaatttgagaaattatacaaacaagaaacttacagtctaatattcagtaataaggaaatcttttaaagaaaaaagccctcaggtctattaaaaagcagagctgtccggaaactcatactaaaaagggacactagcagtcccctaggtcaacttcctctcagtataggaaacctcctaatattgttcctgagtcagaatcatacagcctctactaagcacattcaatctcagggatatctccctcaccccccacattatggggggacccagtctgtgtt

SEQ ID NO: 786204 - DNA, 637 bp, Homo sapiens
aaggatcactctgcatataagctctgagtttaagcctggctgtctatcctttgtgggtgctgtaccagtagttcatccagaaagacacaggctgaagtctatcagactttgctatggcctggaagccccagatatgaacctcaggtgtgtgcctagagcacattccctgtatttggtagtcaaacaactcaccctggttccagaacagcctgaaagagactgacttgggccatcagctaaggaaaagccacagagrggttttttttgttgttgttttgttttgttttgttttgtttttttattgatcattcttgggtgtttctcatagagggggatttggcagggtcacaggacaatagtggagggaaggtcagcagataaacaagtgaacaaaggtctctggttttcctaggcagaggaccctgcggccttctgcagtgtttgtgtccctgggtacttgagattagggagtggtgatgactcttaacgagcctgctgccttcaagcatctgtttaacaaagcacatcttgcaccgcccttaatccattcaaccctgagtggatacagcacatgtttcagagagcacagggttgggggtaaggtcacagatctacaggatcccaaggcagaagattt

SEQ ID NO: 786205 - DNA, 616 bp, Homo sapiens
cgtgtgaggcagcatctgtaagatgctttatggaaatgtcttcactggcattttcggctgttccaccacaggtgagcctgggcacctgacctatcagtattgtcagaaagagaagacctttcccactcatcctaatccttaccaaagaggcagcctttttggagcagctctcactggatctgctgggtaaagctccttgtccaggaggggcagcctcctccacacagcgggagggcctcccagcctccctgccacagtgcactgtggccacagcgaattcctcttcctgaaggttcttcccgcacctccttcactctccccagccctggagaccctgcctcaggatgcactcrgcacagctgcacccccaaagcagtcacagacaccatgaggcctctctcctgggccctgaatgcagcctgtgctcacctgaacacatttcacattgatgccgggacacacaaacttcctccagatgaggttggctctgctgtctccacaggtgatggggtacacaatctcagcttccaggttctccccctcttcagccatcttcacttctcacaggcacattgacagggaagggtaaaagcagaacatcagttacaacctcttc

SEQ ID NO: 786206 - DNA, 611 bp, Homo sapiens
acaggtgagccttgttaatgctagtcctgtcgcatggccaaagcgtgccggaggggacggtgcaggtagtgggtgtgtcctgggccctccccagagctttagccagggcagcatatatgggaggatatgaaatgtcacaggaacagaggcaaaaagaaaaagtttgaaaaaaactagtatattagtttgagaccttttcttattgaatttgagagctgggttctattccatgcactagaaaactctttaacacagggcaccaaactgcagcgtctgcagggccgggacttccgctgtgggagggtcagggtgtgtgcctgctggggcggagctgcttcttgccmtgtggaaatgtgggcccaggttggtgagaccatcttcatcttttttttttttttttccaggacagtgtctcactctgtcgcccaggctggagtgcagtgacgccatctcggctcactgtgacctctgcctgcctggttcaagcaattcttgcctgctgggttcaagcaattctcctgcctcagcctcccgagtggctgggactacaggtgcgcgccaccatgcccaactaattttttctgcatttagtagagatggggattcactat

SEQ ID NO: 786207 - DNA, 527 bp, Homo sapiens
taactatatatcaagttggtagcttaacccgagaaagtaattttttttttttttttgagatggagtcttgctctggcacccaggctggagtgcagtggcaccatctctgctcactgcaaccttcgcctcccgggttcaagcgattttcctgtctcagccttctaagtagctgggattagaggtgcttgccaccatgcctggttaatttttgtaattttaatagagacggggtttcactatgttggtcaggctggtctcgaactcctgatcctgtgatccacctgccttggcctcccaaaagtgctaggattacaggcgtgagccactgcactyggctgtgagaaagtaatttctttaagtaacactaaaacccagtattttaactgtatatccatagtggggtggaatttaaggatgctagcatatgtaaataaaaagaatcatatatttcatgattagtgttattattagctgtaatatggatgttattattttgaaattataggactaacttggagaaagcaatt

SEQ ID NO: 786208 - DNA, 628 bp, Homo sapiens
ttttcttatatggcagatcttttagcaatacattatcctattttatttatctatgaatgtcttgaattcactttcatttttgaaagatacttttgctgggcataacattcttggttaacagttgttttattttctccttcagcactttgaatatatttcatcccactgccttttggactccattacttctgatagaagtctgctgttaatcctaytgaggcatccttgcagtgactagtcagttttctcttgctattttcatgatttttctctttgttgtttctcaacattttgatttttatgtgcttgggtgcaggtctctttgcatttatactatttagaatttgttgagtacctgggatgtatagattagggttttttcgcactaaatttggtaggctttagccattatttctttgaaaaaaatttctgcttctttttcactcttctcttattctggtactcccattatacatatgttggtccacttaatggtgtctacaatttactaagcctatgttcattttacttcattctttccctctgctcttcagattgaataatctctgactgtcttcaagttcaatgattcttttttctaccaattcaacaaagccactgttgatcc

SEQ ID NO: 786209 - DNA, 632 bp, Homo sapiens
ttcttgaggctgactcactcacttctctcaggtctttgctcataagtcacttcatgagtgacacccttgccaaggccagttatctcaagtggtaaccactacccctcccctccccccagcttgctaggaatgcaataaatatttgttgaatgagtaaaataactatttttcatggaaagacatttaatttcctgttccatctatgggaatagataaggaatgcataaaatgatcctcagcagcagaaggcaggtaaacatgacmacaaagtgggaagaaatcagacatggtaaaaattccatatcatatatttagttttcttaaagtacaaacagtaacagaataaaaagtgaataagttgtttaaaaatggaaatcttccttggaacagctaatatttataatcagatcattattatgcaattatgtaatgttactggtataattttgtgttttctaaatattaaatgctcctccctttgcaattaaatttaaactatcaatatgcttgacaaactgccttttataataaaatgtacctgtgtgtatagtactgtatatatataattgcatatgcatgtgtttgcattatcaataatgtaggatttttatactcataaaagttatgatgta

SEQ ID NO: 786210 - DNA, 651 bp, Homo sapiens
cagctgcctgacttgggacttctccacctccataactgtaagacataaattccttttctttataaacccagtttcaggtattctattataagcaacagaaaagggactaaggcaatcaattaattcagtaaagacttttttgatgacaaaaacaaactagcaaaattaactagtatgttcaccacaggagttttaagtgagacaaaggtaactttttggttctcattgaacccatggctgggtctagggtcttgatcagtctgatcatacttggtttctttctgtttctctgccatgtcttctgctgtgtttggtttcatatttcagtcattgacagctccaggctgatatcccattattccaaacatagcagaataaagactctaatttcaaagtatctcaagtaaatctcagaactgagcttgtgaatcttgattgcttatatctgggtattttgtccattcctgaaccaagattattccatctccagctgtggtaggtcatagcscaagtcacaatctttcacttttagagtcagtttcacaggaacctcgggaactaacagcaggaaaaggaaggatttctagataaacatcagtgccctcttatccatacaagggggacgatgttaagggggaaagactatcaaca

SEQ ID NO: 786211 - DNA, 624 bp, Homo sapiens
gaaagctcactgcctgtgtgatgggggtaggggaagcaatttttaaaaaatactaaaactgattacatctgtttattccttttcagaaagtggatgaattaatttcagctgtggattttttcaatttaggaaaaattgtaaatggaccttttagctatgaaaggtaaaggcccattgacattttccatgggagaggttaagacagagtgaaattgctctgcctaaaaagtaatgcaaaagttcaggtaccagtggcctcctgaaagaaatgggcaggcatcctggggctccagcagagaagactggaggcagggcttgctggagagactgaagaccagtcccccagcaaggcagtggaggggtctggaggaagggggcagggccagggaagcatcccggggcggaggcagatgtccaagagacggggctgacagcgacgcctggtgctccacgccccaggctgcagtcacccagtrttacccacaaaccaccattccatggcctgtgctcccacttgcacaaaagtcacaggttccagggatcaggatgtggacatctttgggagccattattctgccccctacacctaataacacgaatgtcttagaaaatggcaaatacaca

SEQ ID NO: 786212 - DNA, 501 bp, Homo sapiens
gaggctggcagcccaggctgctctgcaaaaggagagtgtggcagcacagagacctgcccgcagaggcgacggtgaggacacaggctcatgagaggccagaggactcctgactggacccaggaagagtcggggggagtcccacctagacaggagggagtgcagttagagcccaggctggcacgaagacagtcacatcctgccccattatttgcaaacctggtaccttcmtgagtcactccagtagtgaccacaaaccgggcagagcttagaataatgaagtccaaactcaaggtgccagccaggccacctccctccgccacagggacatgcaggccctcggggaggctcctctttgcctctcagagcctccgttggctgctgccagtccctggcgtccacagcttgtgtggctgcatccgcccaggctctgcctccgtcttcccttctaaggacacagtcattggatttggggtccacatggatcatccccgaagatttcac

SEQ ID NO: 786213 - DNA, 514 bp, Homo sapiens
atcagaggggtgagcaaaagttggggggattagttaggcaactggtgcaataaatcaggagaaatggatgaagacctaagatcaggcagtatgtggaaattgtaagaagggatggataaaatgtgaaggaaatagggttgagggcatttgtggggtgatggaaactaggagcagaggagagactaaaaaggagcatttgcagtagtgagaaaaccaggcaaagaggagttgaggagttaggaaactaaaccagcgtactaaacagaaggagtggtcygaagtgtcaaacgctgttgattgtggcagaataaacagcagtggtgaaatgaagacaggaggtaggttataggtgagagaggagtgaagtgctaatgtctctttctgtaatagatgctctacctagaaaaaaaaaaagagagagagagagaggtgggatggtagctagagggagatgtaggaccaagctaaaacttctaaaatggaaggaaattttcagttgtgtaggcgagaggaa

SEQ ID NO: 786214 - DNA, 596 bp, Homo sapiens
ttcttccttgaaaaatctgcttatttcctcttccttcctgcgtccttccctcatttctttcctttcttccttcctcccacttccctccctccctctctctctcccttccttccttccttccttccttccttctttcctttatttctttcttccttcctctttttttcctaccttatctcgtttccagatatctgcctaatttctcctagttctggtgctacatcctcctctaacttagaatcacgcttaagtgctataggccaagtatgttgtgtgttagggaggaacagagtactttctatttgcatcaaaagggattttcatgwttaatggcaggaaggattttggtttgtgggtgaggagagggggtgctgagagggaagtctgtcttgattctaaaaacggagaatatttctaaagtaaaatatcccttctcatgtatgccagggtcctgggcaatgacagctccaaaatatcagccactttcccctttttgactggggcatgtcctgggacacttcagtgtgacctcacatttagacactcagtgtccaaaggagttaataaataaggctttgacattttctctaaatgtg

SEQ ID NO: 786215 - DNA, 596 bp, Homo sapiens
ttcttccttgaaaaatctgcttatttcctcttccttcctgcgtccttccctcatttctttcctttcttccttcctcccacttccctccctccctctctctctcccttccttccttccttccttccttccttctttcctttatttctttcttccttcctctttttttcctaccttatctcgtttccagatatctgcctaatttctcctagttctggtgctacatcctcctctaacttagaatcacgcttaagtgctataggccaagtatgttgtgtgttagggaggaacagagtactttctatttgcatcaaaagggattttcatgtttaatggcaggaaggattttggtttgtgggtgaggagagggggtgctgagagggaagtctgtcttgattctaaaaacrgagaatatttctaaagtaaaatatcccttctcatgtatgccagggtcctgggcaatgacagctccaaaatatcagccactttcccctttttgactggggcatgtcctgggacacttcagtgtgacctcacatttagacactcagtgtccaaaggagttaataaataaggctttgacattttctctaaatgtg

SEQ ID NO: 786216 - DNA, 647 bp, Homo sapiens
gtagttatcaagtttctgacaaagaaatgtatttccttattagtaacaatattgctataaaattatacgttatcaaaccaaactgtcttataaatacaacctggattctgggtttcataaacaaacacagtgcactatgccaaccgaagaataacaggaagtactttatgaccccacattatctaacagttctcccctaaacatccctgtagcatgaccaggcaggagatgctacaagactgggaacagagctgcaatcactggcatttttaaacagcttgttgatggactgggcttgtgagaaaaccaacattacactgaaactcttagggatactttaaattggtggattagatggtcgcttgattaagtttgggttatgtaaacagtggagtgtttagatttargcttggctgttggagtctaggcagctgtttgtacttaagtccagctagaagtcttgttaatcaaagaactgactgaatttctttctttctcccacccctgcctgcttcttttttttgtacctgtgttgtttttccccctgttcaaaccctttgggctcaggactgtaggtaggcaaggcagagcattttgaatgtttctctgaggaccaggaacttatttttttgattacacagtgatgt

SEQ ID NO: 786217 - DNA, 513 bp, Homo sapiens
gacagtcagtagaatggaatgctgattgactggcatatgtgggacaaaaattctgctccaaatataagcacctgtagatgcccttcccctctctcccctgccttatctcacttgacaaaaactgtttagatgagatgtatttcccagggcttatgaatcagttgcagttaatggctccaggacaattggtgacttttatcttcaggaaatcccagtacttagaaaatgaccgtcagccgtgactatcatgccaaacaacttttctccctctatttataccaggtgattgaacaaaaaamggtaaggggtgtgggggagggcataggctggagctcttgccctggtctgcactattgagtcatcaccataacatgccaaattactcaaataagtctggtcatgttcacattcagcagtaagaaggatactctgtatgactcgcacgaggacatgaaatgccagcgggatccatataatcaacgtcttggcttgtgccaagaagggtgggtggag

SEQ ID NO: 786218 - DNA, 627 bp, Homo sapiens
gtgcccattttataggtaatttcatgtgtgtgtggtaggaacagagggaggagatggaaaatttaagagagtggtttcaaccccagctgcatattagaatcacttggtgagctttaaaaaaagtactctagaatccacatgaacctatttgaatgaaaaaacaaaacaaaactcaaggtggggggagctggttcaagcattttaagaaacactccaygtgatcgtaacctgcagcccaagatgagtaccactgttctaaaatagtggttctccaatgttaaaatgtctcagaatcacctagagggcttcttaaataaagactgctgatccccacacccagaatttctgattcagtaagtctgctgagaggcctgagaatttttttttttttttcttgcttgcttgctttctttttttttttttttttttttaagagatagagtctcattcttgcccaagctggccttcaacttccgggctcaagcaatcctctcacttcagcctcccaggaagttgggtctacaggcatgcacaagcacacccagcaatgcatttctaacaagtctttaggtgaaactaatgctgctgatctgtgggccacacattcagaactactgaactattata

SEQ ID NO: 786219 - DNA, 627 bp, Homo sapiens
gtgcccattttataggtaatttcatgtgtgtgtggtaggaacagagggaggagatggaaaatttaagagagtggtttcaaccccagctgcatattagaatcacttggtgagctttaaaaaaagtactctagaatccacatgaacctatttgaatgaaaaaacaaaacaaaactcaaggtggggggagctggttcaagcattttaagaaacactccacgtgatcgtaacctgcagcccaagatgagtaccactgttctaaaatagtggttctccaatgttaaaatgtctcagaatcacctagagggcttcttaaataaagactgctgatccccacacccagaatttctgattcagtaagtctgctgagaggcctgagaattttttttttttttycttgcttgcttgctttctttttttttttttttttttttaagagatagagtctcattcttgcccaagctggccttcaacttccgggctcaagcaatcctctcacttcagcctcccaggaagttgggtctacaggcatgcacaagcacacccagcaatgcatttctaacaagtctttaggtgaaactaatgctgctgatctgtgggccacacattcagaactactgaactattata

SEQ ID NO: 786220 - DNA, 627 bp, Homo sapiens
gtgcccattttataggtaatttcatgtgtgtgtggtaggaacagagggaggagatggaaaatttaagagagtggtttcaaccccagctgcatattagaatcacttggtgagctttaaaaaaagtactctagaatccacatgaacctatttgaatgaaaaaacaaaacaaaactcaaggtggggggagctggttcaagcattttaagaaacactccacgtgatcgtaacctgcagcccaagatgagtaccactgttctaaaatagtggttctccaatgttaaaatgtctcagaatcacctagagggcttcttaaataaagactgctgatccccacacccagaatttctgattcagtaagtctgctgagaggcctgagaatttttttttttttttcttgcttgcttkctttctttttttttttttttttttttaagagatagagtctcattcttgcccaagctggccttcaacttccgggctcaagcaatcctctcacttcagcctcccaggaagttgggtctacaggcatgcacaagcacacccagcaatgcatttctaacaagtctttaggtgaaactaatgctgctgatctgtgggccacacattcagaactactgaactattata

SEQ ID NO: 786221 - DNA, 642 bp, Homo sapiens
aatggtttcaactgcatccaaactttggtttctgaactgtgtagtgcttaaggacctgatgcatgaatcaaactttcagctatcgtatctccaaggcttcctcatctattggctgaataactgggctaattgttaaatttcttggtgcctcaatttcctcatatataaaatgagaaagagtatagtatctacctaactgaggtgtccatatgatgatgttcatttcaaatacattacaaaatgcttagaataaagcacagagtaagtgttcaataaatgtttgtttgcttttgcacagcaaaggaaacaatcaacaaagtgaagggacaacacacagaatgggacaaaatatttgcaaactccctatctgacaagggattaacaaccagaataaggagctcaaamaactctataggaaaaactctaatctgattaaaagtgaacaaaagatttaatacatatttctcaaaagaagacatacaaatggcaaacagcatatgaaaagatgcttagcatcattgatcatcagagaaatgcaaatcagaactataatgagatattgtctcatttcagttaaaatggcttttatccaaaggataggcaataacaaatgctggtgaggatgtggagaaaagggaattc

SEQ ID NO: 786222 - DNA, 667 bp, Homo sapiens
atctgcaatatttccaagctctcagatgattgcattatgcagcacaagttgagaatcactgggcagtccctctattccaattgctaacttttggggagagtgattctgttttctccaaatgggatgagtgacccctgcctggctcagcttgtccccgtcaacatgggcatgccctggaggcattgctggggcagacatttgaagactttggaaatagcagagggaaaagrtgtccaccaggcctgaccatttgttagggtcagagaaaagtggttaattcaccctgcagaacactaaccaaatacgagcgcgatttatgcccccacctaaagcccatatggaagcatgggaaccccaggcctgggagagacctctgcaaagctccatcctgagtttccctcaagagaatcaaccttaagagatcagagtttcagagatgaagtctccttcattctgtgccagagttaacctaaattccttccactccccagaccccatcatgggccttgaccatgtaccagaggcctgtgctgaagataaaacctgattgcatttctgcctcctagagtctgaagaaacgggaggcatggggaagtgactcagatgaaagaggctgcatattattttctgtacagtggattccaaagaaaaacaaataacagaatcc

SEQ ID NO: 786223 - DNA, 548 bp, Homo sapiens
gccccgtcctaggcatccaagaggaaggtcaaaacagaaggtgtaaagggatagaagctgttgtcagagtccaacctcttcctaaacttctaagccctctatgactcaggaaagaatgtgtcctagagagaagggggcagagtgacacagatggtaaagatgggagctaacgggctctcaggagagaamaagcaaggtggactcctgcccagcagatatgtgccagatgtccctgctatgcagccttggggacacatccatgccaaataactaaagagaagctatgacaggaaaaacaaaaacacacaacatgctatctacatacaacatgtggggctggggccaggagtgaggtcaggaagagcaccccaccaaggcaggatgaacagatggaaggaaggtcaagccaggagagatctgaaaagaaaggatgggaggaatccacttctattttttttttcttttgagacagagtatcgctctgtcgctcaggctcgagtgcagtggagtgatctctgctcactgcaagctctacctcccgggttcat

SEQ ID NO: 786224 - DNA, 619 bp, Homo sapiens
agtctccccatgtgtgatctgtctctctcctccctccgtgggaccagctgaggttatgggggcaaaggggccttggaacatgcaaagtgcaaactcgtgaccgtgttcttgagttctgggtccattctcgaagccacgtatggcctctcccctgggggtgcctgcagarctcacctgcagatttgttactcgtaagtgtcgtacaccaagagggacaacagcagccccatctttccagtgcttttgcagctgatgtaagcacaagaaactcaggtgaagaaaatggcaaagcactcgagatcagccacaaaacccaagtcagggctttatttgatctgtaatgggaaggaaaaaaaatccccaaacttttgtggtgataggaagaccgaatagtaagaaataaaaccagcactttggcataactcagttgaaaaggacgcttgaacccatactctcatgaagagaccttcacattccaaaggcaaacggctgattcctgcccacgccaagaccacttcctctagaaattttggttgcctgtaggatggaaaaatcatctcctggtttctggcctgacagcagtgagaacatacaaccctatgactgcccccagttgctg

SEQ ID NO: 786225 - DNA, 619 bp, Homo sapiens
agtctccccatgtgtgatctgtctctctcctccctccgtgggaccagctgaggttatgggggcaaaggggccttggaacatgcaaagtgcaaactcgtgaccgtgttcttgagttctgggtccattctcgaagccacgtatggcctctcccctgggggtgcctgcagagctcacctgcagatttgttactcgtaagtgtcgtacaccaagagggacaacagcagccccatctttccagtgcttttgcagctgatgtaagcacaagaaactcaggtgaagaaaatggcaaagcactcgagatcagccacaaaacccaagtcagggctttatttgatctgtaatgggaaggaaaaaaaatccccaaacttttgtggtgataggaagaccraatagtaagaaataaaaccagcactttggcataactcagttgaaaaggacgcttgaacccatactctcatgaagagaccttcacattccaaaggcaaacggctgattcctgcccacgccaagaccacttcctctagaaattttggttgcctgtaggatggaaaaatcatctcctggtttctggcctgacagcagtgagaacatacaaccctatgactgcccccagttgctg

SEQ ID NO: 786226 - DNA, 618 bp, Homo sapiens
gtaggagggtattttggccccttgcaaagaacttatccccccaataccctctcacctaatggcttttggatccattgatgattcttttctggatcggttatttcaatgggagttgcaaatggtgaatttgctaaggtgctcttcctcttgcattgatgagcaggcattctgctccagagaagagcgttctctcaaccagggcatcagcctgtcccttctaggatggctgtgtcaatgggaccagggtgtgcacagaagttcctccatgcaggtccacagcagacataatcaccctcttttgcaccctcctctctctcacagcacactacaaactttcatctccaggctctgaacgagcttccaaaatcatgcccttgcactcctccttggaccasgaggcagccacttaaaggtttttggaaattttgcccaccacctcccaaacaagcaaactgctggaagtgtttgctctgggacaggtcttaagaggtgtgtgccttggcttgggagcagctcgggtctgggcagcctcgggtctttgctgggcaggttgagtgagatacagcatcaccctaggaacaggcatagcctggattttggggactgagggagtgaggt

SEQ ID NO: 786227 - DNA, 473 bp, Homo sapiens
tggcatttacacaatggaggctgcactgccagcaggcaaaaataaccagttaattcagtggcttaaagaaaccaaacctacccacaacgcttgacctcccattgatccatctgcgacaccggcagtggctaccatttattgagtgctgatggtgtcacctgggattgacttagtggtctctggcgctagttccgaagttgattctgtctggagagcttaatgcagtgttcagacctcagggtccgaacctgagggtcacccaaagatgagtgggacatagctgtgtgacctcrgctgagtgctttcacctctccaacctcagtttcctcttctgcaaaatggggtggcttcatggcaccttcacgtggtgtgattgcgaggaatgaagggatcgatgccttgcaagtagaggagaaggggccggatacatcttagttgttatgttatttaatcatcttggcaaccccgggagg

SEQ ID NO: 786228 - DNA, 611 bp, Homo sapiens
ctggcatcacgggagcagggctgtgggcagccaccctctccacaggcctggtcccgggactcacctggcctgggacagccacgccctgacactgtcggtccccaccccacaccaccccagggatgcctgagactcagcatgcgggcctctacgacgcactgatcagggcccactcaggccgagttcatcaagcatgggctccctccccacactaagtcccacacatccctctgggcaggcaccgtgaatccaccagcaaagaccccttgggggagagaaaggtgcctccccgcaaaggcctyggagtcaagttcaaaacatgatgtgtgtatgaagcggcaccaatataaacacggctctccacccgcggcagctcgcagaatcctcttcgtgcctgcatttgttccgaggagcgcagggaggctgctggggcccattcccagtcgcagcttgagagccggactctcaggatcagatgcctcgcgggcaagggaaggaaccccagcaggactgccaacgcgaggcggaaggagagaaggcccagcgcggccgcatccctccctctctccagaggaccctggagccggctgtgaagctgtggtcctttaagg

SEQ ID NO: 786229 - DNA, 611 bp, Homo sapiens
ctggcatcacgggagcagggctgtgggcagccaccctctccacaggcctggtcccgggactcacctggcctgggacagccacgccctgacactgtcggtccccaccccacaccaccccagggatgcctgagactcagcatgcgggcctctacgacgcactgatcagggcccactcaggccgagttcatcaagcatgggctccctccccacactaagtcccacacatccctctgggcaggcaccgtgaatccaccagcaaagaccccttgggggagagaaaggtgcctccccgcaaaggccttggagtcaagttcaaaacaygatgtgtgtatgaagcggcaccaatataaacacggctctccacccgcggcagctcgcagaatcctcttcgtgcctgcatttgttccgaggagcgcagggaggctgctggggcccattcccagtcgcagcttgagagccggactctcaggatcagatgcctcgcgggcaagggaaggaaccccagcaggactgccaacgcgaggcggaaggagagaaggcccagcgcggccgcatccctccctctctccagaggaccctggagccggctgtgaagctgtggtcctttaagg

SEQ ID NO: 786230 - DNA, 526 bp, Homo sapiens
tgaaagcatattaggaccatccgacctcgtctcaggatacaggtaagtctgccctgaggatgtgacatttcacttagaccccaaggatgtgaaggaacaaatcaaagagcagggacaagagcctctggggtggaagaaatgaaatgaaagggcatgatgaatttgtatgaagctttctaagagagtgggattggagtagcagtcactggccacggtgctaactgcaaattctcttctcccctctccacccacaggcactcctggccagggcactttatgacaactgccctgactgctctgacgagctggctttcagcagaggggacatcctgaccattctggagcaacacgtgccaraaagcgagggttggtggaagtgtttgctccatgggaggcaaggcctggcccctgccaaccgcctccaaatcctcacggaggtcgctgcagacaggccgtgccccccattcctgagaggcctggaagaagctcctgccagctcagaggagacctatcaggtgcccactct

SEQ ID NO: 786231 - DNA, 654 bp, Homo sapiens
gtacaataaaataaaaaatttaatttttttcatttaaataattctgaactaaaaaagaaaatttcagaactgacaattgtgtagaatatgaagatatatgataacatatgagacatagctaaagcagtgttcagaggaaacttttagccttcaatatattaataattgagatcaaatgaaaataaataaaggtcccagtcacaagtattgaaaaatatcaaaataaacctaaacattacatattgaaagaaaaatttaatataaaacagaaacataaatttaaaatagaaaaacaaaaaataataaaattaataaattactttattaactaattgtttgaaaaaatgcraaattaaataaactgtcagctatcttagtccaaaaaagtgggggtaggcacaaatatggaaacaaatcacagtatgaaacggtcactgtaaagaggcagcccaatgcactatatttccaagcagtaccatctttgtatctaggggtaaccacatgactaattctagccaatggcacatgagcagaagcgatatgtgtgtgtaaaaggatttgcaccagcaattcacaaaaaagaagtgcaaatggttttaaaacaattgaaacaacgcctaatctcacttaatataaatgttaatttaaactact

SEQ ID NO: 786232 - DNA, 601 bp, Homo sapiens
gacattaacattttccaattttttcttaaaaatgctatgatgggacaggtgcagtggctcacacctgtaatccctgcactttgggaggctgaggtgggcagatcacttgaggtcaggaattcgagaccagcctggccaacatggtgaaacctcatctctactaaaaatacaaaaattagccgggcatggttgtgcatgtctttaatcccagctactcaggaggctgaggcaagagaatcacttgaacctgggaggcagaagttgcagtgggccgagatcacaccattgcactcgagcctgggcaacaaagtgagactccatctcaaaaaaaaaaaaaaaagtacctattatgaactacgtgaaataatccttgcattatatattaggttgaactccatcaaattgatgtcttcatggctcaaaactatattatcaatttcatatgagtcaattaattaayattaacattattcctggagttatgttttctctaccacttttccatcagcccctagtccagattcatactgttctatttagtacagctttgtgatatgttttaatctggtataagtttgccctcattttaaataaaatgttc

SEQ ID NO: 786233 - DNA, 610 bp, Homo sapiens
aatactaatttgcaccctatcttataccatatacaaaaaatcactcaaaataagtttaatacctgaaactataagattcctagaagaaaacaaaagaaaagacattggtctggatggtgactttgagcacaggcaacaaaagtaaaaataaactartgaaatgacatcaaactgaaaagcttctgtgcagcaaagaaaacaattcctaaagtaaagagacaacttgtggaatgggacaaaatatttgcaaatcatatatctgataaggggttaatataaaaaatatataaggaactcaaacaactcaatagcaagaaaacaaacagacatttctctgaagaaaacatacaaataaccaacaggtatatcaaaaaatgctaaattgctgatcaccagggaaatacaaatcaagaccacaaagagataacacttcatacctgttaaaatggctattgtaaaaaagacaaaagcgaagtgttgatgaggatgtggagaaaaaggaaccctcatgcactgttggaggaaatgtgcattggtacagccactatggagaactctacggtggttccttaataaattgaaaacagaactactatatgatccagcaatc

SEQ ID NO: 786234 - DNA, 618 bp, Homo sapiens
catgtttgacagccccttttccactggagggctttcccacaggtacacctctcttcagggccgttttaaggcttctttttttaaaggatctacagggtgcctagctcccaagcaggtcttatggtagtggcttagcttaggctccacattccaatgggtggagcggttttaggacctggcacaggmctgagcacttgtctcatccgcggcctctgcccagctcctggcaagcagcctagaatctggctacagcccatggtgtgtgggcagcattctcagccccttccatgatcaggcagctggtcctggccccgtgccagtgcagggtggccagctcagcccctgccgggcagctttgctatcccagcccctcttaagcccacttgtcttcttagctctccacaagtgtgagctcctgctttcagctgtgaccttctcccatttcttatccagaggcgtgggtttcttgtttttaatcacagtgacattatatttctcatttttatctaactacctagtagcctgtgtgttgggagcagtcaatctctcctgtggacctggcactctggttgaagttcagtgttctaaggcatcctgagatccgcagaggcactgcca

SEQ ID NO: 786235 - DNA, 599 bp, Homo sapiens
gtagcctgtgtgttgggagcagtcaatctctcctgtggacctggcactctggttgaagttcagtgttctaaggcatcctgagatccgcagaggcactgccagctgacggtagggacagtgacatgtgatatgatggtggggacagtggggtgctctggacacacctccagctgctaccagggagctctacttgcaggggtttgtatacaagtttatatacaaaatctctattactaataagccaaatatttggaacccatactctagcccaagcatctcattttccagatggagatgaggctgttarttccaaagccaggcgggaaactaggtctgctcatgtcctgtctgacactctcagaactgcaccaggcataggtctgctaggcgccctgtaatgcccatctcatcccacatgatggggtcacctccctcacttcatccccaagacgaagcagttgggaactcagcccaagaggaaacttacttccaaacccatctggaacactgattcatgtaaccaaaaccacctagctgcccgcctggagaaggttctgggttgtggcactgcaggatccagtaaggcccgggcctctatt

SEQ ID NO: 786236 - DNA, 643 bp, Homo sapiens
agcctgtgtgctagatgataaatgaacacactcctacccatccaaggaggctgtggtgcagaacagccagaaaaagtaccctctgttgggtgtgatggctcaagcctataatctcagcactttgggatgctgggacaagaggattgcttgggtcccggagtttgagaccggtctgggcaacatagtgagatcctgtctgtacaaaaaattttaaattagccaagtgtgatggtacgtgcctgtagtcccagctactcaggaggctgaggtgagaggatcgcctgtgcctgggaggttgaggctgcagtgattgtgtcactgcattctaccctgggcaacagagcaagaccctgcctaaatatactatatatgaaatatatatgatgaatgaaatatatatattatatatggagtataatatatataatatgtggaatatatatgatctatattatatatagagtataatatataatatatataaaatatgtattatattatatatkaaatatatatattatatatgaaatatataatatatatgaaatatataatatataatatttatatagtatatttcaaatatatattatgttatatattctatatattctggttggtgcaatagtaattacggttttgg

SEQ ID NO: 786237 - DNA, 575 bp, Homo sapiens
accaccatgcccagctaatttttgtatttttagtagagttggggtttcatcatgttggccaggctagtcttgaactcctgacctcaagtgatcctcccacctcagcctcccaaagtacggagattacaagtgtgagtcactgtgcctggccaagaataatttcttaatatcatcaaatatctaatcagtgctacatttcccacatttttcttcaatgtttatgtcctttggatcagtaatttccgttgatctttcctctgccatctcaaatatggttttgagcccatctagtaaaattttaatttcatttattatacttcagagctctagaatgtccccccaaatagcttccatttttctattgtaattttatatcggcttattcatttataccrtattttcctttaattatttgaacatctttctatcctcttggaagcctttgtctgctaaatccaacacctgagttcagtcagattcggtttttattgactgtcttgttttctgggtattttttggttgttgttgttctgttttgttttcggggtcttgggggggcatgtttgataattttg

SEQ ID NO: 786238 - DNA, 518 bp, Homo sapiens
aacagacatttaaaaaaatttgtgttggatagggggttggcatacctcatctattgaaactttataagataattaaataagttttaaagtgagaaagacatccctcctgttttttcaattgagaaaaactagaaccagggatttgtccaagatctcaggaccagttcccaggagaaccggggcaccagggckgtgaatctggaggttacctgatcgtgtgctttcctgccttggctaagatcttcagatccactcgttaaaagttgccgggatttgtccttagatgtcaattgctcaactgaaaccttttaaaaacattcctcagccttaggggcaggggccgtgtccttgggaaggaggatttagggagggggatgcgggttctgccttaggcgccggcgcaagggtgaatttttgaaagccaggctgtcaatcgtaaaagccgagcgccatctgccagccggttctgagtagccttgctttctttcattgtttccacttcccagccctgaataatt

SEQ ID NO: 786239 - DNA, 641 bp, Homo sapiens
agccctccttgtcacctggtatttagacagctgaaccttaaggaatcacaacataatgcctgatttctaccctgggaactgcaaactaattccaggtcgaaatgtaaatattgtccccatggagaagaggtggttttagctgcttataaatgggaaatgctggcagctgttaatattgatagttattccctgaaaaatgacttcaaggttctactaatcaattgtctctcagaatgaagaacggcgcactctgctctcccrgaatcacaacatgtatttataaatacatgcttcacagaacagacaggaaaaatgagccaagtctttggcatgatgatctgttattcagagtgaagaaagcaattattagcatctatattggactttgaatttacaaaattctttctttaaaaaaaatggccattgcagctattttgtgtttccgttgtttgatcttcaattaggtatactgaattgtgctacttggcattggattgaaagttaacaagggctgggactgtttttttttttttttttttctcacttggtaaataagtagctttgcacttggctagaaacatctggatgatttaggcactggcttgtaacaatgtttgctttgccatgtcctcctagaactg

SEQ ID NO: 786240 - DNA, 520 bp, Homo sapiens
aaggtcagcatcctgctgtttggaagtggtcatgaaaacattcattttatcagatgtttagactggaagtttaaggagcctaaagtccatatgagctcaggtgcagattccagaagcagggggacaggaagaaagtggcagcaacagctagctgcccactgtgtgtgccaatgatggagtaggaagcyatgcaccacgttctcacagcctctgagtgctgttgctccttgagaagggaaggcccattctactctgtttctttctgcacagaattagatgtgtcagtgaattgctctgaggagtagattagtgtcagttccttgggtcagtgcagaagggcttgtgtaaaagaagaaaggataaatagccagctccccaccctgtctttgggaatgcactttcagaactctcaagtcagaaagcccatttcctggggaaaccaaactcaccacagacagttaatgctcaaccagatttcataaaccctgttgttttcatactctggaggctccagtatttt

SEQ ID NO: 786241 - DNA, 629 bp, Homo sapiens
gttttccatagagactgtactaacattaccgcccacagtgtctaagccttccctttttaccgctttcgtgagaatatctattgtttattgactttttaataatggctattctggctagggaaagttggtatctcactgtggctttaatttgcatttccctgatgattagtgatgtcaagcattttttcatgtttgttggccatttgtatatcttcttttaagaaatgtctatttatgttatttgtccactttttaatggggttgtttatctttttcttgctgatttgtttgagttccttgtatattctggatattagtcctttgttggatgaataatttgcaaatatttttttctcactctgtaggttatctctttactctgatgactctttcttttgctgtaaagaagctttttagtttatttaggtcccatttatgtatttttgtttttgtggcatttkcttttggggtcttagtcataaattctttgcctaggccaatgtttagaataatttttcctaggttttcttctagaatttttatggtttcagatcttatatttaagtctttaattctccttgagttaatttttgtatatggtgagagatagggatccagtttcattcttc

SEQ ID NO: 786242 - DNA, 472 bp, Homo sapiens
attggaatataaagttgaggaaattcccccaaaagtgaagcaaaaagaccaagaaacagaacatcacagcgaaaagataagaaaaatagaagattatactaggagatccaataacccaataagggcaattctagaaagagagagaagacaaaacagaagggaaaaaaaatcagaaataacaggtaagttcaagagttatattgtacaacatggtaactatagttaatgacaatgttttgtattcttaaaaattgctgagagtataagtgttcttgccaaaaaaagataagcctatgggctaatacatatgttattaatartctaatttagccaacctacaatgtgtgtatatttcaaaacaatgcattgtacatgaggaaggaaaaggaaaaaagaaaaacagaaccacatttttctaaaacctgaggacatgattcagattgaaagaattgattgagtgcccagccaatga

SEQ ID NO: 786243 - DNA, 582 bp, Homo sapiens
tatgttattactgcacacctgaatagagagatggctgacagatgccactgcaacatgaagcccccccagacagactgtggggctgcgtgttgaaaaccactaaaatatgtatccagaccacatttggaaaaacactcatccggaaaaaacmaaaaaaccaaaaaacccttcaatacacagtcctataaaatagtacatccgcttcatgagcggtagtgacttaaaaaaggaagctgagaactggtaagataattgagtggttttgtttttcacaaagccagataaaagcacaggacgtcagcaacctattttgtatcaatcaggagctttattcgagttaatgcaccaattagttattaatggaaacttattgagggcgtcatattgaagttcacccttggtaaagaatcattaagacctcaagacctgttttcattgaggaccacgtttctgaccacatttttctttgtaccaattaacctccccccccactttttttttcctttgcactttgttgcaggatatttctccatctgctggtgagcatggtgactgtactactcacagcactgctgccacatc

SEQ ID NO: 786244 - DNA, 607 bp, Homo sapiens
atcttgaacattcccaagtcagacacggctgagtttgagggatgaggtcgagagctcatctgcctctccaggcagctgggctggctggtggaggtgggactcagtcacttcctagctgtgtggctttaggcaagtttcttcacttttctgagccaattgcctcgtgcctaaactgaggatcttagtcatccccctgtgaggatgttgggaagacagatgagatggcggtggctacagagcatgcagcatctggccrgctgctggtgggtgccctgcacatagtagctgctagtattattaacccgtctcttgccagaaggatttgcaaggtatcaggagaattgttgtgccttaaatggctcaggaaactggcagttgggctgagagctggccttgctcttatttagtgccaatgccctgcccacccctgccagcatctgtcctgagttaggggacctcaccagcatcctctctatcagtagctgcagtttactctgatgcactgggatcagctccagactgcgagttccctctccctccctcagccctgtaatgacatggttggaggccattattttacagaaaactcttagaacttacagagtct

SEQ ID NO: 786245 - DNA, 614 bp, Homo sapiens
tgtatttttagtagagacagggtttcaccatgttggccaggctagtctaaaattcctgacttcaggtgatccacctgtctcagcctcccaaaatgctgggattacaggcgtgagccactgcaccaggcctattattattattttttgagacagggtctcactacgttgcccaggctggtctcaaactcttgagctcctcccaaagtgctgggatgataggcataagccaccacacccggcctcaagacaattcttaaaagatgtggacaaccctggggatagactaggcagacaggcagtgccaccaatctcgcaagccctgagcatgaaaatgagatgtcaggtctctcagggaactgacgcagcaattgctccwgcgaccggcacagtgtgaatatgacagatgtcgctgaaaagagaaagctgctctggatggagctgctgcaggaatcagctgaggcttgagtgtaaatgctttatttcccattcatctctgcatcaggaccacaaatggcagaccgcaggagccgagtgtttgcctgcagtttgccgcatcagccctctggcgtctgggccggtgacatgtccttaccagtttctcatgaagataatag

SEQ ID NO: 786246 - DNA, 614 bp, Homo sapiens
tgtatttttagtagagacagggtttcaccatgttggccaggctagtctaaaattcctgacttcaggtgatccacctgtctcagcctcccaaaatgctgggattacaggcgtgagccactgcaccaggcctattattattattttttgagacagggtctcactacgttgcccaggctggtctcaaactcttgagctcctcccaaagtgctgggatgataggcataagccaccacacccggcctcaagacaattcttaaaagatgtggacaaccctggggatagactaggcagacaggcagtgccaccaatctcgcaagccctgagcatgaaaatgagatgtcaggtctctcagggaactgacgcagcaattgctcctgcgaccggcacagtgtgaatatgacagatgtcgctgaaaagagaaagctgctctggatggagctgctgcaggaatcagctgaggcttgagtgyaaatgctttatttcccattcatctctgcatcaggaccacaaatggcagaccgcaggagccgagtgtttgcctgcagtttgccgcatcagccctctggcgtctgggccggtgacatgtccttaccagtttctcatgaagataatag

SEQ ID NO: 786247 - DNA, 610 bp, Homo sapiens
cattaaaaaaaaaaacccaagggtattctaccttcaggtacagctggatccgggactcaaatgatgcctgtatgtttctgtttgtctctccactcagctctgagactctctgctcttctttgagttttggcttcattcccattcatgcttagacagggtttctttgcatcgtgggaaacagggtcctttgcagctctcacttctaagaaagtgagaccctccccctcctggcattgaatatcaaatttcrgtgaagattccgattagctcttcttgcggcacgtgcccactgcttgagccaatcagcatggaggggaaatagggtcttgtaattgggtcaagtgcctactcctgcagccctgcttcggatggggggagaattgatagcgctgcaagagaagtgtggggccaggcaagccagcagaggccaggccatcgattacaaagtagctctgtggcaatcaagtccttcatccacattcccagccccagggaaatcccagtctaagcaaaggacatcttggaggaggtggcgcctcacaccttctgaacctttccttttggctctgcatctgtgctacttggtgacaggtgcatctcttgtgacagc

SEQ ID NO: 786248 - DNA, 591 bp, Homo sapiens
agtctggcaagatgccccgagagggaaagaactgggcatgtttgaacaaatgagtatctactggtatgtagcgtacaagggggtgtataattggtttggcgaggttgacagggcccagattatgcagggacttctagactcattttgaaaatccttccaaaattgtctcgacggctatttttaaaattttctatttctttgagtaacataggaatcagaagtatttcttggtgcagcatttctagagagcactttgacaatttgtataaaaaaagcttaagtacatgtactgtagascaatgacttcatttctaggaatttatgctagggaaataattttccacatgcacaaatgtgtatacatagaatatttgcttatatttccaaactcctcaaattctatgcttcaaatattaataggtggtttgtacatgtctcaatagagctgattttgctttaagaaaaagatgcctaattaggaaaaatagctcatgcatgctgggcttaatacctaggtgatgggttgatgggtgcagcaaaccaccatgacacatgtttacctatgtaacaaacctgcacatcctgcacatg

SEQ ID NO: 786249 - DNA, 526 bp, Homo sapiens
aatagaaaatgagccttatttggcattttaggatttttttctctcccctaaaagggagccccaccccagaagtactccaggagttaaacacccagctgtgttctttccttctctgagatcagcaatggccctaacaggtctagcatttgaatttagctgacaattgcagtgatgatgtgttgagcagaatgcaatccagcttgttcctgtgcagttttataggctctgcaagttttaaaacttagaaaaaatgttttgtcagtaaaagaagctggcacacagggaacagttgattgtataataaggcatcatttcccmtggtctaatagctataacctgttttaactattacacattataatatcaataaagctctggtcatttattatctatttaaaaaatcttctttcagtaaagatgttctgaaaaggtcagagctgctgtcagaccccagtgataaagaacaggatggtgctttgtaaaatggcagttcttgcagtgttaaggactgtaaactttttaaatt

SEQ ID NO: 786250 - DNA, 636 bp, Homo sapiens
gtcgtttaaaatatcccacagatggaaacagatagtatagtaaggtcatgaaatgggtgagtattcagcatcataaaatgcaaacacattttctccatgttagagatatagcaatgtagtcccgataatgctgtaggtcattatctagtttctactaagatcagttacatcacatgccaatataaacagaggaggggctgaggcttctgtttttagaaagggacttagaacagcyaacagatcttctttgggtaaaataaataaatgtttctcattttctccttcaaatgaccttgagcagttcatctcttgggatggctaaggtatagttcaccttaaataggaatgaaaatttattattaccaaaaggtaattttataaaaggatcacattccaggaagaaaaccattagactgaaaataccttgagggaagctactcttggtctttcatttcagaggcaggcattttttctagacacttaggatctatcaatggaacaaaataggaaaaaaatccattttcttatagaaattacattgaagtaagataaatcaggcaaaaaaagctatatgtaagtaacttactatattagtgcatataaaattgtatgttcaaaaatgaagaatgtcaaaag

SEQ ID NO: 786251 - DNA, 694 bp, Homo sapiens
gggtgacaaagtaagaccctgtctcaaaaaaaaaaaaaaaaaattagctgagcatgcacgtggttgtagtcccagctacttgggaggcggggacaggaggatcacttgagctggggaagtcaaggctgcagtgagccgtgattgtgtcaccgcactccagcctggatgacagagtgagacaagcctctctcaaaaaaataaaaataaaaaaaataaagaggccaggattgattgctgtaatgtagatgtatatggctaacatgatagctttacarcctatagtttctgctaaagaagaacttttggtttaggtcttcagtcaccctttattggttggttggttgttgggatggccagacccaacgtggaggtgacgaagtccagtggagtcaaaagaatgaaaaagacaagtttaagagtgcataaagtgggtccgggggccaatgctaatatggaggctgcgaaggccccgagctctggaagcctgcactatttattggtgatgaaacaaagaagcaggtggtgaggatgtgggagttgaaagaaagcagtgtatcaagcacatgatctacagctgtgacggtttagcattttctttgcagcatatggaacatgttctgctacttgagataatgggaaacatgttctagtttaagatacaatagatctatgagcctaggagtgctagaagcaa

SEQ ID NO: 786252 - DNA, 694 bp, Homo sapiens
gggtgacaaagtaagaccctgtctcaaaaaaaaaaaaaaaaaattagctgagcatgcacgtggttgtagtcccagctacttgggaggcggggacaggaggatcacttgagctggggaagtcaaggctgcagtgagccgtgattgtgtcaccgcactccagcctggatgacagagtgagacaagcctctctcaaaaaaataaaaataaaaaaaataaagaggccaggattgattgctgtaatgtagatgtatatggctaacatgatagctttacagcctatagtttctgctaaagaagaacttttggtttaggtcttcagtcaccctttattggttggttggttgttgggatggccagacccaacgtggaggtgacgaagtccagtggagtcaaaagaatgaaaaagacaagtttaagagtgcataaagtgggtccgggggccaatgctartatggaggctgcgaaggccccgagctctggaagcctgcactatttattggtgatgaaacaaagaagcaggtggtgaggatgtgggagttgaaagaaagcagtgtatcaagcacatgatctacagctgtgacggtttagcattttctttgcagcatatggaacatgttctgctacttgagataatgggaaacatgttctagtttaagatacaatagatctatgagcctaggagtgctagaagcaa

SEQ ID NO: 786253 - DNA, 694 bp, Homo sapiens
gggtgacaaagtaagaccctgtctcaaaaaaaaaaaaaaaaaattagctgagcatgcacgtggttgtagtcccagctacttgggaggcggggacaggaggatcacttgagctggggaagtcaaggctgcagtgagccgtgattgtgtcaccgcactccagcctggatgacagagtgagacaagcctctctcaaaaaaataaaaataaaaaaaataaagaggccaggattgattgctgtaatgtagatgtatatggctaacatgatagctttacagcctatagtttctgctaaagaagaacttttggtttaggtcttcagtcaccctttattggttggttggttgttgggatggccagacccaacgtggaggtgacgaagtccagtggagtcaaaagaatgaaaaagacaagtttaagagtgcataaagtgggtccgggggccaatgctaatatggaggctgcgaaggccccgagctctggaagcctgcactatttattggtgatgaaacaaagaagcaggtggtgaggatgtgggrgttgaaagaaagcagtgtatcaagcacatgatctacagctgtgacggtttagcattttctttgcagcatatggaacatgttctgctacttgagataatgggaaacatgttctagtttaagatacaatagatctatgagcctaggagtgctagaagcaa

SEQ ID NO: 786254 - DNA, 655 bp, Homo sapiens
agagcagtattgccgctagcacctcacctccagccctaaggcagttttctcctatcttagtaaatagaacatacaattaggttttacaccaagacattctattgcccagggatgagcaggagacagatgccttcctcttatctcaactgcaaagaggccttcctcttttactaatcctcctcagcacagaccctttacrggtgttgggctgggggatgatcaggtctttcccttcccaggaggccatatctcaggctattgcatggggagaaaccttggacaatacctggctttcctaggcagaggcccctgctggagggccttccgcagtgtattgtgtccctgggtacttgaggttagagaatggtgatgacttttaacaagcatactgccttcaagcacttttttaacaaagcacatcctgcatagccctaaatccattaaaccttgagtcaacacagcacaggtctctgctgtgagcacagggttgggacaagggttacagattaacaacatctcaaggcagaagaatttttcttagtacagaacaaaatggagtctcttatgtctacttctttctacatagacacagtagcagtctgatctctcttttccccacaattttttgcaaaagcaaggttaaaaaacttgggag

SEQ ID NO: 786255 - DNA, 655 bp, Homo sapiens
agagcagtattgccgctagcacctcacctccagccctaaggcagttttctcctatcttagtaaatagaacatacaattaggttttacaccaagacattctattgcccagggatgagcaggagacagatgccttcctcttatctcaactgcaaagaggccttcctcttttactaatcctcctcagcacagaccctttacgggtgttgggctgggggatgatcaggtctttcccttcccaggaggccatatctcaggctattgcatggggagaaaccttggacaatacctggctttcctaggcagaggcccctgctrgagggccttccgcagtgtattgtgtccctgggtacttgaggttagagaatggtgatgacttttaacaagcatactgccttcaagcacttttttaacaaagcacatcctgcatagccctaaatccattaaaccttgagtcaacacagcacaggtctctgctgtgagcacagggttgggacaagggttacagattaacaacatctcaaggcagaagaatttttcttagtacagaacaaaatggagtctcttatgtctacttctttctacatagacacagtagcagtctgatctctcttttccccacaattttttgcaaaagcaaggttaaaaaacttgggag

SEQ ID NO: 786256 - DNA, 596 bp, Homo sapiens
actaaattagagtcttgattctacaacttactaactttgggagactaacttggggaaagtttctctgagttatcttggaaaaatgagtgttaaatgcactcatggctgggcatggtgtctcatgcctgtaatcccagcactttgagaggccaaagcacgyggatcacttgaggtcaggagtttgagaccagcctggccaacatggtgaaaccccgtttctactaaaaatacaaaaatcagccaggggtggtggcacacacctgtagtcctagctatagctactcaagaggttgaggttggtggatttcttgagcccagaagtttgaggctgtagtgagttatgattgtgctactgcaccccagcctaggcaacacagcgagactccatctcaaaaataacaactaaaaaatcactctcatccctatctacatcacaagatttttgtgaaggttcatggaggtgatgtagacaaaagcccttataaaacactggttgcatatttgtaagcgaataggcctccaaatgactgaagttgatctgatgttagtacttaaggagtggtaggcagtgtggcaatcatatatatatatatata

SEQ ID NO: 786257 - DNA, 641 bp, Homo sapiens
ttttatctttgacccatttgttgttggtgagcatgttggttaagttccatgtattcatgaattttccaaaacttttcatgttactgatttctacttttattcatttgtgaacagaaaagatagctgatatgatttcragcttcctaaatttgtttatacttgtttgtggcctaacattctcctggagaatgtttcatgtgaactttagaagaatgtgtatcttactgctgctggattaaattttctgtatttgtctattaggtctatttggtctaaagtgttgtccaaatccattgtttccctacggattttctgtctagataatttatccattgttgaacatgagtgtcttgaattcatctatcattattgtcttgcagtgtatctcatacttcagatctattaatatttgctttacatagttaggtgcgccagtgttgggtgcgtacatacttaaaattcttatgtcctcttgatgagttaacgtctttatcatcatataatgaccttctttgtctcttcttacagtttttgacttaattttattttgtctgatatgagtatagtcacttctattttcttgtggttatcatttggctgggatacctttttttaattatttctttcctctcagtttatgt

SEQ ID NO: 786258 - DNA, 641 bp, Homo sapiens
ttttatctttgacccatttgttgttggtgagcatgttggttaagttccatgtattcatgaattttccaaaacttttcatgttactgatttctacttttattcatttgtgaacagaaaagatagctgatatgatttcaagcttcctaaatttgtttatacttgtttgtggcctaacattctcctggagaatgtttcatgtgaactttagaagaatgtgtatcttactgctgctggattaaattttctgtatttgtctattaggtctatttggtctaaagtgttgtccaaatccattgtttccctacggattttctgtctagataatttatccattgttgaacatgagtgtcttgaattcatctatcattattgtcttgcagtgtatctcatacttcagatctattaatatttgctttacatagttaggtgcrccagtgttgggtgcgtacatacttaaaattcttatgtcctcttgatgagttaacgtctttatcatcatataatgaccttctttgtctcttcttacagtttttgacttaattttattttgtctgatatgagtatagtcacttctattttcttgtggttatcatttggctgggatacctttttttaattatttctttcctctcagtttatgt

SEQ ID NO: 786259 - DNA, 641 bp, Homo sapiens
ttttatctttgacccatttgttgttggtgagcatgttggttaagttccatgtattcatgaattttccaaaacttttcatgttactgatttctacttttattcatttgtgaacagaaaagatagctgatatgatttcaagcttcctaaatttgtttatacttgtttgtggcctaacattctcctggagaatgtttcatgtgaactttagaagaatgtgtatcttactgctgctggattaaattttctgtatttgtctattaggtctatttggtctaaagtgttgtccaaatccattgtttccctacggattttctgtctagataatttatccattgttgaacatgagtgtcttgaattcatctatcattattgtcttgcagtgtatctcatacttcagatctattaatatttgctttacatagttaggtgcgccagtgttgggtgcgtacatacttaaaattcttatgtcctcttgatgagttaacgtctttatcatmatataatgaccttctttgtctcttcttacagtttttgacttaattttattttgtctgatatgagtatagtcacttctattttcttgtggttatcatttggctgggatacctttttttaattatttctttcctctcagtttatgt

SEQ ID NO: 786260 - DNA, 538 bp, Homo sapiens
aaagaatgtaaaatacctgatccagcacagcaagggcaaccctgtggcttgctgactcattaagtacccatgctactttatgaaacacatgtgagttgcatagatttattaaatactaatactttgaataaatatggacatacccctgcagaattgtggaatatgacatattttaaaacacagtttcacctgtgactgtaaaacatgcataaattaggttggaaaccttgaggtggtagtgagtgttttgaaacattagagattgcacatttacaaatccaccaattataaatgtgatttttgagcatatatgtagtttaaatatataattatkcttattccattgcacctgcaacacccagttcaacaaatatttattttctaggatctggagagttaagatgaaaactaccttgatcatgacatgtaggagttcaaagtctcatgtggggtgtgaacatctaaatagatagttctaattactgtggtgggaaactggggtcctgtatgatgatcttagcctacagagaagaggagc

SEQ ID NO: 786261 - DNA, 665 bp, Homo sapiens
ccaggattacatgcctaagacaagtgcaataaatttgttagaaagtgctctgaagaaatataagtgtaaggagttgaggaaggcaggattgagcaaaggaaaaggttgacttctggggcagcttcaaatctaacgttagggattcctgtggggaactttgtagctatagctggaactgaccctcagaattttgttaacttgtagtaagggggccattgacactgactggccattgttgtcacttaggaaagatcatgcttgagtgaagcagttyggaagttgagaacactttccaatgagagacacaactgtgagcatcaggaacaaatatttctacaagctgaggaatgagttcactgacctcaaaagcaattttggaagagtaccaggtattcactatagtgtactgttgtatacatttcaatatttccatattagctaatacaatattaaaatgtatatagattacaaataatcataagcaaaactcagtatgagtctttctgcccttaagatctatatgcatcattattctagctagcagcctatcaatcttatttattcttcaaaatacaaacctctggttttgtcaatcttctgtctagtttctggtgtctcaattttattctgttcagctctaaattggttatttcttttcttccgct

SEQ ID NO: 786262 - DNA, 665 bp, Homo sapiens
ccaggattacatgcctaagacaagtgcaataaatttgttagaaagtgctctgaagaaatataagtgtaaggagttgaggaaggcaggattgagcaaaggaaaaggttgacttctggggcagcttcaaatctaacgttagggattcctgtggggaactttgtagctatagctggaactgaccctcagaattttgttaacttgtagtaagggggccattgacactgactggccattgttgtcacttaggaaagatcatgcttgagtgaagcagtttggaagttgagaacactttccaatgagagacacaactgtgagcatcaggaacaaatatttctacaagctgaggaatgagttcactgacctcaaaagcaattttggaagagtaccaggtattcactatagtgtaytgttgtatacatttcaatatttccatattagctaatacaatattaaaatgtatatagattacaaataatcataagcaaaactcagtatgagtctttctgcccttaagatctatatgcatcattattctagctagcagcctatcaatcttatttattcttcaaaatacaaacctctggttttgtcaatcttctgtctagtttctggtgtctcaattttattctgttcagctctaaattggttatttcttttcttccgct

SEQ ID NO: 786263 - DNA, 531 bp, Homo sapiens
catacaaactagtttcactgctctaaaaattccttgtgctccacctgttcattcctccctcccccgaaacccctggcaacaactgtttggttttttttactatctctgtagtttttgccttttccaaaaggtcatagagttggaatcaaatagtatgtaacttttgcagactagcttctttcactgagtaatatacagttaagattccgccgtgccttttggtgacttgatagctcctttctttttatcacttgatactattccattgtttgttatgtaccacagtttattctttcaccttttgaaaaatatcttgattgcttccagtattttttggcratttttaattaagcttctataaacatttgtatacaggtttttgtgtggacatacgttttcaactcatctgggtaaatccctaggaatgtaatgctagatcgtatgttaagactatgtttagctttatgagaagctgccaaaccattttccatagtggctataccatttttcattcccactagcaatgaatga

SEQ ID NO: 786264 - DNA, 642 bp, Homo sapiens
gcacacgagggctcattatactattctctccactcttctttttttgagacagcgtctgtctgtcacctaggctggatggaatgcagtggcacgaacatggctcacagcagcctcaacttcctgggctcaagcaatcctcccaccttagccttccgagtagctgggactacaggcactcaccatcacatgtggctaacttaagtagacatgaggtctccctatgttgcccaggctgttctcaaactcctgaggtcaagtgatctgcctgcctcagcctcccaaagtgaaaatctttgtatgtttgaaatgttctctaataaaggtcttgttttgttcatctttagataaattacgccttagactgttgtaactaaaatagctcaacccttaggggtgcttttagagatgytgtggagactcaaagaatccgtgctgattttggtggcaatttatgagcactttgaaaggatagatgtgatcagtggtaaccagcacgggtttactaagctagagtataccaagatgaatttactccattatacatttaatttttaatttttaatttatttatttagagacctagttatgagacaggctaatttttgtatttttgtggggaaaagcaagagagatcagattgtt

SEQ ID NO: 786265 - DNA, 552 bp, Homo sapiens
gcatctagcacttccaggggagctttctaggtggcaggcagtgttctaaacatgcttacatatattagtttatctaatcttcgttataaccatatgaggtgtgtattagtcagtgttctccagagaaacagaaccaatgggaggtrcatagagagcttgaagacagagggagatttattttaggaactggcttatgtgattgtggaggtttgagagtccaaaatgtgatgggggaggccggcagagactaagggaagagctgcagctgagtccaaaggcagctgctggcagaactcctccttgctgagggagggtgtgtgtgtgtcagtctttgttccattaagaggccttcaaccaattggatgaggctagcctgcattatggagagtaatctgctttactcaaaatccactgatttatttaaatatgaatctcacctagaaaacacctttgcagaaacatctagaataatgcttgaccaaatatctgggcactgtggcccagccaagttgacacataataaaccatcacaaaatgggtatgaatattatc

SEQ ID NO: 786266 - DNA, 645 bp, Homo sapiens
agcacagacctcttgggtcgatccttggctgatggcccctaactccccagccctggcctagtttcgacctgagactgggagcttgggccaaggagctccctatttcccatggaggccaaggagcccacccaaagtcaggctgtgcttgtttctgccttggcctctgtgggaaagaggactcggagggccccacactcctcccacacacctagcccacctgcatggccctgggaggcccgggtgatcgcctcttacagtgaaggaacctgaacctcccagactttcctagacaccatgtgacaaacccacaagcaccaagcagccagatgtgcccagcccaacagaggcagctgcgttagccccattttacagatgcacctcagtcagcttaagtcacttgcctggtgtcacacagcttgcaatgggaggcaaggctgcagactcggttgtctgtgctgcaaccaccacaggccccctcctgccctgcytagtgtttcacaactttcaaggcctaaggaaggggcacctcctccagaaagcccactctgattttgacccccaatagcactgaatgttccaattctgtccccaacagtggtgccctcaaaggagctgtccagtagaattctccggggtaatggaaat

SEQ ID NO: 786267 - DNA, 636 bp, Homo sapiens
ctaggttcaaatcccagctctgccagacagattatttagggtctctgtcttcatttataaagtgcagagactgaaatgatccacctaattggattgctgggggataaacaagttaatacacataaagtcccccgtgcacagtcaggctcagtaacagggagcgcatacacagatcctccacctgctccagctccacctgccagtcacagggccctgctgccagcacyggttcaccctcgagaggggagagggagggactctggaagagctgtgacttgcaggggaaatgacagaaccacctgggacagaatgggcttggccaaaggagggcactgagagaaggagccaggaaggtgggggcggtggccactggaggaggagcagcatgggaagaagcagggacacgggcctggctggcctcagggggaggggggagcaaggcttggggtgtctgtacagagatgaagaaacccaggctctgcagggtaaagccactttgctgagaccacactggtggctggtggctggcagcactgggggtggcagagctggggacttccaggtccatctgaatgactgttatcactttcacattcccccagaatcccttgctgctgccaggctgacgggtctccc

SEQ ID NO: 786268 - DNA, 643 bp, Homo sapiens
tcatggccagaccagaggcagctttcacagtaaggtgttgatgtcggcatttactctgtgtgcgaggcccagtttaaaccatgtacaaagatcatctcacttgggcctcacaaaagccctatgtggttggcatcttacaaatggggagacagaggcacagggctttaaagaacactctgtgtcaggcagcatgtgaatccaggcagtctggctccaaagcctagactcttagcacagactctgcaccccgagctattgctgttcccctaactctgctgccccttgggctgccaagccctgggaagaaggggatgtggggagggracagggtctgggtgctgggggatctgctcactaatggggtacacgcctttggtacagcagcacagaagaccgtggtctgttccgcatgtcccaatatgcgcccactctggaggaagcaggtccatactggtagatgtgggacacaggagcaaaggcagagacttgggttctggtcttggctctatcacaaatgaacccgagggcttgacagaggtaacacacctctcctggttcactgaagcaccctgcgaatgtcaggcttggacccgcacctctgtcagtggacaaggaagtctcaactcccacccttcctaccata

SEQ ID NO: 786269 - DNA, 646 bp, Homo sapiens; identical to SEQ ID NO: 747880

SEQ ID NO: 786270 - DNA, 550 bp, Homo sapiens
ttaatacatcattttacttgatgctatggtagttactgtgggatgtaacaataaataggagcatggtacacaaagagtttacagtgttatggctagagttgggtaataaaattacaacttaaatattatgtagagaaacagtgtgttataatggaaagaatcctgaactagatcatgaaggaagtcagagataattccaacatcaccatttcccactaggaccctgttattgattaaattatgttcatcaaaattgatgggttgaaaccctaaccctaatatgactgcatttggagatagaggttttaaamagaggtaattaagattaaatgaggtcataaaggtggggtcctaatccaatatgatgagtgcccttataagaagaggaagaggcaccaggaatgtgtgtgcacagaaaaaaaggccatgtgtggacacaagaacatgggcatcttgcaagccaaagagagaggcctctggagaaaccaaccctgctggcactttgattttggacttccaacctccagaactgtgagaaaataaatttctt

SEQ ID NO: 786271 - DNA, 573 bp, Homo sapiens
tttgtttgcattgactttgtatcctgaaactttacagaattcagttatcatacctagaagttttatagatgagtctttagaattttctaggtatacatcatatcatcagtgaatagtgacagtttgacttcttctttagtcattttgatgccctttatttctttctcttgtctgatggctctggctacacttccagtactatgttgaatagaggtggtaaaagtggtcatctttgtcttgttccagttctcagggagaatgctattaacttttccctgttcagtataatgttggttgttagtttgtcatagatggcttttattaccttaaagtatgtcccttcttgctaattttgctgactgttttaatcataaartgatgctgtattttgtcaaatgcttttcctacatctattgagatcattataagatttttgtttttaattctgtttatgagatatatcacatttgttgacttgtgtatgttgaactctccctgcatccctggtatgaaacccacttgatcatagcaaattacctttttactatgctattggatttgattagatagtat

SEQ ID NO: 786272 - DNA, 607 bp, Homo sapiens
aatgtgtattctacagttgttggatggaatgttctgtaagtgtctgttaagtccatttcttctagagtatagtttaagtccattgtttgtttgttgattttctgtcctgatgacctatctagtgctatcagtggagtactgacctcccccactattattgtgttgctgtctctctcatttcttaggtctagaagtaattgttttatgaatttgggagctccattgttaggtgcatagatatttaagattatgatattttcttgttgaactagacattttatcaatatgtaatgtcccttttttcttttttttaacagttgttgctttacagtctgttttatctgacataagaaaaatactcctgctcactattgatgtccatttgcatggaatrtattttttcacccctttaccttaagtttatgtgaatctttatgtgtcaggattgtctcttgaatatagcagatacttgggtggtgacttcttatccattctgtcattctatatcttttaagtggagcatttaggccatttacattaaacattattattgaaatgcattgtgttagttgttacctgaataccttgtcttttttttattgtgttg

SEQ ID NO: 786273 - DNA, 636 bp, Homo sapiens
ttccagctaaactagcaggtgtgagtgatatctcatggtttctatttgtattttcctaaagactagtgatgttgagcagctcttcaggtgcttattgaccatttgcatatcttcatttgaggaatgtctattcaaaacctttctcaattttaaaattcagttatttgtctttttattcttgagttgtaggaattctttatatattctaaatctaagtatcaggtcagacatataattttaaaatwttgcctttctgggttacttttcactttcttgatagtgttctttgaagtgtaatacttttgatagcataaatttatcttctgttttattttgttgctggtgcttttcatgtcataactaggaagccactctataattcaagattatgctattttactcctagattttcttccgtaagttttattttattgaattagtccttacttttaggcatatgatgcattctcacctaatttttttgtatagtgtgaagtattaatccagcctcattcttttgcatgtggatatccaggtgtttcaatataatttgttgaaaaaactattctttcttcattgtcctggtacacttgtcaaaattcagttgaccataaatatgaaggtttatttctggac

SEQ ID NO: 786274 - DNA, 636 bp, Homo sapiens
ttccagctaaactagcaggtgtgagtgatatctcatggtttctatttgtattttcctaaagactagtgatgttgagcagctcttcaggtgcttattgaccatttgcatatcttcatttgaggaatgtctattcaaaacctttctcaattttaaaattcagttatttgtctttttattcttgagttgtaggaattctttatatattctaaatctaagtatcaggtcagacatataattttaaaattttgcctttctgggttacttttcactttcttgatagtgttctttgaagtgtaatacttttgwtagcataaatttatcttctgttttattttgttgctggtgcttttcatgtcataactaggaagccactctataattcaagattatgctattttactcctagattttcttccgtaagttttattttattgaattagtccttacttttaggcatatgatgcattctcacctaatttttttgtatagtgtgaagtattaatccagcctcattcttttgcatgtggatatccaggtgtttcaatataatttgttgaaaaaactattctttcttcattgtcctggtacacttgtcaaaattcagttgaccataaatatgaaggtttatttctggac

SEQ ID NO: 786275 - DNA, 636 bp, Homo sapiens
ttccagctaaactagcaggtgtgagtgatatctcatggtttctatttgtattttcctaaagactagtgatgttgagcagctcttcaggtgcttattgaccatttgcatatcttcatttgaggaatgtctattcaaaacctttctcaattttaaaattcagttatttgtctttttattcttgagttgtaggaattctttatatattctaaatctaagtatcaggtcagacatataattttaaaattttgcctttctgggttacttttcactttcttgatagtgttctttgaagtgtaatacttttgatagcataaatttatcttctgttttattttgttgctggtgcttttsatgtcataactaggaagccactctataattcaagattatgctattttactcctagattttcttccgtaagttttattttattgaattagtccttacttttaggcatatgatgcattctcacctaatttttttgtatagtgtgaagtattaatccagcctcattcttttgcatgtggatatccaggtgtttcaatataatttgttgaaaaaactattctttcttcattgtcctggtacacttgtcaaaattcagttgaccataaatatgaaggtttatttctggac

SEQ ID NO: 786276 - DNA, 636 bp, Homo sapiens
ttccagctaaactagcaggtgtgagtgatatctcatggtttctatttgtattttcctaaagactagtgatgttgagcagctcttcaggtgcttattgaccatttgcatatcttcatttgaggaatgtctattcaaaacctttctcaattttaaaattcagttatttgtctttttattcttgagttgtaggaattctttatatattctaaatctaagtatcaggtcagacatataattttaaaattttgcctttctgggttacttttcactttcttgatagtgttctttgaagtgtaatacttttgatagcataaatttatcttctgttttattttgttgctggtgcttttcatgtcataactaggaagccactctataattcaagattatgctattttactcctagattttcttccgtaasttttattttattgaattagtccttacttttaggcatatgatgcattctcacctaatttttttgtatagtgtgaagtattaatccagcctcattcttttgcatgtggatatccaggtgtttcaatataatttgttgaaaaaactattctttcttcattgtcctggtacacttgtcaaaattcagttgaccataaatatgaaggtttatttctggac

SEQ ID NO: 786277 - DNA, 645 bp, Homo sapiens
atagtaagtgaactagtaagatgttacaatcaagtcaaagcagaatccaaagaacagatacattataaatcaagaatattaaaactgaaggaagagaaagaccctctcatactgttttatattgttttatactcagtatctgttttaaggaaaaaacaacaaggaagtaaaaccaaagacaggcagcccagcgccagggccgaaacaagrcctggggctgcctggcctaaacccagtagttaaaaatcaactcatgacttagaaactgatgttattcatagattccatacattgtatagaagaatattgtgaaactccctgccctgttctgtttctctctgaccaccggtgcatgtagtccctgtcacatacctcttgcttgctcaaatcaatcacgaccctttcatgtgaaatctttagtgttgtgagcccttaaaaggaacagaaattgtgcattcagggagctcggattttgagaccgtagctggcagatgctcccagctgaataaatcccttccttctacaactcagtgtctgagaggttttgtctgcagctcgtcctgctacaaaatgaatgggtggatgtccacaactggggacaactgaacctccaatagatagaatttatatgtctataggtaagaa

SEQ ID NO: 786278 - DNA, 647 bp, Homo sapiens
aaatagcagcataaatatggtattgtctctagaaatatgcagataagtaccagataaaacaactgagcacttaaagaagctgtttctggggattcaggagtaataggttggaagtgggaagtggaactgacatttcttaaaagcactttgtcccatttggtttttttttwaaatacatgtaatacatataaagagcttttttaaaaactttgacagaatgatattgtcttgagaaatatgtagataagtaccacataaaacaactgaaccacatttaaaaagaaaagacgttgactgggcgtggtggctcacacctgtattcccagcagtttgggaggtcaaggcagccagatcacttgaggtcaggaattcaagaccagcctggccaacacggtgaaaccccatctctactaaaagtacaaaaattagccaggcatggtggtgcatgtctataatcccagctacttgggaggctgaggcacgagaatcgctttaacccaggaggttgtagtaagccgagattgtgccactgcactccagcctgggcgacagagtaagactccgtctcaaaataaataaatagactcaaatggttgcctcagtgatgaaagtcaagtaagatgagaacgagagtaaccattgaattt

SEQ ID NO: 786279 - DNA, 647 bp, Homo sapiens
aaatagcagcataaatatggtattgtctctagaaatatgcagataagtaccagataaaacaactgagcacttaaagaagctgtttctggggattcaggagtaataggttggaagtgggaagtggaactgacatttcttaaaagcactttgtcccatttggttttttttttaaatacatgtaatacatataaagagcttttttaaaaactttgacagaatgatattgtcttgagaaatatgtagataagtaccacataaaacaactgaaccacatttaaaaagaaaagacgttgactgggcgtggtggctcacacctgtattcccagcastttgggaggtcaaggcagccagatcacttgaggtcaggaattcaagaccagcctggccaacacggtgaaaccccatctctactaaaagtacaaaaattagccaggcatggtggtgcatgtctataatcccagctacttgggaggctgaggcacgagaatcgctttaacccaggaggttgtagtaagccgagattgtgccactgcactccagcctgggcgacagagtaagactccgtctcaaaataaataaatagactcaaatggttgcctcagtgatgaaagtcaagtaagatgagaacgagagtaaccattgaattt

SEQ ID NO: 786280 - DNA, 606 bp, Homo sapiens
gtttacccaatttgtatttcgtaatcattctgtctcattcaccaatatagtttcattttatacttgctattgttttttcttttacatatgttattattctctaaaattccatgcacttctatgatgtttattattcaagaatatgytctttaaaaataaattaaggttgttaatgaaaagacagaatacataccagaatccagtgataaggaatatcagaagcatctagacctaaataaaatagttcccttgcaggaagtttaatactaagtcctgaataaagacctcggaattttatatactacggaaatttccaagaaggaacctaagtagttaataatcaatttccagtgttgcaattttatttcattattcctgactgaaattatgaatgtattttaaatatatactttcagacaatatctgttttcatttagataaaagattcctatttgatttttaaagaattacaattaatttcacttaataatatatactgagattacaattaaataaaaaacaatatctgattattgaatatattttctcaaatttatagctttgttatacaatatttttcttgggaaaaaatatgtaattttataa

SEQ ID NO: 786281 - DNA, 482 bp, Homo sapiens
gaattatgtaatagctggtaaaataccaatccataaggggaaaacagtgtagggaaaatggctgtgctttagtcaggagtaagctgaggtggtgttgcaaaactgaatggccttagacatactaactgctgcccaaggaggcacctgtatccttttaggaacacgatgttgtacctttatccctgacaattggcagaacataacagcagttctgcaaggggtctcatgggaaattaagttggttgagagccttattgatggccccctgcagagacggtgggcatccctggtcwctggcctatgctgggccctaaaagtcataactagtatagctgggatcctagtagtgagctgtcgctctctgtattgttgtgggttatggatccagggctctgccctatgggcatgtatccctacctgaaagacttcccttggcctagggggtagagtgtaaggtaaatcgttgtgctttagtcaggagt

SEQ ID NO: 786282 - DNA, 542 bp, Homo sapiens
tataaatctatatgggtaaggactgtaaagccagagacaaatataaaaacaaaaatgattcgatatgtagtcattttgttattgtgagtacttttttctttcctcaatttacagcactttgagtatttctaaaagcttttttaaaaaaaacagcgaggcggttccaagatggccaaataggaacagctccagtctacagctcccaatgtgagcgactcagaagacgggtgatttctgtatttccaactgaggtaccaggttcatctcactggggttcgtcggacagtgggggcaggacagtgggtgcagcccaccgagcatgagcygaagcagggcaaggcatcgcctcacccaggagatgcaaggggtcagggaatttccttttctagccaagggaaggggtgacagatggcacctggaaaattgggtcactcccaccctaatactgcacttttccaacggtcttagcaaacagcacacaaggagattatatccaacgcctggctcagagggtcccacgcccacgaaaccttgctcattgc

SEQ ID NO: 786283 - DNA, 446 bp, Homo sapiens
cccctccaaaggaatgcagctcctcaccagcaagggaacaaagctggatggagaaggactttgacaagttgagagaagaaggcttcagacgatcaaacatctccgaggtaaaggaggaagtttgaacccatcgcaaagaagctaaaaaccttgaaaaaagattagacgaatggctaactagaataaccagtgtagagaagtccttaaatgacctgatggagctgaaaaccacggcacaagaactacgtgaygcatgcacaagcttcagtagccaattcgatcaactggaagaaagggtatcagtgattgaaggtcaaatcaatgaaatgaagtcagaagagaagtttagagaaaaaagaatagaaagaaatgaacaaagcctccaagaaatatgggactgtgtgaaaagaccaaatctgcatctgattggtgtacctgaaagtgac

SEQ ID NO: 786284 - DNA, 602 bp, Homo sapiens
actcaggtggctgaggtgggaggacggcttgagccgaggcttaggtgttgggagagttggggtgggcagaggttgcagtgagccgaaatcgccccattggcaaaaaaaaaaaaaaaaaaaaagaagaagaaagaaaaaggaaacaaatcaaatagaaaaatatttaacgagtgattttaatrcacaataattcaaccaatttcacagaatcaacaccgtaccagagtgaccaaccatcatggtttgctcaagactgaggttttttttttttgattagggactttgagtgctaaaattgggacagtccttagcaaaccaagatgattaatcatttattaaaatagaaacccataaatatttcagtacatatatgtaaaagaactcttgttttcacacaaatcaccataccattattacagcccaaattaacaataattatttaatatccataggattatatccactgaatagcatcaacatccagtggctgttcaaatttctgtgtcataaatgttgtatttttataagttgtttgaatcagaatctgaataagataaatatattgcaattggtgaatatgtcctttcaatcaataggttccc

SEQ ID NO: 786285 - DNA, 602 bp, Homo sapiens
actcaggtggctgaggtgggaggacggcttgagccgaggcttaggtgttgggagagttggggtgggcagaggttgcagtgagccgaaatcgccccattggcaaaaaaaaaaaaaaaaaaaaagaagaagaaagaaaaaggaaacaaatcaaatagaaaaatatttaacgagtgattttaatgcayaataattcaaccaatttcacagaatcaacaccgtaccagagtgaccaaccatcatggtttgctcaagactgaggttttttttttttgattagggactttgagtgctaaaattgggacagtccttagcaaaccaagatgattaatcatttattaaaatagaaacccataaatatttcagtacatatatgtaaaagaactcttgttttcacacaaatcaccataccattattacagcccaaattaacaataattatttaatatccataggattatatccactgaatagcatcaacatccagtggctgttcaaatttctgtgtcataaatgttgtatttttataagttgtttgaatcagaatctgaataagataaatatattgcaattggtgaatatgtcctttcaatcaataggttccc

SEQ ID NO: 786286 - DNA, 501 bp, Homo sapiens
acaaatttatctatcctgttctaattcttgtttttcctctagcaatattgcatcctaccactatgaagttttatcgtgatcttctgtttttagttttaaaattgcatttctgtatattatttcttaaaataacacattttcatttatattttaagtcccagaaggaaacattcttttctactgtttttgtttgtttgctttgagacagggttgccctgtctcattctagttgtccaggctggagtgtagtgacacaatcacagctcactgcagcgtccacctcccagcttaggtgatcctcccaactcagcccagagtagctgggamcacaggcatgcgccaccacacttgtagagacagggtctccctatgttgcccaggctactctcaaactcctggactcaagtgatcctcccatcccagcctcccaaagtgctaggattacaggtgtgaggcaccgcgcccggcccttttctactttttaatcactccctactacta

SEQ ID NO: 786287 - DNA, 594 bp, Homo sapiens
tcagcccaaatctccttaagctgataagcaacttcagcaaactctcaggatacaaaatcaatgtgcaaaaatcacaagcattcctatacactaataacagagagccatatcatgagcaaactcccattcacaattgctacaaagaaaacaaaatacctaggaatacaacttacaagggatgtgaagaacctcttcaaggagaactacaaaccactgctcaaggaaataagagaggacagaaacaaatggaaaaacattccatactcatggatacaaagaatcagtatcatgaacatggccatactgcccaaagtaatttatagattcaatgctatccccatcaagctaccatggactttyttcacagaattcagaaaaaactgctttaaatttcatatggaaccaaaaaggagaccgcatagccaagacaatcctaagcaaaaagaacaaagatggaggcatcacactgtctgacttcaaactatactacaaggctatagtaaccaaaacagcatggtactggtaacaaaacagatatatagacccatggaacagaacagaggcttcagaaataacaccacacatctacaacta

SEQ ID NO: 786288 - DNA, 585 bp, Homo sapiens
tattcttagatgatttctaaatgcaatagtataaatgttagctttctataaattcaagtcatcatgtaataaagtggtaattttctaatttaccaagtagcttgggcacctttttgctttattaaagctaatcgttgtgctttccaggataaggacaatttggaggttactttccctcctagttacataaattaagatttaaaaaactcttaaagakagcttttaatatcaaatttaaaagtataaacactcaaattattactattatacacagctattcaaaacgcagaaataatgagtacctctgaaatagctaagcattgtatagctcattattacaagcctacaggaaaagctcaatattagataccttaaattgtttacaagaaatccttgatgttaagatccgctaatgggtcctttgctggaggtttcttgggactctgactggcaggtgtagggcttggagaaagctaatgggaaaaagccagccccaaagagcaggaatagaaagcagagagagaatgagacatggggggaagagggggcagggggagagagggagagggggagagagagagagag

SEQ ID NO: 786289 - DNA, 609 bp, Homo sapiens
tccaaaatatgaatcttatctgaatctggttgtaattctcatgggattcttgaggtgatgcttttctggcttgaaacctctgtggtcagtgatgcctttgccctagctttgctcaggtccactaggctcattccacccactcagcctagctggctgcactcagctcgcagtaccagcctaaatcccatccctgccaaaggtgacccaggtgcaaagcactgagggatgtgggaacaagcatggggtccagtcactgcacacagctaggcaccttggctgcggtggggtgggcagctccaggtgctggcacaggcgccagctccttgctggctgctcctggaataggagtactgcaagcagcttccacagctggcaccagggaacttggtggcacccagaagcttagaaacaccaggaactgcatagccccaaagagagtgtcaagtcctggctcagggagctctasgtctggctcttcaaaaggctacagcccttctctctttttctcctctcttcttcttgtcacccacacgtggcaagcaagaggcacatttcagccctgtttgtgttacatcacttttgtccctgtcatttggtaggtcctgagtt

SEQ ID NO: 786290 - DNA, 657 bp, Homo sapiens
acaaaatcccatccaagggtcagcagcctcaaaggtcgatactagacaaattcatgaggatgagaaagaatcaatgaaaaaatgctgaaaacccaaaaggccagagtgcctcttctcttccaaatgattgcagtgcctctccagtaagggcacagaactggacagaggatgagatggacaaattgacagaagttggcttcagaaggtggctaataacaaactctgctgagctaaaggagcatgttctaacccaatgcaaagaaggtaagaacatgataaaaatatacaggtgctgctaactggaataaccaatttagacggaaacataaatgacctgacggagctcacagcatgagaagtttgtgaagcatacgcaagtatcaatagccaaatcaacaagcagaagaaaggatatcaaagtttgaagactctcttgctgaaataaggcatgcagacaagattagagaaaaakaatgaaaaggaatgaacaaaacctccgagaaatatgggactatgtaaaaagatcaaacctacgattgattggagtatctgaaaatgataggaagattggaaccaagttggaaaacacacttcaggatatcatccaggagaacttccccaacctagcaagacaggccaacattcaaattcaggaaa

SEQ ID NO: 786291 - DNA, 582 bp, Homo sapiens
atgagcttagtgtggaattagaaactttattcattggtgtaaccaaaccacctagtgagttaccctaagaattgacacaaatctcatattttaggagattatattggttctgcctctggcatgctggtagactagggccatctcaacttattrttttccagaggttctcctccagacaagatttgcagtaagcaaagagttatactctacctgtctctaaattttctttttcttttctctgtatccttgtcattggccacacacacacagatttgtgtggcttttattgtagaactaaacttagcatagtgttctgttgtttacatgaagtgtgagttttcttttgtttctgctgttttccaactaaagatttttttctaagtaaatattttcaacaattgatttgaaaaaatttgtcaggattatttcagcttttcacatttattatctgaaattcctatttcctattaatgtaggaggtggatgcagactttattaatatgaggaaaagaaatgctcagttgaaggacatttccctattttctataaaacaatggttaaattcattttctattttgttat

SEQ ID NO: 786292 - DNA, 619 bp, Homo sapiens
cactcagctatttttctgacactgtgaatgtatatgaaaaagatagtaactaatatttggagggtgagttactgttgttgttgttgatgatgattgtgattattcaatcttatatttgaagagctctttattatctttcaagtactttcacacatattatagaccaagggaagacattaaaagaggtttacagctatgttacattgaycagatatttgaaagttgtagttcttcaccagtgaagactttggtcatatgccttttagaaacagaaatataacttaccaacagattttatattcctaacaattcatcataatatgcaaatatatatagacatatgtgtgtatgtacatattttgcgtgtgtaaatatgtatatgtgaatatgtaagtgtatatgtgtgtacttatacatacgtgtgtgtgtgtgtgtgtgtgtgtgtaatcagtgagaacaactaaggacagtgaaagtaaattagctgggaaaagtggtatttaagagagcaagggtttaaaatatacacttcttaaatttcacccaggaccatttacttgtccattctttctacaatcaacataaaatttttgagccttcgtcatgcatcaggcactgt

SEQ ID NO: 786293 - DNA, 619 bp, Homo sapiens
cactcagctatttttctgacactgtgaatgtatatgaaaaagatagtaactaatatttggagggtgagttactgttgttgttgttgatgatgattgtgattattcaatcttatatttgaagagctctttattatctttcaagtactttcacacatattatagaccaagggaagacattaaaagaggtttacagctatgttacattgatcagatatttgaaagttgtagttcttcaccagtgaagactttggtcatatgccttttagaaacagaaatataacttaccaacagattttrtattcctaacaattcatcataatatgcaaatatatatagacatatgtgtgtatgtacatattttgcgtgtgtaaatatgtatatgtgaatatgtaagtgtatatgtgtgtacttatacatacgtgtgtgtgtgtgtgtgtgtgtgtgtaatcagtgagaacaactaaggacagtgaaagtaaattagctgggaaaagtggtatttaagagagcaagggtttaaaatatacacttcttaaatttcacccaggaccatttacttgtccattctttctacaatcaacataaaatttttgagccttcgtcatgcatcaggcactgt

SEQ ID NO: 786294 - DNA, 619 bp, Homo sapiens
cactcagctatttttctgacactgtgaatgtatatgaaaaagatagtaactaatatttggagggtgagttactgttgttgttgttgatgatgattgtgattattcaatcttatatttgaagagctctttattatctttcaagtactttcacacatattatagaccaagggaagacattaaaagaggtttacagctatgttacattgatcagatatttgaaagttgtagttcttcaccagtgaagactttggtcatatgccttttagaaacagaaatataacttaccaacagattttatattcctaacaattcatcataatatgcaaatatatatagacatatgtgtgtatgtacatattttgcrtgtgtaaatatgtatatgtgaatatgtaagtgtatatgtgtgtacttatacatacgtgtgtgtgtgtgtgtgtgtgtgtgtaatcagtgagaacaactaaggacagtgaaagtaaattagctgggaaaagtggtatttaagagagcaagggtttaaaatatacacttcttaaatttcacccaggaccatttacttgtccattctttctacaatcaacataaaatttttgagccttcgtcatgcatcaggcactgt

SEQ ID NO: 786295 - DNA, 619 bp, Homo sapiens
cactcagctatttttctgacactgtgaatgtatatgaaaaagatagtaactaatatttggagggtgagttactgttgttgttgttgatgatgattgtgattattcaatcttatatttgaagagctctttattatctttcaagtactttcacacatattatagaccaagggaagacattaaaagaggtttacagctatgttacattgatcagatatttgaaagttgtagttcttcaccagtgaagactttggtcatatgccttttagaaacagaaatataacttaccaacagattttatattcctaacaattcatcataatatgcaaatatatatagacatatgtgtgtatgtacatattttgcgtgtgtaaatatgtatatgtgaatatgtaagtgtatatgtgygtacttatacatacgtgtgtgtgtgtgtgtgtgtgtgtgtaatcagtgagaacaactaaggacagtgaaagtaaattagctgggaaaagtggtatttaagagagcaagggtttaaaatatacacttcttaaatttcacccaggaccatttacttgtccattctttctacaatcaacataaaatttttgagccttcgtcatgcatcaggcactgt

SEQ ID NO: 786296 - DNA, 626 bp, Homo sapiens
aatttttgtataaggtgtaaggaagggatccaatttcagctttctacatatggctagccagttttcccagcaccatttattaaatagggaatcctttccccattgcttgtttctgtcaggtttgtcaaagatcagatggttgtagatgtgtggtattatttctgagggctctgttctgttccattggtctatatctctgttttggtacaagtaccatgctgttttggttactgtwgccttgtaatatcgtttgaagtcaggtagcatgatgcctccagctttgttcttttggcttaggattgtcttggaaatgcaggctcttttttggttccacgtgaactttaaagaagttttttccaattctgtgaagaaagtccttggtagcttgatggggatggcattgaatctataacttaccttgggcagtatggccattttcacgatattgattcttcctatccatgagcatggaatgttcttccatttgtttgtgtcctctttgatttccttgagcagtggggtttgtagttctccttgaagaggtccttcacatcccttgtaagttggattcctaggtattttattctctttgaagcaattgtgaatgggagttcactcatgatttg

SEQ ID NO: 786297 - DNA, 626 bp, Homo sapiens
aatttttgtataaggtgtaaggaagggatccaatttcagctttctacatatggctagccagttttcccagcaccatttattaaatagggaatcctttccccattgcttgtttctgtcaggtttgtcaaagatcagatggttgtagatgtgtggtattatttctgagggctctgttctgttccattggtctatatctctgttttggtacaagtaccatgctgttttggttactgttgccttgtaatatmgtttgaagtcaggtagcatgatgcctccagctttgttcttttggcttaggattgtcttggaaatgcaggctcttttttggttccacgtgaactttaaagaagttttttccaattctgtgaagaaagtccttggtagcttgatggggatggcattgaatctataacttaccttgggcagtatggccattttcacgatattgattcttcctatccatgagcatggaatgttcttccatttgtttgtgtcctctttgatttccttgagcagtggggtttgtagttctccttgaagaggtccttcacatcccttgtaagttggattcctaggtattttattctctttgaagcaattgtgaatgggagttcactcatgatttg

SEQ ID NO: 786298 - DNA, 626 bp, Homo sapiens
aatttttgtataaggtgtaaggaagggatccaatttcagctttctacatatggctagccagttttcccagcaccatttattaaatagggaatcctttccccattgcttgtttctgtcaggtttgtcaaagatcagatggttgtagatgtgtggtattatttctgagggctctgttctgttccattggtctatatctctgttttggtacaagtaccatgctgttttggttactgttgccttgtaatatcgtttgaagycaggtagcatgatgcctccagctttgttcttttggcttaggattgtcttggaaatgcaggctcttttttggttccacgtgaactttaaagaagttttttccaattctgtgaagaaagtccttggtagcttgatggggatggcattgaatctataacttaccttgggcagtatggccattttcacgatattgattcttcctatccatgagcatggaatgttcttccatttgtttgtgtcctctttgatttccttgagcagtggggtttgtagttctccttgaagaggtccttcacatcccttgtaagttggattcctaggtattttattctctttgaagcaattgtgaatgggagttcactcatgatttg

SEQ ID NO: 786299 - DNA, 626 bp, Homo sapiens
aatttttgtataaggtgtaaggaagggatccaatttcagctttctacatatggctagccagttttcccagcaccatttattaaatagggaatcctttccccattgcttgtttctgtcaggtttgtcaaagatcagatggttgtagatgtgtggtattatttctgagggctctgttctgttccattggtctatatctctgttttggtacaagtaccatgctgttttggttactgttgccttgtaatatcgtttgaagtcaggtagcatgatgcctccagctttgttcttttggcttaggattgtcttggaaatgcaggctsttttttggttccacgtgaactttaaagaagttttttccaattctgtgaagaaagtccttggtagcttgatggggatggcattgaatctataacttaccttgggcagtatggccattttcacgatattgattcttcctatccatgagcatggaatgttcttccatttgtttgtgtcctctttgatttccttgagcagtggggtttgtagttctccttgaagaggtccttcacatcccttgtaagttggattcctaggtattttattctctttgaagcaattgtgaatgggagttcactcatgatttg

SEQ ID NO: 786300 - DNA, 594 bp, Homo sapiens
aactacctctcaacctcaaagtcaaattcactgtatcaggccaaactgaaggaccagctaaaggttggcccttctgataggaaatgagagtgccagaattccaggtcaaatagaaggcacagaacagaggttattagggtgaaagtggataacattcatgctcagagccaacctggacaagaatgtcaaggtaasacattcttggaaaggaaagaatatcacatgcatccattctggatttagggtttggggtatagcaaggaaaggggatgggaaaattatcaggcagttgaacagatgggcagatcaatagaacaactggagtttgattgttgacctgagaacaggaactctaccatctgccatggctttaaatatccttcctggtgtaagttgataagaatatggaatgggcagctcctcagagggagacaggattttattagttgtcaggcactatcagggaaggagctaacgtttgtaaggccatgcgccttagatacgtaagctcactaaatcttcattataattccagaagggtaaatattatgcctccccaccatcgccacttttcttgagccaggaaatggaggc

SEQ ID NO: 786301 - DNA, 597 bp, Homo sapiens
acaatataccacattataacaaaattccacacattgtacgtagatatagttttggttctgagctggggaacacaatttccttgaatgttatagtttttatattctattttagtgctataatttttccaagcaataaataatgtacttctactgaattcaaaattacagtaaacgtgctctctgcagataatttaacacctgtgtatttctatgccctacaactgcagactgcgtatctcagaggcttaaggatctgaattatattgcaaaaataatgagctgaagactgattgtaaatgtatatttattaacatagccactaattttttcgactgcagagaakaaatggatcctccagtgtgagaccctcagtaactacagcaatatgttggatttagtaggtttcgatttttcaatgattaaaactgaaatcacagctaatattctttttcgggggattaagcagggagagtgtatcagcaccagcccaatgcgagggcactggcgaggtgtaccttggatgtatggctccagcgctggggagggctgaatagagagtaaagctgagccagggccctgacaaagaaccacacatac

SEQ ID NO: 786302 - DNA, 504 bp, Homo sapiens
gtgtttgcagatgtagtcaagatgagattattagggtgggccctagtgcaatataaccggtgtccttataaaaaggggaaatttggacatatatatatagatgtgcgtagaaggaagaatatgtgaacagatacaggaataacaccatgtgaagacagagtactggcgaggtscagtggctcacgcctgtaataccagcacattggaaggtcaaggtgggtgggtcacctgaggtcaggagttcacaaccagcatgagtaacatggtgaaaccccgtctccactaaatacaaaaaatattagccaggcatggtggcacatgttgtaatccaagctacttggaaggctgagacaggagaattgcttgtacctgggaggcagaggttgtggtgagccaagattgcaccattgcacaacagcctgtgcatcaagagtgaaactccgtctcaaaacaaaacaaaaagacagagtactggagtgatgcatctacaagccaaggaatgcc

SEQ ID NO: 786303 - DNA, 491 bp, Homo sapiens
atgcatctacaagccaaggaatgccaaagattgccagcaaacgactagaagcgagagaaaggccaggaaagattttcctccaggtttcagagacagcatggctctgtggacactttgattgaacttccagccataagaattaatgacacaataaatttctgttgttttaagttacccagtttacagtacttggttatggcagcccaaagaaatgaatacaccacctggcataggatgtactctttttgttgttcaatttctgcctgcctctactagactaattaccatgaggaaagagacaaagtacattttcttcacttttgtgccycaagtacttagaacagtgcccagcactcaatacatatttgccaagagaatgtagggatattttatttttcatttttttttaaattgatacataatatttgtatgtatttgtagggtacatgtgatattttgttatatgcatagaatgtgtaaccatcaagtca

SEQ ID NO: 786304 - DNA, 550 bp, Homo sapiens
taattatgattttataccaataaaatagttgaaagaaaacagtctaagctaactcagtatgtaggcttgcataattttttaattaagtcctattcacgttttaacccgaatctccataaaagattaggcattcaattacatatttattatttcctagttactttcatsagtctgagatatgatctgccatttaagagttcctatcactttgaattatatgtttataaaacagaagagtcaaaaaatgtaacttaaataaatgtgtgtgtttaaaaagaaattacccagctcacaatttttcaacttataaataagcagtcctgctctacccttagttgcttccctgtcactctccatgtgatctatagtagaaatctaggcctggcagatgacaatgagtagggtatggggagcattcctactcaagcagcaaggaagagtatcagaacttcctaggaaagggaatgctcttttgcaaaatatgaatggttactgtggtaggcagaattctaaagagagatcccccaagatttccttcctttggttattt

SEQ ID NO: 786305 - DNA, 578 bp, Homo sapiens
ctacaatttggatttgtttgattgtttcaccatgattagaatcagactaaatattgttggcaagaatattatacagatagtattgtgtacttcccactagatcacatgaggaagcacataatttgtttttcctattactgataatggtaggtttgaccacttgsttaaaactggtgttgccagacctctccactataagtgtaactttgaccctgtaagtatcaagtaatctctgggtgactctttcagaacatgtgaatgccatgttatccaataacttttcacccaatgattttagcttccatgatgaacattgctgaaatgaattattacattggtaatttcaaaattgtaattttctatgtctattctcctttatattaattagtattcttctataaagaagagcttcctccttctcctctttttctcttttatgcaatatttctatgggcttattgaatccctttttccttatttgaatttctattaccattatgtcattattattttaacactccatgtattcctaatttggcctgttgatgccccattcaagcaggatcctgtgtcctttt

SEQ ID NO: 786306 - DNA, 604 bp, Homo sapiens
attacaaccatgcatgctgaatcttcagggattataacaagcagggaagggagatgtttaggagtattttggagccttcagtatagatcaatgcttagagcctcagaccttgaatccagactgcctagtttcctatcctaactacagtgttgacttgatgtgtgaatctgggcaagtaacaaattctgtaattggttttattctctaaaacatacaaataataatgactttgcaaagtcataatgaagtcacagtaaggatcataatgttactgagtaaaaaattacaaacaaagcytgagacacagtagggacacagtaagtgcaatattacttttattttgtcatttttggctacccacatccaagactctattttgaaggaattttaaaataagagccttgtttcctactgttgagtctcacattggggcagatatttccaatccttgtcctcagccatttgccaggttaaagtctatgacttcggcttgatcagttggattctcatatctagaacttagagaatttcgaaggcagttatgcagaatgcatgggaattgaaaacttggggcatgtttgtgacagcagtagtggcattttta

SEQ ID NO: 786307 - DNA, 620 bp, Homo sapiens
acagacaaacagagagccaaatcatgagtgaaatctctttcacagttactacaaagagaataaaatacctaggaatccaacttacaagggacgtgaaggacctcttcaagaactacaaaccactgtttgatgaaataaaagaggacacaaacaaatggaagaacattccatgctcatggataggaagactcaatattgtgaaaatagccatactgcccaaagtaatttatagattcaaggctatccctatcaagctaccactgactttctttacagaattggaaaaaactactttaaagttcatamggaaccaaaaaagagcccacatagacaagacagtcctaagccaaaagaacaaagctgaaggcatcatgctatgtgactttaaactatactacaaggctacagtaaccaaaacagcatggtactggtaccaaaacaaatatatagaaccatggaacagaacagagccctcagaaataacaccacacacctacaaccatctgggctttgagaaacctgagaaaaacaagcactggggaaaggattctctatttaataaatggtgttgggaaaactggctagctatatgtaggaagctaaaactggatccctttctt

SEQ ID NO: 786308 - DNA, 543 bp, Homo sapiens
ggagtcaaacatttgtttgcagtttttatctttacctagaaggaatatggcattataatactcrttaggtcggctgttttttcccccactttttattgtgattatttatttgaaatatagtttgttttttgtttctatcctgtttttgggctttcccccacttcttaattatattaattatactttattttaatgagtatgtaagacattaatataattcacaagctgaaactatacaaagaggaatacccagagaaatatcactcctcccaaccattttttcttacaccattgtcatcctccaaccagcccaccccattctcagccacccatggtatactagtgtcaatactttctagtatactctatgttgcatcaacattttgcaaaaatgtgaagccatatattttttgtatttatcattttttaatacaaaaagtagaatactataaaaatgttttgctcttcgctgtctttcaattagcaatatatactgaagatacgtccatatcagctcataaatatccttattattcattttaa

SEQ ID NO: 786309 - DNA, 519 bp, Homo sapiens
aaaatgtttttaagtgtttttatctcttctggtgccagtttacacatgatgggtagtccataggtaatatatctaaaaagcaaaataagacaataatatgtgattatttatgatagcaaagcagccatacctaggatatttattaatgatgctagtctaaatattgataagcatgtgaaatattctaattatattttaatagtaataagatggccaacgttatttccaattccatttgttttcatatgtaagccattgctttcayatcggagataccagtctttcagggactgtgccctgggaagtgggcttttactcacaacagctgacacatatcctgaaggaagggggatttcttgattgtaaaccagaaaagagaattaacaaaaagtgtaatggcttaacactgaatgcctgaatatttgacttccaattatgccttccaaatttaaaaactctgtataattgagtttttttaaccagctttaaaacaaaaacaagaatacaatcctctccata

SEQ ID NO: 786310 - DNA, 657 bp, Homo sapiens
gcatcacccccagtatctgcggtgacacctgtgaaggcccagctgtttcctcggtagttcccatacttgggaaagaccacagggttgtttcaggtagccttatggagagggctggcattttggtgaattcaccattggtctagtttctggatctgtaatactgaggaccagcttcttatgaggataaatctcagtggaatttatttatgttatccaaatgcacaggaggattacttataatttagaattcagttattaatttttaaagcctcaaattctttgtggaatagttcagaatataaataatggaaggctgggtggcaaygtggagagaacatatggtctagatttagacaacagagtttctgagaacttcatttgggtagataaccttgagcaacttcttaacagctctaacctggaattttccatgagaaatgaagataatattatgtcatcaggttagtttgactctggaatactcagctcaagggcaagggatactggctggggaaaacatcacaggctgctaaggctgactccagcaattatagctgcgtgccccaggaagcagggccccagagaagtagctgtctaggtactcatcaggctagggcattaccaggtgtctcaatttggtggttggatcattgcagt

SEQ ID NO: 786311 - DNA, 657 bp, Homo sapiens
gcatcacccccagtatctgcggtgacacctgtgaaggcccagctgtttcctcggtagttcccatacttgggaaagaccacagggttgtttcaggtagccttatggagagggctggcattttggtgaattcaccattggtctagtttctggatctgtaatactgaggaccagcttcttatgaggataaatctcagtggaatttatttatgttatccaaatgcacaggaggattacttataatttagaattcagttattaatttttaaagcctcaaattctttgtggaatagttcagaatataaataatggaaggctgggtggcaatktggagagaacatatggtctagatttagacaacagagtttctgagaacttcatttgggtagataaccttgagcaacttcttaacagctctaacctggaattttccatgagaaatgaagataatattatgtcatcaggttagtttgactctggaatactcagctcaagggcaagggatactggctggggaaaacatcacaggctgctaaggctgactccagcaattatagctgcgtgccccaggaagcagggccccagagaagtagctgtctaggtactcatcaggctagggcattaccaggtgtctcaatttggtggttggatcattgcagt

SEQ ID NO: 786312 - DNA, 657 bp, Homo sapiens
gcatcacccccagtatctgcggtgacacctgtgaaggcccagctgtttcctcggtagttcccatacttgggaaagaccacagggttgtttcaggtagccttatggagagggctggcattttggtgaattcaccattggtctagtttctggatctgtaatactgaggaccagcttcttatgaggataaatctcagtggaatttatttatgttatccaaatgcacaggaggattacttataatttagaattcagttattaatttttaaagcctcaaattctttgtggaatagttcagaatataaataatggaaggctgggtggcaatgtggagagaacatatggtctagatttagacaamagagtttctgagaacttcatttgggtagataaccttgagcaacttcttaacagctctaacctggaattttccatgagaaatgaagataatattatgtcatcaggttagtttgactctggaatactcagctcaagggcaagggatactggctggggaaaacatcacaggctgctaaggctgactccagcaattatagctgcgtgccccaggaagcagggccccagagaagtagctgtctaggtactcatcaggctagggcattaccaggtgtctcaatttggtggttggatcattgcagt

SEQ ID NO: 786313 - DNA, 649 bp, Homo sapiens
tttagtttggaacatatgaccaaataaaccagttgttatgacatcatggataagttcttaaattccccaaacttgctgcgagtgacaaaattacagtgcagttctggggtttcaggacgatacaggaagatcatgtcttcaaacaggattatctagtcaaattcttgccaaatcaccctgacaaattacctcaatggarttcctttctaatggagacaaatggactcttcttccaaatagtttctgaccaatgtgcttcaatacatacttgataacccaagatgcactttctgctttaataccctgtcatcactagcagaaaatgaatcaagaagttcccaattagttccaattttggttgacttataagagagaggtacatgccagctattacatccccattcttgacaggagagataggtgtaaatgaaaaatatatctctcaaaatccactggtttcaagcatacattgtacattaataagtgttctttccttaatcagcaaattacaatttattattagttcatatctcctgactgatctttatcagttgaggggctctgactcagcaagctttgaagaggagagatacactttaaggtgccaagtgctgttgcagctaatttgttaatatttatggcctcaatc

SEQ ID NO: 786314 - DNA, 691 bp, Homo sapiens
agcactatggatcctttagtggattttaaaatttgcattaattttatgaatgatatctttttagaaaatatatctgaatacagtacttgtatttttaaaagtttggactaaaaatgcatgtatattttttctagtttacaatcttctttcctaagtcatctacaataataggcaattgatttgtatcttataggattgagaaatgatttagttttgtaataatataagaatggatgaaaatgagcatcattttatttccttatagctcacaggtagagtatgtttctaagatattaaaaaacgttttgaaagagatgtgtgcctcagaagaaataaaaggaatatttttcacagatactaaaaggtacagtaaacatctataaaacartaactatgaaccaatctacacactgtgccaagctgcctctctctgtaacctttaaagagtcctccaagagaaagccccgctataaaaatgattggatttgatgccaccgccatagtctggaatgttcttcaattttcatacatagatgcagaaatagtggatttggagaaatcactaataatgaatgaaaggaggctttcttctgaagcatcaaacttcacgacttccttaactgcttatacttttaaatcatttaaaacacaaattactccggataaaagtaatcatctacgtgtaattcct

SEQ ID NO: 786315 - DNA, 584 bp, Homo sapiens
ggatcccccatgcttgagccactttgttactggaaagcagtcccaagccagacgccaagagaaggttcttgaaactttcacaagaaagaattcagtgtgagtccataaagcaaagtgaaagatagttaattaagaaaataagagaataaaagaatgggtacttcataggcagagcrgtggcatgggctgctcgactgaatatacttctagttatttcttgattatatgctaaacaaggggtggattatttatgagttttctgggaaaggagcagagattttccagaactgagagctcctcctctctttagactatataaggtaacttccagacattgtcatggtttttgtaaactgttatggtgctggtgatagtgtcttttagcataatgcattataattagcgtataaggagcgatgaggacaaccagagatcacttgcatcgccatcttggttttggtgggttttgaccggttgctataccacatcctgttttatcagcaaagtctttgtgacctgtaccttgtactgacttcccatctcatcctgtgactaagaatgtctagcctcctaggaatacagcc

SEQ ID NO: 786316 - DNA, 637 bp, Homo sapiens
aaagtttaagggtaattcctctgcaggtgctttgccttcatgttggaactctgccataaacagtggatgtggccttctgggtttgatccaatcagtctcaaaatccacaaagcttgtggctgtacacatatgcttttccacaaaagaaaatttcctacatttttcctttttcaccyctcccagaggtacaaagcggaatagaccaaatgggtgagtgattacataaggcagttcttgcctattcagtggggagaaacaagcctaagtggttatgcttgtttaaacaagtttcatgtttttaataatctatctgccatatttctggcccaaattgtaagatgtcttaaaataatttataaattgtttttgctgtgaatattcatcattttttaaatattgagaattttattaccacaaagaatttttctttccttttaattgatttccgctcccttctctactcaaaactgctactaaataggaaaatggtctgacattcagctaactgtgatgccagccttctctggaatgttgtgttgtgttgggctgtgacttccatggaattcaattcctgtttaccaagggctcccacttattttattttaatatagtatgttgaaaagagtggaaaaaagaa

SEQ ID NO: 786317 - DNA, 678 bp, Homo sapiens
gggcaggtccataactaaagtctgacctttcatctttgtcaaagtgctcctgaaatgggtgacattagtgctacaagtaaaggaacattttgttggagaagtaaaaatgatcaagaggaaggaaatcaggcctttgaaggaaggtgcaaagagcagggacagttgtcttacactagagaagggtgaaggtgatgaatattctcctcattgacaagaaagaatcttgcataggagtggaagtggatctttttcctgttcactgaggacagaagacacaggaaggaattcatcagaatggttgataagacatgaaaatcttasagaagggatatttggaaagcagatgttgtacatttttctaataggggagaatcaagcagacttgtttctaacttggtgaaaattgtgtaccattaggaggtcaaatttcgttagaatcttctttactcttttaaagacagaatatggtttctgaatataatttctaaatggggaacattctgggtttttttcatgggtcttttcctgctgagatatgaattcattttctttcctatgctctccatagaacatttcttactcgattcctcttcaaccttttcttttttaatctggagcattgaaagaactcttgttctatttccacatattgaagacttcattgtaaggtaaagcgag

SEQ ID NO: 786318 - DNA, 541 bp, Homo sapiens
ccaatctgaacagaaaaccaccatactcaaaaagaatcagagatttttcaaaacatattgacagagataaaaacatagttacctgggcaattatgtctataatttctgaataactatggcatcttcccacgcaggatcgagccaaaaagtcttccacaagccgcgttccaatgccgtaacccctgtggatgacggaaagagtgtggtctgaaaattytaagaaattagtgaagtctgtcagtttttaagaagcgatttgtgtgtttagcacttgtgcaagtgaatcacaaatcaaaccaaatatgacgagtcaaatggcttttggctgtgggcttcttattcgccccacagaccacaaagcagagagcaacacactgaggaaatattaactggtctcctgcaagcagaagagtctgcctagaatcaagacttgcccaaagttgacaatataaattaaaattaaggaaggctggtttctgtagcctaatgtttctcagtggcagctaattttctcatcattagctattgatggaaatcaaat

SEQ ID NO: 786319 - DNA, 525 bp, Homo sapiens
tttcacaagcctataaagatttggaaggaaacaattcctcttatttccttaggcaagaggagtcctagagaacagacttggtgcatttaaacattgaagggttggccaggcgcggtgtctcacacctgtaatcgcagcactttgggaggctgaggcaggcggatcacgaggtcaggagatcgagaccatcctrgctaacatggtgaaaccccatctctactaaaaatacaaaaaaaattagccaggcatggtggcaggcacctgtagtcccagctactcaggaggctgaggcagaagaatggcgtgaacccgagaggcagagcttgcagtgagccgagatcacgccacctcacaccagcctgggcgacagagtgagactctgtctcaaaaaaaaaaaagaaaaaaaaacattgaagggttattgacctaaattccatttacctctaaaatgcttataggcaaagctgttccataagcaacttcccttgttacaataacagttgtgggtaggcaatagagaacatc

SEQ ID NO: 786320 - DNA, 531 bp, Homo sapiens
aggtgagcccactgctgcccctacccccaggtgctgggtcacagggagatgggagttttatctataagtctctgtctggggctgctgcctttctttcagagatgccctgcccagagaggaggaatctagagatgcagtttggctacagyggctttgctgcactacagtgggttccacacacagttcgaacttcctggaggctttgtttacaatgtgaggagaaaaccacctacttaagcctcggctctctccccaccaagttcaaatatcccaggtcgacttcagactgcagtgctgcaattgagaatttcatcccagtggatctcagcttgttgggctccatgggggtgggatctgctgagcaagaccacctggctccctggcttcagcctcctgtccaggggagtaaacagttctgtctcactggcattccaggcatcactggggtatgaaaaaaaactcctgcaggtagctccttttctgcccaaacagctgctcagttttgtgcttgaaacctagggccctggtggt

SEQ ID NO: 786321 - DNA, 681 bp, Homo sapiens
taccaggcaccacatgtggaaaacttccatcagactcatggtgtccacattggaaaaaataacataaagccagacactcagctttcccagcatgttgtgttttcttgccggaaaatcattcctgtctcaacccatgggaagcatagcatcacaagtgcctgtagggagaaaaagtactgggaggcagagtgagagacaaagggaggtgaactagcaatcccagcctgcaaagctctgctgtttatctcagccaaagaagatgccaaatctgagtggctatttatcagcaccacattgtagaaggcatgctccatgaatcttctgaacacaaacttttagccaggttttccatacagtttgggtatccsttttgggacctgtcacatccaatataagcaatgctccaaacctatgcaaaagctgagacaaatcccatctcaatgcaccagaatgaaggcagcaatctagaataaagtgtactcaacaggcacattacaaagaaccactatgcaaacataccctagaaagaccaaaacaagacaagtcagcgaagactggaataatctttaaatgcaaaaccatacctgcatgctcaccagaaacaacagcaagcaggaaaacataatcttgccaaagggacaaagcaaggagccaatgactggccctaatgagatgaggaag

SEQ ID NO: 786322 - DNA, 647 bp, Homo sapiens
aaaataatattttaaaaagaggaaattctgtgcaccaaggttaattccatacttagtcctgcagcatcggctaaaaattgtgtaatttttccccttcacacaatgttgtttttgtttcttcctcaccagttcagacaaacatctgttatactgcagaaggacaactatctcccaaaccacggactgcgcctgcagccaaaatcaacaacrcgagccccaagcatcgagcacagtcagcctttatatccagccgggataacatttcacatgttttgattaaaattagctaatttgtaattctagaacctatgaaacttaaaagctgccatccatatagatcacattaggcagcgttttaaagggccagagctccttgtgatttcctagtggctttcacctctctcccccttccccacccccaacctaaaatgaaatgcaaaagtaaactggaaatgcaggacaggaggtaagggtaagtgaggaagaatggttattatggactgtttgaattttgttcccatcaaaaaacaacaacttctaccggtcttaaaaaaaataaaataaaactgtccatcattggaatcaacagtggtttccaccataagaaacagcattgatttccaaggcaaatctcccttaactctccg

SEQ ID NO: 786323 - DNA, 647 bp, Homo sapiens
aaaataatattttaaaaagaggaaattctgtgcaccaaggttaattccatacttagtcctgcagcatcggctaaaaattgtgtaatttttccccttcacacaatgttgtttttgtttcttcctcaccagttcagacaaacatctgttatactgcagaaggacaactatctcccaaaccacggactgcgcctgcagccaaaatcaacaacgcgagcsccaagcatcgagcacagtcagcctttatatccagccgggataacatttcacatgttttgattaaaattagctaatttgtaattctagaacctatgaaacttaaaagctgccatccatatagatcacattaggcagcgttttaaagggccagagctccttgtgatttcctagtggctttcacctctctcccccttccccacccccaacctaaaatgaaatgcaaaagtaaactggaaatgcaggacaggaggtaagggtaagtgaggaagaatggttattatggactgtttgaattttgttcccatcaaaaaacaacaacttctaccggtcttaaaaaaaataaaataaaactgtccatcattggaatcaacagtggtttccaccataagaaacagcattgatttccaaggcaaatctcccttaactctccg

SEQ ID NO: 786324 - DNA, 664 bp, Homo sapiens
gaactttccttcatcaatctgggacatctgattaccccattagaagtggtttgttccctgtttctcatcctctcagcccaccttttactaaagccattgatgcagcaacctgcttcctgcaggtgtaacctgagagcatctctcctcatctgcattgcatacatctcaatttctgtccctgagttcctctgacactataaagaagggacatttgcctagcactcacacatgacagcttagaagtatgagggggctcaggccccaaggaggaaacttggaccaatggaagaagggagctaataagtaactgctctcttcttgcrtcaagctgacaattatgaagtatattctacatggctcaaggcctcattgcccacagtgatgacaaactagagaacacccttgtactgactctctctgtttcactctccctagtcatccacttctgcttcctgagatcactgtccaaaataaactacctaaaaagtcagcccttgtcttaggttcaactttcaagggggtaagccaggctaagacatcactaaatataattcacacaggaaagacaggataaatgctcaattcttttattacattgcaaatattcagagtattgtcccagttacagctaataataaactcatcgatttatatgtaatcaatg

SEQ ID NO: 786325 - DNA, 511 bp, Homo sapiens
ttagttaagcaatgtggagatgagaggagggataaggaaagagaaagctcatgcagagatactgttttgaagataactcgtggggaagaaatgggcagtcatctgggcagccagcaaaacctattccatgaagccttggtaagtaagtggctttgatgacatagtggaaaratgagcactgttactggctgtcttgttgtttagctgtcagaaaagattgtgctgcttcctacatctgctctcacatgctccttcacctgctctgtcttactgagatggataaaccttgtagttcaggactgtcaagggcactgcaattagtactaaatcatcctcactctgacaagttctggcaacagaagtttctggcagatgtgtaagtgcattttcagtgtttcctgagtgtctgaaggcatagcagagccctccatacactgtgcaacttaattcgatagtgaattcaatgcaagtttagaacaggagaaatattagaaataaagatgggctgttg

SEQ ID NO: 786326 - DNA, 511 bp, Homo sapiens
ttagttaagcaatgtggagatgagaggagggataaggaaagagaaagctcatgcagagatactgttttgaagataactcgtggggaagaaatgggcagtcatctgggcagccagcaaaacctattccatgaagccttggtaagtaagtggctttgatgacatagtggaaaaatgagcactgttactggctgtcttgttgtttagctgtcagaaaagattgtgctgcttcctacatctgctctcacatgctccttcacctgctctgtcttactgagatggataaaccttgtagttcaggactgtcaagggcactgcaattagtactaaatcatcctcrctctgacaagttctggcaacagaagtttctggcagatgtgtaagtgcattttcagtgtttcctgagtgtctgaaggcatagcagagccctccatacactgtgcaacttaattcgatagtgaattcaatgcaagtttagaacaggagaaatattagaaataaagatgggctgttg

SEQ ID NO: 786327 - DNA, 545 bp, Homo sapiens
attagtgaaattttcttgttttttctgcataaagtttttataatttataaatcataatgtcaaattttttttcctagaaaaccactggttcaaaaggtaaaaacctaaagggtagaatctagcttctagttaatctcacagttgattctgagagataatgatggattctccttcctccrtctgagtatggtaattgccagctagaatttagattaactactggcacatctctttgagtccttgaaagttgcacaaactgtacattcatttaagggcttttattctctgtggatttcactcatgactggttgctaggcaaccaggactggatgctacatgtaatgtgcacccactgctgttgctttattattattattaaacaaaacggtttctcattttattaccatgtcagagacatgtatatgtcgggtggcagctgatgtgcatagtttgacacttcctgttctacaaagtaaccttgtataacgcctttcaagaatattgaattgttgctttcgcttgtctaaatgtaatgtttttatttt

SEQ ID NO: 786328 - DNA, 453 bp, Homo sapiens
ataaagtggttaacttttaaaattttcacttaatacgttataactaggtaataaagtagaaaattgattttcatgactccaattttaagtatctgcataatagtcaatcaagaatagatatatctacttttacttagccattaccattttatcagatatgtatagcttttgggattgaataaacctgtggcaaaaaattatagaatgtgaacagtttctgtgtgttcagscaaagtaactgagaagaaatactgtagtaactttatgtagaaggaattgcatcatagatgttttccagcagatcagatggagataagaacaaagaacagcagcagcctaggtggtgtatagctttgaaaatacagggaagttcattagtctaaaaatgccatcttgcccaagtgagaaagtggcagatttcttaacaagtgaacgagtgacttgaaataggtg

SEQ ID NO: 786329 - DNA, 453 bp, Homo sapiens
ataaagtggttaacttttaaaattttcacttaatacgttataactaggtaataaagtagaaaattgattttcatgactccaattttaagtatctgcataatagtcaatcaagaatagatatatctacttttacttagccattaccattttatcagatatgtatagcttttgggattgaataaacctgtggcaaaaaattatagaatgtgaacagtttctgtgtgttcagccaaagtaactgagaagaaatactgtagtaactttatgtagaaggaattgcawcatagatgttttccagcagatcagatggagataagaacaaagaacagcagcagcctaggtggtgtatagctttgaaaatacagggaagttcattagtctaaaaatgccatcttgcccaagtgagaaagtggcagatttcttaacaagtgaacgagtgacttgaaataggtg

SEQ ID NO: 786330 - DNA, 631 bp, Homo sapiens
aagtgaacgagtgacttgaaataggtggaattgaggaagccagatgttaaagcttattagcgtgtgtagattagagcctttatagccattttttcaaacactcccttagaatatttaaaaatcactcgtgtcatatgtctgtgtgcrtaagtacattgtatatatattccctgatatttagcaatgacactagcatttttatataaagaaaataaaaagtgaccagtgtattagttttctattccagccttaacaaatgccacacatttagtggattaaaacaatgcccatttattatctcacagtctgtaggttagaaatcggacatgggtcttgccaggctaaaatcaaggtgtcagcaaggcttatattccttaccggaggctctggggaagaatttacttccaaggttatttaagttgttggagatcctgtttttatgctggctgtcagttgaagcctggtctttcctcctagaggctgcccacattccttctcatgctttccatgatttcctagaggcctctgaagtccttgcctgtgggtcccatctcagagccttcccatgcttcagatctctctaacttatgctgctgtgtcacactgcctccaacctgagaaagttttctgc

SEQ ID NO: 786331 - DNA, 631 bp, Homo sapiens
aagtgaacgagtgacttgaaataggtggaattgaggaagccagatgttaaagcttattagcgtgtgtagattagagcctttatagccattttttcaaacactcccttagaatatttaaaaatcactcgtgtcatatgtctgtgtgcgtaagtacattgtatatatattccctgatatttagcaatgacactagcatttttatataaagaaaataaaaagtgaccagtgtattagttttctattccagccttaacaaatgccacacatttagtggattaaaacaatgcccatttattatctcacagtctgtaggttagaaatyggacatgggtcttgccaggctaaaatcaaggtgtcagcaaggcttatattccttaccggaggctctggggaagaatttacttccaaggttatttaagttgttggagatcctgtttttatgctggctgtcagttgaagcctggtctttcctcctagaggctgcccacattccttctcatgctttccatgatttcctagaggcctctgaagtccttgcctgtgggtcccatctcagagccttcccatgcttcagatctctctaacttatgctgctgtgtcacactgcctccaacctgagaaagttttctgc

SEQ ID NO: 786332 - DNA, 580 bp, Homo sapiens
gtcaatggctatgtgagactgaagtggcgtataaggaaaggatgtaatgtgactgttggactgtgacttttaataataatcctcattaactgttccagcaccccctaccaaagctcccaaaacattgtggcagttagtggggaacaaatgtgaggggattatcctagaatgccataaatgtgtaatagctcatctcagtagcattccacwttgtgtaaattatttgtgggggaatgggaagacgttgtccatcattttaacgtattaattttgctggatgttggaactttattccctcgacctctcactttttcatgactagcctattatgaatcctttctttattgtagtcatttgactatcctggacccaacccaaaaccaaaaccatctgtatttgggttcattatattactagaatatatactaagaatatagagagtaaaggaacataaaatttttactcatgaaaatagatatgtttgttgggggtcttaaagttatatggtgaaaataccagtgtaaagctgtagtttgaatatatgttacaggggtgtatgtgtgtattttacttttaaaat

SEQ ID NO: 786333 - DNA, 580 bp, Homo sapiens
gtcaatggctatgtgagactgaagtggcgtataaggaaaggatgtaatgtgactgttggactgtgacttttaataataatcctcattaactgttccagcaccccctaccaaagctcccaaaacattgtggcagttagtggggaacaaatgtgaggggattatcctagaatgccataaatgtgtaatagctcatctcagtagcattccactttgtgtaaattatttgtgggggaatgggaagacgttgtccatcattttaacgtattaattttgctggatgttggaactttattccctcgacctctcactttttcatgactarcctattatgaatcctttctttattgtagtcatttgactatcctggacccaacccaaaaccaaaaccatctgtatttgggttcattatattactagaatatatactaagaatatagagagtaaaggaacataaaatttttactcatgaaaatagatatgtttgttgggggtcttaaagttatatggtgaaaataccagtgtaaagctgtagtttgaatatatgttacaggggtgtatgtgtgtattttacttttaaaat

SEQ ID NO: 786334 - DNA, 603 bp, Homo sapiens
ctttgtatccttcaatccaatcaagttgacattcagtattaaccatcacaagtccaccccttgtcaacttgaacccatatacatctcctgagattatacatcatcttcaaataaagacaataataaggtcataattatacctaacataatacagctgtcctttgtataaccggaaatgcaccaatccccaacccaaatactattacataaagttaacaatatttaaatgcygatatgaagtcaataaatcttatgtcacatgataaaggaaaaggaaataaaggtattttcttagtacaagtgtatacatgcacaaacatgtttttaacaaaagaaggaggaaatactcatgacaattacagtccccgtttctgcagtggtctcgtggtcgtagatgctattgatgactaacttcttctactacccattctgtattccctttgccttcagcaagcacctcaacaggtcatgtttttttttccttgtggagtgacccaaaccttcattcctgggggatctgggccatttctagtcctgcctggattgggctgttgtagtttcccattgaccttaatcatagggcgtggtaatactaagagacac

SEQ ID NO: 786335 - DNA, 467 bp, Homo sapiens
gaatgtaggttatacctagcaatagctcccttcatactgtgaaatatattgtatttttgtattcaagcagagaatgagcaatatttattatttttatagcttctataatatctttatagattgaggtgttttataatcctattttggtggtccgggatattacttcagattttttctcatccaaaacattcatatcaacatgagatggagtytggcctaaattaatgatcaagccagcaggtttgaaaagaaatatattttattaatgttaagtattgtatgttataaagtaaaacattcgtgaatattaagtaaaactaagtaaaatgaataagttacagcaggattgctttccctaaatgttatgcattacgggcctgaacattcatatgtatttccacattgttactaaatcaattcacttatattgttggtggcatgattttattagtgacatctaaattaac

SEQ ID NO: 786336 - DNA, 629 bp, Homo sapiens
tattgtatgatatagtcctaacatgtggtccactttgctttcacattggaaagagaaaagttccactgagttagctttaaagattatggaaccacctgtctaaagatatgctcatgtgaataagaaaatcttgatttgattcaaaggaaccaattctgaatggtggggtttggagaatcctttacagaactgcaagtgagaccatctggggaaaattcattttttaatagatcaaatcattcaacctatcaatgactatacagccygtggcaatcctagtcctgattaaacatatccacttgcacataaatatacgtatacacacacacacacacacacacacacacatgcagcatattttgtgtgagttcattgaaatgctaatactttttcactacctgtaattatgtctgctaacatgattcccatctcaccctccccccatgacttaaaagttgttagggaacaccatctgaaagacagccatattcgcacacccatgataagctggacctgaaaagtaattatcctggattagcacaggccctctctatgctaaattagcagccagatccaggcacacagttgcttcctgaccctcagttacacttcacagaaaacctgaagaa

SEQ ID NO: 786337 - DNA, 629 bp, Homo sapiens
tattgtatgatatagtcctaacatgtggtccactttgctttcacattggaaagagaaaagttccactgagttagctttaaagattatggaaccacctgtctaaagatatgctcatgtgaataagaaaatcttgatttgattcaaaggaaccaattctgaatggtggggtttggagaatcctttacagaactgcaagtgagaccatctggggaaaattcattttttaatagatcaaatcattcaacctatcaatgactatacagcccgtggcaatcctagtcctgattaaacatatccacttgcacataaatatacgtatacacacacacacacacacacacacacacaygcagcatattttgtgtgagttcattgaaatgctaatactttttcactacctgtaattatgtctgctaacatgattcccatctcaccctccccccatgacttaaaagttgttagggaacaccatctgaaagacagccatattcgcacacccatgataagctggacctgaaaagtaattatcctggattagcacaggccctctctatgctaaattagcagccagatccaggcacacagttgcttcctgaccctcagttacacttcacagaaaacctgaagaa

SEQ ID NO: 786338 - DNA, 629 bp, Homo sapiens
tattgtatgatatagtcctaacatgtggtccactttgctttcacattggaaagagaaaagttccactgagttagctttaaagattatggaaccacctgtctaaagatatgctcatgtgaataagaaaatcttgatttgattcaaaggaaccaattctgaatggtggggtttggagaatcctttacagaactgcaagtgagaccatctggggaaaattcattttttaatagatcaaatcattcaacctatcaatgactatacagcccgtggcaatcctagtcctgattaaacatatccacttgcacataaatatacgtatacacacacacacacacacacacacacacatgcagcatattttgtgtgagttcattgaaatgctaatactttttcactacctgtaattatgtctgctaacatgattcccatctcaccctccccccatgacttaaaagttgttagggaacaccatctgaaaracagccatattcgcacacccatgataagctggacctgaaaagtaattatcctggattagcacaggccctctctatgctaaattagcagccagatccaggcacacagttgcttcctgaccctcagttacacttcacagaaaacctgaagaa

SEQ ID NO: 786339 - DNA, 670 bp, Homo sapiens
aattgggcataaaactaatattgaaatgacttatcatggcaatgtgtacatttatttatcaacaattacacgaactaattataaaagcccaattgtgtaatttcgataaatatccaattactttcacctttatactcactgattagtttccaaattcataatatttttattgttatgcttgattgtatataagtaataattttaatgataattcaatgcagaggaactcataaaaatgaaagccggccaggcgcagtggctcacgcctgtaatcccagcactttgggaggctgaggcgggtggatcacgaggtcaggagttcgagaccarcctgaccaacatggtgaaaccctgtctctattaaaaatacaaaaattagtcgggcatggtggcgcgcacctttaatcccaactactcaggaggctgaggcaggagaatcgcttgaacccgggaggcagaggttgcagtgggctgagatcgcgtcattggactccagcctggacgacagagcgagactctgtctaaaaaaaaaaaaaaaaaaaagcctgcgccatcccccaaattgattgtaatgtacatatatatttttgttgttgttgcaggtaagtaggctatggaaaacttaaaataattttaagcataaaactattacattattcaaaatttatga

SEQ ID NO: 786340 - DNA, 640 bp, Homo sapiens
tctggatgagattaacatttaattcagtacactttgagtaaagcagattgcttcctatcagttgaaaaatacttaagagaaaaaagactaacttctctccctaggaagagggacttttgccagcagacagcctttgagttttagctgccacattaactttttcctgggtttccagcctgctggcataccgtgcagaatctgaactggccagactctacaatcatgtaagtccattccttaaaatcactgtctacacacacacacgcacacacacacacacacacacacacacactattggttttctgtttctgaaraactctggcttatatatgtctacacaaagacttgttacacaaatttgcacagcagccctatttataatagctagaatgtgaaaataataaaaatgttcacccacacatgaatggaaaaacaaattgtggcatgtctgtacaaatagaatacattttaccaataaagtgctaataaatggaataaattactgatatgtgcaacaacatgaatgaatctcaaaaatgttctgagcaaaaaccaggaactagagtacatagcatataatttaatccatttagattaaattccagaaaaggcaaaaccatcatgatggaaagggccta

SEQ ID NO: 786341 - DNA, 646 bp, Homo sapiens
agctgaggtataagtgactgcagaaaagtgttaacaagcctgagactttatctaaagccttatctttagaaaggtctgcttgcaaggcttgcccttggctagtgtccgggaacacagcttttgaaacatttcctacccttataaggttattttatctgtctggggcactgaacaactgctttcctttcaggaatatgaaatattggtgggcaagagtgcctatgtgacaagccctgaacaaaaaccctgaactcttgartcttaagtgggtttccctgggtataatcattgtacgcctgtgactacattttcactactggagaggtggtatgctgtgtgtgatctcagagggagggagggaacacagaaaacccacacatggattcctctggaccctgcctgatgtcatttccccttactgatccacctgtgtatccttctacgtcagtgtaataagtcttagccctaagaacgactatatgctgagtgctacaggtcctagtaaaccaccaaacagggttgtcttgggatccctgaaatactaatatagaataaaatgcgctttttaaagtctaaaattagacacattttgacatatgtatatagccatgaagccatcaccacaatgaatataattaacacaccc

SEQ ID NO: 786342 - DNA, 627 bp, Homo sapiens
attcctatttggatggcttttctttctttctcttgcctattgctctgtctaggacttccagcactgtgtcgaacaggagtggtggtagtggacaaccttgtgttgttccagttctcagggggaagcttccagtttttgcctgttcagtctgacattggctgtgggtttctgacagatggctcttataattttgtggtatgttcctgtgatgaccagtttattgagggtttttatcataaagggatgttgaattttatcaagacttttatgcttccattgagatgatcatgtggtttttgtttttagttctgtttatgtgatgcattatatctgttgatttgtatatattgaaccaaccttgtatcccaggaataagtccgtcttagtcataggagattaggttttgttgggctgctagatttggtttttgatattttattgaggattttttgcatctatgttcttcagggatgctaacctgaagtwttcttttttcattgtgtctctgacaagtttgggtatcagaatgatgcttgcctcaaagagtgatttagggaggagtaccttctccccagttttttgtaataatttctgtaggtttggtatgaactcttcttcatacatctg

SEQ ID NO: 786343 - DNA, 629 bp, Homo sapiens
tggaactttctttaaaattgacaatatgcttggtcacaaagcacatttcaatagatttttaaaaatcaaaataatatcaggtatcctctcagaatatagcagaataaaattagaaatgaatgctgaaaggaactctcaaaaccacatacgtaaatggaaaccaaacaacttgctcttgaatgactttaacaaaattgargccgaaataaaaaagaattggaaatgaatatagacatgtaacatatcaaatctaggatacagcaaaagcagtgttaagaggaaagttcatagtactaaattcataaatcaaaaagatagatctcaaattcgcaaccaaatgatgtacctaacaaactagaaaaacaagaacgaaccaaacccaaaactagcagaagtaaagaaataaagatcagagcagaactaaatacaattgagactaaaatatcacacaagggatcaacaaagccaaaagttggttgtttaagaagataaacaaaaattgatagactactaactagattaaacaagaaaaaaagaggactcaaataagcacaatcagaaatgataaagataacattaaaattgataccacagaaatacgaaacatcatcagaaactactatgaacat

SEQ ID NO: 786344 - DNA, 629 bp, Homo sapiens
tggaactttctttaaaattgacaatatgcttggtcacaaagcacatttcaatagatttttaaaaatcaaaataatatcaggtatcctctcagaatatagcagaataaaattagaaatgaatgctgaaaggaactctcaaaaccacatacgtaaatggaaaccaaacaacttgctcttgaatgactttaacaaaattgaggccgaaataaaaaagaattggaaatgaatatagacatgtaacatatcaaatctargatacagcaaaagcagtgttaagaggaaagttcatagtactaaattcataaatcaaaaagatagatctcaaattcgcaaccaaatgatgtacctaacaaactagaaaaacaagaacgaaccaaacccaaaactagcagaagtaaagaaataaagatcagagcagaactaaatacaattgagactaaaatatcacacaagggatcaacaaagccaaaagttggttgtttaagaagataaacaaaaattgatagactactaactagattaaacaagaaaaaaagaggactcaaataagcacaatcagaaatgataaagataacattaaaattgataccacagaaatacgaaacatcatcagaaactactatgaacat

SEQ ID NO: 786345 - DNA, 602 bp, Homo sapiens
ttggctacatcagtaaaatgttatcatatatcttatatttaatgaacaccctgtgcatacgtttcttagctgttcactagatagaatgaccaacccagaagcaatgtgcatccctaggacccagacatccaggcactcagactgtggtttctatttcccacaaaagaaactaagagtctgtggagaaatgtcttattgtagatctgggccacgaaaggtacaaaacattagaaggaaagaagctataaaaaaaactactgggatcatggtcaaaagaactcaggagccaactggtagaggagaggctctcactggccaaaaatggggaaaaaattctgaacaatagtaagattaataagtgccacggactgaaacacatacaatacattataaactgaatgtttataatgataaacacacacacyttcctcactacacctgtggaggatgctgggagcagcttattgttctaaatgctggtaaaggcatttctcctgctttttctatacacactgtacttcagggtaatcaaatagttgatgaaggggtgtttttctttatagagaatatcctagctaataaataaaatacaaatgataaaa

SEQ ID NO: 786346 - DNA, 624 bp, Homo sapiens
aaatcacttagcctttttttcttcattgtgaatattcagtcatcctttttccactatattaacagagttgaattattaaagcaaacttatgagaatcacagctcttaaccagcaacaaattgacaaatgatccaaaggatataggcaagcatcagatacagccaaagcattcttttcctaaaagagtctgaacgcatctgatgcaacacccaaaagtatcccttttctcctcgttacagtatgttttggctttggaataaatgattagttattgaacaatatatggagaaatatcttacaaaaggaagtcatttccattttctaacatcttttacattgcactaattacatggtttaaatgactatccctaatcttcatccaactacaccccatgaattttaggtttatttaatcaacctagttagaccagatatawccttctaaaatcatttgtagatagagattctccttttgctagtaaataccattaacatatttacagaaggtctggtctaggtcatttattccaggcctctccatgattggattcatcttgcaaatcgtctttggagcccctggtatacaagttggactttagaatcagaattgattctagttcagaa

SEQ ID NO: 786347 - DNA, 667 bp, Homo sapiens
tcccttttgttttcttctttgaccaatgagttatttagaagtgtttttcaaaacaaaagatttttaaaggttttgaaatcagtataaaaagtaattaagttatgatactgaaattttttttaactttgagatttgctttatagcttagtacataatcagttttcattagtgtcccatgaatgcttaaaaagaatgtgtattcttcatttgctaggcgtaaagtcacttatgtttagattaagcttgttttttatggagttcaagttttactgtgtgtgttttgttttgtttttttggtctccttttatataatttacagaagaatattaaaatatattactgtggggctgggcacagttgctcacacctgtaatcccagcactttgggaggccaaggtgggaggatttcttgaagccattaggtcagcctgggcaacataacaagatcccatctctacaaaaagtttaaaaattagccragtgcaatatcatgtaactgtagtcccagctactcaggaggctactcaaggaggatcacttgagcccaggagtttgacgatacctccttgagcttttttactttatgtgtttatatgtacagcatataaattttgaattgttggccaggcacagtggcttatacctgcaatcccagtgctttgggaaa

SEQ ID NO: 786348 - DNA, 582 bp, Homo sapiens
cttcatgattctctgggaccgttacattttgaaatatgcaaagaaagactttttttttaaggaaaggaaaaccttataatgacgattcatgagtgttagctttttggcgtgttctgaatgccaactgcctatatttgctgcatttttttcattgtttattttccttttctcatggtggacatacarttttactgtttcattgcataacatggtagcatctgtgacttgaatgagcagcactttgcaacttcaaaacagatgcagtgaactgtggctgtatatgcatgctcattgtgtgaaggctagcctaacagaacaggaggtatcaaactagctgctatgtgcaaacagcgtccattttttcatattagaggtggaacctcaagaatgactttattcttgtatctcatctcaaaatattaataatttttttcccaaaagatggtatataccaagttaaagacagggtattataaatttagagtgattggtggtatattacggaaatacggaacctttagggatagttccgtgtaagggctttgatgccagcatccttggatcagtactgaactcagttcc

SEQ ID NO: 786349 - DNA, 609 bp, Homo sapiens
attaaaatccacagccagtttcatcagtttcctcatccatcctgcaaataaaaatgttaacaaggagccaaacttattcgttctggttttacaatttattttgaccgttttttgggtgaaaattgcaaacagccaagcaagtggctggaatgccccagtctaagaaattcaaaaacaatcactgagtaagccctaattacattaattacattttactcttgactccaggaaaagaaagcaagcttttatctaatctagagggaagtattcgtgagcaataaaaatcacttttttgagttgaataataatcagttaagaatatttaccgcatagcaacacaacatataaagatttgttacaagttgtttacrgatgtttgactatttttgctgaagtattttagagtattgaatgtcttctctcttcaagtttctttcatgttcctaatttcagctcctgtagccagagatcacaggtcttccctgtgaaactttggtttctttctataaatgtgtgtggttttcagcgctcaactcctgtcttcaaatggtagtaagttctacttctacttctgtcattcagaacattttatgtcaaatgatgtaatgc

SEQ ID NO: 786350 - DNA, 646 bp, Homo sapiens
gctttagaggtaagctgaagcacagaggagtttgaaagtttgcccaggtagtaaattatggactccagttcaaacccaggtcttctaagccttaagccctacaaaactctcacttttaattagtgtagaacttggagtgtattttcttgttaataaaagggaagagagctagattcctaggctcattcacaaaagtatatttggtccttaatataaatgaaataataatgcaattgaatggaataattacaaaagactatgagagaaaattaaaaagtaaagtggttaatgtccagatgttggcattgtggtgattttccccttttaaaaatcctttcccttcttactgttttctgtgcaataaaaataaaaaccaagaggtgaggaagtcttagacaacactctgaccaagttttattggcatggrgaactccacaggacagcttaatgggccaggtacccaggccctttgccatggacacaattagagcctttgccttcatcctacaagagctggaatttctcttcccactattggccccaacctggatccctccaggtaagggtggatctgaaaggaggggattctaaaggtattcccatggatttgatgagagaaattctgctcccagagtttgatgggaga

SEQ ID NO: 786351 - DNA, 628 bp, Homo sapiens
gcacttcaataaggggcagtatctctgggagatggaaacgaacatcctcaggaaaaaaaagagagggggttaaacaagaactcaagggaaaattgaggagcaccacttgcattctaattcatttctcttgaaagaattcattaatttactcaggcgcatgtactagtgacaccagaacaaatgagtttctgccctaaggaattcgttactgaatggaaaaaattcagggrgataaagcaagctgtggccacccactgtgatatgcactgtgatagagttaggctcaaagtgctggaaggtgcttcaaagtcaggcagtattagagcctggagccaggacaacatctggaagaaagcgatgccttagcagaatgctgaagattggagaaaacttggccaggcaaatatggggaaacattcccaaggaggagcagattgttccaaggcctgaagaaaaagagctcacctcttgaactttctacggctacagcagagagtgtgaggtgggcagagggagagacgagccaggggacctggggagggactaggtcgtggagccttgtgtgtcccctgtagggatatggactaaattgacagccccagggagccttggtcaccattgtccttcc

SEQ ID NO: 786352 - DNA, 628 bp, Homo sapiens
gcacttcaataaggggcagtatctctgggagatggaaacgaacatcctcaggaaaaaaaagagagggggttaaacaagaactcaagggaaaattgaggagcaccacttgcattctaattcatttctcttgaaagaattcattaatttactcaggcgcatgtactagtgacaccagaacaaatgagtttctgccctaaggaattcgttactgaatggaaaaaattcagggggataaagcaagctgtggccacccactgtgatatgcactgtgatagagttaggctcaaagtgctggaaggtgcttcaaagtcaggcagtattagagcctggagccaggacaacatctggaagaaagcgatgccttagcagaatgctgaagattggagaaaacttggccaggcaaatatggggaaacattcccaaggmggagcagattgttccaaggcctgaagaaaaagagctcacctcttgaactttctacggctacagcagagagtgtgaggtgggcagagggagagacgagccaggggacctggggagggactaggtcgtggagccttgtgtgtcccctgtagggatatggactaaattgacagccccagggagccttggtcaccattgtccttcc

SEQ ID NO: 786353 - DNA, 614 bp, Homo sapiens
ctcatatttactctagatgggcttgtttaacttccgaccatcagtacgcccagttccactggaagttcacattcaaggctttccaggtcaacattactgtcctcgtatggctagtatgaacaagcctgcatttcagggtaagcttcagattcttggaataaaatagtaaccattgtttatggtagctatcaaatatcttctaattggtgttggtttctttgaaaggatgatactggtccagcttctacktatatctaaaactgtttgtctcaactgttaaggaatacaaatatatgttaaattacctagtgaagattggagcgatttcacaaatggtaatgactttgtagttgaataaaagtatgtaattaaaaaaagttatcagagttttcttaatattaatcaaagtgtttttatgatagtagcttggacagatgagaaatggaagctacaggtcaaaaacatctcataatcatttttatgagaaatcataaaacttagaaatttcagtactttagtacagtgcttctgtttttagtttttcctcttctaacaaattaggcaaacaggaaagatttaagaatagcactcctattttattgaaacatgtttta

SEQ ID NO: 786354 - DNA, 557 bp, Homo sapiens
ttaagtttctccttccttggcaactcagaatagaacttggacccagcataattaaatcttttctctcctaggcaatatactctctaggtagggccatcaacctttcttttcctattatctgtctaatatgctgccagatccatgtagtacctgcaataatgccacatttcatgcctaaattgtttacatcattagttttcatgtatccatttgatatcmtaatgaaattcatattctggggttaagtatctttccattttatttcccacaacttttcaacagcaattagaagccattctccagccaaacctgttttgatatttgtctcatcaagacgtcaaactcgtcttactgctttggaattgatcgccttcctggctactgaagaagatccaaagcagtggttaaacatggatgaaagagaggtaagcaacatattttatcttctactacttacacgtttcaggttgtattatattagaatgatcattacatatgtaattgtattatagggaaagaagaaattcataataccgccaccttaccacactattaat

SEQ ID NO: 786355 - DNA, 564 bp, Homo sapiens
agcactaatatataaaaatttaaaacctgttattatcctttccctaagtaataaccaccagtaaaattttaaattagaatttttgtgtctatgcagttatattccattatgcaactatttcatagtggttttctcctgtaatttaataatcatgcatccttattattgtagatttttctctgtttaaaattattttctcagtatagagttctaaaaagaaaatcagtgggtcaaataatgtgaatatttttacagcttttcaggtacactgctaattactttccaaaagaactgtacttattggtgtcatcaccactgatgtatgaattatcagaaatatatgagagtaacagttttactacatcctcatttgttgcaacttattgatatattatagataaaatattatcttaycttaatgtatgccttcatttttgattggttgaacatttttttttcatatatttactagttgtcttcttttttatttgttgtctcttcatttcttttggtctttcatctattccaggacagcatttattttgtagatttgtgtgagagctt

SEQ ID NO: 786356 - DNA, 623 bp, Homo sapiens
taaaaattaacaaaatgaattgaggattaaagggccaaaacatgatggaaatattgggaaaatatatgaaagatacttaacaaagaagaaagaataatggcatttaagcatatgaaaagtgtttaatctaactcacagataaatgtaaattaaaagaacaccaatagaaccgattagatttggcaaaaatttataagtatgacaatatattctgttggtgaggctgttgaggaacaggtaatctctttaccagtgtgaatgttatctggtacaacccttttggcttaaaaacaagaaaaattattccctcacaacttcagagaccagaattcaaaaaaaaatcaaaagtattaacaggaccacactccctctgcaggttcyagggaagaatcagttcttggtctcttccagcttctcgacgctattgacatttgtgatttgtggccacgtcactccagtctctgtctctgtgatcacattgacttcttttctctgtcttttatgtcaatctgaagcctccttctgcccttttgttaaaagggtccttatcttttagacctaggtggtctagagaacacctagatgattcgtgatagtcttttccatctcaagatatttaactt

SEQ ID NO: 786357 - DNA, 600 bp, Homo sapiens
tttagtcttagaagtttccatccaaaaaaaacgcctctcagattaaactaagaggtccagtgagatgatatcactggttcaaatgattcagtaaagaataattttagaaagttaacagaagactttatgattccaaatacactgattmacatattttttaaaaccctatattgggctaggactgaactagactgaaatctctaagctcccagggcaaaggggtagaaacttacttgacagcagcatgaaatgccactttgctttctaaacctcagtgttactaatctaatatgacttctgcagatcataaagtacaattggccctttcaatttagattcgaacacctggctaaatccattaaccagtgattccatgaagccaaatccactgccttttagccaaatcatatttttcccctcttttatggaaactctttgaatgaggtttctgaaaaaaaagtccatcacaaattaatgtaaaaaatgcacagcaaattgtatctgtactccagacagctttttcataaatttttacgagtagagttaaactagactgtgtagatcacttatacaaattatctccataataagaggctcctg

SEQ ID NO: 786358 - DNA, 599 bp, Homo sapiens
ttcaggaacaatgccaggaggaaactatgtaagatctcatctgattttagatacttgtcaaaaaagaactaagaagagaatatcttactgatgagatgctgtctttttaagtttggtagaacaaaaagcaagttcacttctttaataagtacaaataaacaagactgatgaggtgaacaaaaatcaatccacagattccaaaaattttacaactgtttattttcagttcaaacatgattgatgtcaattagatgcagatctgtcctggtgattctcaggaaatctaccgtgtcagataatyaccttccgtgaaactcagaaaatccagtgctatgctttaacctatcttttccccaaatccttaaattccatacattctttaaaattatttaatttttatcactatttttcatttctgctaatattaatattttacttacaaaatacagcaaatacttaatattttttatgtacagcatttttcttattactggcatattttaaactttattttttgtgagaattttttttacagtactatggaaaatccttccaaacaagaaatgcataatatgcaatttaaaatataatccttagta

SEQ ID NO: 786359 - DNA, 361 bp, Homo sapiens
aaaagacaaatttatataagagacaaggactttcctgggaggagaggatcccaaacctatcccatttgagttttaacagtattagaagctctgaaagataagaatggttctgactgagaaagaaatgagcccaagtatcacaaagaagtgcttactgtaagggaaatasaattgagcttaaaatttactgggtgaagacatttgctgatattcaaaggccttggaacccagcaacctagctatggtatttatgctgattatgcaagtatgaactaaaagagctgtaccattttagctcaaaggtgaagtgacattatagcatggagggatctatataacaaggtatcattgtagtaatact

SEQ ID NO: 786360 - DNA, 649 bp, Homo sapiens
aatacctaggaatataacttacaagggatgtaaaggacctcttcaaggagcactacaaacaactgctcaaggaaataaaagaggatacaaacaaatggaaaaacgttccatgctcatggatatgaagaatcaatattgtgaaaatggccacactgcccaaagtaatttatagattcagtgctatccccatcaagctaccaataactttcttcacagaattggaaaaataactactttaaacttcatatgtaaccaaaaaagagcctgcatagacaagacaatcctgggcaagaagaacaaagctggaggcatcacgctacctgacttcaaactatactacaaggccacagtaaccaaaacagcatggtactggtaccaaaacagatatatagaccaatggaatagaacagaggcctcagaaataacataacacacctacaaccatctgatctttcacagacctgacacaaacgagtwatggggaaaagattccttatttagtaaatgttgttgggaaatctggctagccatatgcagaaaactgaaactggaccccttcctccaccttatacaaaaatcaactcaagatggatcaaagacttaaacataagacctaggatcataaaaatcctagaagaaaacctgggac

SEQ ID NO: 786361 - DNA, 520 bp, Homo sapiens
cactctagtcttcatgaccagcctgggagaattcgtgagaccttggactacaggcctcaggacctcagcctttatgtgctcttggaccattccaaacccattttctacagctaacttatgttatttcttccttctctgttctttgctccacctcctccctattgttactgccttctctcctatgcctatattccatgggaaatttttgggtaacctatgctgtctaactgacccacttagaacttccctctgtaaaccgttccagtgagggcmacttttcacattactgctacaaggtaggaatctgcacacatatataatataattgcagaataaagaaaatcacttaaacatgaaaagtcatatgcatggtcattctaaaatatttaacagctttattgtggtataaatgatataaggtaatctttacatatgtcaaatgtagtttgcttaattttgacataagtatatacttgtgaacccataaacagaatcctgataatgaatatatttttcgttc

SEQ ID NO: 786362 - DNA, 641 bp, Homo sapiens
tgaaaataaatacagtcaacaaagacaggagaaattacatcattatatataaagttcagtatgtatacttggtagatttcctttataaaataggatttaaaagaaggtagatccacaaaatagagtgttgtctggaagtagaggatgaaggatagtatggagctggaagggtaaaattttattccaggtttatagaaacagtgagtaacagaaaaagagctattttctacattatgtaagagacacgactgagggtgtttagaaggaaaattttgtaataaattaggaaggttcaagattcaatcatggatgtgactggagaatacttcatgtatagagaagatactcaactaaaatttaaaaaattgagggtcaatatttttaattgttaatcaaatatagatgtattaattgtttatcaaagaccttaaactstggtaggtattcaagagagatccaacttctataggatgtgcttctacacttagtcatttataacctgggaagaaaaatgacattgaagaagctgctgtgataaagagtgatatacactcaaaatttgatgaataaggaaatcattaaattctgaaatcagtacacaatggattagagctatagcattcaccttaaaaacaatgaat

SEQ ID NO: 786363 - DNA, 523 bp, Homo sapiens
tacttttcttgcatgattgtgctggctagaaattctagtactgtgtttaataggagcagtgggaccaaacattcttgctttatttacagtcttatggggaaagcattcagtcttttaccattaagtagaattttagttggtatgttttggaagttttttttttatcacattgaggaaattcacctatatttgtatttttctgagattcttaaatcatgaattagtgctgaattttttcaaatgttttttctacatcaaatgatataatcrtgcaatttttttcttccttagcctattattattaaatgaacttttcatcccttgaataaacactacttggtcatagtgtatttaatatgtatacattgctgaatttccttggttaatattttgttaaggatttttgcatctatgatcatgacagatatttctatgtaattctcttcttgtcttgtacaactttacatatataaatttaacaatttaaatacaaggggccaattctttaaaggcataaagagcc

SEQ ID NO: 786364 - DNA, 650 bp, Homo sapiens
ttagttctgaaatgcaaaaaattagaagcctacaaataaccattttgggtagtaagaagataaaaataatatatatttgcattttcttatacatgtgtcagatgtaactggaagggtacacaaatagtaactgcatttgcctgtgagaagcaggattcggttgcggggaagcagggttgaaaagacttccaagactgtagacccttttatacttttttgatttttgaaccgtgcaaatgtattctatatttgaaaaaaactaattaaaaaattctcacaacaagacaatgagcaatgactcataaattctttattttggctaayactgattgcattcattactaccattttatttattacagctcagaggagagtcatttactagacattcggttgttattaaacactaaaaattaggcagagactggaggggataaggataagagaacaggataaggagagcagaaagacgctcaggagagtagaaagacactcaggagagaacaagagatcctgcccattcttattatgaggatgaactggctacaggacatgagtagcccaatcagatctaacttaaataccagcctctccaaaaaagttttccaataaagatcccctaacaattatttactggacaaaaaaggttg

SEQ ID NO: 786365 - DNA, 563 bp, Homo sapiens
aaaaagtcactagatggtacaatttatatcttaagattcagcttcttcagagtttttactcctatcagtaagtgaatcctctttctggctatgtgcaggaaatagccagttgcatttttttcatagcctctggctcagataccrgatatttatataaactggaatggaagaaaaacattgtatttttcattcacagaatcaaatcttaccaattctcagtaactgagaagaaaagcccatttgatctaatgaaaaatctgaactatatgaagaagcatatgctcatcatatataattattctaataaaaccttttaaagatatttaaataaaaccatttatttaaaagtgaagaggtcattttaaatagctactatttattaattgcctattatgtgcaaggcacagccttaattaagcacacacacaaacatacatacgtcactaatagtaacaaaaaccctaataatgatgccaattaattatatataaatatgacaattttctcttttcattacgtacttaagctctacttgtatgattttaaatattataccaaaattt

SEQ ID NO: 786366 - DNA, 575 bp, Homo sapiens
aaaattatgtgttgttactttatagttataactcctatctgacctaaaacagtagtatcaccaacctgattgccttatctttcttatcagacttgagtccaaattccctaaattatttggattcaaatgaactgttattccctaaaatcaaatctgctctcaaaaaaatgaagatggatggccagagacggtggctcacccctgtaatytcagcactttgggaggccaaggcaagtggatcacctgaggtcaggagttagagatcagcctggccaacatggtgaaaccctgtctgtattaaaaatacaaaaatcatccgggcatggtgttgcgcacttgtatcccagctacttgggagcctaaggcaggagaatcgcttgaacccatgaggtggaggttatagtgagcagagatggtgccattgcactccaacttggacaacagaatgagactctgtctcaaaataaaaaagaagaagaatatcacaggctccaaagtggattctaaaagaagttccaaaaaatgttttctgccacacctaaaaaggtactcattgaaagaacaacttcaggctg

SEQ ID NO: 786367 - DNA, 574 bp, Homo sapiens
aaataactatagtcgaactacagtgattttttcagtgatatgaacatcacaataaaaagtaaacaatggaatatttttcttagggcaaacaagttcattctattttcagagactttctgtaatttaaaacacttcagaagtcaacgacctcaattctcatcattttacagtgaaatgactgggcctacagtggtaaagtgacttgtccaakgtcatatggccaattggtagcttggatacaaaagtgctttgaattcgtttcccccaaccagacactttcatcaaaaggaagggcgactgtttctgattattctgagcctgtgctaacactctgctcagtgttctgcattcagtaagtagtcaacaagtagtaatgagatttgcttccaagaggtaaactcagttattgtttataaaaaacagtatccagctagagttaaatagaaagaacagattcctgctcaacagccatagtatttattgaataaatgaatgaatgaatggttgaatgaatgaatgaaaccttagttcaaaggtagatttgtagttgctgggtccttacatggatgaagga

SEQ ID NO: 786368 - DNA, 580 bp, Homo sapiens
gtaaactcagttattgtttataaaaaacagtatccagctagagttaaatagaaagaacagattcctgctcaacagccatagtatttattgaataaatgaatgaatgaatggttgaatgaatgaatgaaaccttagttcaaaggtagatttgtagttgctgggtccttacatggatgaaggagccaaacaaaggcaccactatsagtaacacttaaccttctaaatagacactggccttaattaaggtcttttcacataggaaaaataggttcttaatccggttccagaatgcccaattaggccaaaatacagcattttgcactttgcacaagtcagcaaatcatttcctttgttatataaatccatccttagtatacctaaaattttgggatacagctcagatctaactcaaatgttttccaaagtaattcacaaacacattacttcagcatttcttctacatttaggaaaactatttttaaaaaccatcattctgtaacattcccttttccaactatagcatacagtagggctcaacaaactgtaatatacatgcccctgagtaacatccagtaatctc

SEQ ID NO: 786369 - DNA, 604 bp, Homo sapiens
tcatcaagtcattgaatctattctgcctagtggagctgtattacattttctatctatttggtctaatcaagctcctccccagagtacttcaaataatatttttgaacagtaaattgtaagaatcaccatgaatatcatttctttcttctcccataatgtgcatacatcaagttgtagaataaggttaccagtgatatagtctgctttgtatccactcaacattccaatcatgggtatgccactgccaggggaaatacctgcttgatatcacacgcaacagtggtgtgttgcagcgtcatactctggataaagtcaatttgctgcatcttgtattttgaaacttctcatggtggmaaaaccttttttttgagaaggagataccagggtattaaaaaatgtaataattgatctacagtaaaagcaagtttgaaaaagtttgcatttgaatattatctattggattaaaatggaagataatgaacaaattgtcacctaggaaattacatgaagagaaaaattgggttagaggcagtaaatattaacattaagaacatacacatgcatatttgaaaaagactcaaatggtgaaggcttaaaaacacac

SEQ ID NO: 786370 - DNA, 496 bp, Homo sapiens
agaggcttagaaggatatagaaatccctcagatggtagaaataaaaagatcttaattaaaggactacttatagagatatgggcagagccaatggaaaaacaaaacagaacaacaaaaagtacattgaggtactcagactattgagagcaggaagctgttatcacttttaaagtataagagacaaaatagtattaccagtgcctgacgatggctgtagatatggagcagaggctgcctcccagagactgaagttgttgctagatcagggaaggcgggagcaggtaagaaagactttgayctgtttttccttctaccctactatcttctggtggtgacttttattggccaaacccaaccaaaagccagaggacaagggatactgggtgatgcagtccataggaatctgctgtccagagcaaagatgagaaaagagaaaggtgggaagaaaatatggtggcaatggagagggaaaacagagtgaccagcatgaacccca

SEQ ID NO: 786371 - DNA, 575 bp, Homo sapiens
ggctgcgaaacagcaaagatggaagcctgccctccctctgggagctccatcccaggaaggtttggaactgctgccagctggaaaacactggcaggggtggttgtagacctcagttgagagattctgacgagtgaagagaaataggatccgggacccacatggaaaaacagtctggttacctctctgtgtagctgctgcactttaccagggtaactgctccagtccttagttgtcttggattcctcagagctcagaggtattaatagttaaggctgtgaaagagcatagatggtggcccaagacaccccttgggagcttggtcgcagggaggtataatactgctacccatagctgagtgaagttctaagatgtgggtcttatccagtgaggtgccatggaagcaaggtctgcaractgtggctgctcaggcccctgtattcagcccctttcctagaggtatgtatggaggtctaacctcccattttgccagagctgcagccacttttattgggaagctcacttggggctccatgtgtgtctgagcagctgctcttctaatactctgtgtagctctg

SEQ ID NO: 786372 - DNA, 644 bp, Homo sapiens
cactttttcaccatcctagaaaaacccaggttgaatcatcataagttggggatcatctgcataagccacatagtatttgctgagaacttggtatgtataatttattctgacttccgtggagagaagagagagtatgcagatcatttggatatattaatgcactrctcctaaaagcaaataaaaaacagcaaggtgctcaccttttttttctaaagcatgtggatttttgtcttgttttatgttgttttgttttgttttatcctaaacccactgactcagaatctctggaagtggagtttagactctggcattttcagtaagcttcccaaatgattcttatatttggggaaatcttttgaaagccaaacacgtgttgaactacttgaaacttttttaaagctggttagaatgaccatctaatctgtggtactttaaaagagaaagaagacactattaaaaaattattgcagaacaacctgtgtgtatatatatatatatatatatatatatatatatatatatgccaagaacttcccagaaaatcaagaaatactttcattttagtgagaatggaatactaggatacatgtcttaaacataaaatccagaacagactaaatgttttggatgtatactagactgtt

SEQ ID NO: 786373 - DNA, 644 bp, Homo sapiens
cactttttcaccatcctagaaaaacccaggttgaatcatcataagttggggatcatctgcataagccacatagtatttgctgagaacttggtatgtataatttattctgacttccgtggagagaagagagagtatgcagatcatttggatatattaatgcactgctcctaaaagcaaataaaaaacagcaaggtgctcaccttttttttctaaagcatgtggatttttgtcttgttttatgttgttttgttttgttttatcctaaacccactgactcagaatctctggaagtggagtttagactctggcattttcagtaagcttcccaaatgattcttatatttggggaaatcttttgaaagccaaacacgtgttgaactacttgaaactttttyaaagctggttagaatgaccatctaatctgtggtactttaaaagagaaagaagacactattaaaaaattattgcagaacaacctgtgtgtatatatatatatatatatatatatatatatatatatatgccaagaacttcccagaaaatcaagaaatactttcattttagtgagaatggaatactaggatacatgtcttaaacataaaatccagaacagactaaatgttttggatgtatactagactgtt

SEQ ID NO: 786374 - DNA, 644 bp, Homo sapiens
cactttttcaccatcctagaaaaacccaggttgaatcatcataagttggggatcatctgcataagccacatagtatttgctgagaacttggtatgtataatttattctgacttccgtggagagaagagagagtatgcagatcatttggatatattaatgcactgctcctaaaagcaaataaaaaacagcaaggtgctcaccttttttttctaaagcatgtggatttttgtcttgttttatgttgttttgttttgttttatcctaaacccactgactcagaatctctggaagtggagtttagactctggcattttcagtaagcttcccaaatgattcttatatttggggaaatcttttgaaagccaaacacgtgttgaactacttgaaacttttttaaagcyggttagaatgaccatctaatctgtggtactttaaaagagaaagaagacactattaaaaaattattgcagaacaacctgtgtgtatatatatatatatatatatatatatatatatatatatgccaagaacttcccagaaaatcaagaaatactttcattttagtgagaatggaatactaggatacatgtcttaaacataaaatccagaacagactaaatgttttggatgtatactagactgtt

SEQ ID NO: 786375 - DNA, 565 bp, Homo sapiens
cacgtatcatcccacatagaggctgaaatgtcttcttgactaaatccagttttcatctatgttcacagtatcaatgtctctacgttctcctgttcttggacaggttttccaggttttctttatgcaaatgtcctctgtttctctccaggtcttttaagggctgcttacttagctactagtatttgctcatggtggtgactgattaaagtctatgatggaaagatttcattataggttatccattttctttgaaaattgaaacatgttatggatataatctattattctttctattaggaagcctgtgaaatatttggggcagtttaccttcaattcacctttccattgacaatgattgtaaaatatgcaaatatatattccatacgttatgcagagttctgggtgctgaaatgactaataatctatagktatgtatattctcatgtacatattgtgtcattttagtcactaatttttaatatttcgaaacacaccaatccttcttttaacaatttaaaaacaatttttaaattgtttatgaatttgtaaatgtccctattaataa

SEQ ID NO: 786376 - DNA, 608 bp, Homo sapiens
ggttattttttaaaaccacatctagcaatatcctcaacttataagctaaaaatttaaataatgaaattactcttttatttatggyagaaaaaataaaacatagttcgttaaattcacaaattcaaaatttgataataacaatcagattagcctctctttctgatgtagtaaagacttaaggaaatgctttcagtagatctaccaagatagaaatccatcacattatttatttgtagttttacctctgacacattattttatctcgatatctcagtttctttgactcatagttcatattaaaacatttgttccaaaggcttaatgtgataatcaatgccatataattattatatggcaaatcctgaactatgtcctgaattaataaatgataactatgattggaaagcagtatagtattgggcatctatatttaaaattgtgaataataaaaattaataggtaacacaacacactagaatctgtttttaagtctgcaaatattttttcttactttttcctcacagcaactccaaaatggaagtactattgttatctccgtttacaaattaggaaactgaggcacagatatgctcttgggtacttgtcag

SEQ ID NO: 786377 - DNA, 307 bp, Homo sapiens
tagttttattttttttctttccaactgtatgccttttatttatttttcttgccaattaccctggctaggacctctgctacgatgtttaatagaagtgatgagagtgtgcattcttgtcttgttcctgaacttaaggatagatacatttrgtctgtcactattaagtgtgatattacctattggtttttcatagatggccttttatcaggttaaggaagcttctttctgtttctcgtttgctttttttttttggttatcaatgtgatatagcttggatatttgtccctgtccaaatctcatgttgaaa

SEQ ID NO: 786378 - DNA, 512 bp, Homo sapiens
aaataaaataaaattaccatgtgatctagcaattgtacttctggatatatatccaaaagaattgaaagcaagatcttgaagaggtatttgcacatccatatttatagcaacagtattgacaatatccaaaaggtggaagcaacccaaatyctcatatcagatgaatagattttttttaatgtggtatatacttataagggaatgttattcagccttgaaaaaaggaaggaaattctgacacaaactgcaacatggatgaaccttgaggacattatactaagtaaaataaaccacaaagacaaatattgcatgattccacttatatgaggtatctaaagtagccaaacatatagaaaaagaaagtagaatggtggttgccaggagctgggaggaagggaaaattagagttgtttgatgggtatagagtttaagtttgcaagataaaaacatcctgaagatatattgtgaaatattatgaatgtattcaatgccacaattatcatgttcttttg

SEQ ID NO: 786379 - DNA, 483 bp, Homo sapiens
tgaagtatgcagaaattgagtggcttaagttcataagggaagtgaatggcaatcatttacacaattctgtgcaagtcaatacttggcctctagaatataacctttctgtataattcttattgttctgttttagtctaagtgattattgcttgattttcccccacttctccatttacttcattgtttcatacccactttttccactcatgcctttgaattggattatagactggctatggccggcattttgaaattactaaaggaactggtmtcttcaatcaagaagcctaataaagagtgaaaatcctagaccaatactgctaccaggcaaaaaatttaaaaaggtgaaggtatataaatcaagatagatagaaaatgaagaaattacaaacaggccaacttcttaagcactttatcgatagatgagaacaaacatttagtaggcaaataaatatttgagcatctgctctggggtgtcattat

SEQ ID NO: 786380 - DNA, 495 bp, Homo sapiens
tcttggttctggtttttctctctctacttaatatttcagattggcattaaaccgagtgaattccctttctgattaatcttgccagagcagcccagaaaaaaatgatctcaataccttctcctaatatttgagggaattggatgttaaatagattcacagtaactgaagaatagttgtggaagggaatttttaaaaatagttaacacagaattcaaaaagtacaaaaaaagcaataactaagaagtataattcttctstcctgtttctgccagctacaaagttctcctgcatgaaggccactggcattttatgaattgttctggagatactctaatgagtttacaaacatttgtgtaatatttgtgtgtatatttcttttacacaaacgtatcatgccatctactctgctctgcatgttgttgttgttttacataatttatcttagagattgttatagattgaattgtatccccccaaaaagtatcttggagtcct

SEQ ID NO: 786381 - DNA, 571 bp, Homo sapiens
atatcaagggatcaccccatgggacaaaagaatttgaacagcagtccttgagttcaagatctttccactgaatagcctacgcaaatagaagaaaccagaaaagtaattctggaaatatgagaaaacaaggttctataacaccccccaaaagattatactagctcccctgcagtggatccaaaccaagaataaatccctgaattgccagataaagaattcagaaggatgagtattaagttactcaaggagataccagagaaaagtgaaaaccaacttaaagaaatttaaaaaataatatagaatatggatgaaaaattttccagagaaatagacatcataaagaaaaaacaatcacaacttctggaaatgaaagacacacttagagaaataaaaaatgcactggaaagtatcaacaayagactagaacaagtagaagaaagaacttttggcttgaagacaaggcttttgaattaacccaatccaagacagacaaagaaaaaagaatttaaaaaaatgaacaaagcctccaagaaatttgggattatgttaaatgtccaaatttaagaataat

SEQ ID NO: 786382 - DNA, 583 bp, Homo sapiens
agtattttcattatgtagtcacaaaatttatatttgtgctactgaaacttagtgctaattagaagagacctagtacattacctatcagaaaattggttcactacgttattttaagatgttttttgtggggacttctgatatacttatctattaaatggtgcttttaaaaagagggaaagctataatgataatagcttccatttttgagggtttattttgttccaagcattgtttatgcttttcatatataatattaccttaagcctcacaacagccctgtgargcacaggtattatcttcattttatgcatgatgatgacactaataatagcaatcgtttattgactgattactgttttcagatgaagaaaatgaggtacagagaggttaagaaatttgatttgagatcaaataggtagtgacagaagtaagatttgaacccaggacagataaatgactccaaaggaatatgatactatatgtttggctactccccgaagggaaacattgattctgtatttttgtttttttttcaatgtacccgtgtatactttgatgagctccctttattcataccaaacaa

SEQ ID NO: 786383 - DNA, 583 bp, Homo sapiens
agtattttcattatgtagtcacaaaatttatatttgtgctactgaaacttagtgctaattagaagagacctagtacattacctatcagaaaattggttcactacgttattttaagatgttttttgtggggacttctgatatacttatctattaaatggtgcttttaaaaagagggaaagctataatgataatagcttccatttttgagggtttattttgttccaagcattgtttatgcttttcatatataatattaccttaagcctcacaacagccctgtgaggcacargtattatcttcattttatgcatgatgatgacactaataatagcaatcgtttattgactgattactgttttcagatgaagaaaatgaggtacagagaggttaagaaatttgatttgagatcaaataggtagtgacagaagtaagatttgaacccaggacagataaatgactccaaaggaatatgatactatatgtttggctactccccgaagggaaacattgattctgtatttttgtttttttttcaatgtacccgtgtatactttgatgagctccctttattcataccaaacaa

SEQ ID NO: 786384 - DNA, 590 bp, Homo sapiens
atatgcatgtttaaaattcatatccactgcagtgacaagtcactgaacactagatgggaagacatttcagttgaagctcagccaaaagcccttttgaaacaactctgacaaaataacgccataagtgaataaaaccagagagttcctgggtatctttgaaaatrtctcccatgatgacagtctcagacaaaggtgctgtgcacagcttctaagaagcaatcacacacaagcacagccattcaacttgcagctagatttcctcagttccaatttggagtcaggtggattgtgttgtccagggacagactgtgcttttgatagtgacttggaacaatataattctttgctaatgcagcttcatatcatgaagttacatattttcttggtatgattgcacggcccttgaagtaaaacagccacatagttgtatgctttaaaatagcccggtagggaagaattccacattttagaagatggatttttataatttaagtttgtgaatgtaaattatttgtgaacaatgggatgtgacatctcaagactctccttattgggatccctgagtgagtttaaaactggcttctgtggca

SEQ ID NO: 786385 - DNA, 597 bp, Homo sapiens
cccatccctgctcgttccttaggggatggaccagatctgaagatctcaggggatggggagccaaaagcagaggggtgagagtgttggaaaggagaagagagactcctctctgggctagtttgtgagttcagccagaacacaggaagaaacagatccagacctgagtcccttactctgtgaggagaagcagttctgacctagcttgggatagagggttgggacctgctgtctgcatggccacctagcatgaggcaccgagagggccacaacaacagtgacgatgtgggcagatgggtcagtagtgacaggctgcacacatggacattcaactcatgaggcacaaagggcccatctgcgctgactgtgggctgtggtacaagacatgtcaggatgagygtggagctttcatggcactgacgggggtagctgagtgtagttctgagaagcggatggcatctgaggtggggttgggcaggctgagggctgttttcctggttcctgctgaggctcatcccctgctaattgtcttctccaaattatcctgttactgcatggctatgcattagctctttgtttgcctacaacacatatgtgaca

SEQ ID NO: 786386 - DNA, 635 bp, Homo sapiens
acatattttgcatactttatctcttgcgttacgatatattctcccagaattttatattatcttaagctttgctggcactatttttatatattgaagttaagagcccctagtagtgaatgtttttattttctgcttttggatagcactagaagcatggaaatgactatcattttagctctgttactagtcacaatcatttaaaattgcatttggaaaccctattttctttctgaaaaagtaggctcaatgggggagttgtaagaattattgacacaagttattgacttagaatggaggtactttaaaataaattttttagtttcagcatgctgtaattctagattgttggtattagttttaccgtgtctgggaagatttattgtgcatttttgaaatgagtgtaaatgctgtatatatgtgatagtaagggagaaaacttgactaagattttgtcgatttggtctcatttcacagctgtatcataggttttttcamatcattttaggtaaattacttaacatttagataatcacataatttatttcctacatcaggacacttgagatcagtgaaagtgggtgctattaaataattatactggcatgacaggcataaacatgaactgtcttggggat

SEQ ID NO: 786387 - DNA, 602 bp, Homo sapiens
tttctatttctcttaaatttgatattgcatctaatttgtacatcttttcctgtgtatttaaaaattgccattttaaagttcttttctgctataatagttctaacatctgtggttctgctgtgtgggttttcttttgattgttttcctcttatgttatcctacttctttacatgtcttaaattttttattgtgctctaaataacgtataaaagaaccattgaaagcgaagcagtgttctttccttttcaggaagctgcagtgaggctgataaaataggagttgaatttgtttagcgttaggttgctgctttagttactttcacctggcttctgttttcagctgtcatgagggtgggagatgagttttgtgtctttcattggttctttccactagcatgactttagggtgtatgaactgtgagactgcasaaatgtttcatggctttatagccccattctcagcctgctacactgctgtaccctcagtaaatgccccatgaaggcgatctaatgtgtggggacaaataactctccattttaggatcctccagattctaactggtcatgccagcccacgtcattaaaggctccactccttatacc

SEQ ID NO: 786388 - DNA, 597 bp, Homo sapiens
gtatctggggctcaataaattctagctcctcctcccttctccttcctttcacaaaataatattagaaacgtgacaagtcgatgactgttagcttggtagcatcatgaacccatcatatcaggcctgtacctaactcttcaggttactattatcccctaacctcttaccttctctgatctagtcacagatcagagaaccacccacccattctcaaatcacaccctacactgtgccattgtgtgtgcaattctttgcctagactgccctccccaatctccacatggccaagtatttctcatttttcaaggtccagttcatctatttctgtctccccattgccctcaatactggcagcaaggccctgttcaaatgccatgttatrtgggaagcactccctcacttctaactggaagtaaacgctgcctcttctaagtgaacgcagaggttttgctgtgtgtctcatcatttttcccttctataataaagaagtaagaataccagcccctatccctccaccagctgactaggaagctctttgagaaggatcaacattgcgtatgcatcatcctggaaaccctcaggagaaaactctgaaca

SEQ ID NO: 786389 - DNA, 629 bp, Homo sapiens
tcctgagcaaagttctgggattacaggtgtgagccactgcgcccagctgagattgatgattttgaaaaacgcagttccttccactcttacttttttttaatataattttctcattttgggtttgtctgatgtttccttgtgattagattcaggttttgtattcctggcttaggattctgtacatccagaggtacacagagtcatctgctctttgttgatgatactgattttgattacctagttgggtgttgtctgaattctgtatcctatagtcattgttttttaccccttgtggcttataggcaatatgtgggggagacactttaacaccatgtacatatcctactccttagcaaaatttccacccatatttagcatccattgatgattcttgaaccgrtttataatatggttgttgaaaagtaagatttctaacagtaacactcctaggtttaccagttaacactttgcattttattctaaacaagagccttccttctttttttcccgtgtctttcatgaacttgcagatacctgtttttttttcaatgacttatcatttattaccatccttaatgacatttgtgctctgagtgatccagtgggggccctttcaagcttgtgtcctt

SEQ ID NO: 786390 - DNA, 628 bp, Homo sapiens
caataaagtggatatggcaataaaccaagtcacacaattttttttgtttcttaatgcatataaaagttattatttacaatacaccatagtccattgctagtgtgcaatagcattatgttaaaaaaacacgtatataccttaattaaaaatactttatggctaaaarttgctaacaatcatctgagccttcagcaagtcctaatatttttgctgatagagagtcttgcttccatgttgacagctgctgactgatcagggtggtggttgctgaaagttggagtggctgcagcaatttcttaaaataagacaacaatgaagtttggcacattgactgactcttcctttcatgaaagatttctctgtaatgctgtttgataacattttacccacagtagaacttctttcaaaattggagataatcatctcaaaacctcccaccattgctttattaactaagcttatgtaatatttttgatcctttgttgccgtttcaacaatgttcacagcatcttcaccagaagtagattctatctcaagaaactactttctttgttcatccataaaaagcaacttttcatctgttcaagttttattgtgagattgcagcattgcagttaatcttcaggct

SEQ ID NO: 786391 - DNA, 628 bp, Homo sapiens
caataaagtggatatggcaataaaccaagtcacacaattttttttgtttcttaatgcatataaaagttattatttacaatacaccatagtccattgctagtgtgcaatagcattatgttaaaaaaacacgtatataccttaattaaaaatactttatggctaaaagttgctaacratcatctgagccttcagcaagtcctaatatttttgctgatagagagtcttgcttccatgttgacagctgctgactgatcagggtggtggttgctgaaagttggagtggctgcagcaatttcttaaaataagacaacaatgaagtttggcacattgactgactcttcctttcatgaaagatttctctgtaatgctgtttgataacattttacccacagtagaacttctttcaaaattggagataatcatctcaaaacctcccaccattgctttattaactaagcttatgtaatatttttgatcctttgttgccgtttcaacaatgttcacagcatcttcaccagaagtagattctatctcaagaaactactttctttgttcatccataaaaagcaacttttcatctgttcaagttttattgtgagattgcagcattgcagttaatcttcaggct

SEQ ID NO: 786392 - DNA, 490 bp, Homo sapiens
tacaggcatgtgccaccagaactagctaaatttttttatgttttatttttgtacagacgaggtctcgctttgttgcccaggctgatcttgaactcctggcctcaagagatcttccctggccaggcacagtggctcacgcatataatcccagcactttgggaggcagaggcaggagggtagcttgagtctaggagtttgagaccagcctgggcaacatagtgagaccttgtctctacaaataataaaaaataaacaaaattagccagccatggtggtrcatgacagtagtcctaggtacttgggaggttgaggtgggaggatcgcttgagcctaggaggtcaaggctgcagtgagccaagatcatgccaatgtactccagcctgagaaacagagtgagagcctgtctcaaaaaggaaaaaaacaaaagaggggtcttccccgcttggcctcccaaagtgctaggattacagacatgagccaccacacttgg

SEQ ID NO: 786393 - DNA, 645 bp, Homo sapiens
tgagtggattagccaggcaataagagaacaatgaaaacctcagtttaaaaaatgtgtcatttgcctgcattgacattccttccagatgatgacattccaggagcttttgataaattaaagctacatgtgcctgaagaagccagtgaagttactgactagttaaaaaataattacgtatgtggtaggatgagaagacactcaacggtattgctgaggtttttttgttttttgttttgagacagagtcttgctctgttgctcaggctggagcacagtggcgcgatctcagctcactgtagtctttggctcctgggttcaagcaattcttgttttgcagcctctcgaatagctgggattacaggtgcgygccaccattcctggctaatttttgtattttttagtagagatggggttttaccatattggccaggctggtcttgagctcctgacctcaagtgatccacccgcctcggcctcccaaagtgctgggattataggtgtgagccatctcgctggcctgatattgctgtttgatcaccagtattgttttcaccaaatctgtggtctgtatatgagtgcaagtgaaatggatttccacatgaccaaaacaacacagaagcatggcatgggaaaaaataatagggaa

SEQ ID NO: 786394 - DNA, 639 bp, Homo sapiens
ttgggaatgaaggaggagaaacatttggatagattgtaatgaactgtagagatgtttggttccagacacctagtggagatgtttaagaggttaatatgattgtaatgagttgtagggatgtttaagaggttaatgtgattgtaatgagttgtagagatgtttggttccagacacctagtggagatgttaagagttgtagagatgtttaagaggttaatgtgattttgagttctagtgtttggctacctctctggtagctcstttctattctctcagttccacttctttcaggtacccattaaatgttggtatttctgagagtccatattaatcacttgtttccactccattcctactcatctgttcctttggcttcaacttcctgctctgttgctcactgtcaaattattgtctccagacaagacttttgtcctgagtgccaactgttcagtctaactgcctacatgttgtttcaatcagatattccccaggcatgtaaagataaatgtgtacaaataaggaccactcattttcttcccccatttcttttacaatgtagagaaaaatggtcaagagcacagatgctagagttagactccctagatttgagtcccatatgtcacttactagctttgtgac

SEQ ID NO: 786395 - DNA, 639 bp, Homo sapiens
ttgggaatgaaggaggagaaacatttggatagattgtaatgaactgtagagatgtttggttccagacacctagtggagatgtttaagaggttaatatgattgtaatgagttgtagggatgtttaagaggttaatgtgattgtaatgagttgtagagatgtttggttccagacacctagtggagatgttaagagttgtagagatgtttaagaggttaatgtgattttgagttctagtgtttggctacctctctggtagctcgtttctattctctcagttccacttctttcaggtacccattaaatgttggtatttctgagagtccatattaatcacttgtttccactccattcctactcatctgttcctttggcttcaacttcctgctctgttgctcactgtcaaattattgtctccagacaagacttttgtcctgagtgmcaactgttcagtctaactgcctacatgttgtttcaatcagatattccccaggcatgtaaagataaatgtgtacaaataaggaccactcattttcttcccccatttcttttacaatgtagagaaaaatggtcaagagcacagatgctagagttagactccctagatttgagtcccatatgtcacttactagctttgtgac

SEQ ID NO: 786396 - DNA, 639 bp, Homo sapiens
ttgggaatgaaggaggagaaacatttggatagattgtaatgaactgtagagatgtttggttccagacacctagtggagatgtttaagaggttaatatgattgtaatgagttgtagggatgtttaagaggttaatgtgattgtaatgagttgtagagatgtttggttccagacacctagtggagatgttaagagttgtagagatgtttaagaggttaatgtgattttgagttctagtgtttggctacctctctggtagctcgtttctattctctcagttccacttctttcaggtacccattaaatgttggtatttctgagagtccatattaatcacttgtttccactccattcctactcatctgttcctttggcttcaacttcctgctctgttgctcactgtcaaattattgtctccagacaagacttttgtcctgagtgccaactgttcagtctaactgcctacatgttgtttcaatcagatattccccaggcatgtaaagatmaatgtgtacaaataaggaccactcattttcttcccccatttcttttacaatgtagagaaaaatggtcaagagcacagatgctagagttagactccctagatttgagtcccatatgtcacttactagctttgtgac

SEQ ID NO: 786397 - DNA, 648 bp, Homo sapiens
ctggcttttatttgtgattctagaatcaggcaactcctcattttacaaaatagaatgagtgttcccaatgaattgagcagaggttggtttaatagacagaaatggaccaagaaggcagaaacggaaaaccaaaaaaggctgggttgtttcaaggttacttttcttgcaaaggttaaagcagaggggacttcattatcatgccagctagcactggcttgtttggaaatttggctattatctctctcctgataycatggaaggttagagaaataacttagtgttggcttggtggtgtggaacttcagcttgagtgaccccattttggcttggtatgtgttgggcttagtgcaggagctcagtccaaaccgatggcctcctataacggtcttaaggaattattatagttggagcgaaagtccagtcttctgtcccatttgcttactaagctatactaagggaaaaaaaatgggactaaatttaaatattgtttttaattttctgttggaacaaatgagtgattgctatataaaggtgcatttcaagtaccaaatgcaaaattatgctattgttgtgttcttcaagtgtgaactttagtggttacagctgaaactcgtagagatgtctcagattctgccttcaattggctta

SEQ ID NO: 786398 - DNA, 617 bp, Homo sapiens
ccccctaggaatgtcaggtaaccatcaggtgatggtcagacagttgttaagctgtctctctaaaataatagtcacagccagcatgagggaaaggcagtctcccaacagataaagcaaaacccaaagctggtgatcagcagtttcccattaagatctcaggagttgggcgagtgggctyacacatgcgtactaaaaggcaaaatggcagcatttaactggtatatcactttcctctaggaacactcaaatggtaagggaagaacacctcaagtgagcatgcatacaactccagtgaacacactgtgctcgcagcccctccgaagggctagcaggccactgcgtgtgcagacagcccaccccaagggaagaatcaggggagaagggatgcaagaccccagaagcatgctaacatataaaacaccaagtcaaaggtcaaacagtgcacttggtctctcaagccacccgcttccaaatgtattttgattttaattccagctccaaagctttttaataagctttcactcctactctaaagcttgccttgctctctccctctgccttatgccccatggttgaattttttcttctgaagagacagtaattgaggttgctgcaaa

SEQ ID NO: 786399 - DNA, 637 bp, Homo sapiens
ctgcaccaagcctgtctaattaatatggctatttggtctagataaacagacaaagtttttgagacagaataaggaagaaaacatcactccactaaatcattatgttgaactattagtccagtaggggagtgtaatgaagcaaaaactagaagctgaaaaggctgaaatggctgtactctagataactgggcagtctggattctttcttctacaaattccagttctattaaagcctcagaggtcaaaatcctggcgctgtggagattggaatctccccgcaacatagaaatcaagttagacagtgcataggttggaatgcctaaagtaggtcttaaataattaatgttacctaaaagtttgtggaagtcatctaaagtttttaaagaatctctcctaatttgaactttttgaggttgaatacattgtttatcgaccaccattcctaaatattgaacaggagtggtctgaygaattttatcttgagcaatgtgtaatccagcctctataacacagcagctcaaaatttggtaacagtcaattctttatcagtgggggcagcaattaaaatatcatcaatataatgatgaatataggcctcgggaaattgggcttgaactggtgaaagcacttgcccaac

SEQ ID NO: 786400 - DNA, 637 bp, Homo sapiens
ctgcaccaagcctgtctaattaatatggctatttggtctagataaacagacaaagtttttgagacagaataaggaagaaaacatcactccactaaatcattatgttgaactattagtccagtaggggagtgtaatgaagcaaaaactagaagctgaaaaggctgaaatggctgtactctagataactgggcagtctggattctttcttctacaaattccagttctattaaagcctcagaggtcaaaatcctggcgctgtggagattggaatctccccgcaacatagaaatcaagttagacagtgcataggttggaatgcctaaagtaggtcttaaataattaatgttacctaaaagtttgtggaagtcatctaaagtttttaaagaatctctcctaatttgaactttttgaggttgaatacattgtttatcgaccaccattcctaaatattgaacaggagtggtctgatgaattttatcttgagcaatgtgtaatccarcctctataacacagcagctcaaaatttggtaacagtcaattctttatcagtgggggcagcaattaaaatatcatcaatataatgatgaatataggcctcgggaaattgggcttgaactggtgaaagcacttgcccaac

SEQ ID NO: 786401 - DNA, 525 bp, Homo sapiens
ctgaaatagggaaagactttcccacataggaaaataaccctggcaaaagctgtgggggctctttgtctcctggtaagaaaatgttcctggcctaaggcccattcttatgtggccaagtcgtggagttgaaagaccacatgcataagaccacctttccttacagcccatcccgactcttgtctggccactgaaacagcagataaaacatatcaaatcacccaccttgatttgraggtgtagttgggtcccatggagcccctgaacaacttgtgcagatgcagtttgctcaaacagcctcttttattttgaaagagcactttaccagagtcaataggggaactaaaagcaggagaatggttctcatcagaaatcccaagtgcttggattaaggtaaacaaagaggtaaaaaatgagtctgggtggactgtggatacatagctgacaaggacctcactgagtgtggatattcagcttggtttctaccctccctgaattaatgatatacacatagcaagtggtgttggc

SEQ ID NO: 786402 - DNA, 636 bp, Homo sapiens
tcactcttagattatcttgcaaagcttgtctttttggctttcttgtatctgtattctctcaaaaaaaaaatctttcctacagttgcaaagtaaaccatctgaatataccatagttgtctataactcaatggttcttaattgtcattctcgttacacctaaacccccactcttagttttagtctctccataacttagattcaaattctcttcaacactgttttccttacctcctggcaggaattgtcagttatacttttattatgctggctcttgtttctgtagctttatcctggtcccaaagtggaaaaaaattatcttcttctttctattcattaatttcaaggtggaatatgtctacactttctctaatacctatatcagagtctttcctctggcagggaggaccacaatctttcttcaggattctgtccattttcatcacttcccttaaatycttctgaagtcacattatggctcctttcccatggccactcttacatctctgcaacccatctttcccgtgatgacagcctaatcttttaaaatataaattgtattatattgcttcactcttcaaaaattttacttatggctatagtatagagttcaaactcttcattgtttccaaaagtctt

SEQ ID NO: 786403 - DNA, 636 bp, Homo sapiens
tcactcttagattatcttgcaaagcttgtctttttggctttcttgtatctgtattctctcaaaaaaaaaatctttcctacagttgcaaagtaaaccatctgaatataccatagttgtctataactcaatggttcttaattgtcattctcgttacacctaaacccccactcttagttttagtctctccataacttagattcaaattctcttcaacactgttttccttacctcctggcaggaattgtcagttatacttttattatgctggctcttgtttctgtagctttatcctggtcccaaagtggaaaaaaattatcttcttctttctattcattaatttcaaggtggaatatgtctacactttctctaatacctatatcagagtctttcctctggcagggaggaccacaatctttcttcaggattctgtccattttcatcacttcccttaaatcyttctgaagtcacattatggctcctttcccatggccactcttacatctctgcaacccatctttcccgtgatgacagcctaatcttttaaaatataaattgtattatattgcttcactcttcaaaaattttacttatggctatagtatagagttcaaactcttcattgtttccaaaagtctt

SEQ ID NO: 786404 - DNA, 450 bp, Homo sapiens
tattctttttatgctactataaatgagattgttttcttaatttcctttcatgatagtttattgtgtatagaaacaccattgatatgtgtgtgttgatttttgtgttctacatctttactgaatttattaattctaatcatttttcttgttgagtattaagggttttctgtgtacatcatcatgtagattttataratcatatcgattttgtagattattgctgcagacagataattttaccttttactttagattttgatgccttttatttctttttcttatctacttgctctgtctagggcttctaacactgtgttgaatagaagtagcaagagtggacattcacgccttgtcctggatcttagagaaaagattgattatgatgttagctgtgggattttcatatatgccctttattatgggatttttttttggatatgacaccaaaag

SEQ ID NO: 786405 - DNA, 501 bp, Homo sapiens
aatgtagcggcagctctgactaggacttgctatctgtgtcatccctacttcccaggctcccctgctcctctcttgtttccacggcaaccagtctggcgacagctccagagcatccccctcccctccccagtcctgggtaccactaggggttgatccaaaccacacgccatagctatttttagccaaagtccctcctcctggacaactcagagcttggctcctcaccccctcataggaaaaaaaaaaaaagaagaagaaagaaaaacaaagctggcrcgctggctctttcctaagaagctccttcctgggggaaaatacaagccctcatgtatttgagaataaggtgctaggttccctggggtttcagagggccatctggtagctggcagctcaccaccttcaacatgggtctctgcgtgcaggtgctgctctcaggtcaggctgaccatcatggtctagttttggagaggccatggatccagaaggcggtagctagaagga

SEQ ID NO: 786406 - DNA, 513 bp, Homo sapiens
caggtacaacctgcaggtaactcctgctgtttacctgagctgagctgtgcgctgaggcagaaatagcctggaatttggggatcatcagaactggagagggacctcagagattttcttttttttttctttttttgagacagagtctcgctctgtcacccaggctggagtgcagtggcgcaacctcagctcactgcaacctgcacctcccaggatcaagccattctcctgcctcagcctcctgagtagctgggactacaggtgyctgccaccacgcccagctaattttgtgtgcatgtgtatttttagtagagatggagtttcacgcattagccaggatggtctcaatctcctgacctcgtgcctcccaaagtgctggaattactcacagattttctcatcccgttccttgtcattcagatgaagatgccaaggtcagagtagagaagcctcttgtccaacatcacacaggtggttagtggcttcagcaggactagcctcagctgacttgacttt

SEQ ID NO: 786407 - DNA, 503 bp, Homo sapiens
ttgatctcttagggatcctatagggaggccatttcctgtcctggaattagtttttctaaaatgtgaataaacttgttttataaaaagcaggcttggctgtgtcttccctaccatgagactgtaaaacgctcagggtgcatagtagggaggtggttggggattgacaacctattctggatgacccaggcctctcttcccaccacaaacaccatctggcctccatgggccatgccacccaccccaggaggggacacctgggttccatctgcagcctgaactgtcggggctgagacaactcctgattggactcctacttggggagggaagcatagaaaaggagggtaggtyccagctgcctgtggtcacccccgcaccagcttctcccatgttaaagggcatgggcctccaggggcagtgccttttctgagcttcccagactttccccaactcttcccacgtttcattctcctggtcaggctagtcttggacctgactcctcccac

SEQ ID NO: 786408 - DNA, 613 bp, Homo sapiens
ttgagctgttatctccttgggctgaattctagaagtgggaatgctgggttaaaaagtacgcacattttacatcttgatatatgtggccaagttgccctttggaaaggttgtctcagttcccagtttacactctttctgtcctctgtctgtgacgtcttcttgttgaacctttttcattttgattctgggtctcccattatgtcccccttgtgccctgaggtaaggccacctagatgcagaaggaagctggatgaacacatttttttttttaaattggtccacgagatcacaagctgccaggaaagtgttgccactgaaggcactttctgatgtggccgttgagggacctgttgygccactgcagttcttcctgaagcagaaagggcgaactatgaagcatgaggaaggctgttgaaaagtgactttgatgaatgttaagcattgttctctccaggctgcagatcgaagcagcccggttgattttactggattttgcatgtgaacagaggcttggagtggcagattgcccttttcaaagatggccacaacaatagcgtccatgccatatgtttgtgtacagtgggaccttgccatgacccatcaagaggtggag

SEQ ID NO: 786409 - DNA, 606 bp, Homo sapiens
cttttcaaagatggccacaacaatagcgtccatgccatatgtttgtgtacagtgggaccttgccatgacccatcaagaggtggagtctaattcccttcctcttgaatctaggctggcttgtgactgcttcgactaatggagtctggtggaagaaatgcccttcttgaattccagaaccacgaatttgggagtaaaataaaatggtggtcattctacattttgggggtcatctattacacaaccataatacctggaacatttagctactgctcactggggaagacagtccagtgaaatgcagcagttttcaaccttgggatacctgagaatcaagtggagctctcatgaatgatgcagattcctgggttccacctctagaggttctgactcacaggacttagkgtggggctgagaaatctgcattttaaaatgagcaccctggaaaattctgacactgggtaaccaatcgaaaactttggtgaatcatgtaagagcaaaagctaaggagccagaaagacttggatctgaattctggttccgtggctaccatctcgctgtgcctttgttcctcatctgtagagtgcaggcagtcatatttcctacttc

SEQ ID NO: 786410 - DNA, 591 bp, Homo sapiens
tttctgctgtttgacctggctccagccccaagagccccttttccttctaactgaagtctcttgaccatacccatggggttggcttcatcccagagcatggaagaatgactttcatgtgtcctagtttcactttctgggactcagtgaaagtataaggtggttggaacagcatggacaaagatctggaggtgggattgagctggagtccacaggtggcagcaagctgatattcagagaaagaggtagtttagagtctgattaccagtatttagaatgtcaggttagggagtgaggaagtagggaggcaaggcaaacctctgagcaagaaagtggcaggatcaccactgcgattcagcaaggcatctctgtgatgctggttgargcaggatggtggcctggttgttaaggcaagggaagaaccctggattcaggaacaggctcagtgcaaaggcaaactgtgatattccttcctgggagttttggaagagctggtagcagctgactgcttctatacctcccctgcccgggcatgtatggttgatggaagagcaaaggactccattctttgggctggaatgccaaggcctgggt

SEQ ID NO: 786411 - DNA, 591 bp, Homo sapiens
tttctgctgtttgacctggctccagccccaagagccccttttccttctaactgaagtctcttgaccatacccatggggttggcttcatcccagagcatggaagaatgactttcatgtgtcctagtttcactttctgggactcagtgaaagtataaggtggttggaacagcatggacaaagatctggaggtgggattgagctggagtccacaggtggcagcaagctgatattcagagaaagaggtagtttagagtctgattaccagtatttagaatgtcaggttagggagtgaggaagtagggaggcaaggcaaacctctgagcaagaaagtggcaggatcaccactgcgattcagcaaggcatctctgtgatgctggttgaggcaggatggtggcctggytgttaaggcaagggaagaaccctggattcaggaacaggctcagtgcaaaggcaaactgtgatattccttcctgggagttttggaagagctggtagcagctgactgcttctatacctcccctgcccgggcatgtatggttgatggaagagcaaaggactccattctttgggctggaatgccaaggcctgggt

SEQ ID NO: 786412 - DNA, 519 bp, Homo sapiens
atgtctcttcacatcttttgcccatgtattaattggattgtttggattttttttactgttgagtttttttctttttcaagacaggatctcactgtgttgcctaggctggagtgcattggggtgatcatggctcactgcagcctcaaagtcctgggctcaagtgatyctcccacctcagtctcccaagtgcagtgattacaggcatgagccactgcacctggcctactgttgagttttgagggttctttatatattctagatactagtcctttggtggatatatggtttgcaaatattttgttctctccgcagcttatctttttatccttttaacagggtctttcacaaagcacacattttttaattttgatgaagtttgattcatcagtttttccttttgcttttagtgtgaagcctaagaacattttttgcctagccctggatttcatttataaaattttatgattttacatttaagtccatgatccactgtgtataaggtgtgagacttaggttgaa

SEQ ID NO: 786413 - DNA, 519 bp, Homo sapiens
atgtctcttcacatcttttgcccatgtattaattggattgtttggattttttttactgttgagtttttttctttttcaagacaggatctcactgtgttgcctaggctggagtgcattggggtgatcatggctcactgcagcctcaaagtcctgggctcaagtgatcctcccacctcagtctcccaagtgcagtgattacaggcatgagccactgcacctggcctactgttgagttttgagggttctttatatattctagatactagtcctttggtggatatatggtttgcaaatattttgttctctccgcagcttrtctttttatccttttaacagggtctttcacaaagcacacattttttaattttgatgaagtttgattcatcagtttttccttttgcttttagtgtgaagcctaagaacattttttgcctagccctggatttcatttataaaattttatgattttacatttaagtccatgatccactgtgtataaggtgtgagacttaggttgaa

SEQ ID NO: 786414 - DNA, 498 bp, Homo sapiens
gaatccttttgccttgtcctcccaaagtgctgggattacaggcatgagccacagtgcccagccacaattatcttttaatgagattttaaaaagtgtcttttatgtttatctacatatttacaatattttctccttcattcatttakgtacatctacatttccacctgtatcattttacttctttctgaagaacttcatttaacatgtcttgtagtacatatctgctggcatgaattcccttagtttttgcttgtttgaaaatgtcttgtttagctgtcatttaaaaaaataacagctttgatgagatataattcacataacatacaattcactaatttaaagtatgcaattcagtggtctgtagtatattcacagagccatgtaaccaatcaccatgactaattttaaaacttttttttatgctagaaagaaaccttggacccattagcagtcgcttcccattgccccccaagctcccagcactaggcaatcactaac

SEQ ID NO: 786415 - DNA, 572 bp, Homo sapiens
gttaatatagccttgcatcctcttttgctttccatttgggtctggccttgggtgttggtgtcccctaaatttcaggtcatgacacagcactgggagcagggctgtgagccatcccaggggttggttagtgcgggagatgagcctgtgttcctgtctcttagctccgtgggcataggtcctacctccttgcacagtcccagcatcctgccagggccctagttcagcgaaaatgttcagggaaaatgggatgagccgaataaaatgcagggtgaggctgggatggcatgctygagtgcagactacatgccctgttgagagtgcgcataaggagtgagagtatgaataacagagattgtgtgtacacagggtggggatgtgtgttgagatggcagtgactgggtgacagaggagggagtgtggtttgtctatagtgagagtggcagtgattgtgtgtgtactcagggtgaagtctaattacgaaggctggaagcaccgttgcagagggagcacagcgcactcttgtggccacagctagaatcccaacatatgtatcagtaggttccaccccagcc

SEQ ID NO: 786416 - DNA, 614 bp, Homo sapiens
tgactttcattttacctacctggcctagtccctgctaccatttgaatttctgacacttgacaggaggagggacaatgacattaaccctgggacaactgcagcattccgggggtaggtacaggagtaagaagtaatcagtgaagaaagatagaaggtcactaggaaaaaaatgctgttttggaaacaaaaggtctttcaatacagaggtgatattggtacagaaacttcaaatagaggccaggcacagtggctcattcctgtaatcccagcactwcaggaggctgaggtgggtggatcacctgaggtcaggaggttgaggccagcctggccaacatggtgaagccccatctctactaaaaatacaaaaaattagccgggtgtggtggcacgtgcctgtaatcccagctactcgggaggctgaggcaggaaaatcgcttcaatctgggaggtggaggttgcggtgagccgagatcacgtcattgcactccatcctgggcaacaagagcgagactccgtcttaaatgaaaacaaaacaaaacaaaaaacaacaacaactaaaagaaagttcaaatagaataagaacaaagcgttggcaattaggagattactggtag

SEQ ID NO: 786417 - DNA, 553 bp, Homo sapiens
tcattagtcttcggataaattccagctttgtggttagttgatgttttcccagtttaaatattttaactactacaggtactacaggttgagcatctcaaatctgaaaaaaatctgaaatccaaaacacttctagtcccaataattccagataasagctactcaaactgtactgagattagtaaggggttaagtgaggtttcacatgtagaaaaaggccacactatttttgtagctatctttgttataattaaggtccaactagttgccacaaaaatgttcaaaaagctggtctatgctgtttctcaccagatagctagattccaaaataagttcatttataacactgaacaaaggtgacacttgagaattacacacattttctgaattttttaaaaagtgcagtatttgttaactcttgtgccatcatcataccactaccaccaccaccagcaccattacacatttataaacctgtccaagtcagaaatactctactttccaatacgaagcacttaaagtatttttgttggtaacaataaccacggctctaaag

SEQ ID NO: 786418 - DNA, 553 bp, Homo sapiens
tcattagtcttcggataaattccagctttgtggttagttgatgttttcccagtttaaatattttaactactacaggtactacaggttgagcatctcaaatctgaaaaaaatctgaaatccaaaacacttctagtcccaataattccagataacagctactcaaactgtactgagattagtaaggggttaagtgaggtttcacatgtagaaaaaggccacactatttttgtagctatctttgttataattaaggtccaactagttgccacaaaaatgttcaaaaagctggtctatgctgtttctcaccagatagctagattccaaaataagttcatttataacactgaacaaagrtgacacttgagaattacacacattttctgaattttttaaaaagtgcagtatttgttaactcttgtgccatcatcataccactaccaccaccaccagcaccattacacatttataaacctgtccaagtcagaaatactctactttccaatacgaagcacttaaagtatttttgttggtaacaataaccacggctctaaag

SEQ ID NO: 786419 - DNA, 587 bp, Homo sapiens
tgccagcacacattcattagcactagaagataatcagcttttaatttttgccagtgtgaagctgtgaaatgatatattcaattaatttaccttctaatttctaggtaggttgaacatctttacatgtttattgcccttttatttgttacttttttctatttttctattgggtggtttacttttttttttaaatattagaattagtaatcctttatctrtcctatgtcttttttaaattttttttatttttatttatttatttatttatttatttttttgagatgagccttgctgtcacccaggctggagtgcagtggcacgatttcggctcactcctgcctcagcctcccaagtagcggggattgcaggtacgtgccaccacgcccaggtaatttttgtatttttagtagagacagggtttcaccatgttggccaggctggtcttgaactcctgacctcaagtgatctgcccccctctgccttccaaaatgctgggattacaggcatgagccactgcacccggcctcttatttgtttttgtccaagtttgccatttgtttcttgactttatggtgtgttttgctcat

SEQ ID NO: 786420 - DNA, 474 bp, Homo sapiens
ctcattatttagaggatgaaaaattacaatcattccactgaactggaagttaagacagccacccagccactttgggctcctcacacctctgaatcaataggcaaggaagggagttacagtgttggctggggtaattgatcctgcccaagaggaactggaactgctacacaatggaggtaaggaggagtatgtctggcttaaggagatcccttaggacatctctgtaccctgccctgtgattacagtcgataaaaatgacaacaatccatacaggactatgaatggcccacacccctgaagaatgaaggtytgggtcaccccaccaggtaaaccacgatcagcttgcgagatgagtgcaaagggaatacagaatgggtagtggaaagaggcaaccatgaataccagcaaccaccatgtgaccagctacagaaacgaggactgtaattgttgtatttcttgttttgttacgaatgt

SEQ ID NO: 786421 - DNA, 534 bp, Homo sapiens
ggcctttgatttctcctgcctactctgtgagagaggcgttaattagcagtgaactagccaaaaaagcaggcaggaggcagtgccaaatcaaagaccacagaaactggataaatagatgttaacaaagcatgaagttaacaatggtgaaggggattgtgatatttttgcttaatagccaggaaaagactgccagctctaagttagggatttgcaaaatgtgttttcattttattttatttcattttatttatttatttattttgagacagagtctcgctctgtcgcccaggctggagtgcattggtgcgatctcagctcactgcaagctcygcctcctgggttcacgccattctcctgtctcagcctcccaagtagctgggactacaggcacccaccaccacgcccagctaattttttgtatttttagtagagacggggtttcaccgtgttagccaggatggtctcaatctcctgacattgtgatctgcccggcttggcctctcaaagtgctgggattacaggcgtgagccaccg

SEQ ID NO: 786422 - DNA, 560 bp, Homo sapiens
atatacaatacatacttgaagataatttttaagagggaaggctgcctggtttcttcatgctttctgtaagtgctgtctaagctttgagatttggaataaaatgcccaactctactaccattttccttttgaaatcacgggcagatagggaactgccaagactttatcttaataaaaaataaaagtaaaataaaataaaaataaaagtctttctttttaattttgaaataaggtcttgctctgtcaccgaggctggagtgcagtggcacaatcacagctcactgcagccttgactgagctcaaagatcttcctgagtcagcctcctcagcagctggggctacaggcatgcccaccatcacacctggttagttaaaaaaaaawtttttttttgtagagacggagtctcactacgctgcccaggttgatctcaaactcctgtgctcaagtgatcctccgaaagtgctgggattatcggcatgagccaccacacctggccctactttaaacataatactatactactataggcacaatctttccaaggagctaatctgatgtta

SEQ ID NO: 786423 - DNA, 539 bp, Homo sapiens
gaacactgacgccactaaatgctggggtggatgtggagcaacaagaactctcattccttgctagtggggatgcaaatgggacacacattttggaaggcagtttgggagtttcttacaaaactaaaattttttttgtaagaaaaaaattcattcggtcaccatagagatgtcaaaaattgccaatgctggccgggtgcggtggctcacacctgtaatcccagcactttgggaggccaaggtgggcagatcacttgaggccaggagttcaagaccagcctggccaacagggtgaaaccctgtctctactaaaaaaaaaaatacaaaaattaggccaggcgtggatggctcatgcctgtaatcccaggactttgggaggccgaggcagstggatcacctgaggtcaggagttcaagatcagcctggccaacatggtgaaaccccgtctctactaaaaatacaaaaaaaatagctggacgcagtggcacgcacccgtagtcccagctactcgggaggctgaggctggagaatcgcttgaacct

SEQ ID NO: 786424 - DNA, 527 bp, Homo sapiens
agcatggtggcggatgcctgtaatcccagctctttgggaggctgaggcacaagaattgcttgagcccgggaggtggaggttgcagtgagctgagatgatgccactgcactccagcctgggcaacagaatgagactccctttaaaaaaaaaaaaaaaaaaaaaaaaaaaaaaccttgccaatgctgactacattgcaagtcatcacagaagggtatcgagaaaagttttcaattggcaataatcacgcctcggataaacctcactgcctatgatactgccactgtgctaagctaaacatattcttaccatccaatcaagcrgttatactccttggtatttacctaaatgagctgaaaactcctatctacacaaaaacctacacatggatgtttatagcagctttattcatcattgccaaaacttagaagcagccaagtgccctttagtaggtgaatgaataaactgttgtacatccacacaatggaatattattcagtgctaaaaataaatgagctatcaagccataa

SEQ ID NO: 786425 - DNA, 527 bp, Homo sapiens
agcatggtggcggatgcctgtaatcccagctctttgggaggctgaggcacaagaattgcttgagcccgggaggtggaggttgcagtgagctgagatgatgccactgcactccagcctgggcaacagaatgagactccctttaaaaaaaaaaaaaaaaaaaaaaaaaaaaaaccttgccaatgctgactacattgcaagtcatcacagaagggtatcgagaaaagttttcaattggcaataatcacgcctcggataaacctcactgcctatgatactgccactgtgctaagctaaacatattcttaccatccaatcaagcggttatactccttggtayttacctaaatgagctgaaaactcctatctacacaaaaacctacacatggatgtttatagcagctttattcatcattgccaaaacttagaagcagccaagtgccctttagtaggtgaatgaataaactgttgtacatccacacaatggaatattattcagtgctaaaaataaatgagctatcaagccataa

SEQ ID NO: 786426 - DNA, 524 bp, Homo sapiens
cacttccactccaccagttcctggaatccagccatggtcttgctcaaggggtccaggatgagttgggccagtgaagtcacaagcagggtgctgtctgtgccttcagccccatgtaccaggccaggaatagaatggacccagttctaggctatatttgcttactgaatcacagttttgcatccaggggttgagagccctgcccatctcaccctattctctatgtcaatggggccttacctctccatgycctggactgccaggcaggtggtgctcagtgcctgctttacatgttacagtcagcggcagccgtccagccgactcagccagttgtccatgctttgctccgagtccccacaggcctccaccaggcgcatgaagctctcctgcaggggacgccctctgggcggtgggagtctggtcatcttttccagctcaagcccttgccaagtacagccagggagcaagtgctcaagaccaatgagggagacacagaatcctgtaaagagcccatctgataaaaggga

SEQ ID NO: 786427 - DNA, 517 bp, Homo sapiens
ctgaaggaaaggatcttccttcagatgcacaaaattttttaatgaatttttttatctaacttggtaccgtttgctttaaaatttttaatttaaaacgtttaaaaattttagcacctttaaagggctcctgttggaaaaccaacaatctttttccaaaatgaatttaaaagttaartgtaaaacagtaataaaaaggaataagaagaagccacaaactaactgagagaatgtacagatgaatatttatctgatcttaaggtaggaaagggttaaaaagcattggggaaaaatcttggaaaatcttgataacttgactctaaattttatgtttttatgtaaatactttaaaatgtaaagttaaaaaactgggggaatatttataacaaatattaaaatgttgatatttttaatttctaaagagcttttaatcaagaaaatcataaaattctgagaagactaataaccatttttaaaaattaaatctcacaagtaatcagagaacattaaccttttttca

SEQ ID NO: 786428 - DNA, 576 bp, Homo sapiens
gaccccagggtgcctcataccagccagttagagagcataccttttatttttcagggcagaatgaccagtggttctgagtttgagtttggacagcttcaaagagtggtccgttcaaatgtcaaagcaaggtgcctttggtggctttgtgaagggtgaaaatcagtgatgggacatttactaagtatttctttttttttttttttttttagttgttgagacagagtttcactcttgttgcccaggctggagtgaaatggtgcratctcggttcaccgcaacctccacatcccaggttcaagtgattctcctgcctcagcctcctgagtagctaggattacaggcatgtgccaccatgtaattagcccggctaattttgtatttttagtagagacgggatttctccatgttgatcaggctggtcatgaactcctgacctcaggtgatctgcctgcctcagcctcccaaagtgctgctgggattacaggcgtgagccaccactcccggctaagttagtatttctttaatcttaatgctttaaactaagccacttggatcctgaataatttaaatcttgag

SEQ ID NO: 786429 - DNA, 554 bp, Homo sapiens
agaattggcagggaggtttgctttggagacgatcagggaagattccctaaggcaatgacattgcatcctgcaagggacactgagtaggataagagaatgaaaaatgattctttttgtgtgtgtgtttgtttgagacagggtttcactctgtggcccaggctggagtacagtggcaccatcatggctcactgtagccttcaactcctgggatcaagcgattctccygcctcagccacctgagtagctggaactacagacatatgccaccacgtccagctaatttttaattttttagtgtggagacaaggtctcactatgttgcccaggttggtctcgaactcctgagctcaggtgatcctcccacctcggcctgcataagtgctaagattacaggcatgagccactgcacttggccgtaaaattattctaagaaaatagttgtttttaaaaacacacaaatagctcagaagtacataaaatgaaaagtaattgcccctgttctcctaccctttaaaagggataaatgaattgtaatagggtaaccatctctcagt

SEQ ID NO: 786430 - DNA, 424 bp, Homo sapiens
gttgagcatcttgaaatcaaatatcattttagggaaactcaatttggatgatcaggcagtgattacctgggtttggcaatttattcaccatgacttcctgtttaaaaagagagactgctgggcacggtggctcatacctgtaatcccaacactttgggaggctgaggcaggtggatcacaaggtyaggagttcgagaccagcctggccaacatggtgaaaccccatctgtactaaaaatacaaaaatcagccaggagtggtggcgggtgcctgtagtcccagctactccggaggctgaggcaggagaatcgcttgaacccgggaagcagaggttgcagtgagccaagatcgtgccactgcactccagcctgggtgacagagcgagactctgtctcaagaaaaaaaaataaaaagaaaaaaagga

SEQ ID NO: 786431 - DNA, 576 bp, Homo sapiens
gtctaaatctctagcaagacttgggaagttttcctcaactattttctcagataggttttacgaactctagtttttcttctccctcaggaatacctctgactcctagatttgaacattttacataatcccatgctacttgaagtctttgttcattttaacaaattctttttttctttatatttgtttgactgggttaattcaaaagacctgccttcagactctgagattctttcttctgcttgktctagtctattgttaaaactttcaactgtattttgtatttccttcaatgaatttttcatttctagaagttctggggttttaaatatatctatctatctcattgatatatttttccttcatgttctaagttgttcttttgatttctttgtgttggtttccaactttctcttggatctcattgagctttttgaaaatcaacattttgaattctttatctgatattacaagaattttattttgattaggacctactactatagagttagtgtggtcctttggggtgttgtaacactttttcatactttcagaattatgtctttggttcctaatcat

SEQ ID NO: 786432 - DNA, 632 bp, Homo sapiens
aaagttggctaactcttatggactatatccatgcaattgcccataatctattcctgtaattcactttttcatatgtcaagttttgtttttaattgctttttcttggctgggtgcggtggctcacacctgtaatcccagcactttgggaggctgagagggggtggatttcttgagatcaggagttcaagaccagcctgaccaacatggtgaaaccctgtctctacccaaaatacaaaaattagcagggcgtggtggctggcacctgtaatcccagctactcaggaggctgacacaggagaatcccttgaacccaggaggtggagattgcagtgagccaagattgcatgaytgcactctagcctgggtgacagagtgagactctgtctcagaaaaaaaaaaagaaaaaaaattctttttcttttttgtttttttttctactgttttaaattgtattattttttatcattctatatgctatgtatttcatgttcatatcatttcccatactggaggtataaactgtgtagaattttttagagacttctgattctgattcatttcatgcattttttttttaaaaaatttgactccatgaaagtgtgttataatgttcactttgcggataagtattg

SEQ ID NO: 786433 - DNA, 645 bp, Homo sapiens
aaaaaaagtggacctatttataaccatattgtttatttgaatactttcaaaacgtctgaaatatcttagaattatgaattgcctaagaactaaatggtttcatatatactatgctttttatcgtaatatcagtgagataactatggttcttagtagaaatataagacataatcttatatccctgtatcttatgtcagaaacatgatgaattttcattttcaataaatatcaagtatgtttttgaaaaatttttggaggctgctaattctggagtgaaagcagagacctyttatgtgaactaataattactgagtcctttagcttgtatacatctaatttatcaaacgtttttggcttaaagtatggtatgaccatatggttttgctgttttcttattataaaattaacagagttttaaaactagttgagactagatgttttcatctaaccttcttttacagatgagaaaacagatccagaaacattaagtactcacataaattaattttaaggccaaatgtgatttatatctttatttcattttagtagaaaatgaataattattttgtgatcgtaaaactctacaatctgctttcagggaactaattaatatagttagttgaaaaaataatgaagtgtttgtaa

SEQ ID NO: 786434 - DNA, 582 bp, Homo sapiens
gaccaaattaagatggctttctccctcttgcgatgtgcctcagccgtgatagtgaccagcttggagtttacagttacagtatagtctttgccagagacaatctttggtgttctaaggaaaaggctgccatggtggagatccatcatctcgcccttcaatttgtcttccatgacatcaacaagagcaagttcgcctkccaagtccttcattaagataccgatggcacaggccatgccaagagcaccaaccccaacaactgtaatcttattctggaggatctgttcttcctttagaagactgtgaataagctgatccttgagcgtatacttgagagtatattggacttggaaacaaaaggaatcgagaatgcacgtccggcgggtgttggggcacgcggcagtgagatccagactcgtcggcagcggctccagcaccttcgctacctttaaatacagtcagtcaaggaaaagcaggataaatgctgtttccttccctgtttattaatttttggaatgatgaattcatgcccctagtagcctctaattcttgtatttgtttttatttttggagtgtcattaggag

SEQ ID NO: 786435 - DNA, 555 bp, Homo sapiens
ctatgcctggcccaaagtctttgtgaaccagatatttgagagtcagtgagtgaaactagctctccatagccaggctggcttcatctgcccctggtgcaagcaataagggagcacgctgtgtgcggagatgttaaaaacaatcctaaagctcactagaagtcagttgktttcgtgtggtcaccatgagcaggctattctaaacaatgtccctggtcacatcgccttctcccacagtttccaaccttccattccctcccagcaccacactgagatgtctgttactttctgttctcccgataccctgcgagctttttgagagcaaagaccatgatttaaatcatctctgtatttccactgctgacagatagcaggtgcatgttttatacagttacaggaagatttcagtttttaggtctaaacctaactggattgaaatcccagcacagccatgaaccattcttgcaactttgggcaagttgtttcaccactatggcttcatcattcctcctatatagtgggtctgatgattattgggtttataaatatatataagtg

SEQ ID NO: 786436 - DNA, 631 bp, Homo sapiens
aacctttgagtgaatctggacattcatctccttttactcatccttacctacttgctgccccaaccattcccatgcaactcccttctcttccaggtaaacttctactcctagtaattttggaagatgagttttgaatgtctttagggtctagcaagtgggaggggcagaaaaagttgtggctccctcctttgtgcttctactgtatttgtttctatttaaacatttatcacattatgttattcttggcacccaactgactgcacatttctccagggaagggctctgtgtgtctcamccctgtgttcccagaaatcacgggtgctcagtgagcatttactgaatgagtggatgaatggatgaatggagattagattacgaatacggtttttcccctgagattgtttcctgtttccaactttgtgcaacaagggtaaatgctctactcagaatcttcctgaaagggagttataatcaaacaaccagccatgatatataaatgtgatggtaatttaagggactttgattaaatgtctttcccaccccaatcactctcctcacatggcttaatcatctgggctgcctttgtcttattttaataactgtatagtaaatacacagcccaagagccctg

SEQ ID NO: 786437 - DNA, 621 bp, Homo sapiens
ctcaattttatcttccaaacttcctattgagtttaaaattttttgattttatttttaacttctgagaactcttcattattttctgaatgtttattttttagagtctcttattctcaaattcatggatgcaattatctaaccctattataaggataacatttacagatttctaaatgttttcttgttttcattactgtctccctctaagtttcttttatctactggtctgttttgatttctttcacattctaggtactctccaaatgtctgttaatctttgtccatttttaagacacgaaggcattatcagcatggtaaggcrctaaaatgctgatgcaaagctctgtgtgcatataaagggcttattgtctggtgacagtaaacagtggtgatcagatgggaaccaggctgttttgttaaagatctcccaaagcagcatccgtagacatttctcttgagctggccaatttccctattgaagaatctttgaggaatataaggttggcttctgatattctggagcagagtgtggcggtgcggggtggtgggagtgggcgggacttgggttctaagtattcacacgatccccgttttcggtagggaggctaatagccatcctca

SEQ ID NO: 786438 - DNA, 621 bp, Homo sapiens
ctcaattttatcttccaaacttcctattgagtttaaaattttttgattttatttttaacttctgagaactcttcattattttctgaatgtttattttttagagtctcttattctcaaattcatggatgcaattatctaaccctattataaggataacatttacagatttctaaatgttttcttgttttcattactgtctccctctaagtttcttttatctactggtctgttttgatttctttcacattctaggtactctccaaatgtctgttaatctttgtccatttttaagacacgaaggcattatcagcatggtaaggcgctaaaatgctgatgcaaagctctgtgtgcatataaagggcttattgtctggtgacagtwaacagtggtgatcagatgggaaccaggctgttttgttaaagatctcccaaagcagcatccgtagacatttctcttgagctggccaatttccctattgaagaatctttgaggaatataaggttggcttctgatattctggagcagagtgtggcggtgcggggtggtgggagtgggcgggacttgggttctaagtattcacacgatccccgttttcggtagggaggctaatagccatcctca

SEQ ID NO: 786439 - DNA, 621 bp, Homo sapiens
gagacatagattcaacacaatttctttcaaaattggagcataatgttttagtacaaattgacaagctaaatctaaactgtatatcaaaattcaaattatctaaagtagccaaagcaatttttaaaaagcagaaacattataaaaagttacatttcaatatttactatccaattagatccattgctaaaactctagtattattaaaaacaagttagataaaagaattaattgaacagaaaagagtccagtaataaatccatacttgtgtgayagatttttaacataaaataggttataattctaaaaattaaaaactaaaactgtaaattttctagaagaaatatctgcaatcttaagataaaccaatttttttaagacacaagcacaaataataaaagaaaaatgataaaatgaggtttatcaaaattaaaatcttttttctttaaaagattttattaagaaataaaaggcaagccatatgttgggggtaatatttgtcatacacatatctaaaaaggacttatattgagaatatataaatatatgaataatatatagaataacataacttataaataatatccaaataacttattattcagtaatttgaagacaacaaaa

SEQ ID NO: 786440 - DNA, 614 bp, Homo sapiens
ccctatgctcgcagaaacatgtgctgtgttgactcaaggtttaattagggctgtgcaggatgtgctttgttaaaaatgtgtttgcaggcagtatgcttggcaaaaagtcatcgccattctcccgtcttgagtacccaggggcacaatgcactgcggaaggctgcaggcacctctgcccaagaaagcctgggtattctccaaggtttctccccactgagacagcctgagatacggccttgtgggaagggaaagacctgaccatacctcagcccgatacccgtaaagggtctgtgctgaggaggatcagtgaaagaggaaggcctctttgcagttgagataagaggaaggcatctatctcctgctcgtccctgggaatggaatgtgtcagtgtaaaacccgatcctacgttctatttactgagataggagaaaaccaccttatggctggaggtgagacatgctggtgacaatactgytgtttactgcactgagatgcttgtataaagtcaaacataaatctggcctacatacacatcaaggcacagcacctttccttaaacttatgacacagagtcctttgctcacatgttttcctgttgaccctttccccaccat

SEQ ID NO: 786441 - DNA, 571 bp, Homo sapiens
atcgatggcaatatatctgaatatcttggttctaatatatttctaatattgtttcagtagtgttaactgtggaaaatgttcatgttgagaggccaaggcgggcggatggctttagcccaggatttcgagaccagcctgggcaatatgacaaaaccccgtctccacaaaaaataccaaaaaaattagctggacatgctggcacrtgcctgtactcccagctacttgggaggatgaggcgggagaattgcttgagcccaggaagcagaggttgcagtgagccgagattgtgccattgcactccagcctgggcgatgggagtgaaaccctgtctcaaaaataaaaaaatatgttgatctcactcagtcacagaagaaagaaaaggaagttgtactgttgcactacacttaggaaacatttagggagggtagtcaaaccactcaacatcagatatggcacatgcatcttcacatcaggcactggcatggatgtcagtcataaataaccagtcgtgccaggatagtgctcccactgaatctcagccctgggcaagtgtctaacaaatattatttgt

SEQ ID NO: 786442 - DNA, 470 bp, Homo sapiens
taattatataataatttattataagtgtatatttataataattagtaaatatatgtataattattatgaacattatttttagccaaatggtcatcttgagcccacaattaatataaattatgtcattttactgtttagaaatctttactgtctcttcacagtctacaaaattgtctcaattyctcagtctgatattactaaaaagtctcccccgctcagtaaaattgtcctcacttatctttcctgccttatttactccattctcccctcttgatgctctgtcctccaaacaacttactacacacattgttctccaagtccactgtgtactaacagcctccaaacctttgcacatgcaagttcctctacttaaaatgcttccttttctcccaactctgcatgttaaaattctaccaacccttcaaaatcctttctccttcatgtagcttcccatttactcccaacccaat

SEQ ID NO: 786443 - DNA, 556 bp, Homo sapiens
tgtttgcaggtgattggagagctacattcccaactcgatggatccgaagtactgctgctgactgatggggaggataacactgcaagttcttgtattgatgaagtgaaacaaagtggggccattgttcattttattgctttgggaagagctgctgwtgaagcagtaatagagatgagcaagataacaggtaaaacacgatccatttattccaggccttcaatagtaatgcataaatgtaaaggctgacagttcaacaacgtctcttgagtttctgccttggaggcactgaagctggggaccagacccaatctctgttctcgtggcacttggagtccagttggctggagagacaaataaaactgttgatgaaataacataatcagatagcattcctacataacaggaggaatatagaaaaataaagttctatgtgagcagaggaagccattagttttactagagttgtatagagccagggaaaggaagcatgcaaaactagctgaattctgagctgggctttgaacaggtggtgaatttctctgggaagaaaaagggg

SEQ ID NO: 786444 - DNA, 616 bp, Homo sapiens
cattcaatcattgaaaaatataactaagagaataataaatgtggctacatataaattaaaaattttgttgcacacaaaccaaacataaactaaataaaaaggaaaaaacagaaaaagatatttgcaaaaacaaaaaagaaagcctttagaagcttagtattgtagcacataaagagcttttgaaaaatcagtaaaacagtaacatccaaatagaaaaatagacaaaggagaagaatagataatttacaaaagaagaaattaaratgcccaggagtttgagaccagcctgggcaacatggtgaaaccccttctctacaaaaaatacaaaaattggcctggcatggtggcacatgcctgtggtcccagctacttgagaggctgaggtggaaggatcacctgagcctgggggtgaggttgaagctgcagtgagccatgatcacaccactgcattctagcctgggcaacaagagtaagaccctgtctcaagaaaaagaaaattaaagaaatgaaataaaaatgtccaataataaaaatgttcatacttactagtaatgagagatgtaaatttgatagggatgagattcatttattgtctagtaagttattgtcagcagga

SEQ ID NO: 786445 - DNA, 549 bp, Homo sapiens
aacccaaaaatttaataatcattgagtcttttattaatgaatttgaatactagaaagaaacagggcttgcatcaataaatggaagtatgtttttatttgttttaaggagctttgccagttaaaaacaacatgcaattgcagaaatctaacagagttgctaaaagttgtttgatttcttttggtgaagaaaagccaatctaaattatttaaatataaaagacatgacttgttttataggagttttggaccagcatcactaggaatatgtcttattttctctaaatttgagcaatgatggtgcatttaaggaagagatggcwttgaagaaagaaagaacagcacaatgaaaattccctaggcacagaaatgaacgttatgtgcatgaaattacaagagttagtgatgctttaagccatggcagtggggataaggtgggaaaggtagcttcaggccaggtgtgaagggaaagtgattgagaaataaacatttattgtgtactttgtccaagggcccaactaatgccttatgtgcattagtttatttaatgta

SEQ ID NO: 786446 - DNA, 591 bp, Homo sapiens
aggaaaaacaggaaccagagcagcaggggggtgctcctctctctacttcattcccttccgtaggacatgagcaggatattttttctagtgaggataaggacggaccagagccttttcctccccctatagaaaagccattgccctcctttcttccacccttaaagggacctgcatttgttggccccgttcagccawcagcgcctcccatcccccttaaggagattggaaactgcccaagggacggttcttagataagacccccggtcagcgaacatctgtatgatcgggtgtccgcttctccttgacaaacttccctgctggaggggtgcctccaagagggaaggaaagtggctgagtatgattgtcttcctaatacgcaagttctcatttcctacttccagcatcagcctttctggccttgtcggttttctgtttccctggagtataaggggaacttacatgctgcctcctgggttttatcctagatagctctggctttcttgctgcccacagaggcctggggcaggagagttgctaagatgccatggagtgcccatttagtcacttgcagtctgggcaggttgccccttt

SEQ ID NO: 786447 - DNA, 576 bp, Homo sapiens
aatgctctcaaagcttagctattattattaaaaggtatttctatatttcttcttcccatcttaacaaataacaagtttttgaaaatgtgaaatccagatgtgaatttgaatgactgataatttaatttattttcagtcaattgttacgtatgttttctttttcttcccaggacatggtgacccaggcatctctgtatctgyttgaagctacaggaaagcgattttatttcaaaaatgttgccattttgattcctgaaacatggaagacaaaggctgactatgtgagaccaaaacttgagacctacaaaaatgtgagaatatcaagttcttctttaaaattccactttctcctgtaaccaagattttttaaaatcaaaatattctagaatcaaatgtgattgtttgaaacttactccagtacgaatatggttaattcatttgctgaaactttgtgatgatagaaactttttcttaaatttcaggctgatgttctggttgctgagtctactcctccaggtaatgatgaaccctacactgagcagatgggcaactgtggagagaagggtgaaaggatcc

SEQ ID NO: 786448 - DNA, 591 bp, Homo sapiens
agcgtgtctggagttgttcgttcctcccggtgggctcgtggtctcactgggctcaggagtgaagctgcagatcttcacagtgagtgttacagctcataaaagcagcgtggacccaaagagcgagcagtagcaagatttattgcaaagagcgaaagaacaaagcttccacattgtataaggggacccgagcgggttgccaatgccggctcgggcagcctgcttttattctsttatctggccccacccacatcctgctgactggtagagcccagtggcctgttttgtcagggcgctgattggtgtgtttacaatccctgagctagatacgaagattctccatgtccccatcagattagttagatacagagtttcgacacacaggttctccaaggccccaccagagcagctagatacagagtgtcaattggtgcattcacaaaccttgagctaaacacagggtgctgattggtgtatttacaatccctgagctagatataaagactctccacgtcctcaccagagtcaggagcccagctggcttcacccagtggatcccgcaccggggctgcaggtggagctgcctgccagtcc

SEQ ID NO: 786449 - DNA, 544 bp, Homo sapiens
gttttggatatttcaagttaactcgtcattcactgactccacataaaatccatccctcaaatattctcagaacctatcaccaagactgtgatcacttctttgggatgctttaaagttaattaggaaaaataaaactgggttttacctttgaaaaactttctaactgtactgatgtgctcaaatagatggacacatgaatgaaaaatccagaatttattctttccatgtggtctaggtccctccatatgtttctctggattttgccattcactgaatgcacacgaacactgaatttactctctattgctgtgtaacaagttattgtaaaatgtattggcttaaaacaacaaataycatttttgcagcttctgtggatcaggaatcatgaagcagcttagtcgggtatttcaggctcagggcctctcatgaggttgcactgtagatgtgagccaaggctgccgtcatctgaagactggactagggatggaagctctgcatttgggatcatactcatggctgtggcccggaggcctcattttttcac

SEQ ID NO: 786450 - DNA, 574 bp, Homo sapiens
aaaaaaatgaaaagaaaatcaaaagaagctagagacaaaaaaattgttttactcactgaggagcaaacctagaagaataaggacataatttacagtgggtttatcatcagaaatcatacaaaaaaataaacaaaataaagagcagagataagtgtttaaagtgttgacagaaaaaaamccctattcacctagcattctatagccaccaaattgttattcacaagtgaagtagaaataaagacttgctctaacaaacagaatctgagggagttcattggctgcaggttttccctacctgaaattgtaaaataagttcttcagaaaaatgtaaatgctatagaaccaaaattcatatccacatacaaaaaggaagagcttcagagaaaaagttaatgaaaatacaatagagtattgtatggttctcattctcggtggatcagacaggtaatgaatatagcacgtggggaagataaataacagtagcatcttacgggatgcaagggagaaagtgggaaacgctgtaagttacctataggacatgtgaaatgctatagtgttatttggaagtggactt

SEQ ID NO: 786451 - DNA, 574 bp, Homo sapiens
aaaaaaatgaaaagaaaatcaaaagaagctagagacaaaaaaattgttttactcactgaggagcaaacctagaagaataaggacataatttacagtgggtttatcatcagaaatcatacaaaaaaataaacaaaataaagagcagagataagtgtttaaagtgttgacagaaaaaaacccctattcacctagcattctatagccaccaaattgttattcacaagtgaagtagaaataaagacttgctctaacaaacagaatctgagggagttcattggctgcaggttttccctacctgaaattgtaaaataagttcttcagaaaaatgtaaatgctatagaaccaaaattcatatcyacatacaaaaaggaagagcttcagagaaaaagttaatgaaaatacaatagagtattgtatggttctcattctcggtggatcagacaggtaatgaatatagcacgtggggaagataaataacagtagcatcttacgggatgcaagggagaaagtgggaaacgctgtaagttacctataggacatgtgaaatgctatagtgttatttggaagtggactt

SEQ ID NO: 786452 - DNA, 648 bp, Homo sapiens
caatgacagctacaggctccacttctaattctagttctcttgctgcttttaccacatctgaggttactttctccactgaaatcttgaacccctcaaagtcatccaggaagactggaatcaacttcttccaacttcctctagtgttgatattctgacctcttcccatgaataatgagtgttgttaatggcatctagaataatgagtccttttcagaaagtttcaatttgaccagatccatcagaggaatcactgtctgtggaagctatagcctgacaaaatataattcttaaacaataggatttgaaagttgaaattactccttgatatttgggctgcagaatggatgttgcrttggcaggcatgagaacagtgttaatctccttgtacatctacatcagagctctttggtgaccaggtgtattgtcaatgagaagcattttttttttttttttttttttgagacagagtctcgctctgtctcccaggctggagtgcggtggcgcgatctcagctcactgcaacctccgcccctccaggtttaagcaattctctgcctcagcctctggagtagctgggattacaggtgcgtcccaccacgcccggctaatttttttgtatttttagtagagatggggtttcaccatctt

SEQ ID NO: 786453 - DNA, 648 bp, Homo sapiens
caatgacagctacaggctccacttctaattctagttctcttgctgcttttaccacatctgaggttactttctccactgaaatcttgaacccctcaaagtcatccaggaagactggaatcaacttcttccaacttcctctagtgttgatattctgacctcttcccatgaataatgagtgttgttaatggcatctagaataatgagtccttttcagaaagtttcaatttgaccagatccatcagaggaatcactgtctgtggaagctatagcctgacaaaatataattcttaaacaataggatttgaaagttgaaattactccttgatatttgggctgcagaatggatgttgcgttggcaggcatgagaacagtgttaatctccttgtacatctacatcagagctctttggtgaccaggtgtattgtcaatgagaagcattttttttttttttttttttttgagacagagtctcgctctgtctcccaggctggagtgcggtggcgcgatctcrgctcactgcaacctccgcccctccaggtttaagcaattctctgcctcagcctctggagtagctgggattacaggtgcgtcccaccacgcccggctaatttttttgtatttttagtagagatggggtttcaccatctt

SEQ ID NO: 786454 - DNA, 479 bp, Homo sapiens
actggagcaaaggtagctatgctgtgttttagcaaaaagacttgtggcattttgtccctgccctagagatttgtgaaacttttaacttgagagagattatgtaggatatctggcagaagaaatttctaagcagcaaagcattcaagagttgacttgggtgctgttaaaaagattcaattttaaaaggaaaacagagcgttaaagttcaggaaatttgcagcctgacgatgtagttaaaaagaaaaacttattttctgaggagaaattcaagctggctgcagaaatttgcataaataaccaggagccacatgttaacccccaagacratggggaaaatgtgtccagggcatgtcataggtcttcatggcaacacttcccatcacagacccagaagcctagtaggaaaaaattgttttgtgggccatgccccaggtgtccatggtgtgtgcagcctagggactttgtgccctgcattgcag

SEQ ID NO: 786455 - DNA, 505 bp, Homo sapiens
ttggtttccttttccttggagctccaagttcactaagagtaaagttaatttatgtctttaaccactctttctaattggtctgccaccaaatgggattgaatttgtgtttgttttcatttctgttctttggatactgaaatatccaccatcatggtaactgaattgaattaagwtgttatctccatggccttcagaatgccaatgtgtattctgggtacaaggtagtaacaaaaggacccataactgccaatatgctaagatgtcttctgtcacttagtaaaacaaagagaatggaaagcaggactggtaagccctggcaagtactaaaaaaaattacatactatggggtgctggtgctagaaagaagaccaacatagggaagtgctgcaggtgtaagagcaggtgacagctatgtgagagctctagaaataaacatgttagggtttggacttggaatatatctatacttcagcttaggatgacaagcattgaagatgcaccttgt

SEQ ID NO: 786456 - DNA, 505 bp, Homo sapiens
ttggtttccttttccttggagctccaagttcactaagagtaaagttaatttatgtctttaaccactctttctaattggtctgccaccaaatgggattgaatttgtgtttgttttcatttctgttctttggatactgaaatatccaccatcatggtaactgaattgaattaagttgttatctccatggccttcagaatgccaatgtgtattctgggtacaaggtagtaacaaaaggacccataactgccaatatgctaagatgtcttctgtcacttagtaaaacaaagagaatggaaagcaggactggtaagccctggcaagtactaaaaaaaattacatastatggggtgctggtgctagaaagaagaccaacatagggaagtgctgcaggtgtaagagcaggtgacagctatgtgagagctctagaaataaacatgttagggtttggacttggaatatatctatacttcagcttaggatgacaagcattgaagatgcaccttgt

SEQ ID NO: 786457 - DNA, 467 bp, Homo sapiens
aataacaaacaagtaaacacacacagcttgagatcaaacatgtgtatgtgagaacttagttgataaagagtgggaggatgagagcaggtagaggaaacagcattcacaacgccctgagatgggaaagtgcttagaatattccagggcctgcgagaaagcggatgagtggatgttgttggactataatggccaaatgacaagtggtatgaggtgggcaggagcagtgatcaaggccaawacaaggctagtgccctaggaaaggacttggggttgtattccaagtacagcaggaaaccgtgcaaagattttgagcagaggagtgacttttgtttatgttttcaaaaatattattccagctgatcagtaaagaagagataggtaggaagtagaagtacaaagaccacctgagaagctattgcaaccatctacaccagagaggaaggtcctggcctaaatcaatgtgttga

SEQ ID NO: 786458 - DNA, 538 bp, Homo sapiens
tgtggatatcaacctcttatcagatatatgatttgttaacattttcttgaagcctgtagtaggtagattgccttttcactctgttgaatatttcctttgatgcaaaaaagtctttaattgttatgaagtctagtttgtctactttttattgttgcatgtgcctttaaagtcatatccaagaaattattaccaaatgaagtgtcatatagctttttccctatgtttcattctaaaagtttttatatgtcagctcttatgtttaggtctttcacccattttgagttaattttgtatatgatgttwggtaagcatcaaaattaattttttacgtgtaaacatccagttttcctagcacaatttgttgacaagactgtcctttccccattgaatggtcttgacaccttttccaaaaatcatttgaccatatatgtgagtgcttatgtctgggctttctattggtatattccactccattggtatatatgtctgtgtttatgccagtgccacattgctttaattaccatagctttgtagtaag

SEQ ID NO: 786459 - DNA, 589 bp, Homo sapiens
ttccaggtgatctgcaaaccaaagtttgaaaataaaaaactgccttgaatggctggtgaggaatggctgctgagcagctggaagcccagcttcaggtgaagctgattttccagcttatatgttgtgataaacaaagtcatgctaagatattaataattaaggttagcatcaagatttagaaagaatgagcacattaagtcaaacatcagcttcaaaktctagctcccatacctgacagctggcttccagttcctaagaactggaaaagcatttacaaaaaaacttttattttcggtttgggggtacatgtgaacgtttgctacataggtgaacttgtgtcatggggttttgttttacagattatttcatcaatgttaccttttctgcttctctgccacctcccaccctccaccttcagatagaatccagtgtctgtcgtttctttctttgtgttcatgagttctcatcatttagctcccacttacaagaacatgcagtatttggttttctgttcctgcattagtttgctaaggataatggcctccagctccatccatattcccttgaaagatatgatcttgttcatttt

SEQ ID NO: 786460 - DNA, 634 bp, Homo sapiens
atgcatcctcactcttggtgtctcaattagagtatataaaaaaagcacagaaggcatttctgcacttttgcataaattgacttgtttgtgtgcaaaggtgcatacacagacaagtgaggatgagtaatgagtctgtaaaacttcatgttgtagtttaagtgattggataactcctaaaactagaacacaaaaagccatttttacagcacttctccttctttgttttgttgaactgaataaataaagaaggctccctaaataaaattacgcttgggaaaaaaaatgagaaaaaacttagaagattacaaaagaacattgagtaagcgcagggcatgaaatagcatgcttacttctcagaaatttcactgtgctcgttaaaatacagaaggaagagaggaggaggctgggagtaggaaagccattccctgactacaattgtcattcacacagcgtacataggattgagttgtttcrtggatataagtatacgggccctttcccagtccagtctgctagtgcatctgctgcttctaggcaccgagtgatttaatgcccactccacttagtttatttactacctcttactctctttaagtgaacccaggggccttcactcaggcatggattaatgagg

SEQ ID NO: 786461 - DNA, 564 bp, Homo sapiens
agaaaaccccatggtatcacatgagaggaggccagcacacctttctctagtgttacagaatgaaactgttgtatgcgtgttaggtacatggggaattctcctgccactaagtgggaacctctggtagagatgctaggtattcagtccgctactacttctcagttttctcctcagaaagyaaatcaagagggccatgtttcccatagcccagtgggaagacaaaaacagtttgaaatacacctaagatctaatcctggggcagctctggggccaggtagctcaagggtttgggtcaaagctcacaaccacacagggaagacctagtgtttcttccctacaaaatgatgagagatagaatgggaagatggggtgcaggaacaaaatcccaactccatccagtctccccagatggtcttgcaacaggcttgaaatacctggcctgttgccctggccggttccaaacccctgaggcaggctctgtgggaagcagcctttgtcccctacaaccttaggaaagctacttttcccatctgaactgaccctctgagtatgctttcagcgttt

SEQ ID NO: 786462 - DNA, 586 bp, Homo sapiens
gaagcaacaccaggaatgtaccttcccaggcagagtccgagttctcatggagggcagctatcacctgtgctgctaggcttctggtagggcctgaagtcttgggcaccataggtacatctgcatgtgccacaagtcaaaaaagacagagacatactttcttccaacccccataactctctcttaagcctctagcccagtgtatatgtagctcctctgcctacaactccttccctgtcctagatcttttttcctggctcctacttgtcttttaaaattcatcttgatgttacttctccaggaagctttcctaaaccatcacttccaaatccaagttcccacagcamcctgggctctatgactatgttatgtgttatttttgtctctctcctacctagcctgaagcctcctctaaagtcaagacactttcttgttcactctgtccacataggagctgctcaacatgctctttgaataattgaataaatgaatggcatcctaggattatctgaggagcatcagcaatagtagcagacatgttctaaagatagtatgtcatcaaagaggagcagtaagctttctccctggg

SEQ ID NO: 786463 - DNA, 574 bp, Homo sapiens
ttacagttttaaatagctgaaaaaaagacaaaaaaaattttgtgacatgtagaaattatataaatttcaaatttcagtgttcataaacaaagttttattgaacacagccatgctcatttgtccaggtatcatctatggtgacttcacactacagtggcagagctgtttagctgcaacagagattataggacctgcaaaacctaaaataaataaaggcctaaaatattctggccctttacagaaaaggtttgtttatcccagatctaarctatgagacaaagtcagtatcgcccaggctggagtgcagtggcaggatcttggctcactgaaagctctgcctcccgggttcatgccattctcctgcctcagcctcctgagcagctgggactacaggcgccccccaccatgcctggttaatttttttgtattttagtagagacggggtttcaccctgttagccaggatggtctcaatctcctgacctcatgatccgcccacctcggcctcccaaagtgctgggattacaggcgtgagccaccgcgccaggcgagacaaagtcaatgttaatcttcaa

SEQ ID NO: 786464 - DNA, 623 bp, Homo sapiens
atttttttctgatatgctgtttgtctatatacaatatttgcttcttcaaaggcatgttatgaatgttggaagtaactcctgggcagaatgacacctaaggcaaaccagccagtgtttcctcatcttaccttttaagacatacagcaagtggttccacactcttttgataagtacatcctcaatctggtaatcatagaatcttagtgaagaaaaatcttaaaggtcatctagtccaatgtcacacscagtacaagaatcctatttgcttgaaaaaatccttcctttgtaaaaatgaaatgtctaaggcaattttctcttaatatactcagtggaagggggaaacatctggacacctttttctttataagaactctttctatacttaaacaccatttattttcttccttcaatcttcttttcttttagttaaatagcctactttcatcgctcttcagagatgtgattttccatgcttttaatcatttcaattgctttccacatcctctgaacatgcagaagcacaacctaggcatggcagctgaatgagagctttgctagtatcttattaatgctgaatatggtgactcagtttttaatgccaggctcttgttaacgtagcctag

SEQ ID NO: 786465 - DNA, 623 bp, Homo sapiens
atttttttctgatatgctgtttgtctatatacaatatttgcttcttcaaaggcatgttatgaatgttggaagtaactcctgggcagaatgacacctaaggcaaaccagccagtgtttcctcatcttaccttttaagacatacagcaagtggttccacactcttttgataagtacatcctcaatctggtaatcatagaatcttagtgaagaaaaatcttaaaggtcatctagtccaatgtcacacccagtacaagaatcctatttgcttgaaaaaatccttcctttgtaaaaatgaaatgtctaaggcaattttctcttaatatactcagtggaagggggaaacatctggacacctttttctttataagaactctttctatacttaaacaccatttattttcttccttcaatcttcttttcttttagttaaatagcctactttcatcgctcttcagagatgtgattttccatgcttttaatcatytcaattgctttccacatcctctgaacatgcagaagcacaacctaggcatggcagctgaatgagagctttgctagtatcttattaatgctgaatatggtgactcagtttttaatgccaggctcttgttaacgtagcctag

SEQ ID NO: 786466 - DNA, 766 bp, Homo sapiens
accagaaaaccaaataccgcatgttctcacttataagtgggagctaagtacagggtacccatggacataaagatgagaataatagacactgggaactagatggggaagaggaggatgggggaaagggtttaaaacaacacctatggggtactatgcttactacccgggtgatgggattattcgcacctcaaacttcagcatctcgtaacatacccatgtaacaaacctgcacatatgttcctgaatctaaaataaaagttgaaattatattttaaaacttgtaaacttatcccaaagagatatcagcacacccatgttcattgtagcattatttacaatagccaaggtatggaaacaatctaaaggtgtatcaacaaataaatggataaagaaaatgtggtggggcggttccaagatggctgaataggaacagctccagtctacagctcccagcatgagcaatgcagaagacgggtgatttctgcatttccaactcaggtaccgggttcatctcaccggggcttgtcagacagtgggtgcaggacagtgggtgcagcccaccgagcataagstgaagcagggcgaggcatcgcctcacccgggaagtgcaaggggtcagggaattctctttcctagccaagggaagctgtgaccgacagcacctggaaaatcaggtcactctcaccctaatactgcgcttttccaatggtcttagcaaatgacacaccaggagattataacgcacgcctggcttggaggatcccat

SEQ ID NO: 786467 - DNA, 766 bp, Homo sapiens
accagaaaaccaaataccgcatgttctcacttataagtgggagctaagtacagggtacccatggacataaagatgagaataatagacactgggaactagatggggaagaggaggatgggggaaagggtttaaaacaacacctatggggtactatgcttactacccgggtgatgggattattcgcacctcaaacttcagcatctcgtaacatacccatgtaacaaacctgcacatatgttcctgaatctaaaataaaagttgaaattatattttaaaacttgtaaacttatcccaaagagatatcagcacacccatgttcattgtagcattatttacaatagccaaggtatggaaacaatctaaaggtgtatcaacaaataaatggataaagaaaatgtggtggggcggttccaagatggctgaataggaacagctccagtctacagctcccagcatgagcaatgcagaagacgggtgatttctgcatttccaactcaggtaccgggttcatctcaccggggcttgtcagacagtgggtgcaggacagtgggtgcagcccaccgagcataagctgaagcagggcgaggcatcgcctcacccgggaagtgcaaggggtcrgggaattctctttcctagccaagggaagctgtgaccgacagcacctggaaaatcaggtcactctcaccctaatactgcgcttttccaatggtcttagcaaatgacacaccaggagattataacgcacgcctggcttggaggatcccat

SEQ ID NO: 786468 - DNA, 570 bp, Homo sapiens
acttttaaccacaagaactgcaagtctacatcataaattttagcactgcaaattcagtatcatcaaagcaagctcatattttcccatataaatctactccatctctgttccttcctttgaccctccagttaatctggtttaaaacctcagctccattttcaaaatgtttccttctctcatgcttctcacttgcaataaattgagaggtcttactgatttaactgtaaaatcctacctatatccatccattcatttctcctacctcacccttagatccattcctgactctccattcctcctaaatcaaccttagacccacattagctttcacctggtgtaactgctttagttgcctgttgtytgtgctgctgtggctttctccctactaaagccaccctctgttttactacctgattaacctcctccaagaacacacctaagcacaccaccctcccatttacaaccagcaggctcaaaacctttcagtggctcccaagtgtcttcagagaattctaaattcctaacactggcattcaaggactttctaccctgcgcccacctgcccttcca

SEQ ID NO: 786469 - DNA, 500 bp, Homo sapiens
tggaatatctttcatgactatcttttggatccaattccttactcatttggtgtgggagttggttatgaagacgaatttctcacaaggcaaggagctgtctctctgctctgtatacatggggtgtagccctcgtgcaatcagactggaggaggataaccaggttgctatgtagccttgatttccaaaaaggtgatgggcttctggtaccaacccgtgtcagtatttagaagaggcctgtyggaaagctcttaatgagaaagctccttctctgaaaacatttcaatttatgactcctgtgctaagcatttctaggagatcaaactgaatctctagtgcataacagaaaagcatttgccctgcagcaaaagggtcaactttaaaagaatgcttttccatgttaaaaaaaaaaaagtcaaaaaaacaaagcaatgactcccaaaataggaacagaggggaaggaaaagttcatggccttagcggactggatattctggatattt

SEQ ID NO: 786470 - DNA, 613 bp, Homo sapiens
agggggtctgtttttttctgccttcctccttttcttctttcttccttattcttcttgggtttcattaacttcatttctagtcattgattattttcacctgagttcttcctgtctactcagggtttttctttactttctttttttttttttttttctatccttccacttaagccasattctaacttgacactttcaaatatttttcagaaggtagaaatttggcattgcttatttgattggactaggtgccaggtgaaatacaggatgcccagttaaatttgaatttcagataaagaataattatttagtataaatatgttgcaaacattgtcccaactattgcatgggacatgtttatatttttaaagtatttgttattttactgaaattcaaatttaactgggcttcctgtagttttatttgctaaatctcgtaaccctggtttaagtgtctctctccctctccccaccccagattatatttagggtggggaaatgatcagggactggaatctagaagtgttggatttgttatttaacttccctgagccttgattttcacatttgaaaaatgagggtgtagatctagatgttctctccattcatttccaact

SEQ ID NO: 786471 - DNA, 492 bp, Homo sapiens
ataaataattacagactaaaaggtgagatgactgttccgttaagaggggggcaccaraggctttaagaggagagaagaggggcacttaatcacagagtggaggggcaagagaaataaatgagagtgagtgctaccttgagctgaaaatttcagaagaatcacatgcctcataagtgctcccaaatatgtattcagttgaattaaacatgtatctttagcaatagggtaaatcaagatggcgattttcaaatgtgggttctgtaggctaaagcatatatagcagaatatactggaagctttataaaaataataatctccttccccttttaacacctgagattctgttttacaaggcatttattttggtaaaacactgatgtggtcgcctccctcaccctggtaagggaaccctaccctaacagaatggattttgccatctaagatggtgactttatatcctaaaaggatcctctggcctaagttaagccataa

SEQ ID NO: 786472 - DNA, 599 bp, Homo sapiens
gcagaaggtgaaggggaaataagacaacttcttcacaggtggcagaaaggagaaatgcagagcgaagggggaagagccccttgtaaaaccatcagatctcataagaactcactatcaccagaacagcatggggagctggggaccggccctatgattcaattaactccacctggtctctcccttgacacctggggattatgaggattataattcaagatgagattttagggaacacaaagactaaccatatcagacattaagtaattagacccaagttacacaccagttggtgctggtgccagaacttaaatctacttttgcccagctgcaaaaactgtgtattgaccattatactgttcatctccaggttaaactgaaagtcaagaaattaatatatatatatawaaatatataattattaatatataatatatctgtgtgtgtgtgtgtgtgtgtgtgtgtgtctgtgtataacatgggtcacagtgagtggctgattccaggaaactctgattaattttaatagctgagatgtatttagaaacaacaacaaacaaataaatcacataagcagttctccccacaaagaagtgaaagaa

SEQ ID NO: 786473 - DNA, 544 bp, Homo sapiens
tcttttatctttctttatgtgttcattctaccagtggtttttatttttgtgtgttttaatgatgatagacactgtcctttcactttcaggtataggattggcacatatttttaggactggttcagtgataatgaattccctcagctgctgcttatcggaaaaagactttatttatctttcatttatgaaggataacgtttctgggtatagtattcttggctgacagtttttttttttctttcagcattttgaaaatataattccattctctcttggtctgtaaggttctgcctagaaatccactgttagtctgataggggttcccttataagtgactagatgcttttctcttgctgtttttagaatttttttccckgtttgtgacttttgatagttttactataatgtgccatgcagaagacctttttatattgcatttatttgggaatctatgagcctcctgtatctggatgtctaactctcttgctagattcaggaagtttttatctattattttgttaaatagaatttctaactctttcat

SEQ ID NO: 786474 - DNA, 649 bp, Homo sapiens
tgttttatttgcatatatttgtgcatttttcaatgttctttctgttattgagatctagttcagttccaggtaataggagaagatgctgtactttgtatgatctcaattttaaaaaatttactaacacttgttttttggcctcaacatatggcctatcctagagaatgttccatgtgcactaaagaagaatgtgtattctgctgtcgttgggtgaaaagttcttctaataatatgtgttgttcaagtcctgtattttcttattcattttctgtctagttgttgtatccattattgagagttgagtactgaagtctgtaactattattatagaactttctrtttatctcataaactctgatcaattttactttatctattttgggtctgtcttgttatgtgcaaatatatttattatattttcttgatgggtctaacttcttattaatacataatgtgcctccttatctcttgcaaaaatgtttgtctattttgactcgtatttatacagacaccccagctctcttttggttgatgtttacatgcgatatctttttcttcagtctttttgctttcaaactctttatgctttgggatctgaagtaaattgcttgaagaagcatatagatgaatcatttttttatttgttttg

SEQ ID NO: 786475 - DNA, 583 bp, Homo sapiens
gggctggatatggtctcattcaaatgtgatggcttcacaaatgagaatttcagagacacctagaaagggtggagacaggatggaactcaaaacccaacatatgcaaggaaacacacccaacacatctgggggagatgactccaaaacccacggcagagtggcatgtgctgagcaatgtaagcatcaccccaggaacccagggtgcagtaggagaacctaagacatgagcccctgtccttgtcctgccaccaaatggcagcttctccatttccgtgcctcagaagtaagtcagcacgccagccagtaagcaccccatctcgtccacagttwgggatactcgtgagaacaagcgtgtatggctactgctgtgagataaatcagaacaagtaagggcaaataaaaatgagtgaacagtgtggaatgggccagacttctctaagagttttatgatcattccttagtagaaaagcagcagacagctgcaataagcttatctaaaggcttggactatcccatttatatgagtcttagtggattccgtatcaaactaatgtgaaaaaaaaataatgaggacagtttagtt

SEQ ID NO: 786476 - DNA, 641 bp, Homo sapiens
tattgggccaggcatggtggctcatgcctgtaatcccagcactttgggaagctgaggtgggcagatcatctgaggtcaggagttcaagactagcctggccaacatggtgaaaccatgtctctacttaaaatacaaaaattagccaagtgtggtggcagtcatctgtaatcccagctactcaggaggctgaggcaggagaatcatttgaacccaggaggtggaggttgcagtgagctgagattgtgccactaaactccaggctgggggatagagagagactctgtctcaaaaaaaaaaawaaataaataaataaataaataaagtaagcatataagcatatatagtacataagagcataagatgtgtgtttttttaatattttgatctgtatttcaacataattgccttccttggtcatcttgtggattttattttatgcatttaaaactttatactgcccagcatggtgacactcgcctgtggtcccagctactcaggaggctgaggccagaggacagcttgagccaaggagttggaggctgcagtgacccaagatcgcaccgctgcacccagcctgggcaacagagcaagacctcgtctctctaaaaactaaaataaaagcgttatactgaaaagggatc

SEQ ID NO: 786477 - DNA, 607 bp, Homo sapiens
tgaatgtccatgtacagaagatcaaactagacctccatctctcaccatatgcaaaaatctacacaaaatagattaaagacttaaatgaaaacccaaaactataaaactattagaggaaaacatagaggaagcacttccaaatattgatctaggcaagtattttactgctaagacttcaaaacacaggcaacaacaagaaaaatagacaaatggaactayagtaaactaaaagtcttcttcacagtgagaaaataataaacagagtgaagagaaaacctgtagaatgggagaaaatatttgccaactattcatctaacaagggactaatatccataatatacaaggtacgcaaacaactaaacataaaaaaattccattataatgtgggcaaagattatgaatagacatttctcaaaagacatataaatgaccaagtatatgaaaaaatgctcaccatcactaatcatcctgaaaatgtaaatcaaaaccacaatgacatattatctcaccagttaaaatggctgttgtcaaaaagacaaaaaataacaaatgttggcaaggatgcaaagcaatgggagcacttgcactgtttgtgggaatgtaagtg

SEQ ID NO: 786478 - DNA, 542 bp, Homo sapiens
ggtccagcctcattctgggcagggggagataggctttggacatgtggatattctcaactgtggagaaatgggttcaacagcgggactgatattgggggaaccagcccccaatatttcaacgtacattctttctattttccctaagtgtcggcaggtctgagaaataaagagaaagtgtacaaagagaggaattttacagctgggcctccgggggtgacgtcacctatyggtaggtctgtgatgtccgcctgagccgcaaaaccagcaggtttttattaaggactttaaaaggggagggggtgtatgaacagggagtaggtcacaaagatcatatgctttaaaaggcaatgaagatcacaaggcaaagggcgaagcaaagatcacaaggcaaagggcaaaattagaattactgatgaggctctatgttcagctgtgcacatattgtcttgataaacatcttaaaacaacagaaaacagtgttcaagagcagagaaccggtctgaccacaaatttaccagggtgggatcttttccccaccctaa

SEQ ID NO: 786479 - DNA, 599 bp, Homo sapiens
ggttcactgcagccttgattcctgggctcaagggatcctcccacctcagccccctaagtagctcagactactagtgtgcatcaccattcctggctaattttttaaacatttttttctagagatggggtttcactatgttacccagsctggtcttgaacttctgggcccaagtgatccacccaccttggcctcccaaagtgctggaattacaggcatgagccactgttcctggccaggaaaaattcctgaaagaaattaaaagtgatactccagtgagtgagcacatgaatgataagaaagtgaaccagccttattgctgatatggagaaaattgtagtggtctggatagaagatcaaaccagccacaacattcccttaagccaaaatctaattcagagcaagcgggctcttttcagttctataaaggctaagagaggtaaggaggcttcagaagaaaagtttgaagctagcagaggttggtttatgacatttaaggtaagaagaccttttgataacataaaagtgcaggttaaagtggcaagtgctagtggagaagctacagcaaattatccagaaggtctagctaagaaagtggctac

SEQ ID NO: 786480 - DNA, 590 bp, Homo sapiens
agctgtagaccggagctgttcctatttggccatcttggctccacaccttttttttttttttttgagatggagtctcattctgtcacccaggctggagtgcagtggtgcaatctttgctctctgcaacctccacttcccaggttcaagcagttgttctgactcagcctcctgagtagctgggattacagccacctgccactgcacctggctaatttttgtatttttagtagagtcggggtttcaccatcttggccaggctcrtcttgaactcctgacctcgtgatccacctgcctcagcctcccaaagtgctgggattacaggccagcaccactgtacccagcccgtaaaccactcttaattagaaagactaaatgatgaactcatccaagataataactacaacttttcaagaaacaggcagtatgataagatagaaacagcaaaaagttaaaaagcagggggatgaagttaaggtgtagagttttattggttttctttttgcttatttgtttacttacgcacacagtgttaagttgttatcagcttaaaataatgggttataagatagtatttgtaggcctcatggtaa

SEQ ID NO: 786481 - DNA, 657 bp, Homo sapiens
tccatattccttcacagtctaagcctcttagaagagtgtgattaaaaaattgcggccgggcacggtggctcaatcctgtaatcccagcactttgggaggccgaggtgggcggatcatgaggtcaggagatcgagaccatcctggctaacacagtgaaaccccgtctctactaaatatattarccgggtgtggtggtgggcgcctgcagtcccagctcctcgggaggctgaggcaggagaatggcgtgagcctgggaggcggagcttgcagtgagctgagatcgcaccactgcactccagcctaggcgacagagccagactcggtctccaaaaaaaaaaaaaaaaagaaaagaaaagaaaattggattagtacttggagacaaaagatttcccagcaaaaagcctcatggatcacagcgtacatataccctcaaatacgacttgtggaaatgtttccataagcaataaagtaaataatttttaaaaacacactgcttcctcaataattaaacatagaattatatgatccagcaattccatttgtggatatataccaaaaaaagtgaaaacagggactcaaacagatgtgtacacccacgttcatagcaaaattattcacaacagccaaaaggtagaagcaactcaggtgtccacagat

SEQ ID NO: 786482 - DNA, 498 bp, Homo sapiens
tcttacagttgtggaggctgagaagtccaaggtcaagtggccacatttggtgagagccttcttgctggtggggactctgtgaagtcccaaagtggcacagtgcatcacacagtgagggggctgagcatgccaacatgctatctcttttcaagtataaaagtaacaggcagaaattctgaaacatgaatgaacttaaaaatacaacacattccagctcttgtaacaaaaaaccactggacaattgtgattcttgagcattctgaaaaaaaaacacyaaaaaaccactagacaagaaatcctgccctccagcacttgcgaaggtaaaagcgaagcaagttgtgaacactaaatacactgaaacgtaggacccacactgtagctgaaggaatgatgagtgcagaacagataataataaaactaacaacaaaaattaaggtcggggaaaaataagaatgggtagaaatttaagtactaattgcctcatctttcactgtagga

SEQ ID NO: 786483 - DNA, 579 bp, Homo sapiens
cagtgtttaatattagaagtgttttgatctttagaagtttggtgatgtttttgtcaccagaaatatgtcacaggaattctattcatttatatcaattagcctatggtaaaattggttttgtttcccttaaagttgcagtttccaagagtctatcagcaacttaagtgagaacttactgtattygttattatatatcttccacctgttatatataacaggtggaaaagtttgcatagcctgaggctatagcaaagaaaaaaaatacagcaacctgacttggcttttaccctggggaggactgccttggcctgggagagctcctaggtagaaagggaggacacacccctctctgagggacaggggcactggttgagtgttgccaggatgtgggctggggaggcctcctgggaagggcatttggttggaagcagagacacctggcttgcctgagagggttgggtgagatgggaatgaagactgggaggctgaccagagccagccagcgcatgtggggacccaggtgtgcagacagagtccactctgcgtgtgcacacttatacgtggttcacagagcttctc

SEQ ID NO: 786484 - DNA, 579 bp, Homo sapiens
cagtgtttaatattagaagtgttttgatctttagaagtttggtgatgtttttgtcaccagaaatatgtcacaggaattctattcatttatatcaattagcctatggtaaaattggttttgtttcccttaaagttgcagtttccaagagtctatcagcaacttaagtgagaacttactgtatttgttattatatatcttccacctgttatatataacaggtggaaaagtttgcatagcctgaggctatagcaaagaaaaaaaatacagcaacctgacttggcttttaccctggggaggactgccttggcctgggagagctcytaggtagaaagggaggacacacccctctctgagggacaggggcactggttgagtgttgccaggatgtgggctggggaggcctcctgggaagggcatttggttggaagcagagacacctggcttgcctgagagggttgggtgagatgggaatgaagactgggaggctgaccagagccagccagcgcatgtggggacccaggtgtgcagacagagtccactctgcgtgtgcacacttatacgtggttcacagagcttctc

SEQ ID NO: 786485 - DNA, 592 bp, Homo sapiens
agcaagcactggacggcggaggcctttcctgttctttgctacatccttcagctgaaatggttttgtggatgcttcattgcatgcaaagataagtggtttcatggaattcaatattgtgaggagatacttggtatctataaggcatttaagttttcatcttacatratttcagaaaggatttgaggtggctaagtgtgggtttattttaagattatacatcagacaagaccttttcttctttgagtcttaaagactcttaggataaggataagagaactctggcccaggtggcaggtggtaaagcccaagaactgcttctccttcaagtaacatgggctgaaaattcgaggtctgtaaccagttgagctgagttcctgggttgttagggcggctggcattggaaaccgactcctccctcctgcaggacattcctgggcccaggagagcctgtgggtggggctgggccacgtggggaactggcagcagtaccaaccttgggttctcgtgttctgtaccgaagctacctctccgtagctggagctcttgggcccagcagtcaggggtccaggctttggccgagggcagaaccttg

SEQ ID NO: 786486 - DNA, 562 bp, Homo sapiens
agcacctgcctcctactccacgtgcccacgcccatcctgctgccctgcttcctcttgtcctctccttggcaggcatgtgaaagaccgttttcacaaaggtgttaagaacttcccgggttcccccactgagggcacatgcatttgaggaagtgctggggaaagctcattggagtgggaagccagggctttgggkctggctctaccagctgtgtgaccccaacaaatccctctgagcctcactttccttatctgtattatgaggctgcttataggggcctgtgaattttattaggcgggtgcaaaagtaattgtggtttttgccatttaaagtaatgtaataccatgtcagggactcggggactctgtcactgaccagaaaaaggagaggaattctgaaatagcttcagcatgaggagcagggtaagagagcctggtgacagaccctggccagcaccccttccatcccagccagcaagggccgtggccacacttaccatgtgcagcatgtctgaggccgtcggggatacctgggcccggtagaggttgtgcagctccaccatca

SEQ ID NO: 786487 - DNA, 605 bp, Homo sapiens
accttcacagcaaccagaggatccacttaaaagcaaggtcaggtcgtgtcgctcctctgcttaagaccctcccctggctcccatctcattctacggaaaaaggacttgctgggctttgggctctgctcgtgacctgacttcatctcctctctcgccctggcactgactccattccagccacactggcccctcactggccctgcaggcacctgcctcagggcctttctatttgctactccctcagcccggaccactctcccctgggtccctgaggcccctcaggtctctgcctcaatgccctctccttgaagaggctttcctggtcacactacccaacatagtaccacgttgctctcactccccttacgcgcctttatttttcttcatagcatgatccttgcctgtttcccccactaggatagaagctttctgcaggcaaggactttgtcttsttcattgttgcatcccaagcccctagggcagggcctgacacatggtaggtgccccgtttgtgaggtgactatgtccaaatccactgttggcctccaaaacagtgactccttcatgaggacccctggtgagcacgtgtcagtctcagacagggc

SEQ ID NO: 786488 - DNA, 615 bp, Homo sapiens
taattttctaaaaatcactgaaaaagtaatttttcagtggcacagttttcacttttttcctgatccataaaaccagcaaagtggatacattcagtgttctataactacatttaagatccatgatgttagcttttcctytataaatcaacttaactctcttttataatggtgacacttacaaagctaaaaccccaggaaaattaaagttgatgaaagaaataacagattccccggctctatatacctgggaaatagctggttaagcttcaccacaaaggatagatctaaattgtttctgaaatgtttaaatttcaaaccccgcatagtcaaggataataaaacagactcatctttttttgccctcttgttaaattctaagcttcacaggcatttgaatacatctaaaaaatttggtttgtgagccttagaatttaaccacttacaaaactcttgagctccctccacttctgaggacgtttcctgacacattcaacagcatcagcgtccaatcaggagggagctcaaagagtaatccagctaattctaaggacacaaaggttttctctaggtaaacagtttaggtaaattacaaagtggtaagtttttcttgaggat

SEQ ID NO: 786489 - DNA, 560 bp, Homo sapiens
tatgggtagcattcttctttccctgtacttactatagtattaacttactactaatgctaagaagtttataatttttgataattcagatttggattagattaagatttatgtctatgcataattcattaaaaactttttaaaccaaattgtcaaaaaagattgtaggtaccttgtttaaagaaaatatataagctagtttcaagaattccaaaatattttttaaaagcagctctgtacatgtcgataaattatttgctcattgtaattttttgaatctgtttgtcaaagcaaatgtagacgggctcgaactcctgacctcaaatgatccacccgcctcagtctcccaaatgctggtattacaggcatgagccacygctcatggcctgttatcatttttaattgaaaattttactgagataattgtagattcacttgccattataagaaataattcagagatatcacttgtatacttagcccagtgtcccccaaaggtaaaattttgcaaaattatagtctaatgtaacagcgtgaatattgacattaatacaatccactga

SEQ ID NO: 786490 - DNA, 615 bp, Homo sapiens
taattttctaaaaatcactgaaaaagtaatttttcagtggcacagttttcacttttttcctgatccataaaaccagcaaagtggatacattcagtgttctataactacatttaagatccatgatgttagcttttcctctataaatcaacttaactctcttttataatggtgacacttacaaagctaaaaccccaggaaaattaaagttgatgaaakaaataacagattccccggctctatatacctgggaaatagctggttaagcttcaccacaaaggatagatctaaattgtttctgaaatgtttaaatttcaaaccccgcatagtcaaggataataaaacagactcatctttttttgccctcttgttaaattctaagcttcacaggcatttgaatacatctaaaaaatttggtttgtgagccttagaatttaaccacttacaaaactcttgagctccctccacttctgaggacgtttcctgacacattcaacagcatcagcgtccaatcaggagggagctcaaagagtaatccagctaattctaaggacacaaaggttttctctaggtaaacagtttaggtaaattacaaagtggtaagtttttcttgaggat

SEQ ID NO: 786491 - DNA, 506 bp, Homo sapiens
gatagatctgagtgggaagcagctggagggagggacacctgcaaggaagttatcacagcccatcagctgagaaggtaacactcagtggtgacactcagaacagaggagagagaaaacaattcctaatatttagagactggtccaatatagggaatgcttgggagggaaactaaaaggcttcagacttgcgggaaggaagaatggtgatactaaccaaaagacgggagtwaggggtaacttggggatgaggatgccgagtacagttttggacatgatttaaaggctagatttatcctctcagcctagaaaaaaacccaggtcaaatatcttctttgttaagccctcctcttggcagaatgagttcctcttctggactctcatagcactttgcaataattatactgtattttaaatccatccatcaactttgctaaaataaagggtgatctctacatgaagataaagtgatatatccctcctgccctccctctcactttctccctgga

SEQ ID NO: 786492 - DNA, 575 bp, Homo sapiens
tgcagctcaagcagtcaggccagagaaagtctctttttttattatattctggccttcaactgatggaatgagagccacccacatcagggagggtgatcttctttacgcagtctactgattcagattttgtctccctccagaacaccctcacggacacacccagaataatgtttgactaactattggggcascccatggcccagtcatttggacacataaaattaaacattacacagggctatccccccccatagagacatttgacgatgtggagatgtttttggttgtcacagttgggtgggcgatgagggaggctgctgctggcatctagtaggtggaggccagggatgctgctaaacatctcagtgcagaggacagcctcccgcaatacagaatatgtacctcaaaatgtcattagagctgaggttgaccaacccttctgagaccttaaagtaagttttgtgatggctgtcaggaataaaagaatacaaagaaacccaatttgggggatttctattctagtcatgtttagagcaagtattggagtatgagatgtgttcagaattaaattctat

SEQ ID NO: 786493 - DNA, 640 bp, Homo sapiens
atatattttagcagaggtttaatagtttttttttaaagcctgcagatttgcccaagaatagcagattttgaaaaaaaaaaacaaaaacagggtgcctgattgaatttgaatttcagataaacatataatgtttgcaatacgagggacatgctgaactaagcgattctttgttgtttgtctaaattcaaatttaactcggcatcttgtattctatctccaagagwttctccttaagggtgggatagaaaggctttcctgcggtataataactgagctctctgcaggctgcagctgccaggtgggaaaggggcccggcctacctgacaggcaggtagaggggcccagaggtcatggctttgctggtttcttcattgggactcagtgcttgtctctctgtggtgtgttttgttgcttttggaagtcttagtttttaagttaccatacagtaaaatccaccccttttggtatgcccatctgtaagcactagcgcgtgtacagacgccggtacccagcttcaatcgggatacagagcagctccacgccacaaagaactctctgagctgccttttagctcagtggctcccaactggggtgatgctgctccccaagagacatgtggcaatgtttgagacatttttgg

SEQ ID NO: 786494 - DNA, 620 bp, Homo sapiens
ctgtggatcatgccccctctggaccaacatggagcaggaatgacaatgggagccacagagtgctggaaggggcagaatgaccacactcaggccagtgagaagaacctccagacacctttcatctgcaggaaaatacaagcccatctccacttcctgtctgggggtggggaactggagagagagggagaaagagcagaaccagtttggccagcagattggtcagaagaaaggagaaatacgatcagcaatcttcagctctcaggctgggttatggctgccyggttccaagtgggacagcaggacgggaacaccattgaggaagaagttcacagcactggcagccccaagaccctggctgcgcagctccattaaaaacaatctggtttaaaccttaacaacagtccaaaaagagagcagggtgagggcaggaagcatgggggaattacccgctcaggctgttccctctcaggaagaaggggcagatgaagtccctgaggctggggtctctggctgggcacaggagcatccctgtctttggagagacctcgggaagatgacctttgaaccacagctgctagaatcctgggccatatatggagagctggcgggagggaaggact

SEQ ID NO: 786495 - DNA, 504 bp, Homo sapiens
agcccaaaccagtcttcatctctctgcagcaggctttgcgggtagaagacggcacaaggaaaatgggcgtattgatttgtagagcagcaggaagcccttctgaaccatactcagagcctcagacctcatctgcatggcttcacccctacccttcagtacatggtctctcgttcctggtcggmctcctcctagaagaatgtgagcaacacaacagccaaatcttcattttgttcaaggctgtgcccctgctgcttcgaacagtccttgcctcattgtaggggcacaacagtccttggctcattgtttgttgagtgaataactgtgcttccaacataggtggagaggctatttgctgtaggaaacttgttctaacaaccagatgcgggggtgggggaagaccatcattcatcattcactccccatgctgggatgcagggcccacgaaaacactataatgtctcttaaaatcggaagataaaacatgaacttttagtgtctaagaaa

SEQ ID NO: 786496 - DNA, 595 bp, Homo sapiens
cagactgactcttgcccagggtcacacagctgatctgaatctttaaaggcccgtactcttccccactcagccataccaactctcttcctcacatgggagctgccagtgacctcttagctgtggcaacgattcaataaggacagctctgagctgaaccaygctctgctcttggcacactcgatgcactcgccacataaatctccaaagctaaactcaaagtgaaggttctgcatccgactcagctccctctcagacttgtaaattttgctcctgcctaatgccagtccttgagggagggaggctgacagcctgaaggttttgtagcattcacccatctcctcattacccctccccaggcccccagattggggggcagggccctgcctggcaaagggcacacaggcagcattgtctcccctgttcctgaactgcttcaactctcgaactttccaccaaatgcttcagctgccagcaataccacctggagtcctacccgcctggctctccaagagggtctttggagacactgcctccttgttaggtgctggggggctgcgtccagagacatgagacctggaggcgagaccacaggcag

SEQ ID NO: 786497 - DNA, 493 bp, Homo sapiens
tttcttaatactgcttttgctgcatcccagggattttgatgtgttgtatctctgttttcatttacttcaaatgattttttgatttctgccttaaattcatagtttacccaaaagtcattcaagagcaagttgtttaatttccatgtatttatgtggttttgagagatcttcygaatattgatttctattttattccactgtgttctgagaatatatttggtatcattttgatttttaaaaaaaaattattaagacttactttataaccaaggatgtggtcaatcttagagtacgttccatgtgcagatgagaagaatgtatattctgcggttgatgggtggagtgttctgtaaatgtctattaagtttaattggtcaaatggtgaatttaagtatacaatttctttattggttttctgcctcaatgatctgtcaaatgctgtcagtggggtgttgaagcccccctctattattgtgtggctttctacatattt

SEQ ID NO: 786498 - DNA, 590 bp, Homo sapiens
accatccaagaacgcaaaactccccaaattgatctacagattcaacacaatccccatcaatatcccagattattcctttgtagaaatagacaagataatcctaaaatagacaagatgatcctaaaatgaaaaagcagaggacatatttcccaatttcaaaccttaccacaaagctgtagtaatcaagacattgtggtactgctgtgaagatagacacgcagatcaatggggtagcactgagagtctagaaataaaccctattatcttaggtggctagttgattyttggcaagggtgccaggaaaattatggggaaagaatagttttataataaattgcgccagaacaactgaatatcaatattcaaaagaatgatgttacaccaatatctcacaccaaatacaaagattaattcaaaacatataattgacctaaatacaagcattaaaactataaagctttcagaagaaaacaggagtaaatcttcctgttcttggattaggcaatgatttcttagctatgacaccaaattcacatgtgacaaaggaaaagaattgataaatggaacttcattaaaattaaaaacttttg

SEQ ID NO: 786499 - DNA, 605 bp, Homo sapiens
gattacaagagcccagaggtgataagagtgacattacaccacttattgagcaccttccatgtgccaggcacaagtgtagacacttaacatacataatctgatttaatcctggcaaagtaagaattattcttctcatgttcacaaataacgttaccaaggcttagagatgtttrtaattccctgatatcccatggttggtcaatgctccaacagtctaagcttcccagacatgggagctggggaagcttaaatgcctcttgcctccagttgggattggagaggagagataggccttagctggggagatgccagggctcagtcatgaagagacaaggaaggcatgggatggatacagggagacatggaatttcagagaggcttcagcccaggtcaaagactaagctgtcttaacttattggcacccagacctcacttcaggtcattagagaagctctaaataatacagaaatcctcctttagttaaaaaaaaaaaaaatgtagagattcaggaagcatccaagaatgttggtcaaatgtgtatcattttctctgggagcataagagcatttgccttgaggctctgccatccagactttgaactgtaa

SEQ ID NO: 786500 - DNA, 457 bp, Homo sapiens
atgttaataattatagatccatattgtcacttttaatggctgtttaatagtctaaggtaaaaatgtgctgtggtttatttagtcaactgcctgtagttagatgtttcagctgtcactaggttattgatataaacaggtatctttatataaatatcaccaaatgctgctcagatcattcccttaaggggaattctttaaaatggaagtgctgggtcaaatcctgtcatcttctttaagggcatgttgtcaaaatttccctacacagtctcaatcaggatmccaagcatccagcagcaaatgaaaacacccattttcctccttcaccctcaacactgggcactatgagtctttttaatctcttccagtctgatgattgtgtatggcatagctcatttgctgttttaacttgttcactgttttctcttctccctctggcaccttctgtaatctcttggag

SEQ ID NO: 786501 - DNA, 361 bp, Homo sapiens
ggggagtggctagatggagacaggctctgtgtagtgtactacagagtttagactttattctgtagctatggcagattgttacaggaagcgtttttggaggagaatggtgatcagatttgtgttcagatggttaattttggcagtaatatggaagaggaaataaagtagaaacagggagatgaagggagaaagaccaataaaaaggtcatttgcaattggctrtgtgaagaaactgagagccagaaagaagccatgggcagtgcggggttagagcagagaaatgtatgagataaaacctctggaaagggtgatcgagtcgaggggggacattcaaaaaggcttggattagagaaaaggtgtg

SEQ ID NO: 786502 - DNA, 645 bp, Homo sapiens
ggaatcacttgttactctgcaatgaaaacaaaaattggtgagtggagtgctgccacaaaacaaaaattaaaatatgtggcattggctttgggaccacatggtgggcagaggctgaaagagcagagaggaaattatttctggagtctggaaaaagggaaacccatatttttgaaacaatcagcaaaataatttcctgtggtaacttgtaaagcaaaaactgtacctgatacrcttatgggtctggctaatgctatttctacacaaaatgctaaaatagttttttgtttttatttttaacactgcctgataaggtatagaagaaagacggatgaattaaagaaggaatcatttagtttgcaagcacaacatagaggaaatgagcaggtcccaggacttgctggattagaatgtaagactgttcctcatttccattttctccagctggcaaaggattctcaaagtaaaaaatggtttcagggtaaagattaatctagagtgtggctatgaaatcctgtattaaggcctctaaaggactttaggaagttctgagtagactctcaactggatgaaagggcttctaagattcgtagaagcctcatcccaaaatatctctgggtaatatagagctgggctgcccaggatggt

SEQ ID NO: 786503 - DNA, 496 bp, Homo sapiens
tttaaagtgcatgagtgttctaatacccctaaattaaggtacatattgaccagatgattttatcccccttctacagatagtgaaacaggtttaaagaagaaaaataagttaggaaaggtggtttaagttccttgagttcagagctgactaattcatagaaaataataataattataatgattaaaatttattgttctcttaatatatgcaagagtgttccaataacattaactcatttaatcccttcaacaaccctacgaggtaggtagcattataaccatccttttcttacagataaggaaatggargtacaaactagttaggtaatttgcccaaggtctcaaacatatatgtgcagcaatatatcatattaaatatatgttacataataggcccacattcatgttcgttatctcactgacaagcaattctaacatactgagcttttctcaatcaggttttccattatgagcaacactgcatctggaagaatgat

SEQ ID NO: 786504 - DNA, 680 bp, Homo sapiens
atctgaaaacacccccaagaggatccatttggaatactgagagtctaaatagatatttttggtcagaattatcccaattatcagcacattaatgcaatgacctggataatgaccaaatctctacctagtttcttgatatatcaatttaactctgctaagacaagaccatacagctggggaaagacattcaagaaaatgccatgctagccgggcgcggtggctcaagcctgtgatctcagcactttgggaggccgaggcgggcagatcacaaggtcaggagtttgagatcagcctggccaacatggtgaaacctcatctgtactaaaaatacaaaaattagatgggcgtggtggcaggcacctataatcccagctactcgggaggctgaggcaggagaatcatttggacccgggaggtggaggctgcagtgagctgagatcaggccattgcactccagcctgggcgacagggcgagactccrcctcagaaaaaaaaaaaagaaaagaaaatgctatgctacagaccactccaaggaagctccaggaaaacactgccttctccttgcgactgtatttggttcatctgtgaatttgtttcagcacatttttctcttcttgacttgaagcaatacaatcagctgagagatcaatgatttctttccccttctcagtgttctgtaa

SEQ ID NO: 786505 - DNA, 630 bp, Homo sapiens
tgttgatttggggtggagagttctgtagatgtctattaggtccacttggtgccaggatgagttcaagtcctgcatatccttgttaatcttctgtctcattgatctgtctaatattgatagtggggtgtgttaaagtctcccattgttattgtgtgggactctaagtctctttgtaggtctctaaggacttgctttatgaatctgggtgctcctgtattgggtgcatatatatttaggatagttatctctttttgttaaattgatgcctttaccrttatgtaatggccttgtctcttttgatctttgttggtttaaagtctgttttatcagagactaggattgtaacccttgcttttttttttgctttccatttcctcggtagatcttcctccatccctttattttgagcctatgtgtgtctccgcacatgagatgggtctcctgaatacagcacactgatgggtcttgactgtatcaaatttgcccgtctgtgtcttttaattggggcacttagcccatttacatttaaggttaatactgttatgtgtgaatttgatcctgtcattatgatgttagctggttattttgcccgttaattgatgcagtttcttcctagcatcgatggtcttt

SEQ ID NO: 786506 - DNA, 587 bp, Homo sapiens
attcataacagctgtaaaattttatgcttctatttttattttcttttttgaagaagtctggattgctgttaaggaatcagtattcatttctaaaagcccttctccttcattaaataaagatcttaccctcacttagacatagtttaccagggattttataacttttaatgtcattgaattagggaaatcctagaattagaaatcagcagtacaagaacatccaaagcataaagaacatcttgttcccatttgaagctaggtgagattcaactgaaaaaaagtatacagtttgatgagctcaacaacatctgtttctcttgtttttaactgttcttgtgagttaatgaataaatgacaggtgctgaaggagargaatgccaatagaggttgactaggaatgggctgctttccttaatggcaactgtgcaatgccagaaggcctagatgttcatcaagctggtggaagatactaagcacctatcctgtgtgtgatccaggacagcagcccctgaagaggagctgagaaccacatctaatgtgatacctgtgtgatatgtctgatgaaacaggaaaacaatcactctttg

SEQ ID NO: 786507 - DNA, 651 bp, Homo sapiens
aatcatcatgaatacaagttaagatcaagccatgggaaacttgtcttcttccatctaatttgattaatgagttttatggctgagatgcattgtgaagaaaaaggtaaaagtactcgaggcaaagaacgattgtggcacatctcacataaattgttagggaaataaaagccatcttgaacataaaaattatatagttacaaagtgacaaaatcacctttccaaggtagttatatacaattacaaaagattgcaataacctctatacctggaaaataaaagctaattaatcctctactatgtattatctcgttgatagctactaccatactctagtagtcagtgagagactcatgcttccttaaattaattcctttaaaagcccaatagcatcagtctttcagaagtaattaaggttgtttgaatattgacrttgtcagtcataaagcaatgcagttccttacttaagttacagaattgcatttataacatttaattagagaatggcccatgacagctttttggacttcaatgattcagtgaaaaatgtaataatctcttaacaagtcaattgaaagtaaagagcagctttgtcaatttttaaaatatcaatgcagagctacaaataaggtaaattatttttgttatgttatg

SEQ ID NO: 786508 - DNA, 626 bp, Homo sapiens
cgccactgcattccagcctgggtgacagagcgagactccatctaaaaaaacaaaaaacaaaaaacaaacaaacaaaaaaccaaaaatatcttggctggaatgctgtaaccagtgagttttattgcaacatgagtaaaaaagtcagcagatttaaagtaggcagaaaaacaaaatagagagatagaggacttaggaggcactgcatgatgactactgttgcagggtttttgttagagttcgaaaaataaccattggaactctaaattttccttgacgtaatttgcccattagtttaaaaatgtgcacaaagacgtagccagcgggagttccagaaaacttactgtgccttaatatttaaaaaccatyccccttcttattaatctttttacagtaaagaacattctacagatactatgaggccacgccggcagtttggactggtgctttagacggtggtgactgctgtagcagcttctaatgagacagcctgtgcccaccatttagaatgtttattttgctctccaaagatttttagaagcaagcagaggaaaagagccaggtcatttacagatacacataaccacagcaaaagaaggcaagataagggtgctcacaaatatgttcac

SEQ ID NO: 786509 - DNA, 619 bp, Homo sapiens
agctgtggccggaccttcgggagcagtaggctcccgcccggggctctgcacagagctccacagtggcctccccctgagtgtggtgcctgcctgcacggccaggcacacagaccctgtctccaggggctgggggatctgtgggcaaagacccgttgagccatgggcggtgccactcttggtcactgtccggccctggggctgctgcccgctcttccctgagcagactcgggccttcgttgcttcyagagctctctgctctgtggctgccaggccgggactcatccacaggccaggtttttctggtgccgtctccctgcagggactgacttaaccactgtgctctcctctccccagcttctggccaggtgtggccagtggagggcactggggaggaggcggtgtgggggacaccctggtcagaggcacagaggctgggcatggagcctgggactccccctcagcctgcccctgacccatgtggcagagccctctgaggggcctgaggggccccacgcctctaagagctccttcctcagtgctccctgagttcggggggaccctgactgtcctcgtgggggtcctcaggggtcacgagtttctaagtgtccggggcccatcc

SEQ ID NO: 786510 - DNA, 538 bp, Homo sapiens
aagaggctgctctcagaagggtaggtttccaggtgtctcttgaaccctttgttcagaaccaggacatgtgtggctgggcagcagccttcagaccccccacaggctggtgcccggtgcccacagccctctgttgggttgtcaggcccctgcacccgtggtggggtgttgggctccagagttccctgggaccagctgatctcttgtccttggttttggcccaaatgcaagcccctggtctcctccaagtaacttcctttccycagggctgtccaggccccaccgctgcctgttccttcccagggcctcccgcaagtcccgatgctgacgcctctctgcccacctagtttgtggccgccgcctccagctctgtgtctgcctcccagcgagggagccgtggttgattatctcgtgagtgtctgcccttctgaagggtacagtgtgaagtctcatcagtctcacttcaatgcctaagcacctcttcagaaaccagggagtcatccgggtttctccatctttaaccatgttttctaaaggtttt

SEQ ID NO: 786511 - DNA, 538 bp, Homo sapiens
aagaggctgctctcagaagggtaggtttccaggtgtctcttgaaccctttgttcagaaccaggacatgtgtggctgggcagcagccttcagaccccccacaggctggtgcccggtgcccacagccctctgttgggttgtcaggcccctgcacccgtggtggggtgttgggctccagagttccctgggaccagctgatctcttgtccttggttttggcccaaatgcaagcccctggtctcctccaagtaacttcctttccccagggctgtccmggccccaccgctgcctgttccttcccagggcctcccgcaagtcccgatgctgacgcctctctgcccacctagtttgtggccgccgcctccagctctgtgtctgcctcccagcgagggagccgtggttgattatctcgtgagtgtctgcccttctgaagggtacagtgtgaagtctcatcagtctcacttcaatgcctaagcacctcttcagaaaccagggagtcatccgggtttctccatctttaaccatgttttctaaaggtttt

SEQ ID NO: 786512 - DNA, 519 bp, Homo sapiens
gccacgatctcccaggtcatcccgtccatcgatgatgcttattacattcttcctgatttccatgtggccaaattcaatagttatttaccccaggcttgtattttggaggctaaagaactctgttaccagctatatccgtgctgtggctgccgtaacaaaatatcacaaatgtggcttaaaacaacaaaaattttttcagagttctgggagtcagaaatctgagatcaaggtgttggtggctgtctctgagtgctccaggggaggaccgtccacctcttccagcttcctgtggtgcaatagtttggatrtgcgtctctccaaatttcatgttgagatgtgattcccagtgttggaggtgggcctggtgggaggtgattagatcatggggctggacccctcatgaatggcctagcaccatctcccaggtgatgagcgagttctccctcagttagtccctgtgacagctggttgtttaaaagtctgggacgtgccactttcttctcttgctccctcttgcca

SEQ ID NO: 786513 - DNA, 519 bp, Homo sapiens
gccacgatctcccaggtcatcccgtccatcgatgatgcttattacattcttcctgatttccatgtggccaaattcaatagttatttaccccaggcttgtattttggaggctaaagaactctgttaccagctatatccgtgctgtggctgccgtaacaaaatatcacaaatgtggcttaaaacaacaaaaattttttcagagttctgggagtcagaaatctgagatcaaggtgttggtggctgtctctgagtgctccaggggaggaccgtccacctcttccagcttcctgtggtgcaatagtttggatgtgygtctctccaaatttcatgttgagatgtgattcccagtgttggaggtgggcctggtgggaggtgattagatcatggggctggacccctcatgaatggcctagcaccatctcccaggtgatgagcgagttctccctcagttagtccctgtgacagctggttgtttaaaagtctgggacgtgccactttcttctcttgctccctcttgcca

SEQ ID NO: 786514 - DNA, 691 bp, Homo sapiens
ctgtcctccagaccccagaatggtggatccactggcagtttgcaccctgaatctggaaaagccacaggcactcaactctatcatgtgagagaagccacaggggcaacatcctccaaagccacaagggtagagttttccaaggccttgggagcccaccccctgcaccaatgtgccctggatatgggacatgaagtcaaaggagattaccttggagctttaagatttaatgactgccctgctggatttctgacatatatggggcatgtagatcctttctttttgccaacttctcccttgtggaatgggaatgtttacgcaatgtctgcactctcattgtattttgggagtcaataatttgtstttgatttcataggctgataggtggaagggactcatcttcagatgagacttgggacttgggaaatttgggttgatgctggaatgaggtaagactttgggggactgttgagaaggcatgattgtattttgcaacatgagattgggggaccaggggtggaaggatatggtttatatatttgtcccctccaaatctcatgttgtaatatgattcccagtgttggaagtggggcctggtaggaggtgattagatcaagggggaagatccctcatgaatgatttagaatcatccccttggtgatgagtgaattctgccccagtcagctcacacaca

SEQ ID NO: 786515 - DNA, 691 bp, Homo sapiens
ctgtcctccagaccccagaatggtggatccactggcagtttgcaccctgaatctggaaaagccacaggcactcaactctatcatgtgagagaagccacaggggcaacatcctccaaagccacaagggtagagttttccaaggccttgggagcccaccccctgcaccaatgtgccctggatatgggacatgaagtcaaaggagattaccttggagctttaagatttaatgactgccctgctggatttctgacatatatggggcatgtagatcctttctttttgccaacttctcccttgtggaatgggaatgtttacgcaatgtctgcactctcattgtattttgggagtcaataatttgtgtttgatttcataggctgataggtggaagggastcatcttcagatgagacttgggacttgggaaatttgggttgatgctggaatgaggtaagactttgggggactgttgagaaggcatgattgtattttgcaacatgagattgggggaccaggggtggaaggatatggtttatatatttgtcccctccaaatctcatgttgtaatatgattcccagtgttggaagtggggcctggtaggaggtgattagatcaagggggaagatccctcatgaatgatttagaatcatccccttggtgatgagtgaattctgccccagtcagctcacacaca

SEQ ID NO: 786516 - DNA, 691 bp, Homo sapiens
ctgtcctccagaccccagaatggtggatccactggcagtttgcaccctgaatctggaaaagccacaggcactcaactctatcatgtgagagaagccacaggggcaacatcctccaaagccacaagggtagagttttccaaggccttgggagcccaccccctgcaccaatgtgccctggatatgggacatgaagtcaaaggagattaccttggagctttaagatttaatgactgccctgctggatttctgacatatatggggcatgtagatcctttctttttgccaacttctcccttgtggaatgggaatgtttacgcaatgtctgcactctcattgtattttgggagtcaataatttgtgtttgatttcataggctgataggtggaagggactcatcttcagatgagacttgggacttgggaaatttgggttgatkctggaatgaggtaagactttgggggactgttgagaaggcatgattgtattttgcaacatgagattgggggaccaggggtggaaggatatggtttatatatttgtcccctccaaatctcatgttgtaatatgattcccagtgttggaagtggggcctggtaggaggtgattagatcaagggggaagatccctcatgaatgatttagaatcatccccttggtgatgagtgaattctgccccagtcagctcacacaca

SEQ ID NO: 786517 - DNA, 632 bp, Homo sapiens
gctgagatgtctcagcttagccactgctctgttttcctggggcatagggtactatatcagctcagccttgggatgtgctgctgctcagcttaagccagggcactgattccctagaaggtgatgtgttgcttcagctcaggccttctctgctgtaaggaaagtcctgcatttatgtatcagagggtgtgattgttctgagtggcccaggcaccatttctgtaggatacaggttgctgcytcagcctaagcactgcagtgtgtgaccttctgggtggccaaggcattagttcctggaatgcagggtgctgcttcaacgtagacactagaaaggcatggccaaagtcctgttttgctaggaggcaagaaactgctttagcttggactcaaagggtcagggggaggagtgggtagagctgatccacttggctctgtggggaagggtttaatagatgcccatagcttgacttggggacgtgggaccactagtctgggttgttcagtggcagcttagcctcagagatgaaggggagctgtgactactcactccttgggtaagacacactccagccatagttcctattccagtgtggtgaagcactagccatgtgggagtggggtacggtgtcagcacc

SEQ ID NO: 786518 - DNA, 627 bp, Homo sapiens
ccccacatagccaaagcaagactaagcaaggtgaacaaatctggaggcattacattacccaaattcatactatactacaaggctatagttaccaaaatagcacggtacttgtataaaaataggcattagaccaatggaacagaacagagaatccagaaatgaagtcaaatacttatatccaactgatctttgacaaagcaaacaaaaatgtaaagtggggaaaagatgtcctattcaacaaatggtgctgggataattggcaagccacatgtagaagaatgaagctggatcctcatctctcactttatayaaaaatcaactcaagatggatgaaaggcttaaatctaagacctgaaaccatgaaaattctagaagataacattggtaaaactcttctagacattggcttaggcaaagagttcatgatcaagaacccaaaagcaagtgcaacaaaaccaaaaataaataaataaataaataaatgtgacctaattagacaaaaaaaacttctgcacagcaaaagaaataatcagagagtaaacagacagcccacagaataagagaaaatatttgcaaactatgcatctgataaaggactaatatccagaatctacaaggaattcaaac

SEQ ID NO: 786519 - DNA, 653 bp, Homo sapiens
gaaatttaaacaaaaaatatataaaaagtcatcaaaatttatcaacgataacagttttagttttattagtctatctaactaaaacaatttttattagttttcgctttccttgttagcttttgcaatcagggttaagttgtcatcagtttaaaataataggttgtaagatgttatttgcaagcctcatgggaatctcaaatcaaaaaccatgcaatggatacacaaaaggaagttgaaaaattattttcaattgctctagctaggacttccagtactatgtttccaaaatttggttttttgaaaagataaacaaaattgacaaacctttatccagaataactaggaagacagaagacctaaatttttaaaaaatccagagataaaaaggagatcctaygaattaaatttaaaggatcattagacattattatgagaaactatatgccaataaattggaaaacatagaagaaaaagatgtactcctagacacataccacctaccaagattgaaccatgaataaatctaaaacctgaatagaccaatagcaaataatgaaattgaagccactggagccaaaaagtctcccaagaaagaaaagtccagaaccctatggattcactgctgaattttactgaatgtttaaagagtaata

SEQ ID NO: 786520 - DNA, 668 bp, Homo sapiens
atcatgaccaggtaggatttatcccaaggatctaaggatagttcaccatatgcaaatcgatctatgtgatacatcatatcaacagaatgaaggacaaaaaacatatgatcatttcaattgattctggaaaagcaaagcatgtgataaaattcagcattccttcatgacaaaaactctcaaaaaactgagtatggaaggaatatgtctcaacacagtaaaagccatatatgacagacttagagctagtatcatactgaatgggaaaaaactgaaagsctttcctctaaaatctggaacaaggcagggatgcccactttcaccactgttattcaacatggtactggaagtcctaactagagcaattagaaaagagaaataaataaagggcacccaagttggaaagaaagaagtcaagttatccttgcttgtagattatatgatcttatatttggaaaaacctaaagactccaccaaaaactattaaaccgataaagaaattcaacgttgtaagataccaaatcaaaatacaaaaagttagtggcatttctatgtgccaacagtgaacaatctgaaaaagaaatcaataaactcaatagcaataaataaaacaatatacctaggaataaacttaactaaagaagtgaaagatctctatgatgaagactata

SEQ ID NO: 786521 - DNA, 631 bp, Homo sapiens
ctgttgtttttgaaactatcgttttagacttgtcttcagaacttatgaattcttcttttgaatgtgaatttgatatttagaaatcactaaaagccatctagtgccagtttatctgttgtacataatgttttaaatcaggctatttaaaatcattttggggcagaagtatttatcttttttatcttctcattgactcgtaacactattcagtgaatttgggcagaagtagagagtcatgttttaactttgagatgcagttttttacatggctcttaagttaaactgagtacatttccaaaagagtttttctgaaaaatactttagtagcaaaattagtagaatagatatagaactgctaagatgactgttttaaaggaatcatgctcatttggactattgatatattagtttaagcaacaaaatcatttatgytttttatttaatcatttattatattttatatttattttaaatattttatatttattttatattatattttttatttaatcagttcttataattactttataattatcctgttacatcaggcataggaatcatagcaatttactttctacactgttatttttcagactttgtatttataatttatgatttaaccactgat

SEQ ID NO: 786522 - DNA, 610 bp, Homo sapiens
gttcctgggctgtcctatcttcatgtcacaggtctcaggacagttttgtttgtcaccaggagaaagaagccaaggtcccctgagctgccggttctccctgcagcaggctttcccagggctctgatcccagggctgagcaaggagctartggaaggagcctaaggatatagggagtcgggtgggtggaggccggggcagggaatagaggcctgtcaggccctgtatggggtgggcgagcctgtcctagctcaaagttaagcacagctcctgtgctgattagaaatgggtttggagagtggggttctgaaaacgcatccaagtcaatgcccagcctctaatattatcatcttccccaccacactgggagctgccacctcagccaatgacactgtctcctattcctttctcttcaaccccatcttctgccctgactcaggtctttcatttcccctgttggtcttgcatggaccagctatgttctcctagttctgccctcggacactgtctgacattgccgtggtgtgcttcccctccatctactacccatggcttcctgctgcccagaaacagaatctgggcttggggcacaccatatttctctctcccccat

SEQ ID NO: 786523 - DNA, 613 bp, Homo sapiens
gcagaacagaacaagaaaaaggctgaaggagacctctggggtgcattgggatccttaaactttttttgtctcccctttaggagggatatatgttttcatttctctttcgtaacgggccttgtctgcccttgccatagcttcaaattgtcctttctctttagcagacwtggtcttccccctcactaagcacttcttagaaaactctgagaagttgactgaagcatctgggtgtttcttcttacgctcctccggacaagtttgcacacaaaatacatacgatggcattttgcctcttggctttttaagatctcctttgcctatgtctagttatttttcctcagcgaggcacagagttgcctagggcccatccggctctcacttgccccggcactgtctttatggagctcaatgtactgcctataattcatttttaaaaccccaaagttcataaaacagcaactcaaagcaaaacaaaaaacaaaccccaaagttgaaaatgaatacctgcttttattttcagaaccggcatttaatttaaaaatctgttttcaaaaataaaattctaaagtcataaagaatgagttaagtttaaaaatttactttaaaacttgta

SEQ ID NO: 786524 - DNA, 612 bp, Homo sapiens
attctgtctcgaatcaatgaatgaatgcaagcttctgggaaaaaagataaaacaatgccacatgaaagaaacacacaccaataggaaaacacattttaacttcagaaatgttaaagattatacattggtcttagaatcaagggaataaataatagacaccattttttgagcccttaacacatcacttagtcaactgtaagtaacacagaacaactaaaatagccttaagagataaggaccttttmtattaacaagaagtcataaggtaggagggctccagagttcacgtggagactcatttgattccggctcttgtcatcttactgctgacacccttagtgtgccctacttgtcctccacctggtcctccaagtgcagaaactgcacttccacccttagcgtcctctagttgtcctctactagctctccactgggtctggcagaggccatagtagttccaggtatctaaacctcatgatgaagggaacgtctcttctgcagatttttaaagataaactcaagttttccagaagcccctccagcagatctcccctcacatttcattggccagagttgtgtcacatgccaatttttaaagcagtcattggcaga

SEQ ID NO: 786525 - DNA, 594 bp, Homo sapiens
gactccgtctcaaaaaaaaaaaaaaaaaaagaaaccaaagtctgaaccctaggtgtgctcattgcaattggaatgccatcgcttctaggccttaaaaagtatagacctgtgtatcaataaatatttctatatttaaccatctgcatctatcttatactaaatatgtgttaatctgatatctccaactgtaatacatttccatatggattattttagtttattccccttacctatctgtaagctccaacttcacagtgagaaacctggatcccaccactgtcatccattgacttaattgttcaactgcattattcargtttagtaatttaagaattattaatacatatccccatagcaaacaacttatagtagtcttagagtacattattaatttatagcagtttattttgctttagttcaatacaccctactcatttccaaagttactgaggccagcatgttattctcctactctattcagtgaggttcttacatgtatttttaatacatttagattcttttgtcacactctaccattgaatcctgggatcatctaaattcctaaatgattttttaaatttacacatattaaaa

SEQ ID NO: 786526 - DNA, 594 bp, Homo sapiens
gactccgtctcaaaaaaaaaaaaaaaaaaagaaaccaaagtctgaaccctaggtgtgctcattgcaattggaatgccatcgcttctaggccttaaaaagtatagacctgtgtatcaataaatatttctatatttaaccatctgcatctatcttatactaaatatgtgttaatctgatatctccaactgtaatacatttccatatggattattttagtttattccccttacctatctgtaagctccaacttcacagtgagaaacctggatcccaccactgtcatccattgacttaattgttcaactgcattattcaggtttagtaatttaagaattattaatacatatccccatagcaaacaacttatagtagtcttagagtacattattaatttatagcagtttattttgctttagttcaatacacccyactcatttccaaagttactgaggccagcatgttattctcctactctattcagtgaggttcttacatgtatttttaatacatttagattcttttgtcacactctaccattgaatcctgggatcatctaaattcctaaatgattttttaaatttacacatattaaaa

SEQ ID NO: 786527 - DNA, 587 bp, Homo sapiens
cttgatgagagaacttagtcattattaccattattattaaataattctgtgtctcctaatttgcttctggctcccagaaggctcccagtggctttcctatgaattaaacaattaaagaaaacctctcaagatatttaatacttgctatgtatattgtggtgaccaaagtttacttcccaaggaaagcttggtcacgatctttattaaaaactaataattgcatgattctagatgtagtcagcagtttggaaggatcattactccactgattgccttactgtcctgataaaatatacagttttggaaataaagtattcaggttggccatttccagatttcctttgctttatctgcagaaggaaccaccacaagctcacagcagaatctacactagtcaagtagttagataacaataactgttaagaatttctgctagtgggtkgggggcagtggctcacgcctgtaatcccagcactttgggaggccgaggcgggcggatcacgaggtcaggaaatcgagaccatcctggctaacacggtgaaacctcgtctctactaaaaatacaaaatattagccaggcgtggtgg

SEQ ID NO: 786528 - DNA, 593 bp, Homo sapiens
aatgtagtgtgtgcatcagtaatttctaacagagccttaaaacagaaacacagtctttccataacctatgattagcaaggtattaatcagcagtaacagttgcagtattaatcagcagtaacagttgcagtaaaagctggttacaaacaatccatagaaacaggaagtgaagctagacaaccggttagatcagaaactctcagaaaggagtatgccttaaccctaaagaggcctagaagagccgtggcaaaatgagggcatttatagccctatcttatccatatgaacaggcasccctcatgcgtctgtttataggctcttcacaagggtcgcattccattcccagagctatgaacatctgcttttctgggataggaatcttggtgatgtgaaacctccctgactgcacgtccattcataggctctctgcagggggaagcacatcacatgctgttggctcattctggcagtccaacctggcattgtctgtacacaatcctgcatacaattttgtatttacaataatcaggagcatttcatcttctattctgtagcaatagtttcagggggtctccctacagttttggagacag

SEQ ID NO: 786529 - DNA, 591 bp, Homo sapiens
cttatttcctataccaccatcccatgccccctcccgcgcacacacagagcaatcaatctacaagctctgtgactgcagggcccttctgttctgtccaccactagattcccagcacctagtacctagtgcctggcatatagtagatattcaaaaatatctgtaaggtaagtgaattagtagctacggaggactcatgacatgccaggcacgtgctaaakatctggggctatcactgaggacccagcagacactggacaactgtgtacgactaacaaaggatcaagcattggtcaagtcattaattacatatttaaaaggtggaataactgctacaaaagaaaatgaaaaattcaaagtgagtgcatgtatgtgtgtgtgtgcatgtatgtgtgtacatgtgcgtgcgtgtgcatgtacgcgtgtgcatgtatgtgtgtgcatgtgcacgtatgtgtgtgtgtgcgcatgtatgtgtgtgtgcatgtggatgcagggcggtatggtttccaaatgtaagcaactcctctgacactgctccatcaggggtggtgtctaattccccactgtttcaatatgaggcagccctggtcc

SEQ ID NO: 786530 - DNA, 591 bp, Homo sapiens
cttatttcctataccaccatcccatgccccctcccgcgcacacacagagcaatcaatctacaagctctgtgactgcagggcccttctgttctgtccaccactagattcccagcacctagtacctagtgcctggcatatagtagatattcaaaaatatctgtaaggtaagtgaattagtagctacggaggactcatgacatgccaggcacgtgctaaatatctggggctatcactgaggacccagcagacactggacaactgtgtacgactaacaaaggatcaagcattggtcaagtcattaattacatatttaaaaggtggaataactgctacaaaagaaaatgaaaaattcaaagtgagtgcatgtatgtgtgtgtgtgcatgtatgtgtgtacatgtgcgtgcgtgtgcatgtacgygtgtgcatgtatgtgtgtgcatgtgcacgtatgtgtgtgtgtgcgcatgtatgtgtgtgtgcatgtggatgcagggcggtatggtttccaaatgtaagcaactcctctgacactgctccatcaggggtggtgtctaattccccactgtttcaatatgaggcagccctggtcc

SEQ ID NO: 786531 - DNA, 461 bp, Homo sapiens
ctgaggatatgtttccaagatggtcactcatatggctgttgacgggagatcttcattatttgctggctgttggtagaaattctctcagtttctcatcacagcaacctttcctcgaggctgcttgagtggtctcacaacatggcagctggcttctcccagagttagtttttgctgcatcacaagctgaattcgtttcctaggcccgccataacasagtacgacaaactgggtggcttaaaacaacaagaattaattttctcacagttcttgaggccagaagtccaaaatcaaggtgtcagcagggttggttcctcctggagcctttgaggaagaatctgttccatgcctctgtcctagcttgtggcagctactggcaatccctggcactcctttgtttggagaggcaccactcctccatcttcacaaggagctcttcactatgtttcttctgtatctatgtt

SEQ ID NO: 786532 - DNA, 571 bp, Homo sapiens
gccatagaagaatcttctatgttgctaaggactgagcacaggaaattgagcagccacacacaaccatggggccaagaccaagcccttgcctttctctcatcctccatgctgtcatctgcaaagtcactacatcatctctgaagcctccttccctctcatggtctgtgtttttcgtcaagaaagacttactggccattaggaggatgaagtcytaagatgtattacactagaggacactgtggtagctccacccagggagatgagatatgatgaattggtaacacgaatgtcaccattacaataaaagctagtttatccgacaggcaatcactcggaagccaatgaggaccaagattctgaataatgatctgcggctttgagttgtccaaaaaatgactgcattatgctgagtggagtttaacgaacagccaagttggaagttcatgcatggggcacagcagattaaacagtaaaaacaagcactgggggtctggagatgggtcagtggcttgcaggccagctgacagcactgggctggtctcttatttctctgtcttcatctaccatgtga

SEQ ID NO: 786533 - DNA, 610 bp, Homo sapiens
tggcaaatgagcacataaaaagatgctcagcatcatttgtcagtaggtaattgcaaattaaaactgtaacctaatactattacacacccattggaatagctacaaattttttaactggccataaaatattggagaagatgtagagcaattgggactcttytacactgttgtaagaatgtaaaattatacaactgctttggtaaacagttgaatcttttttttttttttttttaagttaaccaagacctatcacaaaatccagtcattctacttctaggcatttatgcaagacaaatgaaagccttatccctataaaggcttactacacctgaacgtttacatcagttttatttttcatggacaaaaactggaaacaacgccaatgtccatcaccatgtgataaagaaacaaattttgatatttatttatttttttcatgaagcaatatgacctaaaattttggtatttcttaagaagccagattaaataatatagcacagactatgtagatttatctatataaatttctagaaaatgcaaatgaatctatagttacagagagaaaatggctgcatggggacggaggtggagagagaaaggaattatagta

SEQ ID NO: 786534 - DNA, 598 bp, Homo sapiens
ctggcacccaactgttagttcccttaccttcggaaaggtgtcaggtgccagcctggaggagaaaaagtccaaaccaggccgcgtgtttcctgtgcattctatgtccccagccacctgggccttagtgacagactgtgtagtagatcgatgaatgaatgacaacrggtggccaagcatggaggtatacgctgccttctctccttctggcagaacgtgatgatgggcacagaattgaggtttgtatgggttgaattttatccccaaagctaaccccctcctgagctgtctacacctctgtcctagcttttgagacatgggaaggggtatacaccagtcgcccacacccatccactcaggcggtcaagaactatcaggagaagagggcttggctaacccctctgtgggatatccaatgcggccctggcctcctagtgagccgcagaccactaggggggccgagcccagcactgtccatggcggtaatgaccaaggggactttgcagggtggcaatgtcactgcgaggcacgaggtcctggaagaaggggagctggtagaggaacaagcacgccaggtggtgaagatggctatgaagacaca

SEQ ID NO: 786535 - DNA, 609 bp, Homo sapiens
cacacatatatatgtgtataaatatatataagaaaaagaaatatatatctatgagaaaaggaatatgtatgtttttttctttcttagcagacaggccagatttgtccaaaagcccgagtttgcccaccccgatctagaacatctttctacaaaatcctcgcatcatgaatccccctgcaccagccaccctctctgcygctacagcccagagacctcctttcaagtgagtttgcataagcggctgaggaatccctgaggtcagtggcgggggcggggtgctgttttttaagaagacatttttcctggaaggaacagggctggtactggcacggtccttttctgatgatttagtcagaacagccctccagctcactggtctgtgcaccaaagctgtggtagagggcagtgaaagtggtcattgcggacgagggctcggagccaaaggccctctggggaagaggatgccaggacggcttgcaggaggtgcttggtgcttcctggaaaaagagggggaatgaacgatcagggggtccatgcagcatgggaggggtttctgaggccaggccctgttgtgggcaccaactgggtcattgggtcaggatttccaga

SEQ ID NO: 786536 - DNA, 589 bp, Homo sapiens
gtttacctacataacaaacctacgcatgtgccattgacctgaaaataaaagttaaaaaaattattaaaaatatgtcagtaaaagtctttaaccaacacaagatggttcatcccaagagtcatcttaatttaaaaatcttcacatcttaagaagctacacgggaggctgcggcaggagaatggcttgaacccagcaggcaggggttgcagtgaagcgagatggcaacattgtactccagcccgggcgacagtgtgagtctctgtctcaaaaaaaaaaaaaaaaaaaraagcaactttgctgcttaaattgagtataatacccatttacatttaatgtggtgaatgaaaaatttggttttcatttaccaccctacaactgaatttttaattcctccacatattctatttgcctttctcaactattattttatagataaaaggacttacagaaagcaaatatatgattcaatattccaataaaagtgctttttaaatttatattgagcattttatccttctttcttaaaaatcttaagctacacacattacatagctaggcactgataagaatctagtactagataaccatt

SEQ ID NO: 786537 - DNA, 591 bp, Homo sapiens
taaaaactggacgaagtagtgatgcatgcaaaagtacttagaacagtgcttgatacagagtgagtacataatcgatgatcatcttcttcttctttttcatctcctacccctcctcctccacaagtgcagctgaacaaattcaaaatgatagttcatcaaataattgcaacaatrtgctagacactcatataaagatccattgtaatgtagtcattttgcaatggaagtttggccgtgtgacaagaatgtgcccctgatatgtctccttgcaggttactgtgaactgaattgtgtcctcccctgacaaactcatacgttgaagccctaatcctcagtgtgattgtatctgaagatagggtccttggcagataactaaggctacaggagtcataagggtggcaccctaattctataggactgtagcctcataaaaagacggagagagagagagagctctctctatggcaagcaccgaggaaaggccacatgagcgtgcagtgagaaggcagctatctgcaaggcacagagtgcactcactagaagccaaccacgctggcaccctgatcttcctcttccctcttcagagctgtg

SEQ ID NO: 786538 - DNA, 588 bp, Homo sapiens
gggagctccattaaatttttacaagtataacttgacataataaaatctaaatttaattaatatatttacccttcacctcaaaaatacaagggctttagaaactttcaatactaattaccccatattccttattaatgtttattgtttaaattctgccttttaaataccctccatctccaaattagccattgttccccattattgtwgtgtataagagtgcttattcagatacagccagatgtttatacatttcttggtccaccatttcttcttgcatgtgactccttctttctgggttcagtgtccttaccattgaagtacatctttactgaagatgctgttggtgtcctgtccagaatctcttcaatgagctggcgtactcatcccttagctgctgagagtgttggctgctaatagttcacactctttccctgaggattccattcaagccaacaatttcagaaaatgcctggaaggtaacagccttcccccgtgggtagctcatagccaatgactgattgatatgggtgtacagaactgaggctccagaactccctgtgggatcagactgaggctagacttcagcta

SEQ ID NO: 786539 - DNA, 588 bp, Homo sapiens
gggagctccattaaatttttacaagtataacttgacataataaaatctaaatttaattaatatatttacccttcacctcaaaaatacaagggctttagaaactttcaatactaattaccccatattccttattaatgtttattgtttaaattctgccttttaaataccctccatctccaaattagccattgttccccattattgtagtgtataagagtgcttattcagatayagccagatgtttatacatttcttggtccaccatttcttcttgcatgtgactccttctttctgggttcagtgtccttaccattgaagtacatctttactgaagatgctgttggtgtcctgtccagaatctcttcaatgagctggcgtactcatcccttagctgctgagagtgttggctgctaatagttcacactctttccctgaggattccattcaagccaacaatttcagaaaatgcctggaaggtaacagccttcccccgtgggtagctcatagccaatgactgattgatatgggtgtacagaactgaggctccagaactccctgtgggatcagactgaggctagacttcagcta

SEQ ID NO: 786540 - DNA, 584 bp, Homo sapiens
ctacatctgggagctccattaaatttttacaagtataacttgacataataaaatctaaatttaattaatatatttacccttcacctcaaaaatacaagggctttagaaactttcaatactaattaccccatattccttattaatgtttattgtttaaattctgccttttaaataccctccatctccaaattagccattgttccccattattgtagtgtataagagtgcttattcagatacagccagatgtttatacatttcttggtccaccatttcttcttgcatgtgactccttctttctgggttcagtgtycttaccattgaagtacatctttactgaagatgctgttggtgtcctgtccagaatctcttcaatgagctggcgtactcatcccttagctgctgagagtgttggctgctaatagttcacactctttccctgaggattccattcaagccaacaatttcagaaaatgcctggaaggtaacagccttcccccgtgggtagctcatagccaatgactgattgatatgggtgtacagaactgaggctccagaactccctgtgggatcagactgaggct

SEQ ID NO: 786541 - DNA, 623 bp, Homo sapiens
agtgttatatgttctgtgattataagtaaaactgcctttgctatatagtatgcatagaatattttaaagttattactagaagctgacacattgttgttttctattacaaacaataaaattagtttccatttattgagggcctgtttcatgttaactgctttacaaatattccttatctcatttaattctcccaacaatcctacaagaaagctaatattatcccattttatagatgaggaaattgaggcttacagagggcaagtaacttgcccaaagtcactcagtaccagcaaacggacttttccccctctccctgcccccaaataccagccccccactgcaaaaaaacamaaacaaaaacaaaacaaaactacttctgtagagctagttgtctatttccaaatgcaaggcttaaattttaagccttggagttttcaatttaaagcctttgccatgaaatacagcatattactttataatagaaaacaaatagaaagagcctttcatgatagatacagtgaacactaaattctttcttttaggctgcatctaacaattctctccttaacccaatagatactatttcaacaaattagcccagttttgatttggatggcaagact

SEQ ID NO: 786542 - DNA, 529 bp, Homo sapiens
tgaccaagactgggtgaggaactggagacatagctattaaaaaaatagtatttatatttataaatgatgaaacaaaaagaaaaaatagaaggtgaatcggtaggtaaaaagagacaatagactaccagccaatctcaatgtgtgaaccttgtttgtatcctgattcaagaaaagacattaaaaagattatctgaaagagataattaaaaatctgaattctgcctggatagttgatgatattaaagaggtattattcattcttaggtgtaataatgacattgtggttatgttacaaaaaggagtcatttcagaaacagactgaaatatttacaaataaaatcatrtgttgtctgggacttacttcaaaataatgtgtgagtgtagggaatgggcagggttgcagtagggacaggattggccatgggttgatggttactgaggctgagcgatggcatgtgaggttttattattttattgtttactctcatctattttcaaaaagttaaaaaatcagccctccctttgctga

SEQ ID NO: 786543 - DNA, 567 bp, Homo sapiens
taaagtgtgggacctgctacgttgaagccaatcttctctgagcaagactcaatttatctttttcttaattacaacacatgaattttaggtcaccaagtaacaccaccagtcaaagggtttcattttatctttattgcctatttattacaattcagaagaaaaatgrccaactggaaaaaaaaatatgtaacacgtattacagactgtcaaatttatttcttcttcttattctttagacaagttctcactctgtgaccaggctggagtgcagtggtgtgatcttggcttactgtagccttgaactcccaggcttaagtgattctcccacctcagcctcctgagtagctgggactatggcatgcactacacacctgggtaatttttatattttttttgtagagacaagggttttgccatgggtccaggctggatttttttctttatatatatgaagacttggcaaaggatatggacagacaggtaatccagctggatcttgagcatataacaagatgctccaccacactggtaattagaaaactatactttaaaactacaagatactat

SEQ ID NO: 786544 - DNA, 567 bp, Homo sapiens
caattatcacagtggtcctgaggtgacttacatcctcagcttatgaagataacaggattaagagattaaagtaaagacacacataagaaattataaaagtattatttgggagctgacaaatgtccatattaaaatgaaatcttcacaatttatgttcctctaccatggctccagccggtccctccrttcggggtccctgacttcctgcaacaataggttacctgatgcttttgctgcataactcttaagattctttccttcatcttgactagataatctgatgaatatgtgccaaggtaatgatctttttgtgacaaatttcccaggtgctctttgagcttcttgtgtttggatgtctaggtctctagcaaggccagggaagttttccttgattattccctcaaatatgttttttaaacttttatagttcttttcttcctcaggaacaccaattagtcttatattttgtcacttaacaaagcaagcaggagtagctattcttatatcagacaaaacaaactttaaagcagcagcagttaagaaagacaaaaagagacattatataat

SEQ ID NO: 786545 - DNA, 609 bp, Homo sapiens
aatctctttgtaggagatttgtatgggaattggtgattttggaggcctagaagttccacaatctcccatacacaagctggagcaccaggaaagctggcggtgtcatttagtcccaggtccaaggcctgagaatcaggcactcccatgttcaagggcaggagaaaagggttgtcccagtggagggacagaggaagaaaatttgcccttttctcacttctttgttctataaggtcctcagcagacaggaatatgttcatccacattggtgaaagtagatcttcactcagtccaccacttcaaaygctaatctcttctagaagaactcacagacacacccagaaaagatgtgttaccagccatcagggcatcctttaggccagtcaagttgacacataaaattagccatcattgtgtacttttcctgccctggtctttgatttagcctagtggtgatatggaatttagaaccccagatccagtctctagctgtgctcattgctcctggagcaccatgcttctggccgtttcagaacagaggtaggaaatatatgagtttttcatttgtttgctttttaaatctatttatcctgttccctcaaattctaatca

SEQ ID NO: 786546 - DNA, 624 bp, Homo sapiens
ctgcaagcaggtgagatcctcagagtggcttcctcccagtgctcagcaggattcctggacaaagggagttgtcaacctttgggtggtggccccacgaccctacttgagagccccttggctctggcctagaggcagggacctccatccagcctctgcttcccacctgggccttcaccttgattgtgcttgagacaggtggggtgggggcccagtgagaaggaggcagagaggggctccagagccaggctcctgtggggagggagcccatccttctgaagatrtcatcagggtctgaaggcacattgggaggtgtgctcagtcactgaaattaaatgagggacaactacacacacaaggagccttcacccctgttagtcagggacactgctcggcccatgccccacctccacatctcctccctatcctgctgtggcagagcctgccctctagccctctgcagccccgacccaagtccagctcccggctcccagtcctgcagctgcagaggcatcctggggaggggcagctcctggcccaccccaaagcagagtttggtagctatgttgcatctggcatctgcattggactaagagatccatcaagttcaactaggggaacagctcc

SEQ ID NO: 786547 - DNA, 526 bp, Homo sapiens
cctgacctcatgatccgcctgcctcggcctcccaaagtgctgggattacaggcatgagccaccgcgcccagcctgcatatgtatgtttaaatgttccagtaccatttgttaaaaagactatcctttctctactgaattgtctttgcacctgtgtcaaaaatcaaatgaccacatttgtgcgggtttattcctgtgctttctatttattccrttgatctatgtgctacagtttggatgtgttctccaaagctcatgtgttggaaacttcatctccaatgcaacagtattgagagatgggacctattatagataattagaggcagggccctcatgactggattaagaccattaacttggtagtaggttcctttcaaaaagatgagttcagcctcctttcctgtctcaccatgtgcttattctgcaatgttatgttgcagcaagaaggccctcacaagatgcagccccttgatcttggacttcccagtatccagaaccatgagccacataaatttctgttcattataaa

SEQ ID NO: 786548 - DNA, 568 bp, Homo sapiens
aaggctgtgtcagcattccaaatggggtggctgatgacttggcagttaaatactcaaaacaacttccctgaaaatggaatattaagagcatgctttttctttctcaggtgccatttcttatcacctggttggctagaagccagatgcttttaaacactaacactgtttaaatttcttggggtcaactctttgtaaacagwgctggtgtttgtacaaagtaacattggcccttgactataaaagcttaaagattcttggctttccaagcagccaagttacttttagcccaaggagataggtaaaatatactaatttcccagaggggaaaaagatcatttccccttctttcagcatctttcagtggtaacttcaaataggtgaatagaaagattaggtgtcttattcctgccataaaaagacgactaaagcccagattttctgatccctttctgctaattaaagtacagaagactagattccatggattttattttactaacccttccaaagtgtatagactgatatggtattttcagactgcttatctttgaataaaatttatacccag

SEQ ID NO: 786549 - DNA, 627 bp, Homo sapiens
agccatatggacatccagaagaacacattctgggcagtgggaatagctagcgcaaagatctgaggtagagtacaactagcatgctggagaaacagcagggaggcctgtatggctgaagtggagtgaacaattgggaaagtggttggagatgaggtcactgaggatccaggagtgcagataaaggagggccttagaggtcattgtcaatcctttggcttgtattctgaatgaaatgagcatttgaagagttttgggagaagagtgatgtgacttatcttacacaaagatcagtctcactgctgtactgggacagggtgaaaacacctaattagtatgttattgtgataacgtaggtgagacatgatggtggcttgaaccagagttgtagcactagaagaagagaaaggtggtcagagtctgcatatatttgaaattagagccaatagggtaccctgatagattggatatggtatctgtaagaaagakaggagtaaaaaatgactgcatcttttctggtttgactaagtttgagttgccatcagctgaagtgtggaaggtttcaaggtagagaaactttggaaaggggtggggggtggattgtcaggggataaggataacgttttagag

SEQ ID NO: 786550 - DNA, 591 bp, Homo sapiens
ggtgaagttgggagagaggtagcagggaaaggtggaatctcagctgaagatggatagcttgggtaggatggggtgaagatgggatagtgagggcaaacaggtggggaggaaatgaaggctgagggttaattcgggaatgtccattggaagtagcattgttcctttcatacatggagtgttaaaaagacagttctttttttagctatgtatgtagccacaaatgtaacagacagcctattttatgttctttttttaaaaatatatcattatgttacaaacgtatttacatgtttctacatagtctttggagttataatttttttttwaaaattataaagcatttaactacttcaagacacagagaaatataaagaagaagggaaataatcttgttaccctaacacaagtactgttattttggttaattcctttccagttttcctaaggcatacaggacttcatttcttgatttattgagaaatataaactgtagtgtagttacaatacaattttttgtcctgctttttttcccacctaacatttcaggataagcattttttcactgattttcatttatctgctttgagaggc

SEQ ID NO: 786551 - DNA, 632 bp, Homo sapiens
ctactacctactacgagattttctggatcacaacctgctcaccctctgggctcttcccccatcacctggggctcaaaatcccttgatctcctgcttagccctatgttccaattggtgtccaggtattagccatgccctgtacagctaggcattcattgtgtacatgttgctgataattgataatatggctttctacttattctccattgcaaaatctagtcataaacaagattgctagactgtaratgagctccatggggataaggggcttgctactgtcagtgtctgaaagagtcagccctcattttaaaaattaaatgaaaaaggaataaataaaatagtgcctcagatgagagattcttaatctaacaatatgtgcataaattgatgtgcacttttctgaggtgcttcataaggttcttcagattttcagtggtactcatggacctcaaaacattaataaccatggcttaaaatgtatacgtaagaaaggaacatgtgatttgctcttttaaaaacattcattatttgggggggatatttgggtgttatatagcagtgtattgagaaatattgacaccaaaaattaattaggtggtcttcaatcatgagtgataaggtttctgttttga

SEQ ID NO: 786552 - DNA, 612 bp, Homo sapiens
gatacaagatatggcaaaaagatggtaaccataaaacggaaaagcatgtcaaaaatgtggtgctttccctgtatgaaaggggagccatggaagatatttgaatgtatgtgtattggggaaggggaggtgagcagtattctgaaaaatgtcttattttggcatttcttgaagaattggtaatttattcacagaaaagagtgcttatgaggaaggacgctctagaacctggcacaaaagcccctttctagggaagattggctttggagaagtggggggtatcttgggtgacagtgatsgttcaagaaatgatggtatgatatgtgacggtcatcaggatgtgacatcagtcacctcattgatagcaaggttctattcagccgggttggctaggttaagtccccttcctctcctatacgcacgtgtggtccctatcccagaagctgtgagattggtcaaagcaagtggtctttccaattggaggaggtctacccttggtcaaaggcatgcgagtctgtatgctcccctattggagcactaggagaactacagtatttgagccaaacaaactttcaagaaatttgaaagtggctcagtaagttgtgggacatacag

SEQ ID NO: 786553 - DNA, 589 bp, Homo sapiens
tgtaaattactttgggcagtatagccattttcacgatattgattcttcctatccacaagcatgaaatgtttctccatttctttgtgtcctctctgatttctttgagcagtggtttgtagttctcctcaaagaagtccttcacttccctttttagttgtatccctagatattttattctctttgtagcacttgtgaatgggagttcattaatgatttggctctgcttgcttgttgttggtgtacaggaatgctagtgatttttgcacaatgattttgtatcctgagactttgctgaggttgcttatcagcttaagaagcttttgggactgggtggctcacgtctgtwatcctagcactttgggaggctgaagtgggcggatcacctgaggtcaggagttcgaaaccagcctggccaatgtggtgaaacctgtcactactaacaatacaaaaattagccaagcacggtgtcaagcgcctgtgatcccagctactcaggaggctgaggcaggagaattgcttaaacccaggaggcagaggttgcaatgagccatgatcgtgccttcgtaccccagtctgggtgaaaagagtg

SEQ ID NO: 786554 - DNA, 625 bp, Homo sapiens
agcccctatgggaaggtcccacccagtgaggaggaatggatcgggatcctgcttaaagaagcatcctgaccatgatctggcaaggcagctgtgctgcattgagggggagccttcctcgttttgaccatttgtattctccaaagctggtgggctgaagcagctgagtctactgaaccacagagatggtggccacccctccccccaggagctccgccggtctcaggcagattccagcctgttgccattggctggcgggaattccaagccagtgggtcttaacttgtgaggtgcttggaarcggggcctgcagaacgatgctgtgtggctccctggattcagcccccttcctagggatatgtacagacggatctgccacctcgctgggaatcccggggccagaacaggtaaaactcctaggtctctgtgtatgcttgagtgtctgctctgccgagactccacacagctctgtgtatcggacccaaagccctggtggcgtgggctcacgagggatctcctgatccatgggttgcacagatctgtgggagaagcgtggtttcccggctggggctgcacaatcactgcttcctttggctgggggtgggggtttctttggctctgagcagct

SEQ ID NO: 786555 - DNA, 627 bp, Homo sapiens
tcttgttggcacccctcgctggatcctctgagggacctgggacaagcaggagagaggcgtgaacagcggtggctgccgcggcttccggagtgcaaaaaccggccttttcgagtctagtcgtctccagtctgtcccagagacctccttccaaaagcccgccccggcctcgcctccccaacccctccggtcacttttactccggagggggacgcgcatccgacacccagaccgcaaagtcttccttcttccctggcccacactaaataaacccgaccggcctcccgccctccgcctttcccgaggagactcgtctcccgcgtctaacttaccgcttaatccccaattccttccctaccaaacttctccctctcccgttccttcctgcaccgcctcggcggaaggtcggcctccgggtgtctccgcccccgcccagacctctccaccmggtcccggttaggatgcgagggaagtttcaggttacaggactttttgatctctttttgtaccttctcgcattagcaggaagtggagctacaactgtcgccccccagcccgcgccccgccagcccctcggatctcaaaggggttcaagtcatctccaaagaggaggggagagtctgggaacaa

SEQ ID NO: 786556 - DNA, 499 bp, Homo sapiens
gacaaatatcttaaaatcaattattaacattttgtttcataactttttttaaagtatgaaagtagcctaggtgggaagttgagctaaaaggggcacacaatctactgtttgttgaaaagatactttgcatgaaatgtcatgtaaggctcttttccgtatgtgatctcatctcatcacccattcaatagttgatattgtcttcattttgaagatgagaaaattgaggtttgagtaactygcctaaatttatatggctagtaaatggcagatctaaatccaaattcaaagtccatgttgttctttttctttaaaatcataatgcattccagaatttaataacaatattatatatgtatcataaatagaataaacatgctctcaggagttatactcccgaaatcccttcaagaattaacatttaaaattcctgaatcagtagtttcttatccaaaaatgttggagtgtttttatcagttaagagtaactagtctgttctata

SEQ ID NO: 786557 - DNA, 547 bp, Homo sapiens
cattcctttgttactaaatatgttttctttaaatagctaccaaatatgtttgtatatgcaaacactatattgtttatttctgcatggtttagtactgtatttaaacaaaattatcaagtatagcaaaatcttcttgaatttggcttcattgctcctattataagattcattcatgttgtatgtggttataattcattcattttactgctatttactgtttcattgtaggaatatcccacattttatttattcagtctactattgggttgtttccaggttttgctgttaacagacagtgcttctaaagacattcttacacatattttttggtatccatatgcatgtgatttgaggaatatatagacaaaagtagaattkccaaatcataagattgatgcatcctctgctcaaatggaaaacatcaaatgtttttgaaatgatggttcaaatttacatttccaccaagaacacatagtgggcagctggttctgtataccaggcaaaatatgatgttctcagattttagtacttttgccagtctggcaaa

SEQ ID NO: 786558 - DNA, 547 bp, Homo sapiens
cattcctttgttactaaatatgttttctttaaatagctaccaaatatgtttgtatatgcaaacactatattgtttatttctgcatggtttagtactgtatttaaacaaaattatcaagtatagcaaaatcttcttgaatttggcttcattgctcctattataagattcattcatgttgtatgtggttataattcattcattttactgctatttactgtttcattgtaggaatatcccacattttatttattcagtctactattgggttgtttccaggttttgctgttaacagacagtgcttctaaagacattcttacacatattttttggtatccatatgcatgtgatttgaggaatatatagacaaaagtagaatttcyaaatcataagattgatgcatcctctgctcaaatggaaaacatcaaatgtttttgaaatgatggttcaaatttacatttccaccaagaacacatagtgggcagctggttctgtataccaggcaaaatatgatgttctcagattttagtacttttgccagtctggcaaa

SEQ ID NO: 786559 - DNA, 574 bp, Homo sapiens
ttaccactttctttgtcctttaatcctttttgtattttccatgtggaattggttttattttccttgagtatatcttttgaattttttaagagagtgtcttttggttgtgaaatttctcaccttttcctcacctgacaataacattattttttattcttcaaaattatttttgctaagtatataatcctacactgacaggcattttctctcatcacattgaaaatactccactgtttcctggcttccattattgttgctragaaatcaattgtcaatcaaaatatagttcctttttctctggtaatttctttcccaatacataatagaagtatataattttagggtacatgtgatattttgatacatgtataaaatgtgtaatcaccaaggcaactgggacatccataacccccaaaattgaccctttctttgtgttgggaacattccaattcctctctatcagtagttttcaactatatgacaaattattgttaactgtaatcatcctactgtacttttgaacactagatcttacttcttctatctttaactgtatttttatatccatttagca

SEQ ID NO: 786560 - DNA, 574 bp, Homo sapiens
ttaccactttctttgtcctttaatcctttttgtattttccatgtggaattggttttattttccttgagtatatcttttgaattttttaagagagtgtcttttggttgtgaaatttctcaccttttcctcacctgacaataacattattttttattcttcaaaattatttttgctaagtatataatcctacactgacaggcattttctctcatcacattgaaaatactccactgtttcctggcttccattattgttgctaagaaatcaattgtcaatcaaaatatagttcctttttctctggtaatttytttcccaatacataatagaagtatataattttagggtacatgtgatattttgatacatgtataaaatgtgtaatcaccaaggcaactgggacatccataacccccaaaattgaccctttctttgtgttgggaacattccaattcctctctatcagtagttttcaactatatgacaaattattgttaactgtaatcatcctactgtacttttgaacactagatcttacttcttctatctttaactgtatttttatatccatttagca

SEQ ID NO: 786561 - DNA, 460 bp, Homo sapiens
tctctatcagtagttttcaactatatgacaaattattgttaactgtaatcatcctactgtacttttgaacactagatcttacttcttctatctttaactgtatttttatatccatttagcagttttccttcttcccccaacctccctcctgtctttctcagcctctggtaaccacgaatcaactttacctccacaagatccacttttttagcttccacataagtgagaacatgcagtrtatgtctttctgtgcctgcttatttcatgtaatataatgacctctactatttatgttgctgcaatgacaggatttcattgtaattatttttgaggctgaataatattcccttatttgtatgtaccacattttctttgtcattaaatttttaaatgatattgatacaagagatagaaaaattatttaggcagatagtgagggtaaaatagtcctcagcagagc

SEQ ID NO: 786562 - DNA, 564 bp, Homo sapiens
catgttgacttctcttccgaatttctttggaagatgttactggttgatttccatttgccattattctgaaagactttccacttcttgttttgctttcagacatatcaagttccgatgttttattgactaactgctcaacctgagaatgagaaatggaaagatctgaactttttttatacctcacaatttcatcatcctcmcaaactaaacttggttctccaagttcagaaaatcgagggtttttttttttcctgctcttccattttagtttcaatgtccaaatcatcacttgtataatgcgcctggtcatcttctgcatctttgtccctcaggattttgtgaagttttgtttttatttgttttagtgatagtatagttgaataaatattttccattcgttctctctcagtggtcacttttactttgaaggtgggaaaaggtgttgagacttcgcccacatttaaatacataagttccccttcaaatataactccttcacaatcaccatccttaaaaccaggaggctggtaatctgggggtgtaacttcatcatagtaaaaacgt

SEQ ID NO: 786563 - DNA, 564 bp, Homo sapiens
catgttgacttctcttccgaatttctttggaagatgttactggttgatttccatttgccattattctgaaagactttccacttcttgttttgctttcagacatatcaagttccgatgttttattgactaactgctcaacctgagaatgagaaatggaaagatctgaactttttttatacctcacaatttcatcatcctcacaaactaaacttggttctccragttcagaaaatcgagggtttttttttttcctgctcttccattttagtttcaatgtccaaatcatcacttgtataatgcgcctggtcatcttctgcatctttgtccctcaggattttgtgaagttttgtttttatttgttttagtgatagtatagttgaataaatattttccattcgttctctctcagtggtcacttttactttgaaggtgggaaaaggtgttgagacttcgcccacatttaaatacataagttccccttcaaatataactccttcacaatcaccatccttaaaaccaggaggctggtaatctgggggtgtaacttcatcatagtaaaaacgt

SEQ ID NO: 786564 - DNA, 564 bp, Homo sapiens
catgttgacttctcttccgaatttctttggaagatgttactggttgatttccatttgccattattctgaaagactttccacttcttgttttgctttcagacatatcaagttccgatgttttattgactaactgctcaacctgagaatgagaaatggaaagatctgaactttttttatacctcacaatttcatcatcctcacaaactaaacttggttctccaagttcagaaaatcgagggkttttttttttcctgctcttccattttagtttcaatgtccaaatcatcacttgtataatgcgcctggtcatcttctgcatctttgtccctcaggattttgtgaagttttgtttttatttgttttagtgatagtatagttgaataaatattttccattcgttctctctcagtggtcacttttactttgaaggtgggaaaaggtgttgagacttcgcccacatttaaatacataagttccccttcaaatataactccttcacaatcaccatccttaaaaccaggaggctggtaatctgggggtgtaacttcatcatagtaaaaacgt

SEQ ID NO: 786565 - DNA, 564 bp, Homo sapiens
catgttgacttctcttccgaatttctttggaagatgttactggttgatttccatttgccattattctgaaagactttccacttcttgttttgctttcagacatatcaagttccgatgttttattgactaactgctcaacctgagaatgagaaatggaaagatctgaactttttttatacctcacaatttcatcatcctcacaaactaaacttggttctccaagttcagaaaatcgagggtttttttttttcctgctcttccattttagtttcaatgtccaaatcatcacttgtataatgcgcctggtcatcttctgcatctttgtccctcaggattttgtgaagttktgtttttatttgttttagtgatagtatagttgaataaatattttccattcgttctctctcagtggtcacttttactttgaaggtgggaaaaggtgttgagacttcgcccacatttaaatacataagttccccttcaaatataactccttcacaatcaccatccttaaaaccaggaggctggtaatctgggggtgtaacttcatcatagtaaaaacgt

SEQ ID NO: 786566 - DNA, 470 bp, Homo sapiens
catgtatgtgtttgggttgtttcagtttttgttgcatcggaatccatgagagtccttcaaaaaaatcatctacatagcctgtgaaccctatcagcaataccatataatgatttctgcttgtcctggaaaggagattaaataaaattcagattcttgtaacccttccccaaagatagagactacgtmatgtcatcaaattccctgttaaatctttttatttgtttgaggcttgtgtagttgattgcttgcttatttgttgcttgcaacaaatcatactctgacattgcccaaaagtaattgccccagaaataaaaggtgtaatttttaaatctgtgtattaatttttatataaatgctaactttgtggtcacaattccaacagactgatgacattgaatatgattctgtccttacacctcgaaatcacaatctgtggaacttgaactctttcaaggggacaagcataagga

SEQ ID NO: 786567 - DNA, 438 bp, Homo sapiens
ctggccactaaatagtgggattagatagaagccctccaagggcttccagcttgacatgattcttgattctgatctggcccgattcctggataatcgtgggcaggcccattcctcttcttgtgcctcattttcttcttttgtaaaacaatggctgtaccatttgcatcttagggtcattgcagatgwaagtgttgctgtccagagcctgggtgcaggacctagatgtaggattctggttctgctacttcctcagtgacattgaatagctgacctaatctctctggctttggtttcttcatctgtaaaagaaggatattagcattagcacctcacgggattgttacaagaaagcaatgaattaacacatgtgagcacggagaacagtgcttggcatatggtaagcactacgtacattttgctattcttctgattctttca

SEQ ID NO: 786568 - DNA, 658 bp, Homo sapiens
aggaaactcctttagcctacagcaaaccacatctggaatttggtatctttccgccgtctctgtggctcccaacatgtgactaccacactagcttccaaatggtctcccagcatcaatttttgcccatccccactacacacaccaccaccaccaagagtatattcttaacagaggcaacagaatgatccttttaaatcctaagcaagactatgtcactcctctgttcaaaacccgacagtgactccccattttattcaggaaaaaaaaccccaatttgtctaactctcttgcctgcctcaaggtttgctcaaactttggaccaatcctcgattcctgcaagtcaatctatttatttttttccatagcacttactgccttctgcataccgctagtacrtgtatgtaggcttaagtggtactttttgttgtgttgattctatcacctgtcttccctgctagaacacacagtcaggggcagggatctttgcctgctctgttcatagatgcatctccagcacctagaacagcacctggtatacagtagagatttaataaatgtttgttgagtgaatgaatgagtggaaaggtaaatttgggagtcgttgggcctgttgatgatattcaaagctgtgagactgaatgacatgtatggggatgga

SEQ ID NO: 786569 - DNA, 622 bp, Homo sapiens
cattgagcacatatcaaagggtgaatttggaggtgagagggagtaaaatgataactgacacacagaaacattatcgcagattagttcttcaacaagtcagaattataaagagacccaattattttaataaaaaactaattcagagacaaaaacctgcaaaccagctaaaaccatgtccctttccatggctgacccttcaccctccatctactgataacctactagcagtatctgtttgccttctgaatataatctaagatggcatttgaaagagcctaaaaacctgtcggacttctctttcctgtgcccagattcaaaaacagggacagaaagtaagtttcctgggtgcaagagagtcagaaaaggtcaatagaacmaagtccctctttggaacattgatgggaatggccagtagaatcaccagtttgtttcttggaaccacatacttctaggtgatatggcccctgctgctttttctcttaatatttcacccttctttatccccaccgtaaaattggttgacctcatatcagactccagagaaaagaagaaagttatacactgagttaaaactctcagataaaattagtgacttgcaatttagaaagagtctagcactgtg

SEQ ID NO: 786570 - DNA, 661 bp, Homo sapiens
cacttctcaaaagaagacatacatgcagccaacaaacaagaaaaaaggctcaacatcactgatcatcagagaaatacaaatcaaaaccacagtgagacaccatctcctaccagtcagaatggtgattattaaaaagtcaagaaaaaacagatgccgatgaagttaaagagaaataagaatgattttacactgttggtgggaatataaattagttcaaccattatggaagacagtgtagtgattcctcaaagatttagaagcagaaataccatttgacccagcaattccattactgggtatataacccaaaggaatagaaatcattctattataaagatacatgcacatgtatkttcattgcagcactattcgcaatagcaaagacatggaatcaacccaaatactggataaggaaaatgtgatacatatacactatggaatactatgcagccattaaagggatgagagcatgtgctttgcagggacatggatgaagctggaagccattatcctcagcaaactaatgcaggaacagaaaacaaaacactgcatgttctcacttataagtgggagctgaacaatgagaacacatggacacaggaggggaacaacacacactggcgcctgtcaggggagggtggggagagcatcaggaaaaact

SEQ ID NO: 786571 - DNA, 623 bp, Homo sapiens
agatgatgtcactttgtaatggaatttagtgagcacaatagctcttgttatagaacaaattattgtcactggccctctttaaaaatagctttctatttatataaacaacatccctagttaaggataagacaaccaggaaaccaaagacaactcaatataaacatggacagctcatacatttgtctacatgtttctcattctgagagattaaaaatctgacacaattcccactccctgagcaatagatcagtactgtgacttgcttcattacacatgttatagttggtccaggtgtggccatgtttttattcacttatttcttttacttgagttcttcacgcattaattcattatccgtgaattacaagagcacaagaatagggtaactgattttttgggggttttttttgttttttttttttcgagacagggtctcactcygttgcccaggctggaattcagtggcgcgatctcgactcactgcaacctcaacttcctgggtttaagcaattctcctgcctcagcctcccaagtagctgggattacaggcactcgccaccacacccggctaatttgtatatttttagtagagacggggtttcactgtgttggtcaggctggtc

SEQ ID NO: 786572 - DNA, 612 bp, Homo sapiens
tcaattcactgataataagtttaaaatctttggtttttaaaaatccaagagctttgatattcctaatccctacatacaatcattataatgttgatatatattttcattcattgttctccatttttcatatatgtgttttcaatatagtacttcctatcactcctctaactgggaaagagttggccgtctttgattacattcctrtaatatattggaatatattatatatagattatattcctataatatatattttatatataagatattccagtaatatattcctataatgtattacctcttttataatgtattatatcttcctataatgtattttatactacattatattatagaaatatatataatatattcctacaatatattacatttttataatgtattatacgtttttataatacactgaatcctcttaaacaaaccactcaaaccaagacaagagctttgaccattacttactttggtctgtacgctccttcctaagcatggtgcaaacagagcacgtgaccttggaggcatctataaatcatcacaagtacgtccattctgatgagtgcagagcagagaaaataataacaaaaatgtgatttt

SEQ ID NO: 786573 - DNA, 522 bp, Homo sapiens
aatcccaaattacgatgtttacattaggccttttgtgattatatttcacactttttaataatatactgaacatccttaaacaaaccacccaagccatgacaaaaattttgactcttactcacattggtcttaacagagattcaatcatacagtcataaccatgggagaattcttaaatcagctcagatgggtccagtgtgagaaatacagaacagaatagatgattttaaaatgaagaagaacagacatctgagacgttctctccattaatccttgcttttcamctttagtcagtcatttcagtaatcacacatttagattacttttttctcttaagagaatgaacaaattcaaaatcgccatctatccagaacatgaacagtgtctgtaagttataccatctacaccatcctgagctaaggaggtaagagtcatgtaaaatgtatttcaaattagagtttagtgttttcataatatattagtagtgtttctttgctcactacatatttttaatttgaacaa

SEQ ID NO: 786574 - DNA, 587 bp, Homo sapiens
tacagtggggtaccatttatttcccttaggacttcaatgctttaatataatattttaatatgttatcatatttaatatatattaaatattgcattaattatatattaatattagatttttatttaatatattaaagctttaatataatgctttaatataataataataatacatcttgcctcaccacttattttataattggacaatacttcatccccttcatatacgtacatgtatacgtataaattatttcattgatccaattataataatacartgaagtgaacaaacccaaagaccaaaagcaaacacattgtatattcataggatcacctgaatcagaaggaatgggccagatttcttttgtgatggacctcagagtttcagacatgtattcatcatgtgtaactcatacactaacagtagtcatcattgatcttctttttttttgctattcatttctaccttgtctattgattatgtcatttattcattaataatactttcaaggcccgtgattcacaaaacccagtaacactcttgatattccctatcagtatacagaatcactcaaacattgggtgttt

SEQ ID NO: 786575 - DNA, 617 bp, Homo sapiens
tggatgttccatatctgtatctagaatcattctaacattgatatatctgttttattaattgtcttcagtttttcatctatgcattatcagtataatactttatataactctcatatctatcattgggataataacattggccgtctctgtattataaactttttttttttttttttgagatggagtctcactctgtcgcccaggctggagtgcaatgatgcaatctcrgctcactgcaacctccgcctcccgggttcaagtgattctcctccctcagcctcctgcgtagctggaattacaggcacccaccaccatacccagctgatttttgtatctttagtagaggcggggtttcaccacgttggccaggctgatctcaaactcctgaccacaggtgattcacccccctcagcctcccaaagtgcttggattacaggcatgagccaccgcacccagcctattacaaacttttttataatacatgacatactcttcaacaaaccaccaagacaagaactttgatcattaatcacatgggtctgcatgctccttcctaagcacggtgcagaggaccatggaagaattcttaaaacagtacaactacgtccattctgagg

SEQ ID NO: 786576 - DNA, 403 bp, Homo sapiens
attccacagaactagaggactggctctctctgtaatgagcctcagtattgcaaaggtgaattaattcattccacaaattgcaccacgtcaattccatatattccattagtccatggttgggcttttttcatttaacatccgtatttttaagacgttactatggttatatcatggtataaccaccaagttataccacagctataggcaaggttttccatkttcttatgttcttccctcaattagttaactgtcaataacaatcacaatggggaagtatttaaatccactatggtacaaaaacagcatattaaggcattctgaaaatgacagaaatacctttcaactttttgtcctaatgaatttcgttgtgctgaaatggattaatcataattcttaattcata

SEQ ID NO: 786577 - DNA, 560 bp, Homo sapiens
tagttggatccaaattttgtctctggcagttaaagttacctgctcagatggctaaagccttttattaatatttgtgaaaaggacttttaagatttttcatttaccatttatttctaaaaagtttctctttatgctttccttctgatgagtcatttccctgaagtctgcatttcaaagatttagacatctcaaaggcagaggaaaaggacgtgaagttttctctcataaggaattttggggcatattcctctcttatcaggagtcagtcttaataagactgtagactgaattataggtgagtaacggaggagatayccagtctatttccagtgagtctttatctgttttagccttaggtggttgcttttataatagctcagagttgtgtgcaagaccaagaattaaatttagttgttgcaggtacaactggttcatttaaggatctaattttttaaggaagttagtgttgaggagattcagatggaagaagcaagactaaagactattaaagaggttagtagattcagaataattttttattagtgtgctgtagagattcc

SEQ ID NO: 786578 - DNA, 627 bp, Homo sapiens
agactctagcgacaaaggagtcctgaagaccagacacacctgcccaaggcacactcaggtgcaatcactggacaatgtgctccgaggactggccattggagtccagcgacagtcccagagggcacaggcaggctcagggagctccaccagtaacttgccttagaacaacctgacatccatgtgcttccctcaaggctgacactctctcaaggatggagaccaccagggagtggcaggtcaggggagtagcaggtgagaagcagcatcagctytgcgctccaccatccaccacccattcgtgtgtccggagaggtgcgaggttagtgctggacgcaggaagccctctgggtatgacttggtatggagaagaggcagatccatgtgatttatccttaaaaaaagcaaaccaccattaaactcagtgcacacaaaaaggaccctcctctcccactgcctccagggagtccacaggaagaaccagcacagagagcgaaggcagaacccaagggctaggatcacagccaagctcacgttcccagacagggaagccaagccgtacctgagaggggctgacatccgaggctttgtcctggagacagcagggtctgagcgtcttcctcgacagag

SEQ ID NO: 786579 - DNA, 598 bp, Homo sapiens
tgatacagagttaatattggttttctaggaatgaggggataaatgaaggaatgcaagagtgatagcttttgaagtcatctagatcctctgcttcaactacttatttacaaatgtggaaactgaaaccaaaagaatgaccagcctaagcttcccaactgaggacattttttccccccaggagacatttggcaatgtctggagacatttttcttttttctttctttcttttttttttgacatggagtcaaaaactccatgacacagagtcagagactcgctctgtcacccaggctggagtgtagtggcatgatctcagctcactgcaacctccacctcctgggtttgagtgattctcccgcctyggcctttcaagtagctgggattacaggcacacgccatcatgcccggctaatttttgtattttttagtagagatggggtttcgccatgttggccaggctggtcttgaactcctgacctcaagtgatctgcccacctcagcctcccagagtgctaggattacaggcgtgagccaccacgcccatccttggagacatttttcattgtaaaaactgggtggcatccaaaggatagaggcc

SEQ ID NO: 786580 - DNA, 599 bp, Homo sapiens
gttactgaaagaacacaagacaccctggtgctttattcaataagtgccgccccttcctgcctctggggcaggctggtcactggctctgagcaccaggcattcaagacgccttgctgctggctctggccatttacttggtctctgtttgggcttatctggggccttgtggccaccaggccamccacacgctgagcagcccgccaccctgaaagctgggctctggtgtcccgtgtataccttctttgtcctgaactgcctgcaccaacctgtcaggagcgcagggtaatgtaccggttaggtgctgaatgcaggatggctatttcactgttgttacggagaggaaaacccaacagttctcacccccatcctccttgccaacgtctctggaggcacgaacatgttaactgtgttaggcaaagttggagatttctaagctccacaagccccagtccgcccagcctccaccttcctcccacacacctctctcccccgccgcagctccccggcgaagagcgactcccaaggtctccaggctttgcaaagtgatcatcgtgggctgcgttgccggaggttttcttcacactgaaattatccagagg

SEQ ID NO: 786581 - DNA, 599 bp, Homo sapiens
gttactgaaagaacacaagacaccctggtgctttattcaataagtgccgccccttcctgcctctggggcaggctggtcactggctctgagcaccaggcattcaagacgccttgctgctggctctggccatttacttggtctctgtttgggcttatctggggccttgtggccaccaggccaaccacacgctgagcagcccgccaccctgaaagctgggctctggtgtcccgtgtataccttctttgtcctgaactgcctgcaccaacctgtcaggagcgcagggtaatgtaccggttaggtgctgaatgcaggatggctatttcactgttgttacggaraggaaaacccaacagttctcacccccatcctccttgccaacgtctctggaggcacgaacatgttaactgtgttaggcaaagttggagatttctaagctccacaagccccagtccgcccagcctccaccttcctcccacacacctctctcccccgccgcagctccccggcgaagagcgactcccaaggtctccaggctttgcaaagtgatcatcgtgggctgcgttgccggaggttttcttcacactgaaattatccagagg

SEQ ID NO: 786582 - DNA, 667 bp, Homo sapiens
attgtgggagtgagttagctatcatgagagtgggtgtgttataaaagtgagtttggatccccttcctccctcactcttgcccttgctcttctgcgttccaccatgggatgacacagcacgaaggccatcaccagatgctggcgccatgctgttgggcttctcagcctttagaaccttgagccaaatacctttctgtttataataaattacccagtctgtgacagtctgttatagcaacacaaaatggactaaaacaggagattagatgatgagggcagagccctcatgactgtgattagtgcctttatttaaaaaaaaaaccccagagtgctctttatccctctcaccatgtgagaacacaacgagaaggtgctgtctacgaggaagcaggccctcaycagacactgaatctgctggtgctttaatcttggactttccaggctccagaactgtgagaaatcaattttggttgtttataagccattcaatttgtggtattttgttatagcaaacaggctaacacaccattactattggtcacaggagaactaagagaggtaccctggagaatcctctgcgtttcagatactttcctccctgtcctcattgtgcagcagcagcccagtttccccttgctaatcaggatcaatcactccagtgagtagag

SEQ ID NO: 786583 - DNA, 620 bp, Homo sapiens
gtgttataaaagtgagtttggatccccttcctccctcactcttgcccttgctcttctgcgttccaccatgggatgacacagcacgaaggccatcaccagatgctggcgccatgctgttgggcttctcagcctttagaaccttgagccaaatacctttctgtttataataaattacccagtctgtgacagtctgttatagcaacacaaaatggactaaaacaggagattagatgatgagggcagagccctcatgactgtgattagtgcctttatttaaaaaaaaaaccccagagtgctctttatccctctcaccatgtgagaacacaacgagaaggtgctgtctacgaggaagcaggccctcaccagacactgaatctgctggtgctttaatcttggactttccaggctccagaactgtgagaaatcaatttyggttgtttataagccattcaatttgtggtattttgttatagcaaacaggctaacacaccattactattggtcacaggagaactaagagaggtaccctggagaatcctctgcgtttcagatactttcctccctgtcctcattgtgcagcagcagcccagtttccccttgctaatcaggatcaatcactc

SEQ ID NO: 786584 - DNA, 519 bp, Homo sapiens
ggaggtcaaaggcaggagagggagcgatgcgggaatggatcccctccctctttgggcctgcctctgaccaatgccactgccctccaggccagcctcctctggactttcttctttgctggagagctcccctttctcttccttccagccctgatggtggaaagagtccccctaatgctggtcccagagtcctgccctcccctagtggtccccccttccttctgtaagcatccccctttgtaaatcgccttcctggaatttccctaatttgaggaagccatctgtttccctatgggaccctgactgatgtgacagcgttgtgagyaatggcgggaactggaagcagccaagaggcagagagctggggaaaagcagtgggttaggtagaagaatgtcagggaaaacccgaaataaaggcaggagtgagcgggcgcttagggtgggatgcttggtgaagaagaaaagacggaagactaaagtgtgtggcctgacacaacatccagagggaaagctcgctgtgtg

SEQ ID NO: 786585 - DNA, 378 bp, Homo sapiens
gtccgccggtccgccgttgcgctgttctgaggtctacgaagcgtttgcagccccgtcgccagggccggccagatctgggtgggcctgggcagcgctcgctgggcggtgccgatttctggcaaggggggcgcagtctggatgtaatgggcgmggcttagcagggcggaatgggcgtggcccgaagaagccccgccccgtcccgcttagacaatgccccggagccgccagaccgtcgcgcccctgccccatcgtagtatatgagctcgcctacacaaggacccccgctaaaagccagagctcccagtccccgaggcttgaagacggggactcccttctccaccaactctgtcctcggggggtggggccccagccgagatc

SEQ ID NO: 786586 - DNA, 633 bp, Homo sapiens
ggctgcgggtaaaggtcttcacgctgatttggtggctggttacacagatgtgtggtttacaaaaatccatcttgtgatatgtgcaagcttctgaatgttttaccaaaaaggtttgaaaataagtaaatcagccaggtgagcatggtggtgtgcawctgtagtcccagctacttggaggctgaggcagaagaatctcttgagcccaggagttcaaggccagcttgggcaacatagtaagaaccttagaaaaaaaagctgaacattgtgtatgcatttgactctagggcaaatatatttttttgagggggaaaaggccttaacttctacttgtgtatgcacatttacatgtgttttctcaatcatctgaggcactatccctacttgacaggtgaccaaggtggggctgaagagactgacatatccaagtggtagaggggctgggattggacctcccagccacaaagctgcactgcttttcagaaaaaggtttcataacccaagcactgggctgcaagacttggaagggcagacacctggctatactcatctgggagtcctgctgctcaataccaagcctgactcagagcagcgttatgtccagcatgtttatccagtgtatggaaaaggctgttg

SEQ ID NO: 786587 - DNA, 453 bp, Homo sapiens
ctcctgagtttaagagatctcccacctcagcctcccgagtagctgggactacaggtgcataccaccatgcctggctatttttttgtagagacagggtctcactatgttgcctaggctggtcttgaactctagagcttaagtgatccacctgcctcagcctcccaaagtgctagggttacaggcatgagccattgcactcagcccctcctctcttcttgtaccccatgcccggagcagccctgatytgtgagaggagagaagaccaagccattggctgccccaccagcagccccttcctgggaccttatttaccataatagatggtgatcaccatgcacagggatgagctgctgatggtacacttctctgagcctgaaatgcatcctacagaagggtcttctacgaggcagaagtggcacgtccggatgtcgggaacaggaactggggaggcag

SEQ ID NO: 786588 - DNA, 616 bp, Homo sapiens
cttcataaatatataaatgatatctgtgaaaaacatccagctaacattatatttagtattgatatactttttccttaatatcaacaacaaggcaagggtttcactcttatcacttctaataaatgctctactaaagcttctacaataagcaataaggcaaagaaaaagaaatgatataaagatttgaacaaaagaaataaattgtctattcatagatgacatgattacatgattgtagaaaatcctgtgaaaccagaaaaagatactatgactaatgaaagaatttagaaatattttaagaaaaaaggccaatacggagaaatcaattgatttttatatattagcaataaataattggaaaaataacattagtaagccrtttagtagcatgaaaaagcatactttatatacttaggaatagacttaacaaaagacattaagtaaaactttgttgagagaaaactttaaaaagacttaaataataaagaaaaatggcatgtccatgaattggaaaactcaatattttcattctttcaaaattaatcgatatattcaaggcaattgcaataaaaatcttaacacagacattgaaaagctgattctaaaacttacgtag

SEQ ID NO: 786589 - DNA, 595 bp, Homo sapiens
aatcgaccaatcagcaggatgtgggcggggccaaataagggaataaaagctgcccacctgagcttgcagggacaacttgctcctgtctgcttccacgttgtggtggctttgttgttttgctcttcacaataaatcttgctgctgttcactctttgggtccacactacctttatgagctgtaacattcactgcagaggtctgtggcttcactactgaagtcagcgagaccatgaacccacctggaggaataaacaactctggatgtaccacctttaagagctgtaacactcactgtgaaggtccgcagcttcactcctgaagtcagcgagatcaaaaacccaccagaaggtagaaactytggcaccatctttaagaactgtagcactcaccacaagggtccgtggcttaattcttcaagtcactgagaccaagaacccacaggaaggaataaatgcccaacacagtatgagagactgaaaagtagggggatgccaaattcatgacatgttttctctacaggatatttgttgagtgatagggtattataaggatcatgggggacgagagaagagagatagagtagaataaaatttcc

SEQ ID NO: 786590 - DNA, 595 bp, Homo sapiens
aatcgaccaatcagcaggatgtgggcggggccaaataagggaataaaagctgcccacctgagcttgcagggacaacttgctcctgtctgcttccacgttgtggtggctttgttgttttgctcttcacaataaatcttgctgctgttcactctttgggtccacactacctttatgagctgtaacattcactgcagaggtctgtggcttcactactgaagtcagcgagaccatgaacccacctggaggaataaacaactctggatgtaccacctttaagagctgtaacactcactgtgaaggtccgcagcttcactcctgaagtcagcgagatcaaaaacccaccagaaggtagaaactctggcaccatctttaagaactgtagcactcaccacaagggtccgtggcttaattyttcaagtcactgagaccaagaacccacaggaaggaataaatgcccaacacagtatgagagactgaaaagtagggggatgccaaattcatgacatgttttctctacaggatatttgttgagtgatagggtattataaggatcatgggggacgagagaagagagatagagtagaataaaatttcc

SEQ ID NO: 786591 - DNA, 535 bp, Homo sapiens
ctatggtcagtagatcattagtagactgagtcaccacatctagctcaatcagaaagacacacagtgcacttgtttggtgaggggtgtgacatagtttggatgtttgtcccctccaaatctcatgttgaaatatgatccccaatattggaggtggagtctgatgggaggtgtttaggtcatggggacagatccctcacgaatggcttggtgccatccccttggtgatgagtaaattctcgctctattggttcatacagagtaggttgtttaaaagagcttggcacctcctcctctctctcttgctccctctctcatcatgtgacatgtctgctccctcttcaccttttgccatgwgtaaaactttcctgaggcctcaccagaaactaaccagatgctggtgccgtgcttgtatagcctgcagaaccatgagccaaataaaccttttttctttataaattacccagtctcagacattcctttatagcaatgcaaagcagattaacaccgtgtgaactccagtcaatggtttgggaaa

SEQ ID NO: 786592 - DNA, 712 bp, Homo sapiens
tcttgttgatacacgctgcttggatcctgcaacttcttcagattacagtcccattcctaccttagccagcccagtgattccctggctattgttgtgacttaaccatagttattggtttggtggcaaggagataaggtggagatagatcctgaggttgggagaggtrtgtcacattttcattaaagacagagatctcagcatcttttttaaggaagagggggaagaatgctagactttaagggagaagattgggccacttctgcagtctcagaggattcaagggattctgggggttcaagatatttgagtacattgattagctagtcctacatcaagcctcagcgcctcactgtttccaatcagtgccttaattttgccatagcagacttgctagggctgaaaattcagccttctttgagcactgttacctttatagttgatcctaaacttagccaagggttatctgccctttggctgcaagagataaaagttaatttatagaattcccagaagaccctctgattttaacactttgtcttaaattggtgcttaatcaccctcaggttttctttgtttttcaatgatatggcatcagcaacagctgtttaaattctagtgtccttatgattacctcccctgaacctctctagtacttgagccattgcagctgctaatgcatttccttacacagctatacaatctgagtttagca

SEQ ID NO: 786593 - DNA, 661 bp, Homo sapiens
tgttgatacacgctgcttggatcctgcaacttcttcagattacagtcccattcctaccttagccagcccagtgattccctggctattgttgtgacttaaccatagttattggtttggtggcaaggagataaggtggagatagatcctgaggttgggagaggtgtgtcacattttcattaaagacagagatctcagcatcttttttaaggaagagggggaagaatgctagactttaagggagaagattgggccacttctgcagtctcagaggattcaagggattctgggggttcaagatatttgagtacattgattagctagtcctacatcaagcctcagcgcctcactgtttccaatmagtgccttaattttgccatagcagacttgctagggctgaaaattcagccttctttgagcactgttacctttatagttgatcctaaacttagccaagggttatctgccctttggctgcaagagataaaagttaatttatagaattcccagaagaccctctgattttaacactttgtcttaaattggtgcttaatcaccctcaggttttctttgtttttcaatgatatggcatcagcaacagctgtttaaattctagtgtccttatgattacctcccctgaacctctctagtacttgagccattg

SEQ ID NO: 786594 - DNA, 630 bp, Homo sapiens
taactgaatatctggcaattaattgctcttatttgtgataataagttcagcaagccaacaggttcgtcagagtgcccataaactaatcatatttcaatttaaatctttcataaacccctacataaaaacctactgcttttttatataaatacaagaataaataataaagaactggaaatgcattgatactggtattatactatgttaaatattaataaaaactaatatctcagtaacttttgtgtttaaccacgtagtgttgtatatttcatataagtaattttcctgtaaactcatttttaataatgttaatatagaataaaatattttttaaacaccacagaattttatattttaaatatctagtgcacacgctttattaaaagataaaggaaatttggtttgaaaattttaaaggtaagaaatatcttctyagaaagaactcttaaaagctaatgaagagattctgaggtatgtctgtatttatttcttcattgaagaattgtaggacaacagataaatattctcatcattaaagtgttgtaaatgatcagaggtaagtttacacaataagaaaaatgagagctaaattttggcagtcttcgtagggcacattttgtgaataatttc

SEQ ID NO: 786595 - DNA, 584 bp, Homo sapiens
tcctaagaataataaataagaatgtggtaatttaggtattcagcctagtattcatagaatgttttagagaaatgaatagtcaaaatcactacctcattggtactaaccattttataatacagtatgaattgggatggtgaattaagtgggaatgggaacatggagtggttttatttttctccagtgtgaccttttttgtttatgattagtcaaatcactcttttttgtttcttttactcwtctcaagatgatgtcatagatttctgagcacttcaatttaatctgactttaatgtagtaaagtcagtttaacttgaatttaacctcatagccaacctataactcaatttctcttctttcagtcaatatgacttggacttttctaggagattatagagtgttggaagaggttgaagtctagtcattctctttgctcaatccagtgagtggagaatgatctgttttgttttgtttttttttctcatatacctatttctcctcctgtgtgctgatgaagtaaggggaaaggtggaaagggaaaaggctttcttatgtaagtagtaccttttgttccctttttttctg

SEQ ID NO: 786596 - DNA, 627 bp, Homo sapiens
atatggtatgtaacatgcaatggaatattgttacgctgtaataagggaatgaatttttgagatatgctacatcagtgcatcttgaaaatattatcctaagtaaaataagccagacaccagacagatattgtgtgattccatttatacgaaatatctagaattttgacatagagacaaaaagtagattagaggtaactgggggatataggaaggaagggatggaaatttatttcttaatggttagagttacagtttgtgataatgaaaaacttttggaaagagatagtgagagtatatgtacaacatttgaatttaattaataccactgaattgtacacctaaagatggktaaaaggaccagttttgtatgtagcacaatttttattttttatttatttattgagacagagtatcactctgttgcccaggctggagtgcagtggcatgatctctggtcactgtaacctgtgcctcgcaaattcaagtgattctccaccctcagcctcccaagtagctgggactacaggcgtgcaccactaaaaaataacaaaatttttttagtagagatggagttctcactgtgtagaccaggctggtctcaaactcctgacttcaggtcatccactc

SEQ ID NO: 786597 - DNA, 633 bp, Homo sapiens
ttacatcataagatgtcaattcctatgatttctttttttaaaagaccttttcttgaaatagtgtattttctcctcagtaattgtagggtaggaggaagtattatcaaatgtgcgtaactgtacagtggtataaaagctgcaattacaaattgaacttacttttaatggcaattttatcaagtacttttgttgatctgaaaacttgtcctaaaaaatcttactaatagcccacatagttattaaccatctcctgtggtggtctgttctctgcaagaagggtcratcatttctttttatgacagatttggaataaatcttggagaaatgttaatggtattaagacaatgctttttaaagaaacatcaaagttacatgaaaataatttttccacaatcaactgaaacatatgcgattttcttaaatgtgttaaatttgctatctggcctaatattacattcttaggaggtatgtggtataatgataaaaaattgtttttgacaagacttttactgttctctgtgtttgctatatgtctttgcacagttgcttccatttccatacatgtaagttggagatatctgtcctgattattgtgaacattaaatgagattttatgtgtgtcaatcaattata

SEQ ID NO: 786598 - DNA, 640 bp, Homo sapiens
atatggatgataaatatgcataataagagtctcaaaatcagtagtcattagggaaatactaattgaaaccatgagataccataggttgtttgcaagaataaacgtgatataccatttgtgaaaataaattagaaatttcttataaagttaaacataagcccatgactcagtaatcctactcacagtatttaaccaaggtaaatgaagacttaggttcatacaaaaacttgtatggaaaggtttataatggtcttatttattattgtcaaaaactgggaaaacctaaacatccttcattggttaatggataaatagtgacatatacatccaatgaaatactagtcagcaatagaaaaacctgattaataatatacacacaacatggatgaatctcaaatgcatgtgctaagtaacaagaggcagagagaaaaaattttatatggtatgtttctatctaatgacattctggaaaagtaaaatataggaacrgaaagcacattagtgtttgctatgggctgggcgggcaggaggtgttgactataaagtgcagcaacaggggttatttggggggtgatgaactattttgcagtttgattgtggtcatggttttatatgactgtaagcatttatcaaatttgac

SEQ ID NO: 786599 - DNA, 610 bp, Homo sapiens
tatattcagactatcaatggttggttgggcaataatagttcctgagtttttgctttgttttcaatatgcaaaatcttagggtgacaattgtatgtagtcttttggtaaattttaaaaattaggccgggcatggtggctcacgcctgtagtcctagcactttgggaggctgaagcgggtggatcacctgaggtcaggagttcgagaccagcctgaccaacatggtgaaacccagtctctactaaaaaataccaaaaattagccgggcacagtcatgggtgcctgtaatcccagctactcaggaggctgagacaggagaattgcttaaacctgggaggcggaagttgcagtgagccaagatcgtgccattgcactccagcctgggtgacaagagcaaaactccatctcaaaaaaaaaaaaaaaaaaaaaaaaaaaaawatatatatatatatatatatatataactcaaataagaaaaagagtttttctctagctttctggtcaagttcacacacaatattagtgacaaatttattattccagtgaagattgagattattctaattaagtactgaaaaaagtagaacaatttggttatcaagagaaaataag

SEQ ID NO: 786600 - DNA, 639 bp, Homo sapiens
cctcatccctaggtgtgttaccagagctagccagtgacttgagctctagccaacacagacaacttctggacagcaggacagaggcagggcataagatgaacatgtcccctctctcaaataaatcctcctgtaagatttacaggacatttttacatttcactggctaaaattgacaatgaaatgttaaaaagtgctgttcaccctcataagattcctactaaatgtatggcttggggaagtgactttatctccttgaaagtcattttcttcatttctaaaatgtaattaacatgctcatctcatagaaatactgtaaagataataagtgtgtatttgaaactctagtccagtgacaggcacatagcaggcttccaataatggtagttgcagttgttagtgtagatgacattactgattcagagatatcatagctcctgcaaggtctcataactaatgatggttaaaccagtattcaaacttagatcagcctcactcygaagcttcctctcttataaatacagtgaaatatggcaggaacttggcctgagagcttctactttccaattcaattcctctatatcatgaatcatgatatacttctggtctgagttttcaggaccattgaaaatagagttaaaa

SEQ ID NO: 786601 - DNA, 616 bp, Homo sapiens
gcctagaattaagaaaatgctaggtcttacactaatcctgctactagtaagttcagagaagttacttgtataagtatgtatatgaattatcccctgaaaagttgttttcttgttttttaattctaacaatgttgtactgaagctgttttaatgtatattttcaagagatgtggtacaatatggtcgtttgagaatgtgatatattgctttttcctcatagcacttatcactaccttargtctatctatctatctatctatctatctatctatctatctatctatcagttgaggagctcctcctcctccttggcttcatctataatggaaaagccatgacagcctgagaagaaggactttgtctatgtttttcactactgtatcccacctttaagaacagtccctcagtcagtaatggtgcatagatagcattgggtttgtcagtgagtgaatgaaccataaatgtatgtcatcagcaccggctctatagcttagcctcagtcttagtgaactctatgacctaccttaagtgaccttattgaaagccttgaaccacaactttaataacagttctggtagtatctttattctgcttttggctttgattgtttctttac

SEQ ID NO: 786602 - DNA, 616 bp, Homo sapiens
gcctagaattaagaaaatgctaggtcttacactaatcctgctactagtaagttcagagaagttacttgtataagtatgtatatgaattatcccctgaaaagttgttttcttgttttttaattctaacaatgttgtactgaagctgttttaatgtatattttcaagagatgtggtacaatatggtcgtttgagaatgtgatatattgctttttcctcatagcacttatcactaccttaggtctatctatctatctatctatctatctatctatctatctatctatcagttgaggagctcctcctcctccttggcttcatctataatggaaaagccatgacagcctgagaagaaggactttgtctatgtttttcactactgtatcccacctttaagaacagtccctcagtcagyaatggtgcatagatagcattgggtttgtcagtgagtgaatgaaccataaatgtatgtcatcagcaccggctctatagcttagcctcagtcttagtgaactctatgacctaccttaagtgaccttattgaaagccttgaaccacaactttaataacagttctggtagtatctttattctgcttttggctttgattgtttctttac

SEQ ID NO: 786603 - DNA, 612 bp, Homo sapiens
cacaacagtgaacaatcaaggcactgctccatggtgctgctccttagctcaaagccccttcgacacaaggcagcccccaggaatgaggctgaaactcagcatccctgagagactagctggcctccctctcttcccctcctgtgcctcaccctcctccccagaccccctcctctggctccaacagaccccaggagagcctgccacaaggactactacaccagcctgatttagccccttccagacaccacctgcctgaactcacaatcccagtgcttcttctttcatggaaaataatacgcattcaaggtccagtttatgtatcatgttcttcctgaagccttccctgatacgtctatggaaaagaattctttttttctgtgctccttgcycaaacccctttttgttgctcttgttgttttggtttttgtttgcttttgcttttgtttttgtgatagggtcttgctctgactagagtacagtggtgtgatcatagctcactgcagcctcaatttcctaggctcaaatgatcctccagcctcagcctctcaagtagctgagaccacaggcacacaccacaacacacagctaaattaaaaaaaaatatttgcagag

SEQ ID NO: 786604 - DNA, 623 bp, Homo sapiens
tatgctagaattcttttctttattcaggattataagatgttttcttaaacgacttttgttgtctattgaggaaatataacttttctatcttaaactattttatagcaattatttgtacagttttccaatattggccagttcttacattctttaaataaaccctacctgattaggatatataattcttttaatatattactggaatctctttactaaaattttacttaggacttttgctattatagtcattagtgagattggtatataattttattttacgttactatcaatatccatttttgacatcaagttatagtgacattgtaaaatgagttttaattttcatttttggcaatatagcaaactacttacaatttaaaacyccctcattacaaaaacacataaaaatgaaacatacactataacaagcatcccatatatgcttagataaaccaccaataacataaaacaaaacaaaacaacaaaatacaaagagggaagaaaacctcaaatcataagaaaagctgacaataagctattaatgtaatttccattttcgtaatttagatacttcaatttgaatgactatacagagacaggggacatactattgtgtatttaaa

SEQ ID NO: 786605 - DNA, 566 bp, Homo sapiens
catgttgccctaacaaaatagaagactaagtagcttaaatactgacatgtatcttctcatagtcctggaggccagaattccaatattaaggtgccagcatgttgtgtctgatgagggctctgtttctgccttcttgctatgttcctacatggacaggagagagagatagagagaatgctctcagtgtcttttcttataaggacagaaatctcattatgggggaccccacccttacaacctcatctaaacttaattatctcccaaagtgcccatctccaaatatcatcgcattgcggggttgaggcttctacatatgaatagggagtggaacagaaaagacattgtgcatagcaaatgttatggaaaaggaaaaattagttaaaagcaaactaactagaacttccagaaatgaaaaaatactrtcaataaagttaaaaacttaatgggaggaattgacagcatactatacacggattaagagagaatcaatgaactagaagatatgttggaggaaattatctggaatatagcatggagtagtaacaaaattggaaatgtgagaaaga

SEQ ID NO: 786606 - DNA, 643 bp, Homo sapiens
ggtccttgagacattttcaagggatccatgaggtcaaaataattttttttagacaaggtctcttcctgtcgcccatgctggaatgcagtggtgtgatcatggctcactgcagcctggaattcctggactcaggggatcgtcctgcttcagcacgtacctgggactacagggatgtaccaccctgccsggctaatttttttttttttttagagatggggtcttgctatgctgcccaggctggctttgaactcctgggctcaagcaatcctcttgccttataaactcagcctctcaaagtgctgagtttataagtgttagccaccacactcaaccaaaactatgtttataatcatacccaggcattatctgccttttcctctgtgttgacatttgcactggcaatacaaagcactggtgggcaaaactcctggagtcctagccctgatcaaggcagtggccccaaaatgcattggtagtcatctctcctcccagatttacttaagaatgtctttaataaaacagtaaaaattattaatattattatatcttaaccaaggagtacaggtctgtattaattttctgccaccgccacacaaattaccacagtggcttaaaacaacacacacttatttatctcacagtt

SEQ ID NO: 786607 - DNA, 487 bp, Homo sapiens
gcattttatccatattgtagcattgaatccttgcgttgacactgtaaaggaaatgctgttcatttcctcagtttacttaggaataaactgaagtttagggaaattaaatatctttctcaaggtctcatagattggcctttaaactctggttgtcacaacccagggcacacattttttgctattattttatcttgcctaaactctagtgcctgaatcacatatgtacacactccatttctaaagttcaagccaaagagcttgtccaaatatgcaacttgtccaagawatccaaatatcttcctaattatttctactatgacttctaataccatcatatattagtagagcatcttacaaagcatgcttgcaaatcttttccatcagaaacacagagtggccagagattagaagagttagatcgttccaccaggggcaccttttacatggaagcaggctgcatgagaccagctttccaccatccaagcac

SEQ ID NO: 786608 - DNA, 613 bp, Homo sapiens
gaccctggactgatcaacaagacagatagagtaatttctgtcacccttagggctaagcaaaaatcgtgggtaacattcaccctaaagactgttcccatttctcatctggtttacatgatttcacattaatgcaactcacggtcagcgaatgcaggagtgtgattaagtacaatcctaatactttaartaaaaatgtaatactttaaaaaagcatagtcttccaaaatttccagataacattttaaaatttagccttttatttaaatcacataatgtggtatcctaccagttttcaactcatcaattctcctttcattcaaattactattgaaatgtaacttccatcgtgaagtcttctctgataagaaatctttttctttatgctgttcgatctaatcggaacatgcaaatgcagtgacactcttacttatctctgctctgatttcatataccctgaatgtgtgcccgattaaattatgcagtcaggtttttatagaaatctattccctagttcttctcattcagatcaccaagcctacaactttgcaggcagctttaatgccaatggactactgcagaataagaaaatggtaaggatggcacagtttgtcac

SEQ ID NO: 786609 - DNA, 609 bp, Homo sapiens
ggagacaacggagcttcccatgaggcaaatttgctgagctccaaacagcaggaggctgggcaagtcatctataggatttccccttgtactctggcctggggtactgtgaaagtcaagcggtcttctctgtctctgcagttggtatatagatccagacaacatctcctaaagacaacccagtagagtgaaaagagcagaggctgtgtgtttttactcactgttccaccacctaccagttccgygaacttgggcaagtcacttgacctctgcagctcagtagcatggtctgtgaaatgtgatgatattgccaacccagcaagcaatcaatggtagtttccttgtctgattcccttcccatccccacgttacctaacatttgccatatttatttatgtttttattttggaacagaatccagcacttaaagcacctggaaattagcggggtaaatccattgcttcttggcacaggagccgatttcctttctctgtaacaatgaggaaatcatcacatcaccacccatcatcctgctgcaatcatttcagcggcagcagaaatcgttcccattctttatctcaggattacttttgttctgtgaagctctctaga

SEQ ID NO: 786610 - DNA, 557 bp, Homo sapiens
agctgccagtaactttgtgtgcagctgttatgggagaagtcagtagaaagacagaagcagagtaaagagggggatacttatccctgagcccttgttacaactctgtcctttccttggttatgttagccaataaattacccttatttgctagatgtagttcaacgtacatgtatgtaactggcagcaaaagtaatcttgatcgtataatggttcattgatttttagtttgtaaagttggtcagttacattgtcactaataaattaattgtatcaataaaataagtctattttatcattaatttggtatagtatctgtaagagatgataaatytattttagaagattaaatgtcattatcttttaaaatgtcatttacattatttatattggtaataatagtaattaatggcttaatagagtatggggaattaggaaaaaagagatgtttaaacaaaaatcctcaaacaactttgatggaaaagaggagaaaatataatatttaaatctaaaaattggtttttaagctaagcataggagtgacataatttttaacataa

SEQ ID NO: 786611 - DNA, 637 bp, Homo sapiens
tattataatgtctggtttcattttccttaataaatgtatttttgctaatctgattataccaattctatcagtgaaaatttctgcatgacctaattatttaatcatagcaatgtcttctatttatatgaaaagtaacactttttgaaaaatagacattcctgtgtattatttcaatactaattccttttgcataaaarcgttatactatggtatgtttaaaaaaacagaggagtgtatattatgtttctttttatcccaagatcttagatgagaggctggtatatagtaggtgctcaatgaattattactaaatgaatgaataaatgcaaaaattttatgctttgtggtagaattgtaaatgttatataagaagttttggtgacatgtacaaagtttgtatttgttctttaaagaaatgagaatttggaattttctgtcagtaaactagtaatatctgagttgaacattctgatttaaaggggtttctcttccctgacctctcctgtagttggcatggcttggtgccaatgggcagtggcatatccctgaactagacagtgaattatttgaaggcatacatttcttttctcttcctgtccagattatggtatgaaggaggtacacagtacacatattc

SEQ ID NO: 786612 - DNA, 593 bp, Homo sapiens
ctgaaggagatagagacacaaaaaatccttcaaaaaattaatgaacccaggaactggttttttgaaaagatcaacaaaatagaccgctagccagactaataaagaagaaaagagagaagaatgaaatagacacaataaaatatgataaaggggatatcaccacccgtcccacagaaatacaaactaccatcagagaatactataarcacctctatgcaaataaactagaaaatctagaagaaatggataaattcctggacattaccatattattaacagaccgtaaccttaatagcaccttctttgacccagctggagggggagaccctatcctgtaccaacacctattttgattctttggtcaccccgaagtctatatcctaatcctaccaggcttcagaataatttcccacatcgtaacatattactctggaaaaaaagaaccgttcggatacatgggcatagtctgagccatgatgtcaattggtgttaagagttgtgagggtagttatgatgaatagtgatagcattatcccttctaggcatagcagggaggatattaggtgtgagcagtagattagtattcccaaaag

SEQ ID NO: 786613 - DNA, 593 bp, Homo sapiens
ctgaaggagatagagacacaaaaaatccttcaaaaaattaatgaacccaggaactggttttttgaaaagatcaacaaaatagaccgctagccagactaataaagaagaaaagagagaagaatgaaatagacacaataaaatatgataaaggggatatcaccacccgtcccacagaaatacaaactaccatcagagaatactataagcacctctatgcaaataaactagaaaatctagaagaaatggataaattcctggacattaccatattattaacagaccrtaaccttaatagcaccttctttgacccagctggagggggagaccctatcctgtaccaacacctattttgattctttggtcaccccgaagtctatatcctaatcctaccaggcttcagaataatttcccacatcgtaacatattactctggaaaaaaagaaccgttcggatacatgggcatagtctgagccatgatgtcaattggtgttaagagttgtgagggtagttatgatgaatagtgatagcattatcccttctaggcatagcagggaggatattaggtgtgagcagtagattagtattcccaaaag

SEQ ID NO: 786614 - DNA, 593 bp, Homo sapiens
ctgaaggagatagagacacaaaaaatccttcaaaaaattaatgaacccaggaactggttttttgaaaagatcaacaaaatagaccgctagccagactaataaagaagaaaagagagaagaatgaaatagacacaataaaatatgataaaggggatatcaccacccgtcccacagaaatacaaactaccatcagagaatactataagcacctctatgcaaataaactagaaaatctagaagaaatggataaattcctggacattaccatattattaacagaccgtaaccttaatagcaccttctttgacccagctggagggggagaccctatcctgtaccaacacctattttgattctttggtcaccccgaagtctatatcctaatcctaccaggcttcrgaataatttcccacatcgtaacatattactctggaaaaaaagaaccgttcggatacatgggcatagtctgagccatgatgtcaattggtgttaagagttgtgagggtagttatgatgaatagtgatagcattatcccttctaggcatagcagggaggatattaggtgtgagcagtagattagtattcccaaaag

SEQ ID NO: 786615 - DNA, 619 bp, Homo sapiens
ccctgactcaactggatgggctaaggtttctgataaaatctgaagataaagaaaatggaatattctgcttttttcttccttctaatttcacccttgcctaaggatgagatttcttcccaggttggtatcccagaaatgcagactgtagctatggggcggaagctttgtttctttacctgatcacttgctgtggaaattctagcttattgtgttccaagtagttagtggtttttctccttcagtctccactgttattttgctccttcatccctctttccttgccaatcattagaaaggaaagaagaggaaagagactcgctggagcactggtgagtctctaggaccctgctatcctatcccaacagggctgtcagamggagaactcctaatgtggccatttgaaacacttctcaacattgaaatagacagttgaagttttaaaataacctcttctaagacacggctatgagtaggtaagagagcattcattcccttcaataatatgactgtgttgataaaactgataaccattcacttgcaaatgttattattgaataagtctcacttagctcatttaatattacccaaaagatgctaacaaattctgtttcccacattg

SEQ ID NO: 786616 - DNA, 635 bp, Homo sapiens
tagaagagactctaaccatcctaagtagggcctctaaccccgctttataaacttttaattgactcccatcttaacagttgcaatccatggaggaatgcttgataacctcggtgataagataaaaaaccaagcatactagaagtgttctctaaaattaaaaatacagtagttrctagagaaaaattttagtccaaaaatccaactatagaaacatagaatgtgagaggtagcacataagaaataagtcatggggattttatttcatggaccagcaatatgatgataaaagccatctaacctgttggaattataggtcacatcaagagaattctagtgtctagaaccaaagaaatgttagcctcactctaatagacaatacacttcaggaacgaaataagcaaattagattgtgttcagagatgaataaccaagatggcagagggaattaaaataattgctcatgattaccctgggaaatagaaggcttagaaaggacaacacagtttcttcatatgcttaaagcaatgtgaatagggaattggactcaaccaacatagcccgacttattaaagccaatgggtagaggttacagagaaagctattccagtacaaccaaacaaaaaaaataaaatgta

SEQ ID NO: 786617 - DNA, 617 bp, Homo sapiens
ggcgggtacaaaaaaagtatttgattaaatacaaaatattttcttgattaaaacccctaggaattcttctttcttaatatgataaagaatatatatttaaaactgataataactattacacttagcatagaacattagaaatgctcaggccgggtgcagggactcacaccggtaatctcaacactttgggagaccaaggcaggaggatcaactgaggccagtcattcaagaccaggctggacaacatagtgagacccatgtcttgacaaaaaataaaaagtatatyagccagacctggtggtgtgcctgtagtcccagctactcggaaggctgaggtgggaggactgcttgagcccaggagtttgagacgaccagctgggcaacataggaagaccctgtctctacaaaaaaaatttttaaattagccaggtgttgtggtgggtacctgtggttccagatactcaagaggctgaagtgggaggattgctttagcccaggaggtcaaggctgcagtgagtcatgatcacaccactgcactccagcctggtgacagaacaagaccctatctataaatagataaatacctttaggatccatctttgaaattaggttgttgc

SEQ ID NO: 786618 - DNA, 519 bp, Homo sapiens
agctttatttttgttgcttaaggagaaccaaacattgtaaatatgtctatggaagccagtcccagctttgcttcaaatcatcttttggacaggaagcaaatgaataaacatccctagttctcagtttccccatctataaaatragaatggaggaccaagcttggcagctcacgccagtaatcccagcactttgggaggtcaaggtgggcagatcacttgaggccaggagttcgagaccagcctggctaacatggtgaaaccccgtctctactaaaaatacaaaaattacccaggcttgggggcacacacccgtaatcccagctatttgggaggctgaggcaggagaatcgcttgaacccgggaagcggagcttacagtgagccgagatgtgccacagcactccagcctgggtgacacagcgagactccgtctcaaagaaaataaataaataaaataaaataaaaatggaaatgcctgtcttcctccactcccagggatgctgtgaagaaaaatgaacct

SEQ ID NO: 786619 - DNA, 626 bp, Homo sapiens
gaaaggtgaactaatttatactttatgtaaagataatagggacaatgccccaaagaaattagcagtttacaaatggataacttgtctcaagaagggatgagatgatgttaaaatgaagcctgcagcagcaaaccattcacataaatttgcaaggaaaaaattaatcctttgtgccctaattggagaggactgacaattgacagcagaaacaatagccaacaccatagacatctcaattggttcagcttacacaattctgactaaaaaaaaataagatgagcaaacttaacacttgtgtgccaaaacrattgcacagatcagctgcagacaagagtagagctttcaatggaaattttagacaagtgagatcaagatcttgaagcatttatttgaagaactgtgataagagatgaaacacggctttgccagtccgatcctgaagacaaagcacaatcaaaggaatggcctccaagagacggaagtggtccagtcaaagccaaaggagaacattcaagagcaaaggtcatggcaacagctttttgggatgctcagggcattttgcttgttgactttctggagggccaaagaacaataacatctgtttattatcagagtgtttggagaaa

SEQ ID NO: 786620 - DNA, 653 bp, Homo sapiens
tgactaggaagcccaagggttcaattttaacttggcattataaaagtgttaaattgggacaaactagctccactggttaagtaaaatgtggttatgttacaatccaggcttcaaagcttacatcgttgctataacttaaaaaaaagaaacactagattgttcattagagtaaaatattggcctaccattatgaaaaatgcataacactaatcacaaatggttaaaaaaaactgccaaatttaatatcacaaatgaaaagtcaatccaaaaacacatttcatgttagcaataccatttttgaatttaagaaaaaaataacttttaatctacttggcatattgttaattgtctgtgttttaaataagaaaatggttgtttagccgggcacggtggctcacgcctgtaatcccagcactttgggaggccaaggcgggcggatcacgaggtcaggagatctagaccagcctggctaacacggtgaaaccccgtctctactaaaaatacaaraaattagccgggcacggtggcgggcgcctgtagtcccagatactcgggaggctgaggcaggagaatggcgtgaacccgggacgcggagcttgcagtgagccgagatggcgccactgcactccagcctgggcgacagagcaagactc

SEQ ID NO: 786621 - DNA, 603 bp, Homo sapiens
gcctcccaaagtgctggaattacatgtttgagccactgtgccccatcattctagcaacattttaaaaggaggcataattttattcacattaaaagaatcaatcaataaaaccaatgaaagaataaatttgaggaactgtttgtggaaaagtagttgttttactaacaaaaaaaaagtggcaggatmcttagaagtcatagtttcatgaaaatgcgattttttaaaaaaaaaagtaaacgtatggtttattctttgaattatccactagatggcagaaaattgttactgtccaaagcactattactgtattagtccaggctcctttctaagctccagaagttatgcaaattgctttcacctctacccctgcaatgctagccttttcacaagtggcattttaaaacacatcagtatttttaagctgggaaagaaaaatcagaggtttcagagttataaatattaggtatgagcatactaattatatgtttgtgttactctgctctaacacagaaggaacagatgcacagacatgttgggagaagggctgagagcccacatagaatgatctatccagatgccagatattagagttaagctgaaaag

SEQ ID NO: 786622 - DNA, 603 bp, Homo sapiens
gcctcccaaagtgctggaattacatgtttgagccactgtgccccatcattctagcaacattttaaaaggaggcataattttattcacattaaaagaatcaatcaataaaaccaatgaaagaataaatttgaggaactgtttgtggaaaagtagttgttttactaacaaaaaaaaagtggcaggatacttagaagtcatagtttcatgaaaatgcgattttttaaaaaaaaaagtaaasgtatggtttattctttgaattatccactagatggcagaaaattgttactgtccaaagcactattactgtattagtccaggctcctttctaagctccagaagttatgcaaattgctttcacctctacccctgcaatgctagccttttcacaagtggcattttaaaacacatcagtatttttaagctgggaaagaaaaatcagaggtttcagagttataaatattaggtatgagcatactaattatatgtttgtgttactctgctctaacacagaaggaacagatgcacagacatgttgggagaagggctgagagcccacatagaatgatctatccagatgccagatattagagttaagctgaaaag

SEQ ID NO: 786623 - DNA, 613 bp, Homo sapiens
tggtactgggatcttacccagtggggtttgcactaattccggttagtgtcagaattgggttaaactgtaggaaatcctattggtgtctgctgcagaaatggttggtgtggtacagaaaagaaaacgaaataacaaccaaaaaaaaaaaacacattttggtgaccaaaagtgttctgtgctggatatgtgcagcaggggaaaatgagttgtttttttcctactatataggagtctatagataaaataactagtaaaaactacacggtacaaaattaacagttataagtcacaaacyctaccttcaatcacaatttactgggctattatagtttttatttgtatctatacctatttatacttagtatctttacaacgagccaggcatcctgagagttttataaaattacttcacaaaatactcaggaactctataatgtaggcataatctcttttttaagagttgagtaattaaggcttaaagaggtaaagtgatttgcccaagaccaaacaattagtatatatagtagagaagccacaattcaaacttctaataatataataaggacgacctgttttaaacaattctgaaataacaaaattcaaatttacagtt

SEQ ID NO: 786624 - DNA, 613 bp, Homo sapiens
tggtactgggatcttacccagtggggtttgcactaattccggttagtgtcagaattgggttaaactgtaggaaatcctattggtgtctgctgcagaaatggttggtgtggtacagaaaagaaaacgaaataacaaccaaaaaaaaaaaacacattttggtgaccaaaagtgttctgtgctggatatgtgcagcaggggaaaatgagttgtttttttcctactatataggagtctatagataaaataactagtaaaaactacacggtacaaaattaacagttataagtcacaaactctaccttcaatcacaatttactggkctattatagtttttatttgtatctatacctatttatacttagtatctttacaacgagccaggcatcctgagagttttataaaattacttcacaaaatactcaggaactctataatgtaggcataatctcttttttaagagttgagtaattaaggcttaaagaggtaaagtgatttgcccaagaccaaacaattagtatatatagtagagaagccacaattcaaacttctaataatataataaggacgacctgttttaaacaattctgaaataacaaaattcaaatttacagtt

SEQ ID NO: 786625 - DNA, 644 bp, Homo sapiens
gttttactttgcccatgccacctctctcccagcccaagtttcacagcacagagggagatccttctgcgtgagagaagagtgtatgagcacccaactttactgaaaaccccagcaccaagctcactccagtgaaccccagtgccaggctggtccctgcaaacctaggttcctggcccaccccatactctgaccagcttgtgcagcttctggtttgagaaccaaccttgcagatccaggctctaagtctgtcccagcactcacaaccccaggttcaaggcaggtcaggcctgcttcggcatgtccattatcaaaaagacaaaaaataataaatattggcaagcatgcagagaaaaaggaatttgtatacactgttgatggsaatgttacttggtacagtgattataaaaaacagtatggaggttccttaaaaagttacaagtagaactaccatataaactaacaaacccacttctgggtatatgtccaaaagaaacaaaatcagtatgtcaaagaggtatctgttctttgcagcattattcatgttcattgcagcattattcacaatagtcaagatatggaatcaacctagatgtccattaacagatgaacaaataaagaaaatatgatacatacacacacacaat

SEQ ID NO: 786626 - DNA, 533 bp, Homo sapiens
tttattgaagagggtgtcctttccccagtgtatgttcttgacacctttgtcccaaatcaattgggtgtaaatatgtggatttatttctgggttctttattctgtttcattggtctatgtgtttgtttttatacaaataccatgttgtttttattactgtaaccttgtagcttattttgaatatattcatgaaggcatattggaaatgaaggaatsaaactgtctctatttgtaagcaacatgattgcttatatagaaaatcccaaagattctacaaaaaaagctactacacctcctgagttcagcatgatcacagttggtatataaaaatcaactgtatttctatatactggttatgaataattggcatttaatataaaaaatattgcatgtttctatttatataacattctggaaaagacaaagctacaggaatagaaaacaaatctttggtttccaggctttggaagtaggggaagggattgactacaaaagtcaatgctagggaatttggggtatgatggaactgttcta

SEQ ID NO: 786627 - DNA, 613 bp, Homo sapiens
tgataggaaggatccattcagatgggtggggggctttgaattttacttttggtttacagaaggaattttactgtatacaattttttttaaaccaagcagtaattcagataaacccaagatggaatgtagatggccacaaatgaatccatgttacaaatgaatgacacaatcaaatgtaagggggtatagaagataggagctaacttaagtaactttggaaaatattgctgtaactggataaagaaaacacacaaacactataccttatgtaatagactgraaatggccccccagaagatttccatgacctaatccctggaatctgtgattgttacctatatggaaaaaaaaatgaggctttgtggatgtgactaagtcaaagtcttgaaatggggagattatctgaattatccatccagatggaccctaaatgcaatcacatgtatgcttataaaagggaggcagtgggagagatttcacacactaagggaaggccgtgtgaaggcgggtcaaagagaaatttgaagatgctggctatggtggttaattttatgtcaatttggataggatatggtacccagttgtttggtgaaacaccattctagatgttgat

SEQ ID NO: 786628 - DNA, 542 bp, Homo sapiens
tatttgaaaacactgaagtgaatgagtgtcaaatgaatgagaatgtcaaaaaagaggatgtgggctgggtacggtggctcacgcctgtgatcccagcactttgggaggccgaggcgggtggatcacctgaggtcaggaatttgagaccagcctggccaacatagtgagaccccgtctctactaaaaatacaaaaaattagctgggcatggtgctgggcgcctgtaatcccagctactcgggaggctgaggcaggagaattgcttgaacccaggaggcggaggttgccgtgagccgagatmgtgctattgcactccagcctgggcaacaagagcgaaactctgtctcaaaaaaaaagaggatgtaaatagatttaaatttttagatggcagacatttaataaatacaattggtagattcattctgatctcatagcattaaataccatttataaaaattccaaaatctgtgtctccatctcattgaattcgaaattcatatgtacaatttcctactttactttcacttacgtatctaataaata

SEQ ID NO: 786629 - DNA, 651 bp, Homo sapiens
aaaactggataaccacatgcagaagaatgaaaccagatccctatctctcaccatatacaaaaatgaaagcaaaatggatcaaagccttaaatctaaaacctgaaactatgaaacgactagtaaaaaacgttggggaaatgctccaggacgtyggtctgggtgaagacttttttgtataagacttcaaaggcagaaaagaaaaaaaaatagacaaatgggattacatcaggctaaaaaacttctgcacagcaaaagaaactatcaacacagagacaaccaacagaatgggagaaaatatttgcaaactatccatctgataaggaattagtaaccagaatatataaagagctcaaacaactcaataggaaaaaaaccccaataattctatttaaaaatgagcaaaagatttgaatagacatttctcaaaagaagatatataaatggccaaaaggtatatgaaaaagtgttcaacctcactaatcaggaaaatgcaaatcaacaccacaatgagatgtctcacacagaatggctatcacgaaaaaaatatcagggaataatagatgctggcaaggatgtagttaaaagggaatactcatacattgttagttcaaatgaaaattagtacagccactatggaaaacagcatggagg

SEQ ID NO: 786630 - DNA, 615 bp, Homo sapiens
gttatcatgagagagggctgttataaagcaagtttggcccatggtccctttgtctcatgtactcatttctaccttgtgcccttctgacatgggatgacccccacctgatgcaggcaccatgctcttgaaattcccagcctccagaactgtgagaaatacacttttctgtttttttgagatggaggctcgctctgttgcccaggctggagtgcagtggtgcatcctcggctcactgcaacctccgcctcccaggctcaagcgattctcctgtctcagcctcctgagtagctgggattacaggcacccaccaccatgcccagctactttttgtatttctagtagagacagagtttcaccatgttggccaggctggtcttgaactgacctcgtgatccacccacctcggcctcccaaagtgctgggattacaggcgtgagccagtgcacccagcctayacctcttttctttacaaattagtctgtgctattgttacagaagcagcaaacagacttaggagctagagtcccactggccttttatgactcaagcaggcttcaagtatttaaatgattttgtgttaaaagcaaccccagaggctaacatcactggcttaga

SEQ ID NO: 786631 - DNA, 476 bp, Homo sapiens
ggggacagagcgagacttcgtctcaaaaaaaaaaaaaaaaaaaaaagagatacacattcattcagggtggtcagactcaaataagaaaatcattacacagaagcaagtaaaagctgaaatatgaatactacgtctagaaacacattattataaacagcttgacataaatggtattataccctccaagcttatacagagagtataaggtgttctatgagtctgaactttcctccctaaaccattctgaacctcctgagagaactcatccttccctgcagcaggaggacactcccactcagtatcttgctgaataaaaagagtcyttacaaaggtccttgttttggccgggtgtggtggctcacacctgtaatcccagcactttgggatgccgaggcaggcggatcacctgaggttgggagttccagaccagcctaatcaacatggagaaaccccatctctactaaaaatacaaaatt

SEQ ID NO: 786632 - DNA, 510 bp, Homo sapiens
ccatcaactcttccctaaatttgagtgtagctgctgggactgtctgggatactatcacatagttagaagccaagagagcagtagcagcatcatggtgcagaccacacacagtacaagaaggtcaccaaatccctgcctgccctcctgtagtcacacagccaatggatccatgtgcatgttrcagctataaaatttgaacaattaaaaaaaatagctactatcggcacatgtcagttgtagactctatgggatacatacaaaacatcaatcaatatcttttcattaaaaaaacagcagtttagttataactgcaagaaacagaaagccttaatgttgcctcttagaaaatcagggtgctttttttaatagaataataaaatcaggcaaaaccagggctgctactgattgaatgactcgacactattgtggctaacatttctatgattattttcctcaggtttgctgtctccttgtttcctgaaagctgcttcagtcaggtatcaggttgac

SEQ ID NO: 786633 - DNA, 579 bp, Homo sapiens
gcataaggaggagttgactaatcattgctgttattaaagctgaaagaatatcataaaccttgaaatataggttgcctcttaaagcttggaatgaccccaaccagtagccagtaaccaaagggcactgtagtcctacagccacaatggtactgaatcatgcaaacagctctaatgagtctggaagtagattcatgcccagatcttccagaaagaaacacaggctgctggcaccttgagtttggccttgtgacaaacaaagtaccaactgagcaatgatgtccctggacttttgatgtaccagactgtgggataataaatgggtgttgtaaactgctaagtttgtggtagtttsttgtggcagcaacagaaaactaatgctccatcctatttgcctagtgattattgtcaagcttttcattgataagtactggaatgtgtgcatatatatatatatatatatatatatatatatatatacacacacacacacacacacacatatatacacacacactcgcatacagatatacacacacatacacttaagtcctcaatgtcatcgataggttcttggaaact

SEQ ID NO: 786634 - DNA, 645 bp, Homo sapiens
ttgactcagatatgatgagtccatcctttctctactgttcagactgtgctttcagtggtcaggagcactaggtaaggtccttcccaagctagttcgagtttttcttctttttaccctttgataaggacgtgatctccaggggtggcacctgtgctaggagacttttggacttaagagaaagtggaagatagatcgagtatataatttttgagggactgatcttttgtttcaaatgtaggagcatcagtggtagatgtaaataaggcagcccatatatcacttcataagggaacaagatgatatcttttctaggggtggttttgatttttaacaaggcaatacgatgacatttaatccagggcaaatgggtctctaggactaattttgttaggtggctttttagagcgtcgttcatttttttctacttttcctgaggaagagggatgccaagggatatggtattcccattttatgtcaagcacccgagctaactttttaatcacatgygctgtgaaatgagttccattctctgaattactgttttctgttactcaaaacctgggtatgattttttaattaatgccttagctccaatactggcggttgcacttgagaaggggatagcttttacccagtgagtaaagt

SEQ ID NO: 786635 - DNA, 589 bp, Homo sapiens
ctagtagaaaatatataacaaatctgtgtccagattatataagaaatatatgcaaatcaataataaattttaaagttctgtaaaatataggcaaaagatttgaagaaacatttcacacacacacaaaaaaaacgatgtacaaagggcattcgaaaagatgctcaaggccgggtgcagtggctcatgcctgtaatcccaacactttgggaagccaaggagggcggatcaygaggtcaggagatcgagaacatcctggctaacacggtgaaaacccgtctcaacttaaaatacaaaaaaatttagctgggcatggtggcatgtgactgtagtcccagctactcaggaggctgaggcaggagtatcgcttgaacctgggaggtggaggttgcagtgagctgaaatcgtgccactgcactccagcctgagtgacagagtgagactccatctccaaaaaaaaaaaaaaaaaaaaaaaaaaaaaagaaaagatgctcaaaatcattaatctttgagaaagacaaattacaaaacaatttcttttcacacctactaaaatagctgaaattaaatagcctgacaatatataatatgg

SEQ ID NO: 786636 - DNA, 589 bp, Homo sapiens
ctagtagaaaatatataacaaatctgtgtccagattatataagaaatatatgcaaatcaataataaattttaaagttctgtaaaatataggcaaaagatttgaagaaacatttcacacacacacaaaaaaaacgatgtacaaagggcattcgaaaagatgctcaaggccgggtgcagtggctcatgcctgtaatcccaacactttgggaagccaaggagggcggatcacgaggtcaggagatcgagaacatcctggctaacacggtgaaaacccgtctcaacttaaaatacaaaaaaatttagctgggcatggtggcatgtgactgtagtcccagctactcaggaggctgrggcaggagtatcgcttgaacctgggaggtggaggttgcagtgagctgaaatcgtgccactgcactccagcctgagtgacagagtgagactccatctccaaaaaaaaaaaaaaaaaaaaaaaaaaaaaagaaaagatgctcaaaatcattaatctttgagaaagacaaattacaaaacaatttcttttcacacctactaaaatagctgaaattaaatagcctgacaatatataatatgg

SEQ ID NO: 786637 - DNA, 589 bp, Homo sapiens
ctagtagaaaatatataacaaatctgtgtccagattatataagaaatatatgcaaatcaataataaattttaaagttctgtaaaatataggcaaaagatttgaagaaacatttcacacacacacaaaaaaaacgatgtacaaagggcattcgaaaagatgctcaaggccgggtgcagtggctcatgcctgtaatcccaacactttgggaagccaaggagggcggatcacgaggtcaggagatcgagaacatcctggctaacacggtgaaaacccgtctcaacttaaaatacaaaaaaatttagctgggcatggtggcatgtgactgtagtcccagctactcaggaggctgaggcaggagtatcgcttgaacctgggaggtggaggttgcagtgagctgaaatcrtgccactgcactccagcctgagtgacagagtgagactccatctccaaaaaaaaaaaaaaaaaaaaaaaaaaaaaagaaaagatgctcaaaatcattaatctttgagaaagacaaattacaaaacaatttcttttcacacctactaaaatagctgaaattaaatagcctgacaatatataatatgg

SEQ ID NO: 786638 - DNA, 607 bp, Homo sapiens
tatcccaaatcaacactttgtagttatatcacttaattgccattgaaaatgtgtctcctataggtgattttttgttgtgggaagtcagggaccccaaacagagggaccggctgaagccatggcagaagaacataaattgtgaagatttcatgggcatttattagtttcccaagttaatacttttataatttcttatgcctgtctttactgcaatctgaacatgaattgtgaagatttcatggacatttatcacttccccaatcaatattcttataatttcttatgcytctttaagcccttaatcccatcatcttcataaactgaggatgtatgtcgcctcaggaccctgtgatgattgcattaactccacaaattgtttgtaaaatacgtatgtttgaacaatatgaaatctgggcaccctgaaaaagaacaggataacagccacattcaagcaacaagggagataaccataaggtctgactgcctgtggggcgaggcagaacagagtcatatttttcttattgcaaaaaacgagtaggagaaatattgctgagttcttttcctggtaaggaataaccctgggaagggaagcattcccaggggaggc

SEQ ID NO: 786639 - DNA, 607 bp, Homo sapiens
tatcccaaatcaacactttgtagttatatcacttaattgccattgaaaatgtgtctcctataggtgattttttgttgtgggaagtcagggaccccaaacagagggaccggctgaagccatggcagaagaacataaattgtgaagatttcatgggcatttattagtttcccaagttaatacttttataatttcttatgcctgtctttactgcaatctgaacatgaattgtgaagatttcatggacatttatcacttccccaatcaatattcttataatttcttatgcttctttaagcccttaatcccatcatcttcataaactgaggatgtatgtcgcctcaggaccctgtgatgattgcattaactccacaaattgtttgtaaaatacgtatgtttgaacaatatgaaatctgggcaccctgaaaaagaacaggataacagccacrttcaagcaacaagggagataaccataaggtctgactgcctgtggggcgaggcagaacagagtcatatttttcttattgcaaaaaacgagtaggagaaatattgctgagttcttttcctggtaaggaataaccctgggaagggaagcattcccaggggaggc

SEQ ID NO: 786640 - DNA, 640 bp, Homo sapiens
aaaatatccctgtcaaacagaggagttgggctttcaggcataattagaaaggcacaagtgaacaagaggtctccccaccaacaactaagggattaggaaaaaatatcaggttaaagaccttcttgagacaccccacatggtcatgctaagaaagtagagggggccagaattggagaaaataaccaagagaccagccccggtgtccagaaagaggtctactttccttccttcagtttccagaattacccagggctcctggatgttaatggtgatctggaccatcagagccagggagagaagccccacgactcctcattcctactggaccatttgggaaattggctctrggcccagtgaccagaatccctgggggaagttcaccttccagtaatcctcactgtagattgaacagggtcaagatgggtttttcatgctgcctaggcaatcctccctaaaatgccctgatttaccaaatctgtagctgttaacaagtgcacctcagagattctggggcttgtgggcttccatggtggccattaaagtttctacctctttcctttgtcttctctctctctctctggggtcttcttgtatctattataaaagaccagggtggccactttcaggaggttctctaaag

SEQ ID NO: 786641 - DNA, 570 bp, Homo sapiens
caagaaaatacagtgtataaagcactcattggggataacaaatactgccctcccatcttccatcagaagaaaaacactgggaatgtgatattgatttgtgtatttgcacctaacggatccttaatgaatttgccaaggataattaataaatatgccagttcatgttgtgagcttaagtgaaaaatatagttcttatattccttgagcaaattcatttttcaaagcatcatgctaggcacttaattattgaatgatcacatcaagcccatggggattacrcctttaaaaaaataaaaaaaactaggatctaagctgttaagaaatgtttgctagggctgccataaaaaagtaccgcagactgggtgggttattttctcacagttctaaagttcagaagtctgagatcaaggtgttggcagggtttatttcttctggggccttcctcgggttttcagttggctgtcctaatttcctcttcttgaaaggacactagtcagattagggcccacatgaataatttcattttaacttaattacctttttaaagactgtatctccacagtcacattc

SEQ ID NO: 786642 - DNA, 538 bp, Homo sapiens
aatactcaaaagacaaaaaatggtgaatattttatccaaattttgccccaaagataatggtagctctgtattgcctgacatgctgttacaagcaaaaataaaattttaggacataagagagttttgagggagttccccttggctctttctatggatcaagtgaggagtctcaaggagtaacttgcatttaaatttaccgctaaaaggaaaaagcaggtagaagattccttttaaggaaaaataccatatttatccaaaattgatcttttaaaaattctatatctagttgtmctgaccactttaattgttcttaaactttgttggacatcagaatcacttgaacttgctgaataaatatctctgagctccacccaaaaactactgagttggatttcagggaatgtctcagagataatatatgctttgtgaaacataaaaagagcatttttttttacattggtgagttatggcatgtgcaataaagtaagttttaaaaactgatggctactgtcccttgcctttggtccagtaatacata

SEQ ID NO: 786643 - DNA, 626 bp, Homo sapiens
gccattgagcgtggaaggttagagagaatgataggaatcctggatagtagtgtggcagaagagggatttggagaagaacacatatggaatgtaatattaactaagctgatttctgtgcggtgtgcatttaaactatcccccttaaaatcttcaggagaatctactgaaaaaatatataggamatcaaatctatatttcttgctgctgcttttgatgagaaaggatttttttatggtgaataaagataagctaaagctgtctacaacagaagttacacctgagccagctgcatgacagttacctctaaaagactttgtgcagaactccttcaccatgtacaaatggaagagcaaatcaattggtcatatttaatgagtacctacactgcatgaaatttgcaattgaattttgtatctgataagaactaacatatgctgttgacactatttatcttacacactgaataagatggtttgttccatcatttgtatacactctggctagacataaatatataagcatggctttcttattcttttattatggaattacccatttgctcagctaacagttattaagcatatactatgctagatgtaatagtgccagagatggtttcctcaagt

SEQ ID NO: 786644 - DNA, 616 bp, Homo sapiens
gggatcctttctgggctgcccttcccttatccctgagttctcagagagacataataaatgtcatagttgttctcggttgtgctgaggcaacagaggagaaagtgcctcctccataggccagaggggcacttcagtcatggtcactagttgttctaatggacaaccatctgtagccaagtgagcgagtggcygtgggagccaggggagatggaaagcagctgaaaggctctcctggagcatgtatgggctcctggaaacttccagaacagctgctagaaactcggagcagagcaaagttttgacaaacacaccagtggggacttgagttacagttggaatataaaaagaactataagctcatttcatattcagcagctgatgagggcactgaaataggttaaaactgctttctaaagcccatgggtatatttatcaatatacatatattgtattatgagtttggtttgttgtgtacacctgtggtctgttttatatgggaattttctccaaatatttaggattcaaacttttcactgttataaactttataactatcattgtgaatacagtgtagtctgtttttaaaatgaagtccttgagatacattcctagaaag

SEQ ID NO: 786645 - DNA, 618 bp, Homo sapiens
catgtattttcattggagaaattccattttgagacacatacctaaaataaattatttgatatatatactcagagataagtacagtaatgcacctaatagcaacatttttaagaataaaacattggttaacaacccaaattttcttctgccaaggaataaactattgtatcgtcagacaatagcaaatttctatagtggtgaagataaatgaccttcatctgtaagtgtcaatgtggataaatctcaagaacaatactgagcaaaaatcaagctgcagaagaatatatattctgtagagttcataaatagataaagataatgtattgtttaaggatacattgctagggrtatgtggtaaaactatttttaaaaagtaaggatatgataaacacaaacttcttgatagtaactacattcagatgttggaggagagagtagggtgatatcaggaaaggtcacacaaaattttaaggttctagagtgttttattgcttaaaacagacatactcatcacaccttacatatatgccacacatacttttgtgaatatataaaacctggaaaaaataagcattgaatatataaaacctggaaaaatatagatattaattggaagca

SEQ ID NO: 786646 - DNA, 618 bp, Homo sapiens
catgtattttcattggagaaattccattttgagacacatacctaaaataaattatttgatatatatactcagagataagtacagtaatgcacctaatagcaacatttttaagaataaaacattggttaacaacccaaattttcttctgccaaggaataaactattgtatcgtcagacaatagcaaatttctatagtggtgaagataaatgaccttcatctgtaagtgtcaatgtggataaatctcaagaacaatactgagcaaaaatcaagctgcagaagaatatatattctgtagagttcataaatagataaagataatgtattgtttaaggatacattgctagggatatgtggtaaaactatttttaaaaagtaaggatatgataaacacaaacttcttgatagtractacattcagatgttggaggagagagtagggtgatatcaggaaaggtcacacaaaattttaaggttctagagtgttttattgcttaaaacagacatactcatcacaccttacatatatgccacacatacttttgtgaatatataaaacctggaaaaaataagcattgaatatataaaacctggaaaaatatagatattaattggaagca

SEQ ID NO: 786647 - DNA, 629 bp, Homo sapiens
tgaagaagtattggggaaggagtgcaaagtttccttgccctttctgggaaggccaccctccagcaacctccatgtgttcagctatcagatgctcccctaaacctgttctcttgggccttttatggatatgttattggataggtatgattggtgactgtgtagaaaaggggtataatctaatgctaatagactgagtggggaagcccagcaaggcctaaccagattcttcttggcctctctgtggagcattctttcctccttgatatggggcaggacctcttttgaaatgggggtcttatgaccatcaatcagacaaagtaggttagagaattttattayggccagacatggagaaacagagtatacttttagtttctaaggcctatcttggggataaatgagaagcggtatgagacttatgagtcagaaactatggatgaaaaccaatgtatataaatcataattcctaagttctcaccatgatctattggggtgcttcctgattaatcagtaaatattaattaaatgcctactgaatctacaatgtggcaaatatttgcagctattactaggctttaagatatatgagatataattttaaagtctaaggaataaaaaaattaatgtat

SEQ ID NO: 786648 - DNA, 397 bp, Homo sapiens
ataccacaaataaatacatggggattcacggccatgacacgcaaaaaggcagaaaacaggatggacctacgggaaaaacagtaccaacagcaacagcaatcaaacccagacaggctccctgaggctgggcatttgaatccacagwggaaggatgagtggggaggtaactgggtagaacccaaggcctggcctgggtacaggaagggggcatattccaggcaggagagagtaacggcaaaggcccagaggtagacaggatatagcaggcagtaggtctaagaattgaataatatgccaagtaaacacataactgggctccttctcctggattccatgcttccagcaatggtggatccctgtgagttcctccatagaggccagcgtcctcccagacatg

SEQ ID NO: 786649 - DNA, 575 bp, Homo sapiens
ttcccgaagacccagaaaacagagtcgaccacacccttttctgtgtcatgccctattaaagtcttccttaccccagattgtaaatgcatgtttggattaacgtctccccaacttgtctttgagccttttgagagtagttactgagtttgtttggtttttctggtgttctcatgttagcaccccaacacaaggtctggtacagagtaggtgctgagaagatgcttgtattttgttttgtggggtttttcggtgggcgggggttgcctactacaactgctagcagcagatgcktgttgaatgaataaatggatggatggatgggtggatgggtggatggatggatggatgaatgatggatgatgaatgaatgaatgattaaataaataaataaatcccaactaactaagaggattttaatgaacctgggtagaaaggacactccgttaccaatcaagcgagctggatgtcagccaaagtgacttcctggaggaggagcaaatggcccctgaatgatagatgcgtttttgccaagtggagacacagtgcagaggaaatgttgggaacattctctagcc

SEQ ID NO: 786650 - DNA, 646 bp, Homo sapiens
atctgcatatcagagtcactaaactcaaagatggcatcatgtagagaaaaggcatgcagctacaataccactgcatggaaaacgtatgggcttgaaaatttcccatgatatatacaagataaataccagctcagattttaatcattttagaaggtgaaccaattcccaggtcccaaccaaaaattcattgattaataatccaaaacttgatctacattgagatatatttttattttagatatctaaattcaaaaattgccytgagctgagataatgtctctcaggtctaccacccatttttatagtggatttaagcataggtgttataaactttataatccttataatggtatgtgtcccttaccaaaatgaagcttttagagaaactgacatattagtgattcagttgaaatatttaggaggatttgattgtttttaatcaacgtttaaatcatttaacttgttaaatgtatagattttgatttgctggttatagaaatcgtgttcaaatatttagacaatttttccttcagtaggtttgtgaatagattaaacaataaataaagcacaggtgatggtgtgtggtcctctccaggtaccaaaagctcctcagactttaaggatcctaacaacagactccaactat

SEQ ID NO: 786651 - DNA, 622 bp, Homo sapiens
gattctttcacttacgaggactacaggttggtgtgggctgtgagtgtgtctgtgtattgagggtggtttctaagtgaagtgggatcctggaagggagggaagggcttcagtgagaagtgacctgctgtgaccgttaaagcatccaaacagagctcatctttcagaagttatcaggagcagcttggataagtatcagcattttcatagccatgtagaaattgccattaacctgtcatggcaggggattagctgaggtagccaaatgctacttgagattaacattagtgttgggtggtcctatggatttttcttttcttatttaaaaaagactatgttagtgtaaaatggggactttttttgaacggagagatttaattcactgcacagtgtaataaaaaagtcacattttacatttcttacaattcayagaggatttctgatcagaaaggagttttatggtttgcttttcaatgaggcttaaaataggtgcagagtcagcatttgggcaaaagagggttgggttggggggtgtcggggagtggattttgtgagtcacgaagatccgggaaggggcctgagccctgcgcaaagccgtccttctggctctgcttcttgggaacag

SEQ ID NO: 786652 - DNA, 651 bp, Homo sapiens
aacgtgaattattcccccaagtgtttgataaatgctgctgcaacacaggtcgtcttaaggatgctctgggagtttctcttggggaagacatagctctgcagatcaattgcctaatcccccctgacagttgagataaatttaactctttaaggcgttgcttgcgttgctcagcaggttagtttacctgctgcactgggcgctggaggcaagcttcatgtctgcgtgaggctgggacatttcctggcgttgacgcctgtacctttcctagcttgttgatgtataccaggaggaagcatgtgattgccacctctcgtatcagctttacacctgagataccttaccaaaaatattaaatagtctgtaaagcttagtgttaatttctaaaaggcaatagcattgtagtrcttgagtttccgactctagaagccccagagccttctagaactttgatgaccaatttgtccatagaattatcttcttataggattaaaagtttccaagcctaataataaaaaatcttttttgaaaacatatatacagttcaaacataaaataacatcatgagacagctgggttttcaaactattccccggcaaagttcgagttcccgtggagctgggatagcgccagactggggtcgggatcccaagc

SEQ ID NO: 786653 - DNA, 622 bp, Homo sapiens
aaaagcgctttacagtgttattttgcaagacttgagccctgagtggatactgagtgtggagcagcctggttttgtacatttttgccacatgttgagatgccatgggagctggtgactcacgcgccaccgacgttcacaaaagctcccggctcggagcagagcattgaagggaagggtctggctgcttggcgtatgttaaccaggctgggtactgagcgtcttaaaagccaagccacgtttgcctttcaactttactttgtggtgacgaaagaggaggtctctttcttcaggggcttactcagcgctgctggatctgaagatgcccgggaggagggtgaggggtgaaaagggcatcctaaggcaggatgggacacagcggcctctccagcttaactcagtattctctgaggcacagaatactggagatctgagacccctgaggtgcaagccctcccctcaaggatctaagcaggyggtgggctgccgctggcttctccccacagctggtggggggcagaagccctgttccacaggcgacaagtgtgggtcccagccatcatgtttagccaatggtcttgtccgtgttttctccccaaaaacgctttgagttagtgatgacgtc

SEQ ID NO: 786654 - DNA, 560 bp, Homo sapiens
cgcttaattcctaggtgatgggttgatgggtgcagcaaacctccatgggacatgtttacctatgtaacaaacctgcatgttctgcacaagtatcctagaacttaaaacagaaatggtggctgaatgatggagaatcaggaattcaactcatttttagttgttgaataatgtgtaagtggccaaggctgaatgaatacacgagtgagtggatgaacttgtctgagactcagccttcttctctgtaaagtgaggaaggtagtattaagagctactatcttcctsctctggggaagattagctaatgtgtgtggacctcattagagctggtcacaaattttccacaccccttctcagtgcacattaggaatactgttccctgtccctttgaagttaagtatggccaagtgacttctttcgctaatgaaatgtgagtgtacgtgatgaatggcccttctgggtgaaagctttttttttttttttttccctgagacagagtctcactctgtcacctatactggagtgcagtggcttgacctcggctcactgcaacctccaccatc

SEQ ID NO: 786655 - DNA, 591 bp, Homo sapiens
cactgcaacctctgcctcctgagttaaagcaattctcctgcctcagcaccccctagtagctgggattacaggcactcaccaccatccctggcttttttttttttttttttttttttttgtatttttagtagagatggggtttcgccatgttggccaggctggtctcgaactctggacctcaggtgatccacctgcctcggcctcccaaagtgctgggattacaggcgtaagccactgcacccagccacacatytgtttacaggatggtttactgaatattttaatcccactgttgagacctactgcttagaaaaaaatacatttctttaaaaatattactgtttattgacaatgcatctggccacccaagagttctaactgagatgtaagaagagattcgtgttgttttcaggcctgctaacacagcatccattctgcagcccatggatcaagaagtaatttcaactttcaagtcttattatttaagaactacattttgtaaggctatagctgccataggtagtgattcctctgatggatctgagcaaaatacattgaaaaatcttctgaaaagaattcagcattctagat

SEQ ID NO: 786656 - DNA, 602 bp, Homo sapiens
cccaaagagctgggattacaggcatgagccaccgcacccagcagataattttttttttttaaacggaggcttactctgttgctcaggctggagtgcagtggtatgatcttggctcactgcaacctccacctcccgggttgaagcaattytcctgcctcagcctcccaagtagctgggattacaggcgcacgctaccatgcccggctaatttttgtattttcttttttttagtagagatggggtttcaccatgttggcgaggctggtctcaaactcctgaccttgtgatctgcccacctcagcctcccaaagtgctaggattacaggcgtgagccactgcgcccagcctaaatttttaaattctaaaaagatgagttaactggatgtggtattgcacacctgtagtcccaaaggagtctgaggcgggaggatggcttgagtccaagagtttgaggctatagtgagctatgattgtgccattgcagtccagcctaagcaacagattaaaaattaaactttttttaataaataaaaaatgggttgcaaacagggaagcagaatgctggtgcaggcctgcaggatggaatgaaacagacacagaca

SEQ ID NO: 786657 - DNA, 636 bp, Homo sapiens
actggtagcttgaaaccagccatgatgggagtatttacaccacaaaataggcaaatgctaaaacccggggcttttatttcccagaaagccagttgttaaacatttccctgcgcatcactaactaaagggaagggtaaacaccctgatggtgaaggggaaagtttggaaagacatcagcatatacatggtcaaaatgaaggaaaagaagcaaattagtacatgagattccaggcaagatgtatcctagaggctaatttattatatagggatgatgttcctctctttttccttcatagcactggttgtcatgacatttcgacccaaaacattgtattttatttatttattttttaaaagagacagagccmctcacagagtcacccagtctggagtgcagtgctgcaatcagagctcaccacagcctcaatctcctggactcaagagatcctccctctttagcctcctgagtagcagctggaattacaggcatgcaccaccacacctggctaatagactcaggacattttcatgtaaccctgtggactttgtttatgttctttactccactaatgacataggctgttagtaaacaaaacaaaaaacattgtaagaataaagagtattgtgtttagaatt

SEQ ID NO: 786658 - DNA, 621 bp, Homo sapiens
tgaataaatgagggcacacctggtttttaggacttccctggatggctccatgcttcctcctggaccaagtgtgttcagatgagaatggcccttccttgctgtgggcaccctctttgctagggtgccaaggtcggagctgatattggttatctcatcgggccttgcagcagcgccgcagatattctgcctcccattttgcccgcggggacgccgaggcccggcgccgcatcctgccgcccgttttrcccgcggggaagccgaggcccgatgccgtaccctgccgcccgttttgcccgcggggaagccgaggcccggcgccgcatcctgccgcccgttttgcccgcggggaagccgaggcccggcgccgtatcctgccgcccgttttacccgcgaggaagccgaggcccggcgccgtatcgtgccgcccgttttgcccgcggggaagccgaggcccggcgccgtatcctgtggccgttttacccgcgggaaagtcgaggcccggcgccgtatcctgccgcccgttttacccgcgaggaagccgaggcccggcgccgtatcctgccgcccgttttacccgcggagacgccgaggcccgatgccgtatcctgccgcccgttttac

SEQ ID NO: 786659 - DNA, 608 bp, Homo sapiens
cacattcaaatatctattgagtataaacaagtctattgagtataaataagtctgagttactgggtctctaaaggctaacatgttactctttctagggatcttttgtaggaagtgatttgtttttcaacaaaaaagcaagggaaggaaatgaagagctttcccagtaaaaaaattacatgggatcaaacacatcctacattgtttttgtttttggttatgtcaagaggctccaaccacttgcctatcatcgagcactgagtctgggccacscactggtgagctgttcacattcctcagctcagctaacccatgaggtcgtgctgctaccatcattggacacatgaggaggccgggctcagagtggtcaagctggcccagctcccacgattagtagcggcggaactcagagtcgctggagctctccccttggcatgttcatttattgaccaaatattgattgagctgatactgtgtgataagttcagggactataggatcaactgagtatgaacaccttcaccctcttccaggtgggcgtttgtgttctgggtgttgtccacgctggacgtgccagcatctcccactgagccagatgttccagggctaag

SEQ ID NO: 786660 - DNA, 608 bp, Homo sapiens
cacattcaaatatctattgagtataaacaagtctattgagtataaataagtctgagttactgggtctctaaaggctaacatgttactctttctagggatcttttgtaggaagtgatttgtttttcaacaaaaaagcaagggaaggaaatgaagagctttcccagtaaaaaaattacatgggatcaaacacatcctacattgtttttgtttttggttatgtcaagaggctccaaccacttgcctatcatcgagcactgagtctgggccacgcactggtgagctgttcacattcctcagctcagctaacccatgaggtcgtgctgctacyatcattggacacatgaggaggccgggctcagagtggtcaagctggcccagctcccacgattagtagcggcggaactcagagtcgctggagctctccccttggcatgttcatttattgaccaaatattgattgagctgatactgtgtgataagttcagggactataggatcaactgagtatgaacaccttcaccctcttccaggtgggcgtttgtgttctgggtgttgtccacgctggacgtgccagcatctcccactgagccagatgttccagggctaag

SEQ ID NO: 786661 - DNA, 615 bp, Homo sapiens
atatataatatctcctattggttccgtttccctggagaaccctgactaaaccaccttcctagagaatctagaaagtagactttgcaggaacattttctcccttttgctagttgttttgtcttgtgtgaacctgaaagagcccattctccgaaacagctcttaagcatctaactgggcctagtttccaaatagagccaagcagccatttgctgactagaggtcacacacatactctgtgttccaggaaagcacacacccttgccatgtaacttagggacattcaaggctgttttttcctgttcatgccacctgaatcagtagctgtgggaaaaccttattttcctcctggacctgagcaatagactgtgacagcatcggccaatcagaactgagcagtttacatcccacaattgcataagtggcccagagtgggargctgggtaagagctttctctatcaaagacaaccactctcttggttctctccgggcccacctttgttttgtactgaaggctgcatctccccagtttgcaaactgcttgtgcaaatagagtctctgttaacctaatgcttctttctcaggtgtttggttaacacttgtacatggtaggcatt

SEQ ID NO: 786662 - DNA, 622 bp, Homo sapiens
catataatagaaaagaagaaatatctatagtcaataatctaagcttctaccttagtaaactacagaaagagcagtttaagcctacagcaaacagaagaaaaaaataaaaatgagagcaaacatcactgaaattgaaaacaaaaaatcaagagagaaaacaaaaccaaaagttagttctttaaaaagatcaatacgattgataaactctaaccaggcttatcaagaaaaaaagacagaaacacaaattactaatatgtggtacataagaggagttattattactgactccatggacttcgaaggatgataaaggagtattatgaaccgtttgccccartatttgcctagcactttgggaggctaaggcgggaggattgcttcagctcaggagttcaagaccagcctgagcaacatagcgagagctcgcctctactaaaaataaaaaaaaaaaataagccaagggtggtggtgcacacctctggtctcagctactcagaaggatgaggtgagaagatcacttgagcttgggagaatgaggcggcagtgagctatgacagcaccactgcactccagcctgggtgacagagcaagataaaaaaaaaaaaaaaaaaagacatcatta

SEQ ID NO: 786663 - DNA, 595 bp, Homo sapiens
tcatcagggaaatgcaaatcaaaaccacaatgagatacctcttcatacctactacgatggttataatgaaaaagacaaatagtaactattggcaaagatgtggagaaattagaaccttcatacactgctggtagatatgtaaaatggtgcagctgcttcagaaagcagtctggcagatccttaaaaattaaacagagttrccagcaactccacttctaggtatataccaagggaaattttttagtaagacaatctaatagaaaatgaaaacacgtccacctaaaaatttatatgccaatgttcatggcagcattattaatcatagcagattactaataatagccaaaagtgggaacaacccaaatgtccatcaactgatgaatggataaataagatgtggtctatccatacagtggaatatttcttgacaataaaaaggaatggagtattgatacacgttatgacacggattaaccttgagaacattatgttaagcaaaagaagccagtcacaaaagaccacgtattgttatgactccatttatgtgaaatgtccagaataattaaatctataaagacagaaagtagattagtgg

SEQ ID NO: 786664 - DNA, 605 bp, Homo sapiens
ggcaggaagatcatttgagaccaggagttggagactgcctaaggaacaaagcaagacccccatatctctaacaaatattaaaaaattagccacgtgtgatggcatgaacctgtagtcccagctactcgggagactgaggcaggaggatcactagagcccaggggttcaaggctgcagtgagctaggatcgtaccactgcactccagcctgtgacacagtgcaactctatctctaaaatcatcccaacaatttttaaaagctgtaattaaaaaaaattctgttaaacaaattctagrttaatataaacagaaaaaaataaatgttagaaaggaatactcccgaatcttaacagtggttgaattttggtgacaagtcccaagacagtttttcacattttccttgacaaacaccttttccttttaaaatgagaaaaattaggacctttgttttccaaaaaagtccaattttcacttaaagcatttaaaaattatctatatgctgagaatatgactaagcccatatgtttaaagacattccctatatacgtatgtattttttattattgtttaaatcaagctaggagctaccccagaacaaaaagaaaa

SEQ ID NO: 786665 - DNA, 615 bp, Homo sapiens
ataattgaattatcatgttatatagtctcttttaataattagcagttaatggaagaaaaaagcatgttctcattaataaatataaaaaagcatttaagttaaataaaagaaaaaggtagcttttgaggaaacttcagtctgaattgtccaaatagactgaaaggactttaagggcaaaattttgtttgggtttgggaataccaaaatttaggataaaatatttcttttatccttctttttttgttttgttttaagagaagaaaaaatttayatagactctttgtataccagtgagaggaagtatagcatagaaggccatctaaaggatgaaattcccataaggagttttctgaaccacttatatcaactggtcagaacttagttttaattaaatttgctgggctggggatggtggcaggacaatagcctgttttaaggatagagagccagctttaactttaactttgaatttcctggctccaatccattggtgtcactacttcagtgttatttaaatgcaggattttccatttaatttccttttaagggagataaaaaccacagtttctttttcagaaaactgccaaagagtctccctgtgctttattaagtaac

SEQ ID NO: 786666 - DNA, 615 bp, Homo sapiens
ataattgaattatcatgttatatagtctcttttaataattagcagttaatggaagaaaaaagcatgttctcattaataaatataaaaaagcatttaagttaaataaaagaaaaaggtagcttttgaggaaacttcagtctgaattgtccaaatagactgaaaggactttaagggcaaaattttgtttgggtttgggaataccaaaatttaggataaaatatttcttttatccttctttttttgttttgttttaagagaagaaaaaatttacatagactctttgtataccagtgagaggaagtatagcatagaaggccatctaaaggatgaaattcccataaggagttttctgaaccacttatatcaactggtcagaacttagttttaattaaatttgctgggctggggatggtggcaggacaatascctgttttaaggatagagagccagctttaactttaactttgaatttcctggctccaatccattggtgtcactacttcagtgttatttaaatgcaggattttccatttaatttccttttaagggagataaaaaccacagtttctttttcagaaaactgccaaagagtctccctgtgctttattaagtaac

SEQ ID NO: 786667 - DNA, 556 bp, Homo sapiens
atctctgagtattgttatgcatattttaaaaattagctttccaactttttatgataatatatattgttttcactaatacaagtgttattaaaaaggtctggtagagattggctatttttcatttcagccttgagattattgggagtggagagggcccttttatgaaatgaagtctcttatttctttggggagggagtagaacatttggtagtgtgtctttccygatagaaagagaggaatgtgacccagcagggcctggggcagcagatactaactcagctggatttcaagaacaaccattggatcctgatttagtggaatgcactccagactgcttagtgtcatggttaagggtgctagttttgtagccagagtttctagtttatagcctagttctgccacttgtgagctgaattaagttttgggtaaattacttaatctctgtgtgtgtgtttcagtgtttccatatatgaattgggaataataacactctctgtgccatggagtttttaagagaataaactgaattattgtgtttaaaattgtcagcagagta

SEQ ID NO: 786668 - DNA, 651 bp, Homo sapiens
atgatttcttcttccttattaatatccttttctttctgattgaagaactctctttagcatttttttaggacaggtcctgtgttgataaaatcattcagtttttgtttgtctgggaaagtctttatttctccttcatgtttgaagaatatattttgccagatatactattctagggtataagtatttttttcttcagcactttaagtatgtcatggcactstctcctggcctctacagtttccactgaaaatctgctgctagatgtactggagttctatcatatgttgtttcttttctcttgatgcttttagaatcctttctttatccttgatccttaggaatttgattattaaatgcctggagctagtcatctttgggttaaatctgcttgatgttctataaccttcttgtacttaaatattgatctctttttctaggtttgggatgttttctgatattatctctttgaataaactttccatccctatcttcttctctacttcctttataaggcctatgagtcttagatttgctcttctgaggttattttctagatcctgaaggcatgcttcggtttatttttatttttttcttctcctactgtatattttcaaatagcctgccttcaagctcaccatttttttctgcttg

SEQ ID NO: 786669 - DNA, 586 bp, Homo sapiens
atataaaataaattcgaacaactcaacagaaaaaaaaaaagaattccattaaaaaatgggcaaaggacatgaagagacatttctgaaaagaggacatacaaaggcaaacaggtatatgaaaaaaatgctcaacatctgtaatcatcagagaaatgcaaaccaaagctacratgagttatcaccttaccccagttggaatggctgttattaaaaagtcagaaaattacaggtgctgttgagaatgtggagaaaagtgaactcatacactgttggtgggacagtaaattaatacagccactatggaaaacagtgtgtaaatttctccaaaactaaaagtaccatatgattcagcaatcacattattgtttatccaaagaaaaagaaatgagtatattagagggatacctgcactaccatgtttattccagcactattcacaattgcaaaaatatggaatcaacctaagtgtctgtcaacagatgaatggataaagaaaatgttgtatacacacacagtggaatatatttggccataacaaaatgaaattctgtcatttgcagcaacacagatggaactggagattatt

SEQ ID NO: 786670 - DNA, 533 bp, Homo sapiens
gattcatttctgaagatttgtttgatgtggtttattcatttttattgtggaagaatagactttactagtttattcatttgtttatccatatccttgtcaatgaacctttggatatttgagtggttccccaatcttttttaaaaaaattttttttaatactttaagttctagggtacatgtgcacaacgtgcaggtttgttacatatgtatacatgtgccatgttggtgtgcygcacccattaactcctcatttatattaggtatatctcctaatgctttccctctgcccctacccccaccccacaacaggccccagtgtgtgatgttccccttcctgtgtccaagtgttctcattgttcaattccctcccatgagtgggaacatgctgtgtttggttttttgtccttgcgatagtttgctgagaatgatggtttccagctttatccatgtccctacaaaggacatgaactcatcctttttaatggctgcatagtattccatggtgtatatgtgccacattttcttaatccagt

SEQ ID NO: 786671 - DNA, 656 bp, Homo sapiens
tccatattccttcacagtctaagcctcttagaagagtgtgattaaaaaattgcggccgggcacggtggctcaatcctgtaatcccagcactttgggaggccgaggtgggcggatcatgaggtcaggagatcgagaccatcctggctaacacagtgaaaccccgtctctactaaatatattarccgggtgtggtggtgggcgcctgcagtcccagctcctcgggaggctgaggcaggagaatggcgtgagcctgggaggcggagcttgcagtgagctgagatcgcaccactgcactccagcctaggcgacagagccagactcggtctccaaaaaaaaaaaaaaaaagaaaagaaaagaaaattggattagtacttggagacaaaagatttcccagcaaaaagcctcatggatcacagcgtacatataccctcaaatacgacttgtggaaatgtttccataagcaataaagtaaataatttttaaaaacacactgcttcctcaataattaaacatagaattatatgatccagcaattccatttgtggatatataccaaaaaaagtgaaaacagggactcaaacagatgtgtacacccacgttcatagcaaaattattcacaacagccaaaaggtagaagcaactcaggtgtccacaga

SEQ ID NO: 786672 - DNA, 644 bp, Homo sapiens
tctttgtgtggaagctctaaagtggcctttagccaaaagtcaatcaaaagttttgagcaagatcctaatatagttgatgactgatgcagcccttgagctgacagctggtgtagcatggatggctggattcctgatgtgaaagtatgagaccagaagcaactgaaacgcccaactctctactctcattctgctctgtgctgctccccctcctccccactgcgggccccacacgaagccaatactaattccccagtttctgccttttcagagacccactgtgtgccctgcccaatcaaagggaaaaggtgggatggaaaaaaggaaagaaaaatataagataattattatggctcctgacagctctgtcagtaggataagggcytgagatatggaaccatcctctcttgcaaacagggagcatgcatgtggaggaccaaaggtgggaggaaggcttgaaatcaagagaatggagggtgagaaagggaagtgcagggagtggggtctacagccccaaaggtgagcctcaggaaggcctcacctctctgggcagtgccaagaatcctggggaagaaaatatgaggagtggcctggctcccagcccttgtgtcctacttcccctctcccatgcctcattatacctgaag

SEQ ID NO: 786673 - DNA, 598 bp, Homo sapiens
tcaatagaacaaattctaggagacgaattccttagtcaaaaattatgaatatgtttacatatagccactctttgaaagcattaatttacaatcattgtggctttttttcctgctgttgcttttcattgttagcatattgcttattcttacaccgcttcagtttccttaagttgatgkcaccagaatatgaggtccttggggttgagaactgtaatattttcatctttgtgtcccctagggctacactactgagtgtggtagtcactagccaaacatggctgttgggtacttgaaatgtgtctagtgcaactgagacactgaatttttcatttagttaaaatttaaaatgaagggagatcaatttattttcaacaaagattccaaaacaattctttgaggaaatggtgctggatacacacatgcaaaaagatacatttagaccacaccccacactatacacaaaaataacttaaaacagttcagagacttacatgtaagatctaaaacttacaatttttggaagaaaacgtaggaaaagtctttggttaggaaacaagttcttacatacaataccaaaagcataatccacaaaagacaa

SEQ ID NO: 786674 - DNA, 540 bp, Homo sapiens
atgagtactgatacatgttattaatgtaacatggattaacctcaaaaacatgctaaatgaaagaatccagatgaaaaggccacatattttatgattccatttctatgaaatgtccagaaaaggaaaatctatgaagacagaaggcagtggctgcctgaagctggtggtggaaatggcaatggactgcaaatgggtgtaagggatccctttggagcattgggaatgctctaaattggattgtggtgatgcttgcayaaatgtaaattttccttaaaaataattgaattgtataaaaggggtgaattttatgctatgtaaattataccgcaataaagctcttaaaaaactaaagcagtgtaaaatactttcggtaaaacacagctttgttgttttggtaggattgttttacttcaacgatcaacataagatattgtcgtattatagtaacatatcaagaatatgtgttgtttctagtgtatacacaaacatcaccaaactagttgttgtcaatagattgattggctccagtgcgtttttctc

SEQ ID NO: 786675 - DNA, 638 bp, Homo sapiens
gggatggctgggtcaaatggtacttctagttctagatccctgaggaatcgccacaccgacttccacaatggttgaactagtttacagtcccaccaacagtgtaaaagtaaagtggatcttacattaggtcttcgatccattttgagtcaatttttgaactcttaggagaaaacataagtgtaaatcttcatgaacttgttgcctaagcaacaatttcttagatatgatacctaaaacacaagcaacactccgcccccaccccccaamaaaaggtaaattggacttcataaaaattaaaatcttggccaggcatggtggctaacacctgtaatcccagcactttgggaggccgaggcaggaggattccttgaaccaagagtttgagactaggctgggcaacatggcaaaaatctgtctctgtgaaaaaaaaaaaaacccacaaaaattagttgggcgtggtggtacatacctgtagtctcagctatggggggtgaggctgcaggatcacttgaggcagggaggtcaaggatgtggtgagctgaaatcatgctggtgcactccagcccaggtgacagcgcgagacactgtctcaaaaaaaaaaaaaaaaaaaggccaagcatcgtggctcacacctgtaa

SEQ ID NO: 786676 - DNA, 627 bp, Homo sapiens
gcaggaacttctagtctcagacaacaggctgcctctcctaaatgcaaacagagatgcattaaggaaaaaggacttcagaaatacatgttgctcttatgctctttttgcatgctaaagtccaaagtcttcagctgaagatatgaatggttaaagagtatattcattgttaaatccgtattttcttagctgataaacttcagagccattaagaacccagtgttactgactttccaagagagaacctcagtgttactgaccgtccaagagaaagcatgcaacttttctgtggctagattatggaacattttttttctatagagtaaaaattttggattagtgtttgctaggacacattttaggaaatcaatatgctcaamctgttagtgtacaatacaggctaatgcatgaatgtgctggcttttctttgctagccaatcctaatactacatgtgcaacacacatacatacacacacttcaatggtatattaattgtatactggcagtgacatattattaaacattcaatatgtatcaaaaagactttcttttaaaaaaaatgaaagacgtacaattcccttaccctaatgccaaatttaaattttaaaaattactttattcataaacat

SEQ ID NO: 786677 - DNA, 633 bp, Homo sapiens
ttaaaagcccttcaatatatacgtgttttctttactcaaataattactgaatggcagattcatataatcaccagaacaattgtgaggtatacatgatagtccaagacaacagatattcaccttaaacttctgtatttttcaaaastaatgttataagcaatgttattttcaggaagctaaaattcttacttttctacaatccagtctctctgtgcccctatatcatctgcggcatctttactactgtagccattgccagtcagacccatctctcggatctcctgtggcactgacatttaccagcacacaccctccaacttcattactctgcatgtgccaaagtggggttcctaactagatcgtaaattcctgaagggcaaggattatatactatttgtcttttgattcccacagaggtttatagctaatgatacatgaaaaaatagctgttgatagattgcttctatccatccttcattattaatgacatttgaaagaaaaacaacttaagacttatttccagtacagaaagaattcagtttagatgaactgcatgaaaagatcttattctcaattgatggatattttcatgttcaggctgagcttatataagaactgcattgctgagacaga

SEQ ID NO: 786678 - DNA, 403 bp, Homo sapiens
aaaaataccacattgtcttgattcctgtagattcgtaagagtcttaaaatcagatcgtgtttggcctccaattttttgttatttttcaaaaatgttctggctcatctagtcccttgggttttcatatgaatgttaaaatcagcttgtcactttaaaaagttgggattgtgattggttayatttcgtctatagatccatgtaagaataatttacatgttaacaatatttagtaatgacccttaaagtaagcctcttcatttatttaggtgttatttcactcagcaaatgttttgatcttttgtcaggtctagtcttatatagtccattttcacagtgctaataaagacatacctgggactgagtaatttataaaggaaagacgtttaattgacttacagttcag

SEQ ID NO: 786679 - DNA, 403 bp, Homo sapiens
aaaaataccacattgtcttgattcctgtagattcgtaagagtcttaaaatcagatcgtgtttggcctccaattttttgttatttttcaaaaatgttctggctcatctagtcccttgggttttcatatgaatgttaaaatcagcttgtcactttaaaaagttgggattgtgattggttacatttcgtctatagatccatrtaagaataatttacatgttaacaatatttagtaatgacccttaaagtaagcctcttcatttatttaggtgttatttcactcagcaaatgttttgatcttttgtcaggtctagtcttatatagtccattttcacagtgctaataaagacatacctgggactgagtaatttataaaggaaagacgtttaattgacttacagttcag

SEQ ID NO: 786680 - DNA, 403 bp, Homo sapiens
aaaaataccacattgtcttgattcctgtagattcgtaagagtcttaaaatcagatcgtgtttggcctccaattttttgttatttttcaaaaatgttctggctcatctagtcccttgggttttcatatgaatgttaaaatcagcttgtcactttaaaaagttgggattgtgattggttacatttcgtctatagatccatgtaagaataatttacatgttaacaatatttagtaatgacccttaaagtaagsctcttcatttatttaggtgttatttcactcagcaaatgttttgatcttttgtcaggtctagtcttatatagtccattttcacagtgctaataaagacatacctgggactgagtaatttataaaggaaagacgtttaattgacttacagttcag

SEQ ID NO: 786681 - DNA, 600 bp, Homo sapiens
acctagcctgtggttactaaactttctgaaactaaggtaagtgattgtcctggggaagcagtaagtagcagtgcccaaccaaaatctcagtcaggcagaagacaactcttaggaagacggtgtttgtactagattttcagctttgtttgggaaaatgtttataaacttttataaatgtctgcattgaccaacgtttcttytaggctgaggcaggagaatcacttgagcccgggaggcagaggttgcagtgagccgagattgcaccattgctctcctgctctccagcctgggcgaaaagacaactctttttttgagataactctgtctcaaaaaaaaaaaaagaaagaaagaaagaaagaaaagaaaaaataagattgatctctaaaatttttttcttttcatttcattttagttttaaactttctcgtgttttatttttaatatgaattttagaattaccataaagagaaaatatctctgttcagacttcaaatactaggacaataatgtcacttacttcattaagaccaggatattttaaccccagcaaaaccggcaaagaaccaacagatttgctatgtatggcctctattgatatga

SEQ ID NO: 786682 - DNA, 532 bp, Homo sapiens
atctttttgtgactagactatttcacttagtaacaaggttcatctatgttgtagcacatgtcagaatttctttcctttttaagactgaataatattccattgtatgtatataccacgttgcgtttatccatttatccaacaytggacatctgggtcgtttccacctcttaactactgtgaataatgctgctatgtacgtgtgtgaaaaaatatataaaattagttaaaaacacacatctgtgctcaagtttttgtttgataagtgaataaaaatgaaaacagaaaagcttgtttcttggaattctgcagttcaaaatcacaaatgcttttatgtgattatacctgacagtgagtaactgatttcctcagtggactaatgcatttgtctttcaaattccaaaaattttactctaatacaatataatcataaataaaacatcattctaaggtatttgtttacaaatggtaatatttcatgaagaaaaatatatggcaaaagattttaaaaatttgtattttgattagttaagga

SEQ ID NO: 786683 - DNA, 577 bp, Homo sapiens
tagattgtttcaaatttgaactactgtatcaattgggctattagtatccacaatatgcaattttgtgcacttgtttaataactcttagcataaatatttacaagggaaatttctgggtcaaaggtttgggactttttttaggggtggagaggtggttgtttttgttttgagacggcatcccactgtctcgcccaagctggagtgcagtggccyagtctcggctcactgcaacctctgcctctcgggttcaagggattctcatgccccagcctcccgagtaggtgggattacgggtgtgtgccatcacacccagctaatttttgtatttttattagagacagggtttcaccatgttaggtaggctagtctcaaactcctggtgtcatgtgatctgcctgccttggcctcccaaagtgctgggagtacaggtgtgagccactgtacctggtcaaagggttttaagtttacaaattttgacacatcgtgcccacttaacctccagaaatgtaccaattcacaattccaccaaaatttatgaaaaggtgctcatttccccaccccattctctttactgaat

SEQ ID NO: 786684 - DNA, 626 bp, Homo sapiens
gcagtttcatggtgcaattttccacaaaggtttctcaataggaaaaatgtcattctgtcagccttgttatcatcagctcctgcactggcccttaaaacttccacccaggagtgatacaagcgacttctacttaccaaaaacaagtttcacacatggggaaaggcaaggcagagttaggaygtttgtgtacagtctgttgattcctacacacaccacacatttcccatgaagtcccttgagtcccttactgaagagtatgttgtttctattcaataaactatcaccaaatttaaaatgaactgaacatgctattagcattcctgacaagagaaattctgtaaggagggcttagtcataggtagggaagatgaggagaaagacaaaagaagaagtgaagaacggatgatgagtgacatataagaagaaaataatgaaagaagagaaataaaggagagagggagaagactgactatgagcattgcccatcctcgccctgaatggctttgttaccacttttctgctcctctgagtccccagtgttgctcatttctctaggacctatttcactgaacaaagagaaacctccaggaaagaggaagcagaagagtagaaagaggttaaatcac

SEQ ID NO: 786685 - DNA, 348 bp, Homo sapiens
aacaaaaactgagggatttcatcaatatcagacctgccctacaagtaatgctaaagggagttcttcagtgtgaaagaaaatgatgttaacaagcaagaagaaatcataagaagctacaaaacttactggtaatgataagcacacagaaaaacacaatattgtaacattgtaacgctgatgtataaagtactattatcttaagtacaaagaytacatgatagggcgggtgtggtggctcatgtttgtaatcccagcattttgggaggccgaggcaggtggatcacctgaggtcaggagtttgagatcagcctagccaacatggtgaaaccctgtctctactaaaaatac

SEQ ID NO: 786686 - DNA, 563 bp, Homo sapiens
acatatattacagtacctttgggatggaaagtaaaacaaagtttgtatgaagccaaaagcaagccagaggaaaattattttaattttcagaagcataaaactgatataaaaattataagccaaggattcaatactagtaaaaatggaagtacattcctgttaataatatgcttgctaacacagagaacacgccatacattaatttctttcttgatggtatttgtacaagatgtaacttaacagaatttctgtgattgtagcagtgagtrtatctgtgtgtgaagctgcatatattatatatcccaactatcagtaataaaaagtaaatttggatcaacaatgttattgccaggcatggtagctcacacctgtaatctcagcactttgggaggctgaggtgggcagcctgattgagtcttgaagttcaagactagcctgggtaacatagcaaaatctcctatctaaaaaaattagccaggcatggtggcacatgcctgtagtcccagctactcaggaggctgaggtgggaggatcacctgagcccatgaggtcaaggctgcagt

SEQ ID NO: 786687 - DNA, 524 bp, Homo sapiens
tgagccatcatgggcacaaaggaaacacccttgagaactgccagggtgtcacgtgatttgtgaatactttgctagaataacgtggagtcagctgctcggaggcaacggtaggtcaatgagtgcttcctttgctaagatccactcacggcagaggcccagtgagggcgctgtggttagtgagggccatttcacaacttggtaactaggtatgcatcttcatggcacgycttccagtcaccacagagtcttgggtggtcctaaccgtcagtgacacgtggcaaacacccatccccccaccgacctgcaccccaacgccaccccggcctcatgttccacgctgttctttttcaggtctagggctctgtagctctgcagcaatggtttagattgcttgttggtggcaagttggtaagtcatacaaattggagaaaaatacaattttacttatcagaaaataatttcaaaatgccattttttagcaacatggcatactgcatgtgaagggcaatttctcccaggtccac

SEQ ID NO: 786688 - DNA, 623 bp, Homo sapiens
agcctaggagttagagaccagcctaggcaatacagcaagactccatctcttaaaaaaaaaaaaaagttaaaaattagctgagcatggtggcacatgcctgtagtcctagctacttagaaggctaacttgagcccaggagtttgaaggtgaagagagctatgattatgctactgcactccagcctgggcagcaaatgagaccctgtcactaaaaagaataaaattaaaaaaaaatataactgagcaagtttttcttctcaactatgtctgaggagaacaaaaagttctttgtaggtacagtggattcagaactcggcatctggtcccacaaaaccagatgttcatccagctgagcytaggacccttgggtgcctgtctctccatccttcctaacacagacctcggtgccagccagcctgtccttctcagtgtcagggagctccgtcccggcccttcccacatcctgcccaggactggctgtgcagggaaggtcacccctcagtgtctgcccactctctaagccctggacccaagcagggcacccaggccagccctcttcctttactcattttcttattcatcttaaaaggaataactgagaagctggagaccaaccctgcaggc

SEQ ID NO: 786689 - DNA, 623 bp, Homo sapiens
agcctaggagttagagaccagcctaggcaatacagcaagactccatctcttaaaaaaaaaaaaaagttaaaaattagctgagcatggtggcacatgcctgtagtcctagctacttagaaggctaacttgagcccaggagtttgaaggtgaagagagctatgattatgctactgcactccagcctgggcagcaaatgagaccctgtcactaaaaagaataaaattaaaaaaaaatataactgagcaagtttttcttctcaactatgtctgaggagaacaaaaagttctttgtaggtacagtggattcagaactcggcatctggtcccacaaaaccagatgttcatccagctgagcctaggacccttgggtgcctgtctctccatccttcctaacacagacytcggtgccagccagcctgtccttctcagtgtcagggagctccgtcccggcccttcccacatcctgcccaggactggctgtgcagggaaggtcacccctcagtgtctgcccactctctaagccctggacccaagcagggcacccaggccagccctcttcctttactcattttcttattcatcttaaaaggaataactgagaagctggagaccaaccctgcaggc

SEQ ID NO: 786690 - DNA, 603 bp, Homo sapiens
cttcagttgtccaaggtgccagtttttcacgtgcaatgctagaagataagtgaggcacccagcagcctcgattagcacaaatataggtatagaccattaaaatgaagaagagcatgtggcatgtctctctgactaaagaaatgccagtgatgaaggcagagtggtgccaccagaaacaagrgggctgaggtcgcctttgggctcatggagagttaatattagccctcttcagacatgaaaaataataattaaacactgcttgtcaattaatgccagcttaaaggaaggcctgcacttagattaagcgaggagcatgggtttcttgaaaacagtgagaaaggaggagggaaaagggtataaagtaatggaagagataaggtgaaaaggagaataattaaacacacatgtacttttcacagagttggggcactcatatttctaattagaatttcaatgcaggagcccaatttaaccttagggagtctttatactcatgtcactgttgtacacagcaatcaatccaactctggcatcttacttgcacgttgaatttttatattacattagtggagccccagtctctttgtatctttaatggatatt

SEQ ID NO: 786691 - DNA, 464 bp, Homo sapiens
aagcttttttcatttgcaagaaaacaaagggctattgtaaattgaagtgctgaaacagcgacagcagtgaagtaattaattgctcattcatgaaagaaaaagtataagtgagaggcaaaagttaacccctcaaaataaagtgtgtggctaactgaacacctatcagctcctctgtgtttaaacacaatggtcctctttgtgctgcaggttgttttgttttgaggcctggtcgcaattgttgatgtcactatatgtattttggaaaamagacacaagcatgcatctatagatttaacttttttctcggaggaagaacttactggctatggtactatattgtgaaagccaaggtaaggaatattctataactagtgtctaacacttttaatacattatatttatgatcatctctgtgattagatgatctaattaaaatatatgtgcagatgtacacacatctatgg

SEQ ID NO: 786692 - DNA, 566 bp, Homo sapiens
agcccaggccaatgtcatcgggccttggatccagaccaagatggaggtgggtcccatgctgggaagcagtgctggggctcccacccctcccccccgacactatcctagccagccaggctgcctgtctccctgggtgggacccatggaggactgaggcccggagcccrccgtgggtctgctgtcctgtagaaggctatgggggcctatgtgaagaagccctgctggcagtatctgatttgggagcaaagacatatgaggacaccactaagaagctgcctgtgggctcacgcctgtaatcccagcactttgggaggccgaggcaggtggatcacctgaggtcaggagttcgagaccagcctggccaacatggtgaaaccccgtctctactaaaaatacaaaaatcagccgggtgtgatgatgcgtgcctataatcccagctacttgggagcctgaggcaggagaatcgcttgaacccgggagacggagattgcagtgagctgagattacgccattgcactgcagcttgggcaacagagcaagactctgtctcaaaaaaaaaaaaaaga

SEQ ID NO: 786693 - DNA, 566 bp, Homo sapiens
agcccaggccaatgtcatcgggccttggatccagaccaagatggaggtgggtcccatgctgggaagcagtgctggggctcccacccctcccccccgacactatcctagccagccaggctgcctgtctccctgggtgggacccatggaggactgaggcccggagcccgccgtgggtctgctgtyctgtagaaggctatgggggcctatgtgaagaagccctgctggcagtatctgatttgggagcaaagacatatgaggacaccactaagaagctgcctgtgggctcacgcctgtaatcccagcactttgggaggccgaggcaggtggatcacctgaggtcaggagttcgagaccagcctggccaacatggtgaaaccccgtctctactaaaaatacaaaaatcagccgggtgtgatgatgcgtgcctataatcccagctacttgggagcctgaggcaggagaatcgcttgaacccgggagacggagattgcagtgagctgagattacgccattgcactgcagcttgggcaacagagcaagactctgtctcaaaaaaaaaaaaaaga

SEQ ID NO: 786694 - DNA, 553 bp, Homo sapiens
aaagtcccatacgagggtcagttcctgagcgcccgatccagcttaatccccttgatgtctcttgttgatcaggcctccccttcctctcctcctcctcctgagcaatgagcctggccaaagaaaatgattgatcttcccagaaagagaactgaaccccagtagagcatagaatttttttctgaattgtgtggggtagatagtggggtgctttagcagatcaggaaagaggccctgcttggctagagcatggcctctgagttcctwaagaacagagaccatgttgagttcacattggtatgtgtcgctcccctgcacccctgccagcacattgtccttagtagacaggcaggaaatatctactgaattgaactgagtggacagaaagtgctttcacaaacaatggttgtttacatggatgaataacagacagaaatgggcattaggcctggcctgcagggatggatgggattcaggtgggccagggcaggcatcccaggaggcggaacagcaggagcaagagcatgggtactgaggaggtgagtgaggtctgccg

SEQ ID NO: 786695 - DNA, 578 bp, Homo sapiens
cctccatggcccaggctctcctgcatgtccttcccaagacccttctgcagcttcttccttgggagaggcccatgcccttcgttaagtccccagcatgcagcagtcgctgcaaagcccatccattcaggtatttggtcgttcattcgtccagtgactattcatggaggtgctaccctgaccrcatcaccctgggtgcaggggacagagcaggaatgacgggagacctcgtccttgctctccaggaatgtatgcacagtggagagagaaagtcagcagtcacagaggtaataatgcattgaccacagtcctctcagcgtaaccatggaggaggtgctgcagatatctagaagaaacacgcacaccgaggtctacagggggagctgaagttggctagggaaagaagtgtggaagagcacttatttaataaacccagcagccactgttttaatgctttacaaatactaactcatttaaccctcctaataactctatgatggagtactattagaaacctcattttacatttgaggggtgaaatgacccatccacaatcaccctgctaggcacagtcttagcca

SEQ ID NO: 786696 - DNA, 565 bp, Homo sapiens
cttaaaataaaataaaatgtgtaaaggaaaaaaatcatttgaccatatatgtgagggtttgtttctgggctctgtcttctacttcattggtttatatgtctgtctttatgccagttccacattgttttgaatactgtrgctttgttttgaaatcaggaaaagtgagtcctttagcttcgttctttttctttttctttttttttgagacagagtctctctgtcgcccaggctggagcacaggggcgcgatcttggctcactgcaagctccgcctcccgggttcacgccattcttctgcctcagcctcccaagtagctgggactacaggcgcccgccaccaggcccggctaattttttgtatttttagtagagacggggtttcaccgtgttagccaggatggtctcgatctcctgacctcgtgatccacccacctcggcctcccaaagtgctgggattacaggtgtgagccaccgtgcccggccagctttgttcttctttttcaagatcattttggctacttagggaaccatgaaattcaatataaattttaggatgagtttttctt

SEQ ID NO: 786697 - DNA, 652 bp, Homo sapiens
acagagtagtttcactgccttaaaaatcctcctattcattcctccttcctcctgcccaaacctctagcaacctgatctttttttttttttttttttttttttgagacagagtcttgctctgtcacccgggctggagtgtagtgaggggatctcggctcactgcaacttctgcctcctgggtttaagctattctcttgtctcagcctcccaagtagctgggattacaggtgcccgccacttatgcctggctaattttttgtatttttagtagwgatggggtttggccatgttggccaggctggtctcaaactcctgacttcaggtgatccacccgcctcggcctcccaagcaacctgatcttttcactctctctatagttttgccctttccagaatgtcatatagttggaatcatacaataggcagcctgctcaggttggcttctttcacttagcaatatgcacttaagtctccttcatgttgtttcgtggcttgataggtacatttctgatatggtttggctgtgtctctgcacagttctcaccctgaattgtaataatccccacctgtcaagggcagggccaggtggagataattgaatcgtggggctgggtttttcccatgctgttctcggggtagtgagtaagtctcac

SEQ ID NO: 786698 - DNA, 652 bp, Homo sapiens
acagagtagtttcactgccttaaaaatcctcctattcattcctccttcctcctgcccaaacctctagcaacctgatctttttttttttttttttttttttttgagacagagtcttgctctgtcacccgggctggagtgtagtgaggggatctcggctcactgcaacttctgcctcctgggtttaagctattctcttgtctcagcctcccaagtagctgggattacaggtgcccgccacttatgcctggctaattttttgtatttttagtagagatggggtttggccatgttggccaggctggtctcaaactcctgacttcaggtgatccacccgcctcggcctcccaagcaacctgatcttttcactctctctatagttttgccctttccagaatgtcatayagttggaatcatacaataggcagcctgctcaggttggcttctttcacttagcaatatgcacttaagtctccttcatgttgtttcgtggcttgataggtacatttctgatatggtttggctgtgtctctgcacagttctcaccctgaattgtaataatccccacctgtcaagggcagggccaggtggagataattgaatcgtggggctgggtttttcccatgctgttctcggggtagtgagtaagtctcac

SEQ ID NO: 786699 - DNA, 612 bp, Homo sapiens
ccactacagtatcatacagagtagtttcactgtcttaaaaatcctcctattcattcctccttcctcctgcccaaacctctggcaacctgatcttttttttttttttttttttttgagacagagtcttgctccgtcacccgggctggagtgtagtgaggggatctcggctcactgcaacttctgcctcctgggttyaagctattctcttgtctcagcctcccaagtagctgggattacaggtgcccgccacttatgcctggctaattttttgtatttttagtagtgatggggtttggccatgttggccaggctggtctcaaactcctgacttcaggtgatccacccgcctcggcctcccaagcaacctgatcttttcactctctctatagctttgccctttccagaatgtcatatagttggaatcatacaataggcagcctgctcaggttggcttctttcacttagcaatatgcacttaagtctccttcatgttgtttcgtggcttgataggtacatttctgatatggtttggctgtgtctccgcacagttctcaccctgaattgtaataatccccacctgtcaagggcagggccaggtggagataattgaat

SEQ ID NO: 786700 - DNA, 603 bp, Homo sapiens
gtctccttcatgttgtttcgtggcttgataggtacatttctgatatggtttggctgtgtctccgcacagttctcaccctgaattgtaataatccccacctgtcaagggcagggccaggtggagataattgaatcgtggggatgggtttttcccatgctgttctcggggtagtgggtaagtctcacgagatccgatggctttacaaacgggagttcccttgcacaagctctttttcccgccaccacgtaagacatcttttgctcttccttcatcttctgccrtgattgtgaggcctccccagccatgtggaactgtgagttcattaaacctctttcctttataaattacccagtctcagttacgtctttattagcagcatgagaacggactaatacaatttctttttagcgttcaataatattttatcgtctggatacaccacagtttatttattcaaaaatgagaaatttttcatgataaagaattatgttaatctttagaaaatgaggaaacctaagaaagaagggaaaaaaccaatcctctgtcgttctacctgttaaagaccatactgttaatactctgctgtatttccttctagtgtgt

SEQ ID NO: 786701 - DNA, 585 bp, Homo sapiens
ttgataggtacatttctgatatggtttggctgtgtctccgcacagttctcaccctgaattgtaataatccccacctgtcaagggcagggccaggtggagataattgaatcgtggggatgggtttttcccatgctgttctcggggtagtgggtaagtctcacgagatccgatggctttacaaacgggagttcccttgcacaagctctttttcccgccaccacgtaagacatcttttgctcttccttcatcttctgccgtgattgtgaggcctccccagccatgtggaactgtgagttcattaaacctctttcctttataaatyacccagtctcagttacgtctttattagcagcatgagaacggactaatacaatttctttttagcgttcaataatattttatcgtctggatacaccacagtttatttattcaaaaatgagaaatttttcatgataaagaattatgttaatctttagaaaatgaggaaacctaagaaagaagggaaaaaaccaatcctctgtcgttctacctgttaaagaccatactgttaatactctgctgtatttccttctagtgtgtgtatgt

SEQ ID NO: 786702 - DNA, 631 bp, Homo sapiens
ggtgggttcgtggtctcactgacttcaggagtgaagccgcagaccttggcagtgagtgttacagctgttaaaggtggcaggtccggagttgtttgttcctcccggtgggcttgtggtctccctggcttcaggagtgaagctgcagaccttcacagtgagtattgcagctcataaaggtagtgcagacccgaagagtgagcagcagcaagattcactgcaaaaaccaaaagaacaaacattccacagcacagaacaggaccccaacaggttgccgctgctgtctcgggtggccagctcttatactcttatttggccccacccacatcctgctgattggcccattttacagagtactgattggtccgtttttacagagtgctgattggtgcatttataaatctttagctagacacagcrctgattggtgtgtttttacagagtgctgattggtgcatttacaaacctttagctagacacagagcactgattggtgtgtttacaatcctttagctagacagaaaagttctccaagtccccacctgacccagaagcccagctggcttcacctctcaataatacctaagtcaatgggtgtggctgtgttcttataagcttttatttacaaaaatag

SEQ ID NO: 786703 - DNA, 523 bp, Homo sapiens
ccataataatctggagggagtgtagtaatgggggattggatgaggccagggttgatgagtatcacctgggggctcatcagcctattttctctcattttatgtatttacattttccttcattagaaaaaaattaagacatggaaaaactgtgatgaggaagagccaagcccagaatattgacatttattttgcttatattttcttttctatgactgcacaaaagagtgataactgatttaataaaaatttacacacaaaatagcaatggtcagcaacaagtcagcatggtgtcctggtggcctcggcaggaytcttcctctgttgttgtcttagtgtctgtgagccttggcattttccagctttccagagaggaaacgagctctgctacacgcaggggcttatccaggttcagcaggtgaagcccgtctgcatcctgagctctgtggggcccccgcagtgtgccctgggagctttccattgcaccacaatcccttctcccgggacacagagcaggcctcggatg

SEQ ID NO: 786704 - DNA, 579 bp, Homo sapiens
ggactaaaaagatgtaacacctaaatgcaatgtgggatcctgcattcggattgggatggggggaagtagagagggcataatttgaaaatttggtaaaatttgaatatggattgtggattagaaaatagtagtaactcccaacctcaagtgatccrcccgtctcggcctcccaaagtgctgggattaacatggcgaaaccccgtctctactaaaaatacaaaattagctgggcatggtggtgggcgcctgtaatcccatttactcaggaggctgaggcaggggaattacttgaacctgggaggcggaggctgcagtgagccgagattgcgccactgcactccagcctgggagacagagtgagactgcctcaaaaaaaaaaaaagtagtaatcgcatcaaggttgaatttactgatttttataattgtacagtgtttatgtaagagattgttaggaaatgcacactgaaataattagggataaagcattgtgatgtttgcaatggtctcttaagtggtccagaaaggaaaagaaagaggatggatggggttgggagggaggcagaaggaggaggagagcaa

SEQ ID NO: 786705 - DNA, 538 bp, Homo sapiens
ttgtggattagaaaatagtagtaactcccaacctcaagtgatccacccgtctcggcctcccaaagtgctgggattaacatggcgaaaccccgtctctactaaaaatacaaaattagctgggcatggtggtgggcgcctgtaatcccatttactcaggaggctgaggcaggggaattacttgaacctgggaggcggaggctgcagtgagccgagattgcgccactgcactccagcctgggagacagagtgagactgcctcaaaaaaaaaaaaagtagtaatcgcatcaaggttgaatttactgatttttataattgtacagtgtttatgtaagagattgttaggaaatgcacactgaaataattagggataaagcattgtgatgtttgcaatkgtctcttaagtggtccagaaaggaaaagaaagaggatggatggggttgggagggaggcagaaggaggaggagagcaaatggggcaaatgttggcacttggtgaatctaggtaacaggggaggtctttgttctcctcttgcaatctt

SEQ ID NO: 786706 - DNA, 640 bp, Homo sapiens
ctggttaccaaattacgtctattttatctcccaatgtttatataatttgttcactcctttccatctccactgcctttgcttaggtctaactgttataatttgtctgagttattgaaaagacctctactgtcattcctctatcaaaacaaggaaagatctctctaaatacaaatctcgctcaaacttttggtactgtgcttaaaatccaaaagtggctctctataacccatagaatgaaaytacatatgttatgtggctgtcctccctgtggcagatactgaaggcaggcaatgtgtgatgtgggatactcagaaacttctgtccttgttcagggactacccctttccagcatatgactggagcacatgacaacctctctggaccttgatttcctcctttacaagaagaggaaattgaaccagaatatttccaactccagtgactttgtgattctgaatcattgccttaaaatatattgtttgcttttaaaaattaatcttatgtttataccaacatccatattaggttgtacaaattttatgtagaataatctcagacatcaactatgtaatttttatgtagcaacaattgattttatctgcagtgattcatgactcaagtgggaaactaaatcccgatt

SEQ ID NO: 786707 - DNA, 620 bp, Homo sapiens
taccaacatccatattaggttgtacaaattttatgtagaataatctcagacatcaactatgtaatttttatgtagcaacaattgattttatctgcagtgattcatgactcaagtgggaaactaaatcccgatttaactaaatcattttaattgacgttctccaccattaaaaggcctgtagaagtccctcaagattaagatacatgcaacctgtgatcctagaaatcccttcctctgtactagcctgaagtgtgagggttatcttattatccagttacatctcttgactctctgctcattcccacccttgcaaactaagctcttctctgttattctcagccccctcaacaaaaatacctcatactatccttctacatctcatgtgatgccccttcctccttgcatgctttctcccattgcccatgtctggctctctcttacttggcctttagaactcagctttgcctcayctcctctaattgccttctctctctttttctgggttaggtgtccctcctctttttcctgttctcttgacacactctgtagatatcactgtgcttctcaaactacattgtaatatatatatatatatatagagagagagagagagagagaga

SEQ ID NO: 786708 - DNA, 632 bp, Homo sapiens
tgctcagtgctggcatggaggaactcacatcgtaaggaggcactatgcgttttccttccactgtttatttttttgctaatttcttttcttttctgcaaaacagtcatattagccagtcagtggagtactttattagaggtagcatgctttagtagctatgtgtcacattgtaaaggagaactaagtttcataattatgaaaaatgcttagagtattcttgtatttatagttttctctrtgaagggaatgagtattctttataggattctgggcagttagtttactttcactgggacttcctggggaatgatgcactatgtgactggatactgcagtcggaatctgaaattgctccgtaaaacagctgtccaagtcacttgcatgcctctcttgaattctatgctccctaacaatccacatctctaacaaaactgtcatagttctatgtttattagtgatgggtctaagctctctgtgggtttttaaagataggtgtataacttcagtgtttcccgtcagctaaagtaaactacaccccatgttgtggggtgttgaggaagcactgcacacagattgtaagctttacatgtgagctttctattgtaaccaagcaactgacacattagacaccc

SEQ ID NO: 786709 - DNA, 632 bp, Homo sapiens
tgctcagtgctggcatggaggaactcacatcgtaaggaggcactatgcgttttccttccactgtttatttttttgctaatttcttttcttttctgcaaaacagtcatattagccagtcagtggagtactttattagaggtagcatgctttagtagctatgtgtcacattgtaaaggagaactaagtttcataattatgaaaaatgcttagagtattcttgtatttatagttttctctatgaagggaatgagtattctttataggattctgggcagttagtttactttyactgggacttcctggggaatgatgcactatgtgactggatactgcagtcggaatctgaaattgctccgtaaaacagctgtccaagtcacttgcatgcctctcttgaattctatgctccctaacaatccacatctctaacaaaactgtcatagttctatgtttattagtgatgggtctaagctctctgtgggtttttaaagataggtgtataacttcagtgtttcccgtcagctaaagtaaactacaccccatgttgtggggtgttgaggaagcactgcacacagattgtaagctttacatgtgagctttctattgtaaccaagcaactgacacattagacaccc

SEQ ID NO: 786710 - DNA, 645 bp, Homo sapiens
tcatagagagatcatataagttgtcccatccttgtaaatctctcacatagtcttatgcatattttctgtatctccagctcagttgtccctcattttgtttctttaattttattacttactttacttgttaatttacttgtagacatttggattttcactagacattcacaagatggtttctgtctgtagttaaatagtggtgggatgggcataagatttagggtactgtggaggggtgctttttaatcatgttgattaatgttgaaagaaatgacttgaggtttggttgatatttatatttactcagagctaattttttgattctgtttttccttttgtttgccttctgaaactccactcrttgtttgatatgagtagaattctgtgtgtataatcagagagaagaaagttctttctcactaagtttatggtcaatctaagtaagcaatgagtttaaaaattactttatagacgaaattaatctggaggtttagaaagtgcattgaaattgaatttgtttcttagctggcaactgatttcaaaactgaagcacttttgagtgctttgagggatgttagccaatgttataggattatttgaatgaacccttcatcctccattttggtgtgacattgggacattaat

SEQ ID NO: 786711 - DNA, 615 bp, Homo sapiens
gctctgagggtatttaagtcatttaaagattaccaggctaaagaatcaagatcctttgaatttcagtgaatgtacttttttatcccatgaaatattttttttgaaaaatattaacaaaaatattctaagaaaaacttttagtagagtcttttagtcatctttatagttgtagttaacttggaaaaggaaaaaaygaaatgcaaaggattctgacagattgaagtcactgctgcctggaattaattctttccattagccttaatattaacccctttaaaatgatgaaaggttttggttaatcctagaattcttaatccccaccttttggagaagcagaaaaaaatactgaagtgatttttgttgggggagtgcttatgctaagtgaggcagtttgtcagattttacttttatgagttgactgtcaagcatttgagaagggagggtgttttttagaaggctgtgctgcagcagattcctcagctaagtgcacatcctgtgatatttcccccactcttccctgatcagtgaaattgcaattaaataactaatatcaactgctccatttccatgatcctcagagcctatggaattagaatatacatatttaaggaggag

SEQ ID NO: 786712 - DNA, 615 bp, Homo sapiens
gctctgagggtatttaagtcatttaaagattaccaggctaaagaatcaagatcctttgaatttcagtgaatgtacttttttatcccatgaaatattttttttgaaaaatattaacaaaaatattctaagaaaaacttttagtagagtcttttagtcatctttatagttgtagttaacttggaaaaggaaaaaatgaaatgcaaaggattctgacagattgaagtcactgctgcctggaattaattctttccattagccttaakattaacccctttaaaatgatgaaaggttttggttaatcctagaattcttaatccccaccttttggagaagcagaaaaaaatactgaagtgatttttgttgggggagtgcttatgctaagtgaggcagtttgtcagattttacttttatgagttgactgtcaagcatttgagaagggagggtgttttttagaaggctgtgctgcagcagattcctcagctaagtgcacatcctgtgatatttcccccactcttccctgatcagtgaaattgcaattaaataactaatatcaactgctccatttccatgatcctcagagcctatggaattagaatatacatatttaaggaggag

SEQ ID NO: 786713 - DNA, 687 bp, Homo sapiens
aacttgaactagtatccattaatatctaagaagctgatttgaaactctgagtatatgagagggaattgtcagctatgagcctcactataaagcagtgattttcaaccaggagtgattttgctccttataggacatttggcaatatttagagacatttctgtttgtcatgactggagaggtcgtggcatctaatgagtagaggccacaggtactactactagacattctacaatgcacaggacagctctccacaacaaagaattttctggtcccaaatgtcgaaagtgccaagattgagaaatcctgctatataggttgatatgggctgtttattgatggaacatccttccaycaatatctttagatatttcctttagatttgatgagattcccacctgctgattgcactctgggaattgaatggaggaagaagacaggatttaaacatttaataagcatatgttgacctaatttcccagtttagggtaaggtgtccctgccttcaacattggtatcctttaatctagagaccctctattttattctctgcatagagaggcagactcccaagagagggaatctggggttttagctggttcttaaattggcttccaggtgattatcttaggtttaggcccactttcacccttcttccaggggaacaagatgtcatcagtttttgggcat

SEQ ID NO: 786714 - DNA, 575 bp, Homo sapiens
acctataaatttgattgactctcagtttccccactgccagtttaggatttagctttcttagatctgctaaatcaattatttcttgcccatttattttctggtttccaaaatcctcttgttgttaccatctctcttactcttttttttytttttaattctttagtgatatttttatgggttttgggagggagcagaggctaatgagaacatttgatcttctgtctttaccagaagtagaaaattagtttttcttctctaatatgttttccgtaatgatagctgcttcatttacaagctaataccaggaaatggctttaaaaaaaacacattggtaagtagaatggatttgtcaggatcttggtttttgtgaggcagagtccagattgaatgctacctcaaaagttcctttattacataaaacaagcaaacaaaaaaacattttccagtagttactttcagcttttctggattttcttttctctttaactatttcacaccctcttatttagtaggtagcatacaattgtctaccagctgatttatataaagactttattgaatttttatttcttcac

SEQ ID NO: 786715 - DNA, 553 bp, Homo sapiens
ggccacatgtataccttcttttgaaaagtgtctgttcattggctggatgcggtggcttgtgcctataattccagcactttgggaagtcaaggtgggccaatagctaggagtttgagaccagcctgggcaacatggtgacaccctgtctctccaaaaatcacaaaaattagacaggtgtggtggtgtgtgcctgtggtcatagctacttgrgaggctgaggtgggaggatcatgtgaacccaggaggaagaggtgcagtgagctgagattgtgccactgcatcccagccagggcaacagaggaaagaaagaaagagagaaagagaaaggagggaaggagggaaggaaggaaggagaggaatgaaggagaggaaggaaggaaggaaggaagctgttcatatcctttgctcatttttaatggggttgtttttctcttgtaagtttgtttaagtttcttatagatgctggatagtagacctttgttagatgcatagtttgcaaaaattttctcccattcagtaggctgtccatttactctgttaatagtttcttttg

SEQ ID NO: 786716 - DNA, 638 bp, Homo sapiens
tctatcaacaagtcctgggaatccatctccaaaatatgccctaaagttactctcttctctccaacactactgctgccatcctagtcaagccacatcactgcttgcctaggctacttttagaactttctaactaatcttgctgcttcttttacctttagccttgcagtttattctccacccagtagccaatgggatcttttaaatacgtaaacaagcatggtgactcaagactatgatcctagcactttgggaggcagagatgggcagattgcttgagcccaggagtttgagaccagactgggcagcatggtgaaaccctgtctctactaaaaatacaaaaattagtaggcatggtggtgtgcacctgtaatcccagcttctctggaggctgagatgagagaatcacctgagcctgggaaattgaggctgctgatgctccactgcactacatcctsggtgacaaagtgagactctgtctcaaaaaactaaagtaataaatatgtaaatgaggtcatgtcacttccttgcttcctattggacttacaataaaactaaagctttttcctgtgactctgctcttggctgttcctctgatcctggctcctgtacttttctccttgttcataaagctccagatt

SEQ ID NO: 786717 - DNA, 585 bp, Homo sapiens
aaaattcaacatcccttcatgctaaaaactctcaataaactaggtattgatggaacatatctcaaaataataagagctatttatgacaaacccgtaaccaacatcatactgaatgggcaaaagctggaaacatcccatttgaaaaccggcacaagacaaggatgccctttctcaccactcctattcaacatagcactggaagttctggtcagggcaatcaggcaagagaaagaaataaagggtattcaattaggaaatgaggaagtcaaattgtctctatttgcaaatgacatgattgtatatttagaaaaccccattgtctcagcgcagaaactccttaagctgttaagtaacttcagcagactcaggatacaaaatcaatgtgcaaaatcacaagcattcctatacatcaacaatagacaaacagycaaatcacgagtgaactcccattcacaactgctacaaagagaataaaataccaagaaataaaacttacaagggatgcgaaggacctcttcaaggagaactacaaaccactgctcaaggaaacaagataggacacaaacaaatggaaaaactttccat

SEQ ID NO: 786718 - DNA, 528 bp, Homo sapiens
aaccatcaatctttggttgttctaatttaccaagtaaactatgttcacttcctaattcaatttaatgaatacctagattatgttttccatgcatttctggccatttgtttatgtaataaatctgttatatcagagtaccactttggttaatatctgatatacaaaggtctggaaactgaaagaaggtcaactggtccatccctatctctccaggtgaacctttatctaaaaggtaccttaaatacaaatgctgaatccaatattcactatttctgtgaaagaaaatggatgctattttggttgtcttataattttacagttcttcratttaattttcttgaaggcaatgtgatatagtggaaaagctctaaagtaagatttaagagactgggctgtcatgctggactctgcatattattttctctttctgaacggcaattttcagtgtgtaaagtaggggtaataatagctacctaacttttgtcaaagtgttttggagctcaaattgcataataaatagataagtac

SEQ ID NO: 786719 - DNA, 566 bp, Homo sapiens
ccaatttgctgtgtgtaagtacttttttcaaacctctttgatgcttcttggacttactagaatttagtgttggttcacagtggtgctattattctgaactacatatttttaggaagcttagttgtggctactgatagttgttaaattttaaaaactaagtggccagatgcagtggctctaacctgtaatcccagcactttaggggggcgaggtgggcggatcacctgaggtcaagagttcragaccagcctggccaacatggcgaaaccttgtctctactaaaaatacaaaaattagctgggtgtggtggtgggcgtctgttatcccagctactcagtaggctgaggcaggagaatcgcttgaatctgggaggcggaggttgcagtaagcctagattgtgccattgcactccagcctgggcaacaagagcaaaactgcgtctcaaaacaaataaaaactaagcttaatgttaactcttagagattaagtaaatacatctttgctttatcaaactaagacctgataaaaattacaggtgtgtgtagaatcaccggaaaatatatgat

SEQ ID NO: 786720 - DNA, 566 bp, Homo sapiens
ccaatttgctgtgtgtaagtacttttttcaaacctctttgatgcttcttggacttactagaatttagtgttggttcacagtggtgctattattctgaactacatatttttaggaagcttagttgtggctactgatagttgttaaattttaaaaactaagtggccagatgcagtggctctaacctgtaatcccagcactttaggggggcgaggtgggcggatcacctgaggtcaagagttcaagaccagcctggccaacatggcgaaaccttgtctctactaaaaatacaaaaattagctgggtgtggtggtgggcgtctgtwatcccagctactcagtaggctgaggcaggagaatcgcttgaatctgggaggcggaggttgcagtaagcctagattgtgccattgcactccagcctgggcaacaagagcaaaactgcgtctcaaaacaaataaaaactaagcttaatgttaactcttagagattaagtaaatacatctttgctttatcaaactaagacctgataaaaattacaggtgtgtgtagaatcaccggaaaatatatgat

SEQ ID NO: 786721 - DNA, 602 bp, Homo sapiens
agaatctaagctaggtatctgtagtctaagagggagaactgattgaagtaaataaatatttaacatgttgaaagcttttatataattttctttcaaaaaacttattcattaaaggtaagcgtaggatttgaaggcaaagtgtttgctaataaaacaaccttttcagaaaataattcaggattataatttcataggtaaccaattaaaaaattctaagatatcaaatgaatgtaatgtagaatttctttttgttaacactgacttattctgttagaatggaaaaaagtatctagaattgtgaaaattagtactaaatcttgataattgtttttgggtacatatgtatgctttcttgttaagtgaatatggatgttaagtrtctgaagtaaagattatatcttattttattcataacctggggcaatgaggtaccttctgagagcattttctttttaataaactataaatgttggatgctaaaatcagaatacagtctcaaaagttaaacctatacaattatcaaaataatatattgttagtgattaggagaatattagggataaattgtaaaattccttaccccatttccttgaaatgtttaa

SEQ ID NO: 786722 - DNA, 609 bp, Homo sapiens
catatgtggccatttaagtttaaatgtaacttaattaaaataaaatagaattaaaaattcagtctctcagttgcaccagccacatttcaagtgtttagcaccatgtgactcactgctactgtatagggcagtgcagatatagaacgtttccatcagtgcacaaaggtctgtgaatggtgctrgaatgtagcagagagaggctagtgttagggagagcatgaacagatatatttaatcagcttttaaaaaatataaagttctataaaggatacagagagtatttaccaattatattgttaagatactattttcagaagttaagaaattaaaaagttctttgttcatgttttaacttgttttaattactaaggattgtacatatcttggttaaaaaaggtaacatagattttttttttttaatgaccagatttcaaaaaagatccttattcaagtatatttttaaaaattatatgccaaattttcatcacagattatacattttattttttggacaataatttagcttagaataaatcctcatatttttaaagtgctggtcacatttgaatttatatttcttttctttttgaaatggggtctcattctgtc

SEQ ID NO: 786723 - DNA, 562 bp, Homo sapiens
caggctggtctcgaactcctgatctcaagtaatccgcccaccttggtctcccaaaatgctgggattataggtgtgagccaccttgccctgccttcccttttaaagagaaggtttaaatgtgatttctaagagctttccctaaattattaccatttttttttttttttgagacagagtcttgctcwgttgcccaggctggactgcagtggtgcaatcttggctcactgtaacctctgcctcccggattcaagggattcttgtgcctcagcctctcaagtagctgggattacaggcctgtaccatcacacctggctaatttttgtatttttagtagagacagactttcaccatgttgcccaggctggtctggaactcctggcctcaagtgatccacgtgcctcagattcccaaagtgctgggattacaagcactttgtgtgagccactgcacccggcctgttaccgtttcttaactgttttcttatccttacatttttgtcgtttttactaattgaagaaaatgaagattcttaaatatattttgctgtaacagaagtatatat

SEQ ID NO: 786724 - DNA, 608 bp, Homo sapiens
tttagcttgtgataccttttataaattttcattacacaaatgaatgcctactaagtcccaaggcctatgataggttctaaacctacaaggaagaaaaaggtacagttttctgcctgtaaagattgcacaacacagtaagagagacatatgtaaataaaaggctaaagtgcaatacaaaaagtggtaaagaatcatgtaagaggaaacatgaaattcacatgatgattacctatatagttctacctattgaactatcagaaaacttcacttaaaaggtagcatttgaatacaaggagatgggataacaatcaaattggtgagaacagtatgaacataagtaaatgagaaaacatatggcttgtacaagagaaccatgatagttsaatgtgactgcagcatatgatgcttgaagggaagtagtaaaaaataaggttggagagaggtggatatgacctttagtagggtctcagaatcaagacaagagagtctagatgcttaatgtctgtatatcaatgcaataaatgtatacatttaaaactcacttggaatgatatgcacgtaagagtattacatatgttaccaccaccacctcatacccaagtacttcc

SEQ ID NO: 786725 - DNA, 594 bp, Homo sapiens
aatacccagcatctataaggaacttaaacaaatttacaagcaaaaaacaaacaaccccattaaaaagtgggcaaacgatgtgaacagacacttttcaaaagaagacatacacatacatgtggccaaaaagcatatgaaaaaatactgaatatcgctgatcattagaaaaatgcaactcaaaatcataatgagataccatatcacgtaagtcagaatggccattattgaaaagtcaraaaataatagatgctggtgaaattgtggagaaaagggaatgcttgtacactgctggtgggagtgtaaattagttcagttactgtggaaagcagtgtggtgattcctcaaagaacataaaacaaaattaacatttgacccagcaatcccattattgaatatatacccaaaggaatataaatcattctaccataaagacacatgcacgtgaatgttcactgcaacactattcacaatagcaaagacatggaatcaacctaaatgcccatcagtggtagataggataaataaaatgtggtacatatacaccatggaatactggaatactatgcaactataaaaagaacaacatcatgtctt

SEQ ID NO: 786726 - DNA, 619 bp, Homo sapiens
cacagtgctagactctttctaaattgcaagtcactaattttatctgagagttttaactcagtgtataactttcttcttttctctggagtctgatatgaggtcaaccaattttacggtggggataaagaagggtgaaatattaagagaaaaagcagcaggggccatatcacctagaagtatgtggttccaagaaacaaactggtgattctactggccattcccatcaatgttccaaagagggacttkgttctattgaccttttctgactctcttgcacccaggaaacttactttctgtccctgtttttgaatctgggcacaggaaagagaagtccgacaggtttttaggctctttcaaatgccatcttagattatattcagaaggcaaacagatactgctagtaggttatcagtagatggagggtgaagggtcagccatggaaagggacatggttttagctggtttgcaggtttttgtctctgaattagttttttattaaaataattgggtctctttataattctgacttgttgaagaactaatctgcgataatgtttctgtgtgtcagttatcattttactccctctcacctccaaattcaccctttgatatgtgctca

SEQ ID NO: 786727 - DNA, 569 bp, Homo sapiens
cttgagggcctgggcttcaacctcaccgagctgtctgagtccgatgtccataggggcttccagcacctcctgcacactctcaacctccccggccatgggctggaaacacgcgtgggcagtgctctgttcctgagccacaacctraagttccttgcaaaattcctgaatgacaccatggccgtctatgaggctaaactcttccacaccaacttctacgacactgtgggcacaatccagcttatcaacgaccacgtcaagaaggaaactcgagggaagattgtggatttggtcagtgagctcaagaaggacgtcttgatggtgctggtgaattacatttacttcaaaggtgagagtcagatcattggtatatgctaaatccacaccaccgcctccaacccactaatttgttgactggttaaatatatttttacaaaaatgtaagtaaaaacgttgtgtctgatagggttgagcaaccctcagggaatgcaatgtgagaatgttgtatgttgaagactctgtagtattgaggtttccattccttcctatctttagacatattttcttcataa

SEQ ID NO: 786728 - DNA, 595 bp, Homo sapiens
cctctaattccatggttggtttccctggtaaccagattctttatgagcctacccaggagcccaccaagacttgcctcgctagaaaaaagatgttcctgtcacccaagaaactgcaagggatccaggagctcttcatcagatgctcttgtcactctggaaattactaagctctcgggaatcaggtcaaagaccaaatattaaacaaacgattctcttagtacccctatctacaaggatsctagaggcactgtctcaggtactcgagccagagactaaatgtatatttcttattattaatatgtcacagtttcacaggctgctagccaggaagccagagggacctccccagtgtaaaatttggattcagacaaggctgcagtctcagcttcttcactaacaatgcactgtggggcaatcgctttacctgtttgggtcttaatttcctcacctgtacatggcagtgtcctctgggcacagagacctactgcagctgtggcagtggaaatgggaggatggacatgggatccgctgaagacacagacctgggagcccctggcttctgactccatggagtgggtgaagggcacaccagtct

SEQ ID NO: 786729 - DNA, 653 bp, Homo sapiens
tcccctcattcttctgagccccaattcagtgattggtgcaatcacaggcttggctacagtgacccattcattgcaggcatggtgagtctctcaatccctctcatttccactagaatctaactgttgggatctatgacccagtcagcatagcaggcctgtggggagctctcaggttcaagcatatgccccccctaatctacaagaaattagctgcagaaaaccaaggaatagaacctggaaaaagagagggtttgctagagctgtccctttccctgtctctggaatgccaacaatagggaggctctttggtcttgtctctcaggagtgcccatgccattccaggaaaatgatggcccagctggtggtgtaaggcttggggggcagcgagtgggcatcgtggtgaaagcctcgggatcagggagctgcgtctgcaggcaggcctgctggccggaaacctgccaggaaaggaaggggctgtcycggggcggggccagggaggggtggagacagggccggctgtggtcagtgacaaatgctggctgcaatccagccagccctctgccctttctgagcccgagggactgccacctccactgtgtgcacactcagctacgggacacagtaagtaccgatgccgcaaagggaggtcccca

SEQ ID NO: 786730 - DNA, 512 bp, Homo sapiens
ggaaggaactcaaaggtaagtttcaagttttaagattggaagggtcaatttctagatttatttgaaaaattgtaaatattagttctatgagacaattgggctagtttcagttggaatcacacagtatgtagacttttcagattggcttctttcacttagtaatatgcaactaagtttcctccgtgtcttttcatggcttaatacctagtttctttttagtgctgaataattccattgtctgtgtgtactatagytcatttttttttgtttttgagatggagtcttgctctgtcacccaggctggagtgcaacggcgcgatctcggctcactgcaacctccgcctcctgggctcaagagattctcctgcctcagcctcctgagtagctggcattacaggcacgcaccaccacacccggctaatttttgtattttcagtaaagacagggtttttaccatgttggtcaggctggtcttgaactcttgaccttgtgatctgcccttcttggcctcc

SEQ ID NO: 786731 - DNA, 653 bp, Homo sapiens
tccatccccatacatgtcattcagtctcacagctttgaatatcatcaacaggcccaacgactcccaaatttacctttccactcattcattcactcaacaaacatttattaaatctctactgtataccaggtgctgttctaggtgctggagatgcatctatgaacagagcaggcaaagatccctgcccctgactgtgtgttctagcagggaagacaggtgatagaatcaacacaacaaaaagtaccacttaagcctacatacaygtactagcggtatgcagaaggcagtaagtgctatggaaaaaaataaatagattgacttgcaggaatcgaggattggtccaaagtttgagcaaaccttgaggcaggcaagagagttagacaaattggggttttttttcctgaataaaatggggagtcactgtcgggttttgaacagaggagtgacatagtcttgcttaggatttaaaaggatcattctgttgcctctgttaagaatatactcttggtggtggtggtgtgtgtagtggggatgggcaaaaattgatgctgggagaccatttggaagctagtgtggtagtcacatgttgggagccacagagacggcggaaagataccaaattccagatgtggtttgctgtaggctaaaggagt

SEQ ID NO: 786732 - DNA, 615 bp, Homo sapiens
gaaaagaaaagaaaacccaaccaacaaagagatactcattggatggctataatgaaaaagagggataataaaaagtgttggcgaggatatggagaaactggaaccctcatacattgttggtaagaatgtaaaatggtgcagctatttcagaaaacagtttggcagttccttaaatctcccacagagttactatatgactaagcgattccactttcatgtatatatccagcagaaccgaaaacacatgtccacacaaaaacttgtacacagatgttcatgggagcaatattcataatagctaaaaactgaaacaacccaaatatccgtcaactgataaacaaaatgggatgccatggaatattattcagccataaaaaggaacaaagtaactgatacatgttacaacatsaatgaatctttcaaacatcatgctaagtaagtaaaagaaaccagacacagaaggccatacaatgtatgactccatttatgtgaaataagcagaataggcaaatccatagtgacagaaagtagaatggggagtggctactaataggtctggatttctttcttttttttttttttttttttttttttttttttgagacagagtcttgc

SEQ ID NO: 786733 - DNA, 472 bp, Homo sapiens
tcctcctaatgacccaaacataagacagggagggacaggagaacatgcgtaaaaagtgagaagggaaaaagaaaggagatattgcatcagaagccttagctggccttcctatgtaatgcagaaaatactgagctacataatatactgctctgaaagaggaaagaagaaaggctttgggrtatccacataatctgaatgtgtttattcatccagtaaataattattaagtgcctattacgtgtacacactgttctaggcactaggaaaacagtagtgaacaaagcagataaaaacccatgccctcatggaacttactatattctagttaaagccacaattatccccatttcctagctatggaaactgagctcagatgggtaagctacgggaaggagattcaattttattttagtgcaatgagaggccattagtggatcttaaaacagagaagtggcatgatctgatttttgct

SEQ ID NO: 786734 - DNA, 472 bp, Homo sapiens
tcctcctaatgacccaaacataagacagggagggacaggagaacatgcgtaaaaagtgagaagggaaaaagaaaggagatattgcatcagaagccttagctggccttcctatgtaatgcagaaaatactgagctacataatatactgctctgaaagaggaaagaagaaaggctttggggtatccacataatctgaatgtgtttattcatccagtaaataattattaagtgcctattacgtgtacacactgttctaggcactaggaaaacagtagtgaacaaagcagataaaaayccatgccctcatggaacttactatattctagttaaagccacaattatccccatttcctagctatggaaactgagctcagatgggtaagctacgggaaggagattcaattttattttagtgcaatgagaggccattagtggatcttaaaacagagaagtggcatgatctgatttttgct

SEQ ID NO: 786735 - DNA, 472 bp, Homo sapiens
tcctcctaatgacccaaacataagacagggagggacaggagaacatgcgtaaaaagtgagaagggaaaaagaaaggagatattgcatcagaagccttagctggccttcctatgtaatgcagaaaatactgagctacataatatactgctctgaaagaggaaagaagaaaggctttggggtatccacataatctgaatgtgtttattcatccagtaaataattattaagtgcctattacgtgtacacactgttctaggcactaggaaaacagtagtgaacaaagcagataaaaacccatgccctcatggaacttacyatattctagttaaagccacaattatccccatttcctagctatggaaactgagctcagatgggtaagctacgggaaggagattcaattttattttagtgcaatgagaggccattagtggatcttaaaacagagaagtggcatgatctgatttttgct

SEQ ID NO: 786736 - DNA, 621 bp, Homo sapiens
atttttatgtgtaagcaatcattatatatgaaagttagtccctagcaataaaattgtactcatgtaaaattttttccttggtttaaatatagtctttcctttccatttgagatattcagaggctatacttcataaayatcaatatctttccaaagtgattggtcattttcttctctaggctcagcagaaaattaggaaatacgtaactcattcaataactaaggataaaaacttccatgcattttagacttatttcttggctattatgtctgcatctcttatctaatggatggatatcccagaaatgagttgcctccactctggcttggtcaattatacttagatggagaagagttgaagggaagggtgggaaccctagctctgttctgttttcccctctgaactacaaaggatcctattaatatctatagctattgagctaacatgtaaagtcttgcctactatttctttttcagggcatggtagatactactgagataaaaataattttctaagaaaccaggattttaataaaaatgtaaattattttaacattagtactgaagttcaggttaataagtatggcagtgattgataaaaatcttatgtactggcaaaaac

SEQ ID NO: 786737 - DNA, 621 bp, Homo sapiens
atttttatgtgtaagcaatcattatatatgaaagttagtccctagcaataaaattgtactcatgtaaaattttttccttggtttaaatatagtctttcctttccatttgagatattcagaggctatacttcataaacatcaatatctttccaaagtgattggtcattttcttctctaggctcagcagaaaattaggaaataygtaactcattcaataactaaggataaaaacttccatgcattttagacttatttcttggctattatgtctgcatctcttatctaatggatggatatcccagaaatgagttgcctccactctggcttggtcaattatacttagatggagaagagttgaagggaagggtgggaaccctagctctgttctgttttcccctctgaactacaaaggatcctattaatatctatagctattgagctaacatgtaaagtcttgcctactatttctttttcagggcatggtagatactactgagataaaaataattttctaagaaaccaggattttaataaaaatgtaaattattttaacattagtactgaagttcaggttaataagtatggcagtgattgataaaaatcttatgtactggcaaaaac

SEQ ID NO: 786738 - DNA, 641 bp, Homo sapiens
tagatagattgagattaacagaggtaagatcactcaagatcccagatggattagtgtgccgagtggcaagaggcaactcagcagccaaagatgctcttggttggcactaggaaaactatacacaggccttccattgtctggaacacccatccccttctttgtctaggtctgtcttgttatgttgcctgacatctagcaggcactcaaatatttgttcattgaatggatacattcaatacttagagcagagggtttgaaattagccataggacactcacaaaaaataagttggtgtgagtgtccaattaatattatacaccaamtatattcagataggataaagttgtctggaggttaaagggggccagtattgattatttactttgtccaggctaaggaagatagtgtccaaaaactgctaggggcatggcggggaaaaaaatctggccaagagtcaaagggatgtgaaggtgtcaaaaagatgtctcttacctctcttcctgctccggctcatgggcactgaccattgttattggttaagggtccttgcatggaattttgatggcagtgtctgaatattatctcatagcctagtggagtttgttagagattttgtaaatttgcttaatcagatatcattt

SEQ ID NO: 786739 - DNA, 641 bp, Homo sapiens
tagatagattgagattaacagaggtaagatcactcaagatcccagatggattagtgtgccgagtggcaagaggcaactcagcagccaaagatgctcttggttggcactaggaaaactatacacaggccttccattgtctggaacacccatccccttctttgtctaggtctgtcttgttatgttgcctgacatctagcaggcactcaaatatttgttcattgaatggatacattcaatacttagagcagagggtttgaaattagccataggacactcacaaaaaataagttggtgtgagtgtccaattaatattatacaccaactatattcagataggataaagttgtctggaggttaaagggggccagtattgattatttactttgtccaggctaaggaagatagtgtccaaaaactgctaggggcayggcggggaaaaaaatctggccaagagtcaaagggatgtgaaggtgtcaaaaagatgtctcttacctctcttcctgctccggctcatgggcactgaccattgttattggttaagggtccttgcatggaattttgatggcagtgtctgaatattatctcatagcctagtggagtttgttagagattttgtaaatttgcttaatcagatatcattt

SEQ ID NO: 786740 - DNA, 620 bp, Homo sapiens
cctgccagatgtctccctcttctccccttgctgccacctcactaaggggtttcacctgcatctgtctctcactcagctctaggtgtgtgtgtgtgtgtgtgtgtgtgtgtgtgtgttttgttttgtttttagctctaggtgtttttattgcctatgcactccctcttctcattggcccttcttcagggcatctttgactggtgacctaattcgttcaaattattgttttaatgttgtaactcctccacaatatacatacatttatagaagcatattttgaaatatttatctatgcgttttcttatttcttttagcactttcagcattaacattagacagwgaggttgaatcttatagccccagggaaggaaggacacaaggaagcacagagagaaggaaagatttcattgagcttctaactggattaaaaatcagacaaacactagaggcaatagacagaaaatttctggattttaatggcaagtgttggtttctgcttctggtaatggtagagtagcttctgtcagaataaccctctctcaaataacgacaaactctgcataaaataaaaacacaaccttcggaaggcattagaaatcaagccaaagcaggcacatgca

SEQ ID NO: 786741 - DNA, 634 bp, Homo sapiens
tttgaaggtctctaataacttgctttatagatctgggtgctcctgtgttgggtgcatgtatatttaggatagttgtttcctctcgttgaattgaaccctttaccattatgtaatgtccttccttgtcctttatggtctttgctggtttaaagtctgttttgtcagaaactaggattgcaacccctccttttattctgttttccatttgcttggtagatttttctccatccctttattttgagcctctgtgtctcattgcatgtaagatgggtctcttgaagacagsgtacctatgggtctttatccagcttgccactctgtgtcttttaattggggcacttagcctatttacatttaaggtcagtattgatatgtgtggatttgatcctgtcatgatgttaactggtcattttgaagacttacgtggttactttatagtgtcactggtctgtgtatttcagtatgtttttgtagtggctggtaataatctttcctttctatatttagtgcttccttcaggagctcttgtaaggcaggtctggtggtaaaaaaaattccctcatcatttgcttgtctgaaaaggatcttatttctccttcgcttatgatgcttagtttggcttgatataaaattc

SEQ ID NO: 786742 - DNA, 642 bp, Homo sapiens
tatagtataaatattttgttcagggattatctgtccttattttgccaccagcaggcatggccaaaccactgagattccaactgggtaacagtttcctgggttgtaaaaataatgaggacttgtcataacagctcatgatttgrtcaggatttctatttggtactgtagagatttttctatttaatggatgtttgcacatacattaatcatagctatgcttgtttggaatgccactctgccatttgtcatattagtgaatagtcacactttcctttcttgtatttcgaagtttccttttggagaaaaaagtctttggggaatagcataggatatatctttgttaacaaattaatttttaggtataatagagacaaatccagcattaagggaaggtctgtaaatgttcagtagaactcttaaattatattgcttatgtgcagttctctcccaaaattttaaattagtttcattctctcttgtattcagtctatttcaatgtgctgagcttggtaggaaatatctgaaaaatgtggttcttccaaaacatcttcttatgtgaggtccacgagacaaagtgtacacgattgccatacagtacaaaggcagtggaattatacactacagttcaaattgcttgaactg

SEQ ID NO: 786743 - DNA, 565 bp, Homo sapiens
tgtcctgagacctgtaccacattcctttgctctttagtggtggcaagttttaaacctcttgagagtggatacgactttttggaactgccgagaatcagaggcatgcatagagaacagagtgagctctggaaaataatttttagattattttctaaaattatttttarattaaaattatttttagattacgattatttttagattaaaaacagaatgatgttaaaggtaataaagtagtttcctttgtggcccaggaattagctttgctagtaacaaaagcatcttaatctccaattgtattggcaattgtatacgactaaaatttgcatgtaaggatcatctagatcttctggaagtctgcttgttttgaccactttccagtcatttccagactctgctactcactgtgtccgaggagactttccactaagctgtaatatttatctttagtatagtcttttgtaccctcagctttcctacaagggcttctagagcattcttgtctttcctgataagcagagaaagtattaggtataatgacattggtaggactgaaataggaatc

SEQ ID NO: 786744 - DNA, 646 bp, Homo sapiens
tcagtggcaggccttactatctgttccattcatgtgtacccttcattatcttactgtgtgaaatttccaaacagtcagaccctaggttactcatacttccacccattcatagctcacaaataattttatatatttggctggatgcagtggctcatgcctgtaatcccagcactctggggggctgaggcgggtggatcacctgagcttaggagttcgagaccagcctggtgaaaccctgtctctactaaaaacrcaaaaattagttgggcatggtgagacgagcctgtaatcccagctactcaggaggctgaggcaagagaattgcttgaacccgggaggtggaggttacagtgagccgagattgcaccgctgcgctccagcctgggtgacagagcgagactccgtctcaaagaaaaaaaaagaattttatataagtgcacaataagtaaataaatttgaataattcatcattcaaaagccctttagatgtcttttactgtactgtgatgtatagagtaaactctacgtgctccctactttgtcttcatttgcaatctaagacaagtaaatagcaatgataaagatgaacctgttgaagacatagacaaatgagaaagaaacttgaacaaatacctaaatggaggaa

SEQ ID NO: 786745 - DNA, 646 bp, Homo sapiens
tcagtggcaggccttactatctgttccattcatgtgtacccttcattatcttactgtgtgaaatttccaaacagtcagaccctaggttactcatacttccacccattcatagctcacaaataattttatatatttggctggatgcagtggctcatgcctgtaatcccagcactctggggggctgaggcgggtggatcacctgagcttaggagttcgagaccagcctggtgaaaccctgtctctactaaaaacacaaaaattagttgggcatggtgrgacgagcctgtaatcccagctactcaggaggctgaggcaagagaattgcttgaacccgggaggtggaggttacagtgagccgagattgcaccgctgcgctccagcctgggtgacagagcgagactccgtctcaaagaaaaaaaaagaattttatataagtgcacaataagtaaataaatttgaataattcatcattcaaaagccctttagatgtcttttactgtactgtgatgtatagagtaaactctacgtgctccctactttgtcttcatttgcaatctaagacaagtaaatagcaatgataaagatgaacctgttgaagacatagacaaatgagaaagaaacttgaacaaatacctaaatggaggaa

SEQ ID NO: 786746 - DNA, 646 bp, Homo sapiens
tcagtggcaggccttactatctgttccattcatgtgtacccttcattatcttactgtgtgaaatttccaaacagtcagaccctaggttactcatacttccacccattcatagctcacaaataattttatatatttggctggatgcagtggctcatgcctgtaatcccagcactctggggggctgaggcgggtggatcacctgagcttaggagttcgagaccagcctggtgaaaccctgtctctactaaaaacacaaaaattagttgggcatggtgagacgagcctgtaatcccagctactcaggaggctgaggcaagagaattgcttgaacccgggaggtggaggttacagtgagccgagattgcaccgctgcgctccagcctgggtgacagagcgagactccgtctcaaagaaaaaaaaagaattttatakaagtgcacaataagtaaataaatttgaataattcatcattcaaaagccctttagatgtcttttactgtactgtgatgtatagagtaaactctacgtgctccctactttgtcttcatttgcaatctaagacaagtaaatagcaatgataaagatgaacctgttgaagacatagacaaatgagaaagaaacttgaacaaatacctaaatggaggaa

SEQ ID NO: 786747 - DNA, 518 bp, Homo sapiens
ttagcttcctggttaattcaaagttcacaggtgtatgctgtgatttttatcacacctatctataatgcgcaatgtgtccagcttcttatatcccaagaggatcaccatttaagcttttcctgaatgctcaattcttctttgtccatctgctaggattttcatcttcagccaagaaaaaataatgtacattgtcctacattaatggtctggcagattacccttacccgaagagttatgaaagttcatatgaatcttacttcaaagtgtatctccatccctgctccctcccatcctttctctttttgatgctcttcagatgtttaaaaatgactttaacaagacctttgggtgccccygatccattccaagttattgtcatactgttgatgtacctaattgatagaccagtaaccattcattttatgtctgagtatgaaaccagttcctgtcttcactcaatggtatagatagagtctcaccagcatgtgaggctatagaaattactcgctaatagcatg

SEQ ID NO: 786748 - DNA, 578 bp, Homo sapiens
aggacacagcaggctctggaagacatggcctggcaaactctccttgtcctctcttctggactattattcaggattgaaacaatgaagaaacatccaggagctaagtttttataaaaataatgcattcaaatattacttctgcaatttttmtaagagtaacgggaaatagatcttgcatcctacagtatactgggtgattgttggtggagcctggtaaatctcatccagagactagggaagttttccacattcaggtgaaattcagaagagtcatcacctagagaccaaattaaacttattagtattagaaaacaattgcaaatagcacactcttcaaacacacagccatcaaactcaatggtaatcaagactgaagttaggagcatatgggcagttcttgagttgagaaggaaacaagaactgtctgggtcctgaagccacctgctgtgtaagttgcttggtgactacagagaactctactatgatacaacacagaaaatatttctcttctaagatgcaagtagtgtttctaactccacaaatgtaagtgtatataaactgaggttggaggtatgcat

SEQ ID NO: 786749 - DNA, 616 bp, Homo sapiens
ttataatgtgggcatattagtttcctgttgcttctgtaagaaattaccacaaactcagtggcttaaccaacacaaatttatcgtcttgtaattctaggggtctcaagtccaaagtaagtcttaaaggttaaactcaagctgtcctcagagctgtattccttctgaaggctctagaagagaatctacttcctctcctttttcaccagcattccttgcctcatagccctttctccagtcttcaacctgcatcacaccaacctctacttctcctctgtctctgctgactcttctaccttttatatccggcttacctctcataaggaggcrtgtgaatacattgggctcacttggataattcagaaacgctttccaactcaagttctctaatacatctgcaaagatatatatatatatatatatattttttttttgccatgttaagcaacacattcatagtgtccagagagtagaacacaaggatctcaggggtggggggcattattcagcctaccaccatggaccagaaggcaagacctacttgaggcaggagaaagctacagacccttgttcatgagctagtgcaattttaacctaatgtgacaatgtgtacagatag

SEQ ID NO: 786750 - DNA, 616 bp, Homo sapiens
ttataatgtgggcatattagtttcctgttgcttctgtaagaaattaccacaaactcagtggcttaaccaacacaaatttatcgtcttgtaattctaggggtctcaagtccaaagtaagtcttaaaggttaaactcaagctgtcctcagagctgtattccttctgaaggctctagaagagaatctacttcctctcctttttcaccagcattccttgcctcatagccctttctccagtcttcaacctgcatcacaccaacctctacttctcctctgtctctgctgactcttctaccttttatatccggcttacctctcataaggaggcatgtgaatacattgggctcacttggataattcagaaacgctttccaactcaagttctctaatacatctgcaaagatatatatatatatatatatwttttttttttgccatgttaagcaacacattcatagtgtccagagagtagaacacaaggatctcaggggtggggggcattattcagcctaccaccatggaccagaaggcaagacctacttgaggcaggagaaagctacagacccttgttcatgagctagtgcaattttaacctaatgtgacaatgtgtacagatag

SEQ ID NO: 786751 - DNA, 625 bp, Homo sapiens
gaatagctattatctactcacttactgcctagatcatgaacctgtaatgacctggattgttctatcagccctaaggcaaatgatctataaaccaaacacagatattccagctccatctgtgacgaggacctccctggccttattcctaacattgttccccttctgttmcacacctgggagagctcaagccctctggctttggatgcaggtcccatctgtctctttaaatgtattggcagacctgggcatcagagctttctaaggactttggttcagactcattactctggctttcccaggtaggggatccccttttctagctcttactatagaattcaaactgtggctctgacccaactgtcatatctggtttcattaaatgtccactggcatcttttattctggtcctgaaaagtcaaaataggcaaaagaaactaaggaaattccacactccatcaagggaagcttccacatatcctgacttaaggatattttagttttaaaacagtgacctgaaaccattgactcatgcattatgtcagcaaacatttgttgagtgcttagcatgaaccagactcattttagagactttttcttctagctccttctaactccctgtttgaaa

SEQ ID NO: 786752 - DNA, 625 bp, Homo sapiens
gaatagctattatctactcacttactgcctagatcatgaacctgtaatgacctggattgttctatcagccctaaggcaaatgatctataaaccaaacacagatattccagctccatctgtgacgaggacctccctggccttattcctaacattgttccccttctgttccacacctgggagagctcaagccctctggctttggatgcaggtcccatctgtctctttaaatgtattggcagacctgggcatcagagcttyctaaggactttggttcagactcattactctggctttcccaggtaggggatccccttttctagctcttactatagaattcaaactgtggctctgacccaactgtcatatctggtttcattaaatgtccactggcatcttttattctggtcctgaaaagtcaaaataggcaaaagaaactaaggaaattccacactccatcaagggaagcttccacatatcctgacttaaggatattttagttttaaaacagtgacctgaaaccattgactcatgcattatgtcagcaaacatttgttgagtgcttagcatgaaccagactcattttagagactttttcttctagctccttctaactccctgtttgaaa

SEQ ID NO: 786753 - DNA, 567 bp, Homo sapiens
agcatgaaccagactcattttagagactttttcttctagctccttctaactccctgtttgaaaacttatcttcatgtttacatcttctttttccagagtcctggcacaaagcttcccgtgaactttcaggaccagatattcatagtttttgatgggtccctaggaaaaccactggtgtgagagaattttagagtctggtggatgcaaacaggaatgagatatatgatggctttccttrcagaatacacaatccagtatgggagtatgtaaatcaatgctccccacaatgtgatttgtatccaaaggccaagataaccctttggaaggaaagatgggattttaatggaagtgacatttgaaatggtccttgattgataaataggagccttcagtgactgggccctgcctatccttctgctggatcaatctaaatgttaaattctgtgttaaaaaaataaacggctgatttttgttttcaggtcacactacactgttgccagtttccattcctttgcttgtttggtctgcctcttctgaagtgggtcccttcccaactcaccttaggta

SEQ ID NO: 786754 - DNA, 635 bp, Homo sapiens
aatccccagtacttcagaatgtgaccttatttggaagtagggtccttaaagaggtaattcagttaaagtgaagtaattagagtgaacccctaattcagtatgattggtgccctaataaaaaggggaaatttttagatagacatgcagacaaagagaacaccatgtaaacataaagatgaacacccgctaagcaagtaaagatgtctggaacaactccttctctcacagtcctgagaaagaaacaaccccattaaacctasattttgggcttccagggtccagaattgaaatatgaaaacatttctgttgtttaagcaacccagtctgtggtactttggtatgatagccctaggaaactaatacaaatgttttggtctttgatttgttaatacaaaaaaaaatgtggtcactatgatataatcaaagtcacttataaaactgcttaagaaataaaattaaagctcatagttcactattagataattaaccttgaagccaatggaaactgctgccttcaaacaataagtaaagtgttgtttgcagttctttttaaaaattatgtatttattacttttctttaatgccatgaaaaagataacagaccagattatctttatactttaaataattaaaac

SEQ ID NO: 786755 - DNA, 570 bp, Homo sapiens
aattatatccccctcaaatttatatattgaggtcctaatccccagtacttcagaatgtgaccttatttggaagtagggtccttaaagaggtaattcagttaaagtgaagtaattagagtgaacccctaattcagtatgattggtgccctaataaaaaggggaaatttttagatagacatgcagacaaagagaacaccatgtaaacataaagatgaacacccgctaagcaagtaaagatgtctggaacaactccttctctcacagtcctgagaaagaaacaaccccattaaacctagattttgggcttccagggtccagaattgaaatatgaaaacatttctgttgtttaagcaacccagtctgtggtactttggtatgatagccctaggaaactaayacaaatgttttggtctttgatttgttaatacaaaaaaaaatgtggtcactatgatataatcaaagtcacttataaaactgcttaagaaataaaattaaagctcatagttcactattagataattaaccttgaagccaatggaaactgctgccttcaaacaataagtaaagtgt

SEQ ID NO: 786756 - DNA, 613 bp, Homo sapiens
agttgaggtaaaaattgttggccagaaaatagtctggaatcattttagaagttgtcataacccaggtaacaaacgctaatttcatcatttgctacttatctagcctaagatactatggatcataatacaaatcattaccttacataccattcagaaagggaaaaatcagcccaartaatctgtgttctccatcagtggtaagccatgccacaattatagagattttaaaatgtgataaaatatgccttttagactcactgaaatacagcatgtgtcttaacatcttcaacactctattttcaggcagttgtgcattgagttgtagattgtactgctgaggaaaagcaagtcttttacctgtaatcttgcatctatcacccatgatatatctacctacagagaaaaagaggtgtattgtaaagttgactcatctagtctctctgcttctgagggaaacattgacttatttagatgggtgagtttgaaacaatcaactttgcataacatctcctgcttacctttttcacagaaccactcaccctcctgtaaagtaaatgatctgttctgctctctgccaagaataaaagtagcttatcgcatagggcatacctaa

SEQ ID NO: 786757 - DNA, 613 bp, Homo sapiens
agttgaggtaaaaattgttggccagaaaatagtctggaatcattttagaagttgtcataacccaggtaacaaacgctaatttcatcatttgctacttatctagcctaagatactatggatcataatacaaatcattaccttacataccattcagaaagggaaaaatcagcccaaataatctgtgttctccatcagtgrtaagccatgccacaattatagagattttaaaatgtgataaaatatgccttttagactcactgaaatacagcatgtgtcttaacatcttcaacactctattttcaggcagttgtgcattgagttgtagattgtactgctgaggaaaagcaagtcttttacctgtaatcttgcatctatcacccatgatatatctacctacagagaaaaagaggtgtattgtaaagttgactcatctagtctctctgcttctgagggaaacattgacttatttagatgggtgagtttgaaacaatcaactttgcataacatctcctgcttacctttttcacagaaccactcaccctcctgtaaagtaaatgatctgttctgctctctgccaagaataaaagtagcttatcgcatagggcatacctaa

SEQ ID NO: 786758 - DNA, 613 bp, Homo sapiens
agttgaggtaaaaattgttggccagaaaatagtctggaatcattttagaagttgtcataacccaggtaacaaacgctaatttcatcatttgctacttatctagcctaagatactatggatcataatacaaatcattaccttacataccattcagaaagggaaaaatcagcccaaataatctgtgttctccatcagtggtaagccatgccacaattatagagattttaaaatgtgataaaatrtgccttttagactcactgaaatacagcatgtgtcttaacatcttcaacactctattttcaggcagttgtgcattgagttgtagattgtactgctgaggaaaagcaagtcttttacctgtaatcttgcatctatcacccatgatatatctacctacagagaaaaagaggtgtattgtaaagttgactcatctagtctctctgcttctgagggaaacattgacttatttagatgggtgagtttgaaacaatcaactttgcataacatctcctgcttacctttttcacagaaccactcaccctcctgtaaagtaaatgatctgttctgctctctgccaagaataaaagtagcttatcgcatagggcatacctaa

SEQ ID NO: 786759 - DNA, 613 bp, Homo sapiens
agttgaggtaaaaattgttggccagaaaatagtctggaatcattttagaagttgtcataacccaggtaacaaacgctaatttcatcatttgctacttatctagcctaagatactatggatcataatacaaatcattaccttacataccattcagaaagggaaaaatcagcccaaataatctgtgttctccatcagtggtaagccatgccacaattatagagattttaaaatgtgataaaatatgccttttagactcactgaaatacagcatgtgtcttawcatcttcaacactctattttcaggcagttgtgcattgagttgtagattgtactgctgaggaaaagcaagtcttttacctgtaatcttgcatctatcacccatgatatatctacctacagagaaaaagaggtgtattgtaaagttgactcatctagtctctctgcttctgagggaaacattgacttatttagatgggtgagtttgaaacaatcaactttgcataacatctcctgcttacctttttcacagaaccactcaccctcctgtaaagtaaatgatctgttctgctctctgccaagaataaaagtagcttatcgcatagggcatacctaa

SEQ ID NO: 786760 - DNA, 592 bp, Homo sapiens
ggcactcaacagcagtcgtagctgggtcagccttagtgagtggaagtctatgttactgagcccatgtgtaacctccatccctgccaccatggccactttgctcacgggcccattgggcaatgacagggtggctggggaaagaggctgagtggtatccacagaacgagtcgtcctatccacctgattattaaaatgctcctctgytaaggtcacccttcagtgaacactcacatgagatacaaatatctttacagtgtttgaccactcagagaggtccacacacatatctcttccccaaatttgtcaccaattttccaatcatgcttcttccaagtccctgaccatctggcccaaccattggctacagcccataaaccaatatataattggacatctggccatttcttcttccaaccaaagtgcacaaccaggtacacttcttgaagttctgctcactgggaagatttccctttgccattgtcctttaggaatgtccttgaaaggggctgtagtgctgcagctgtccacattcagatggtgcctgcatatcatggagagctatctgcaaacagggaacttgtcttctcttcct

SEQ ID NO: 786761 - DNA, 536 bp, Homo sapiens
agtatatataaatgggcaaacgtatcctaatttacaacatctagtctttctaaatgttaaagagtttgacagtgtatgacaaaagcagaggttagtaaactaataaattgagaacattttgttttaaaattcataagaaagactattcttaaaaacacttaaagaagtgaaattgttaaatcttgtctaagcattacaaatgcttatacctgtcaactgtgttgatagaggtaggaaggggaagggttctaggccagaatgttcttatttagaagacactttcaaatataacctgtgttatgtgcaccacttatttaatgctactgtgtctatggtggaaaacttaagtcctatttgaaatatctagtsttttcacatgcttaaaattgcacaacatagtttaaaactagagggctaaagtaacaccctgaggtagttttttggttaattcctaggagtggttgtgcttgggaatgcaattgttaagcttgatgtttggagagtatgctgactgtttattgggtggcagcaagtca

SEQ ID NO: 786762 - DNA, 512 bp, Homo sapiens
ggggctcttattataaaaaggtaacttatattgactacattttaaagtaaggcattttttttggtaacaaaaggtcaaggataaactttgaaatgaaacaaattttgttatcttggccctagaatttgggacagtgaacactraagcaagtagaaggccaagtagaatggtaaagcaatgaaaaaaattagaccttatatggaaaagccaagaaacttaaattgcttagcgtaatgaacagatgcactgatagatactagaaaagatgacgacctggaatacttttcttgaaatgtgctgcaaggtgatatggtcttgacctcaaccaagtggacagcagcactgaaaggaggcaagtcacattcatggcttgtacctgcatggtctcacactggctctgaatttgttaattatgtaagctctcattatagttttaagttcctgatacccaaactatgactttatccacagaaaaatgttagattttgattagcaaaccaaatgaaaagaga

SEQ ID NO: 786763 - DNA, 608 bp, Homo sapiens
tttacatattatgcaagggtcacaggatccctatgtgcaatttcttgtaagattacaagaggcagtgaagcatcagattcctcatgccactgctgcagaaatgctaaccgtaactttagcttttgataatgcaaatgtggattgtaaacatgcactggcacctgtgaggtgtacaaaaaacttgggaaattttctcagagcttgtcagaatgtaggaactgagcttcatcgctcttcaatgttaactgaagctgtggggaaaagaaagagagattagattgttactgtgtctatgtagagaaggaagatataagaaattccattttgatctgtactaaaataaattgttctgctttgagatgctgttaatctgtatctttagccccaaccctgtgctcacagaaacatgtgctgtattgaatcaaggtttaatggatttagggctgtgcaggatgtgccttgttagcaayatgtttgcaggcagtatgcctggtaaaagtcatcgccattctccattctctattttttttaattaattaatttatttatttattgttatactttaagttttagggtacatgtgcacattgtgcaggttagttacatac

SEQ ID NO: 786764 - DNA, 638 bp, Homo sapiens
acatacaaatcaaaagatagagaaagcaagctatagacttgaaggaaatatttgcaaagagcacatctgataaagggcagctgaaaaaaaaattcaaaaaactcaccaataataagatatgccacccaattttaaaacaggcaaaaacttgagtagaaaccacaccaaagaaggtatacatatagcaagtaagcatataaaaagatgttcaacaccatatgtcactaggaaattacaaattacawtgaaaatgagataccattacatgcctattggaatggcaagaatccaaaactgaaaaccttaaatgccgaagtaaatgtggagcaacaggaactttcattcattgctggtgaaaatgcaaaacagtacagtcactttggaagacagtttgaaaattcttttacaaaactgagcagactcttactctatgatccagcacttgatatttatttatctaaactccttggtgtttatctaaaggcgttgaaaacttatattcacacaaaaacctgcacacacatatttagagcttgattcaaaattgccaaaacttataagcaaccaagatttccttcagtaggtgagtgtttaaataagctgtggtccattagacaacgggatattactcagcacta

SEQ ID NO: 786765 - DNA, 529 bp, Homo sapiens
gcaagctatagacttgaaggaaatatttgcaaagagcacatctgataaagggcagctgaaaaaaaaattcaaaaaactcaccaataataagatatgccacccaattttaaaacaggcaaaaacttgagtagaaaccacaccaaagaaggtatacatatagcaagtaagcatataaaaagatgttcaacaccatatgtcactaggaaattacaaattacaatgaaaatgagataccattacatgcctattggaatggcaagaatccaaaactgaaaaccttaaatgccgaagtaaatgtggagcaacaggaactttcattcattgctggtgaaaatgcaaaacagtacagtcactttggaagacagttygaaaattcttttacaaaactgagcagactcttactctatgatccagcacttgatatttatttatctaaactccttggtgtttatctaaaggcgttgaaaacttatattcacacaaaaacctgcacacacatatttagagcttgattcaaaattgccaaaac

SEQ ID NO: 786766 - DNA, 646 bp, Homo sapiens
aatttttatatacaacaatataattttatatacaatgataaattccattgcattcaatactgtggaatattatgcggccactaaaacctctgttttgaagaatatttaatgatatggaaaacatttacaaatgtaatattatgtttaaaaaaatggaataaaatatgcagtgtgatccctgcagcagacattttggtactctgccttcctcatttctgccataccatggtggatagtcctgactcctgccaacggcatcccacccagaaagtactttgtgcagttctctgcttccctgcctcagggctttctctgaaatcaggmaaacctgctcaggctgtgcaagcctaatacagcctgaaactttggggtaaataatgccaactggagctgatggatcaatgtcccagcttcttgttggggggcatttctgggatgggctatagatgtccctagaactctgaagctgtatgcaaaatttggtgcatgtcctaatttcctgggagaagcccatagcttttatcagatattcaaataagtctatttgccaataaaggagaaccactggcataagggaaacagtagaaggaagaggatcgaatggcaacagtggttattctggtgaaattacaagggcattttttcc

SEQ ID NO: 786767 - DNA, 825 bp, Homo sapiens
aaaggcctccatgaacgccaccctccatgctggggtctcggggcctgcaagatcccagctcagtggatttgaaggaactgatgggcctggagtctggcagtgtgaatgaatacattctgggagcaggccccgccgcaaactcccgtttcagacctatggatgtgccaagcacactcctccccaggtggggcctccggaggcaccggggatcatatgtccatcatggatccgactgagaccaccgctgtaccaagccgggtgcgggggcacctgggcatacagggccctgcaggtgcggccgggctgcggggaggcccctccttccgcaccagctccacccgtggtagggcagggatgacacttctcagctcctggtagggcagggatgacacttctcagctcctgggccagacgccaataagcggacccaggggccacacccagtcctagaaggaaaaggggcggccggaggtcggggctcactaggagatgctgccttttctggcacacaccgccccgggatgctgacagccagtcagctttcggagaaacagsaaacggtctcagactggtccacgcttggcactcatgtttttttccaggtctagagagcagcaagaaacgcatcctgttaccgtaatatgagtcagatgaatcctgttgtgtcctccaggtgtccagatgtacagcccgggttggggcggggactgcaacgcaaaggaagctagactttgcaagctagaggagaggttggggagcttctgaccagttctctaatcacctgaatttcacagaccaggaaggggcctgggagttggagcttgc

SEQ ID NO: 786768 - DNA, 629 bp, Homo sapiens
cgactccagagtgatttcatgtgctactcggccacaattccacttctcttctcttggcctcaatttgttgacctgtaaatgggacccatggagggtggaattgcattcccttcccaggcccatgtcctggggcagggaaccctccagaggatggcaatcttcactaggaggctgactgcccgggatgccgtgcccttggcaccatctggcagtcagccagtcgtgaagagggctctctgccaggcccagactccacagaaaacagctaagaatttgcccactggcttgtggaacatgcttttctgtctctctctcttccttagcaataggaaggtgaagttcaagggtagtataaccacccgtgaccctgagacactcttcccttcttcatgttccctttgtccagccagctctgcaaaagtcactggccctgctgagcacattgatttcaaagcaaatggtcactgagtggcacacgccttgattccagaccrtgtccccctctcctacccactgagcccactgctgggggaagctcagggaagctggcgggcaaatgtgtgccctggattctctcagctgtggatgtaggtctgggagcattgtttttaggccaggagcagcctgaa

SEQ ID NO: 786769 - DNA, 597 bp, Homo sapiens
aaacaggtatttaaggactaagaattgggaggacctaggacatctaattagagagtgcctaaggaggttcgcatagccttgccagcaaagattatttatttactttaagagttaagagtggcggtttggggatagcaccaggagatatcagctgtgatgtcttggagaaacagtgtaaactggcagcgtaaacaagagcagggcatgtatgagtagttgagaatggtgaataggagtatgactagacagaagatagtagggttgacaagttttttggggcacagtccaagttggtctggtgtctggaatgagactgrggcctaataaaaaggagcatctatacaggagctcatatgggctgtaccttgtagcactccaaggacaggcctgaattctgagaagggaaagaggtaaacgtattgcctagtcctttttcagttgttggctgagcttgatgaggtgtgtttttaaaagaccattagtctgttctacctttcctgaacactgaggactgtaagcgatataaagttttcaccgaatactaagagcctgaaaaaatgcttgggtgatttgactaataaaggctggtctgttatc

SEQ ID NO: 786770 - DNA, 583 bp, Homo sapiens
aaatacttctgaatgatagttaatggctttgatatttttccatatgacacgtccattgaacagagaatttcctcactataagttactaacggtgccctgagacaccatggcttcccaatatggtggatatttaggagcagggggctttgctgggtgactggatctccaaattaaaataatcttagccacaaagatatcatgcccttccatgttccaacgcaggctcatggaggctttgtttcaggagaagagggaatcccagctatgactgacatttatttacgctcacaagatggcttgtctgctgacgaggaactagagtgtaggagtgaaagwcaatgacacagagaaacacaaatagacagggaaggtaaaattatctctcgttttggcattttctgctctgccaggagcacagttaaattcataccatcttaagatgccagagatgaggtttgccttggaagggcattcattctgtcaccatctagaaagcattatatgctagatgctgggcctgagggtggcaatgcaatggtgccccagtgcagcccatctcctgccctgggtcatggagaaggga

SEQ ID NO: 786771 - DNA, 605 bp, Homo sapiens
agagcaggacactggatcaagactgccagtgcacacctggccccaccacctaccgggcaggtgatgtgcagggctgcatcattaccctggttcctcactcatctctgcttacccttaacatgccagtttgcagtaccctcccctgtgggcagggcttgctgcctgcccctgtgtttggccacttgctttgctttaaccagtggaattaggggggaaatgacaggataccagctctgaatctactgctcactctcttgtacttctgccatccctataaaaaggacatgcctggactggcctgatgttttcagaagaggaggagaggcatgtggagcagagtcaagcccctackggccacaggcacatggatgagaacaggagaaccgcctaactgagcccagcctggatcagagctgatacccagccaacaacttgtgagaaccaatacatggttattttaaggcactaacttttggggctggtttattatgtggctatagctaactgatacaggtgaccttgggcaagttaatccatctatgcccccattttcttttttgtaaagtaggggaatgaatagtatctgcctcgtgtgatttttataa

SEQ ID NO: 786772 - DNA, 740 bp, Homo sapiens
actgatgagtggtggtgacccgggatccctactttgcattctacccactggctgttaacatctgaagggcagtcactgtttaccagtatgctgtattactccaatgactattccagcgaaagcagatacagtcctcaggcccaaccactggagactgcaaaatcaagctattagtatgatggaatggggtacagatgtttaaaatgataaatatgatgattacgcagacaaggtcctttgctactttgctacctgtcaatgaaagagttaactaaaaaaacrtaggaagcaggaatatatatggattacaaagacagcaaaacaatgttgacacattgataatgatcagcagaggccctggagagatatgactggttgctgggttaagataaaagaatttatatttttatgtgatgctgatgtaaaaagaaagaatataaaataatattgtttgaccagtatttaaatgcacctttaaagcattttctgataaaatatcttgaatatggaatacacaatacatccagtaatgccttctttgggtctgaggtcaccaggcaggacagatggtagagataagccaggcactggagccacagagacctagggtgggtgctggctccactgtggaatctgcataggtggttgtcattacctgcccttgatgcatcccaatctggtggttgatggtctcactgccctcagcaagcttctttcctcctcctcattgattcttttcc

SEQ ID NO: 786773 - DNA, 622 bp, Homo sapiens
tgcaccctgattgaaactgatgagtggtggtgacccgggatccctactttgcattctacccactggctgttaacatctgaagggcagtcactgtttaccagtatgctgtattactccaatgactattccagcgaaagcagatacagtcctcaggcccaaccactggagactgcaaaatcaagctattagtatgatggaatggggtacagatgtttaaaatgataaatatgatgattacgcagacaaggtcctttgctactttgctacctgtcaatgaaagagttaactaaaaaaacgtaggaagcaggaatatatatggattacaaagasagcaaaacaatgttgacacattgataatgatcagcagaggccctggagagatatgactggttgctgggttaagataaaagaatttatatttttatgtgatgctgatgtaaaaagaaagaatataaaataatattgtttgaccagtatttaaatgcacctttaaagcattttctgataaaatatcttgaatatggaatacacaatacatccagtaatgccttctttgggtctgaggtcaccaggcaggacagatggtagagataagccaggcactggagccacagagacctag

SEQ ID NO: 786774 - DNA, 622 bp, Homo sapiens
tgcaccctgattgaaactgatgagtggtggtgacccgggatccctactttgcattctacccactggctgttaacatctgaagggcagtcactgtttaccagtatgctgtattactccaatgactattccagcgaaagcagatacagtcctcaggcccaaccactggagactgcaaaatcaagctattagtatgatggaatggggtacagatgtttaaaatgataaatatgatgattacgcagacaaggtcctttgctactttgctacctgtcaatgaaagagttaactaaaaaaacgtaggaagcaggaatatatatggattacaaagacagcaaaacaatgttgacacattgataatgatcagcagaggccctggagagatatgactggttgctgggttaagataaaagaatttatatttttatgtgatgctgatgtaaaaagaaagaatataaaataatattrtttgaccagtatttaaatgcacctttaaagcattttctgataaaatatcttgaatatggaatacacaatacatccagtaatgccttctttgggtctgaggtcaccaggcaggacagatggtagagataagccaggcactggagccacagagacctag

SEQ ID NO: 786775 - DNA, 593 bp, Homo sapiens
ggcacttgcagatggaaagcttggggcccacatgaggctggtcattggcaaaggctaatgacaacaaacaaaagctcagcactcacctgggcatgaggacatggggctctgagacaggctctcctccttccatctctgggcctcagtttctccaggataaaatgattggttctcttcatgcattttggcactgacaaatttctatctggcacagtgcctgcacacaggaggtctgcttaaacatctgtggagttaatgccatggggcacctgcttgatatggtcctttctcactctcaagtgtaagaggcagagaaagcagggaggatggggagctgcrgagaaatttaagaatagattggggaactctaaacgtagctttcagggggcagggaaaaggccagccacacactcagctttcagtggagaaggcacagccgaaagaggcaggcaaatggctttaggttaccatgacaacggcagtggataggaaaggcatccagaggatgccaagagtggcatttttcctcctgccttttttttttaaatgactggctttctttctgtaagggaaagagaggaggaggtagaggg

SEQ ID NO: 786776 - DNA, 549 bp, Homo sapiens
agcccaaactgggcaggtttgtcctctccctcctggatgtggcacatccatggatgctaataagaaccacttcactttggggtcaccacagtatgccatgacttacgatgctacaaaatcacattgctccctgtttgtggaaggtgagcatttttaacccaagaataggacttagtatttacaytacagtccagggggctgacctctgcccactgtgccaatctgttgagtttgccttggcttctagatgattgtcttcctacacagtcactctcctcccagcttcagatcatccacacactggatgtgcaccctctccatacagttactcaccttccagtttttgactaggtttccagcttaataccaactagttcattagcactcttccaaggctgtcaattggttactgtttgccttctcctctggcccatatttatccaaggttgctataaagtccacctaggggctgggcacggtggctcacgccagtaatcccagcactttgggaggccaaggcgggcagatcacaaggtcaagtgatcgaga

SEQ ID NO: 786777 - DNA, 600 bp, Homo sapiens
taccaagaaaaaaacggacaacaatccctaacttccaatttcttcatctgataaaggagatgtacaaaaaacctaaaacaaatatcaccatgtatgataaaacattgaaaatgctcccctgggagagaaaaatgtccacttttgccatatcccttcagtataacagaatagttaygtgtacttttagctagtacgataggaaaataaatagaaggcataaagagtggaacagaagatgtaaaccagtttttattcacaaacaacataatactacatgtggaaaatcctacagaatctacaaagaactactagaactagtagatacatttaacaaggtcgtaaaatgcaaggtaaatatataaaaatctatcttatttctatataccagcaaaaagcaattggaaaataaactatcaaaaaatacctaaaatagcattaaatactttgcaacaaatacaatgaaagatgagcaagagtttcctagagaagactataaaacacagttgagagaaattaagacagaccaaatttaataaaatatataccatataagtggactggaagactcaacagtataaagatgtcagtgctccccaaatt

SEQ ID NO: 786778 - DNA, 580 bp, Homo sapiens
gactcaacagtataaagatgtcagtgctccccaaattggtctacagagtcaaattcaatcccaaggttccagcaaacttggaggtgggtgagtgtgtgtgtaactgacaaggtgattctaaaatttaaatagaaatgcaaagggcaaagaatagcaaagtagcaaagtccagttaaagaaaagcagtgccaaagaatttcaactaccagatatcaagctttaaataaagctacagtaactaagacagtgtggtccaagaacaggcaaaaaggacaattgaaaaaagagagtccagaaacaggtgcacagatccacacatccacacttgactgatgrcaaacatgacaacaaagggaaagaatggtcttttcaagaaaggctgctgggtcaattagatataaatatggggataggaaagatacatgacccctcctcaaataatacccaaaaaccaactgcaggtagactatacatctgtatgcataattggcaagctgcaactgccaaaaattggagacgacctaagagcagaataaatacataatggtatgtaactacaatagaatatcatatagaaatg

SEQ ID NO: 786779 - DNA, 669 bp, Homo sapiens
aagttgactgcagattattaggaacatcccataacagctcataaatgagaaaccattttcataagaaaacatataaatctttggattgatcattagaagcagtcacacacttaccaagatatatacagccaaagcctccttggccaatgggtaatcctactttccattccttttttgccatgtcagttattatctctccaactgcaaattgttctgcaagatgtctcttygcagagctctgtcttccagcttgagctgcttttacacgaggcattttcactataacataaaacaaagaaatggtcagaattctaatcttagaagtgtttaaaacatttttccctaaggaaaacttccgtacggagatgctgctcaaattcctacttactccaaaacttaaaggatacctgttaattctgacttataatggctcaaatcctatttgattatctcttaactttggagaagaaacaataaaatcatatatgcaactattttcaaggaaataattaggtttaagtccaatggcataatgatcaactacaactaaaaatgctatttaataacaacaaagaattgctctatgaagctgagagggaaaggtgcatccaattagaatgcacattttataggaacaaaatgaagagtttattaaggtcaataccgata

SEQ ID NO: 786780 - DNA, 621 bp, Homo sapiens
ctgatattcataagaatggtctgtagtttattttttctgctacatttatctgtttaagtatcaatattatgctcacttcataataagattttggaagcttttcttcctttaccacaatctaaggagtttaagcagcatttgatctattccttaaggttttgaagacttcarctgcaaaagtctgacactacaaagtgttggtaaggagttggaacaaacagaactctcctacactgtatactgtttcgatcattttgaaaattcatttggcagtacctgctaaccgacccagcaattcaacttctatgcatgtacatgtccacccaaagacatgtacaagaatgataacagctttattcacaacagccacaaactggaaacctgtatgtccaacaacaggaaaatgaatatagtaagacggatggacataccaaacactgtgttaagaaaaagcagcaccagacagaagagtacatactatattccatttacatgaatttcaataataaaacaaatcaatggtgatacaagtcaaacagcagatatcactttggggactaagggtcagaagaaatggctggaggtggatggttcctagggatctggtagcattctatatcc

SEQ ID NO: 786781 - DNA, 599 bp, Homo sapiens
catttcatatgcttatatcttctgagctggttttcaaaatgccacggctattttatcttcctgaaatcctgagggattaataacagagggaaatttaatgtgtgggcctcccacaatgactgaattgtttcccagtgccctggtgaaattctctgagctgaggatgttgtaagctgcctgcaggtgggttgctttctgccttcctgttgggaggtgtgctcgatatgatctgtcaacactcagcatccatttctactgccttcttctgtaccttcctactgcacaggctgcaaaactaaaaattgcgcttcccagaaaccctagtacttagggctctggatgcaaaaagttccaccagttaaagtcctcaaagaagatttggagggcagggtgaggtggcaacatggtcatggtgttgtcttgggatttttccacagcygtgttccactgccttgtccctaatgtcatgactgtcagaagacactcatctgttgggttggtaacagtatcagcttcctgatatagttgtgagtttatgtagtaaagatatggaacttgcccaaagagaggtctggccttcattctccgcaattggaagc

SEQ ID NO: 786782 - DNA, 568 bp, Homo sapiens
cagctttaagaggagtcaggacatattgtagggcctttggacaactccgttggtttaacctgatgtttattcatttaccattcaacaaataaagactgagcacctagtgtgtcccaagcactgcaataggctctcaggataggaatgaacaagaaaagattgctgtcctcaagtgtccacactctaagggggcagatggacacaaacttatggtgataggacaagggggcgatggcattatgaggtggaatttctgcwcccaccggccagttttcatgaggaaagttcgattccacaccccaggggatgtactcttggaaagaaattgtagcctctctcccactcactcctcctgagtaaagagaagtgacttgccagatcagtaagacggagaaagcatccaacgtgaggctgagttcccctgacccacccactctctcactgtctctctttatctgcttgcctgcccctgcatccaaggtgtaagaaagcttgggttaggcccaagacctgccttcctaactagatcgggaaggacaaatctctctctggaggctcataggtgtgg

SEQ ID NO: 786783 - DNA, 591 bp, Homo sapiens
acagttttattaccctgaggagtcagaggatggggttctgaactgctagagcaattggaaactgagggaaggcagacatcccacaatggcggtagccaagaggggcagccctaaaacccccatatatacaccccaaaatcacaggctgattagtgaattgcacatgcatgaacaagatttcaaggagcccaagggggaaacaataattggaaggctaaaagaacagtgcacagatttcagcaactgcccactgttgggggagaccaagtttggggtttgagtcctgccaagttagaggagcttaataaacatttcaggctgtccattgaaaccctgcaaaaagaccatgactgaagrtgaaaggctatgtccaagttctaaggaactaagaaacagagatgcaatgatgtcaagtagttgttttaggcacatagttaatgagtttagggctgggattcaaacccacctggtcgggcctgtcgaagttgtcagaatcaaaatgaagtcatggatattaaggaaatcctaacaaagacagctggggaaggccataaagagaagttcctcttgcttgtatgtctttgactaaaa

SEQ ID NO: 786784 - DNA, 611 bp, Homo sapiens
tacagctgggtttatttgtacatatctgttactgactatttttaagcatgatcaggaattcctaagcgtagtatgaatggctcggtattttgattaatcagctcagtagggaaaatttctatgggtaatcagactgaacataaagatagggcacatgctgagaatgaatgaagggagggaaaagagggagagagaaggacagaggtaagaattcttttgtagccagaaaagcagtttgagtcagtgccactgaacatgtaaagcttcttttttttttttttttttaracggtgtttcgctcttgttgcccaacctggagtgcaatggcacgatcttggctcactgcaaccgccacctcccaggttcaagcaattttcctgcctcagcctcccaggtagctgggactacaggcatgcaccatcatgcctggctgattgtttttatttttagtagagacgaggtttcaccatgttggccaggctggtctcgaactcctgacctcaagttatccgcccaccttggcctcccaaagtgctgggattataggtgtgagccaccgcaccgggccattaaagtttctgtttcattgtgtgttaggctggcagctgcat

SEQ ID NO: 786785 - DNA, 614 bp, Homo sapiens
caggcctcttatgattctgcaattccacatgaactccgctgcacagggaggggtctcatctccctgactctacccctatcacgatccatactggggcctggtacatagcagattctctgaaattgttcattgaacagaagtgagagaagagctggacttcagcccagcctattcctggggtcccagttgccgcagtggccttgaagtgtttgcacagcttctgcagacaactgggacacctgctccttcacatgggggcatggacctactcatcaagtcagcccatctgtgaccaacgcaatgggtcatgaagcaggaagttacaccgtgcaagatggcagtacacgggkcatctcacccaagctgagccaatcagccccttctctgaggattctgaattgaagggatggggaaaaaagatggtgaaagagagacagacacaaagagagcctgggacaaagtgacacacacacataacacacacacacacacaatccacacagcctttgtccctggttcgagtcccttcctcccttccagaggctgacaaagcttacctagcagtgatgggagttgaagattcctattatccctgcctccaaccccattggttc

SEQ ID NO: 786786 - DNA, 563 bp, Homo sapiens
tccccagttaatcccgggcttaaaaaccagagtggcaaagtgactcccaggccagcccctggaaaaaggcctaaattggtatgatgtaattgctctcccgccctgaaaaaggcctgtgtggccaacatctgagcagtggacaccaggcccctcggtgaccaagaatcaatttttatcctcaacatgccacacktccatttctactcattaggagcctgataatgaccccagtgagtgaggctcacaggaccagagacttcaagcagctgcctggaaaatgggtctatgctaaaagtggggtcagccagaaaggtcagtccccaagatgcccaagggagaggcaggcaaatgtgctcttcccaaatggaatgggacaaggatttcttcttctccagaacctccttgtttcaccttgactatagcctgctaagatttgcaacacctcctattctacgtaaaatgtaaatctgattgccgatggcccctccctgctcacaatctttcaatggctccctgttgtcctctgagtaaaatccaagcttcttagggtgtaatacaaggcc

SEQ ID NO: 786787 - DNA, 563 bp, Homo sapiens
tccccagttaatcccgggcttaaaaaccagagtggcaaagtgactcccaggccagcccctggaaaaaggcctaaattggtatgatgtaattgctctcccgccctgaaaaaggcctgtgtggccaacatctgagcagtggacaccaggcccctcggtgaccaagaatcaatttttatcctcaacatgccacacgtccatttctactcattaggagcctgataatgaccccagtgagtgaggctcacaggaccagagacttcaagcagctgcctggaaaatgggtctatgctaaaagtggggtcagccagaaaggtcagtccccaagatgcccaagggagaggcaggcaaaygtgctcttcccaaatggaatgggacaaggatttcttcttctccagaacctccttgtttcaccttgactatagcctgctaagatttgcaacacctcctattctacgtaaaatgtaaatctgattgccgatggcccctccctgctcacaatctttcaatggctccctgttgtcctctgagtaaaatccaagcttcttagggtgtaatacaaggcc

SEQ ID NO: 786788 - DNA, 509 bp, Homo sapiens
gtctgtaactatgggggaggggagtgactttgccctcttgaggtcttccagaagtgctgcttatttgtggtgcccactcacataatgtgtaatgcaactatcatctagcactttccattcgctggaatgtctttttttttttttttttttttttgagacagagtctcgctctgtcgcccaggctggagtgcagtggcacaatctcggctcactgcaacctctgcctcccggattcaagcaattctcctgcctcagcctcctgagtagctgggactataggcgcatgctgccatgcccagctaattttttgtattttagtagagactggrtttcaccgtgttgcccaggccggtctccaactcctgagctcaggcaatccgcctgtctcggcctcccaaagtgctcggattacaggcgtgagccaccgtgcctggccctggaatttctaaatctgtagtaactgcattgttttcttgatttctagatttcctgtatttccatttccccaa

SEQ ID NO: 786789 - DNA, 516 bp, Homo sapiens
ccttgcttactgctagtgcagcagtccgagatcgaactggaaggtggcagcctgggctgggagaggggcatccaccattgctgaggcttgagtaggtaaacaaagcagctgggaagcctgaactgtgtggagctccctgcagctcaacgaggcctggmagcctctgtagactccacctctgggggcagggtatagctgaataaaaggcagcagaaacttctgcagacttaaacatccctgtctgacagctctgaagagagcagtggttctccagcatgaagtttgaactctgagaatggacagagctgccagtagggatttactgacacctcatacagccaagtgtccctctgagatgaagcttccagaagaaggatcaggcagcaatatttgctgttctgcagcctccactggtgacactcaggcaaacagggtctggagtggaaccccagcaaactccaacagacctgcagctgagggtcctgattgttagaaggaaaactagcaaacagaaag

SEQ ID NO: 786790 - DNA, 606 bp, Homo sapiens
aatagtaaatctagtaatgtattctaaaaaaaattctggagcagttgggtatctcaggaatagaagcaaacgtttaacagtttgcccaagcagcttttattttattttattatttttaaagagacagggtcttgccctgttgcctgggttggaatagtggcacgatcatatatctcacagcatccttgaactcctgggttctagggaccctctgccttagcctcctgagtagctgggactacaggcacacaccacaatgcctagctaattttaaaaaagtttttgttttgtagagatgcagtctcactatgttgcccaagctagcctcaaacccttggcttcaaatgattcttcaaccttggtgccccaaagtgttgggattacaggcgtcagtcatggcacctggcctgagcatrttttaataagtcgccccatgtttggagaatttctaacattattaatattactttcccaatgcagaaaccaggaacacaagtttttaaacttcctttgtcatgaaggcatagacacatgatgaacacactgctactgacattaatttctgcttttatctgcatagctggtacctccaggaaaaggagagga

SEQ ID NO: 786791 - DNA, 632 bp, Homo sapiens
aagcacttgagctttttttccaatttttggctattatgcacaatgctgctgtgaacatttgtgtacaaattttagtgtggatgtatattttcatttcccttggttgtatcactaaggaatacactatctgggtcatatgataattgtttaaractacaggcacgtgccaccacacctggcaaatatttaaaattttttttgtagataaagggtctcactatgttgcccaggctgaccttgaactcctggcctcaaaagatcctctcacctcagcctcccagaaagtgttgggattacagttgtgagtcactgcacctataaaagaggctcatacctctttttacgtattttttttttttgagacagtgtttcactctgttgcccaggctggagtgcagtggtgggatcacaactcaatgcagcctggacctcactccatatgattctagttgtgggtgtctttcctgtagtttttattatgttgtggtatgtttcttctgtacctgtttctttaaggattaatagcatgaagggatgttgaattttatcaaatactttttcagtttcagttgacatgatcatactgtttttgtcatttatttggttgatatgatgtatcacattgtatgtta

SEQ ID NO: 786792 - DNA, 570 bp, Homo sapiens
ctgtgaacatttgtgtacaaattttagtgtggatgtatattttcatttcccttggttgtatcactaaggaatacactatctgggtcatatgataattgtttaaaactacaggcacgtgccaccacacctggcaaatatttaaaattttttttgtagataaagggtctcactatgttgcccaggctgaccttgaactcctggcctcaaaagatcctctcacctcagcctcccagaaagtgttgggattacagttgtgagtcactgcacctataaaagaggctcatacctctttttacgtrttttttttttttgagacagtgtttcactctgttgcccaggctggagtgcagtggtgggatcacaactcaatgcagcctggacctcactccatatgattctagttgtgggtgtctttcctgtagtttttattatgttgtggtatgtttcttctgtacctgtttctttaaggattaatagcatgaagggatgttgaattttatcaaatactttttcagtttcagttgacatgatcatactgtttttgtcatttatttggttgatatgatgtat

SEQ ID NO: 786793 - DNA, 591 bp, Homo sapiens
agtttaatgtaaatattgcctttaaaagataatatagttttcaggtgtctacagtgattttgtaatatttgtgcacatataaaataatatttccaaaaatgtaatccagtggggaaatatactttctaaattctagatttataatttagggtttaaattataaaatcattaaataagacacaagtgaaatatagtcaaatatccccttggaaaaaaattaagtggcctctaaagtgaggtattcatatatgtaattttacaaccctctagtgatagaattaattaaatatgccaccaaattgattaattccaacagtgttaaaagagaagcmctaacaatgccagtgaccatgtaacatggatttaagctacaagtcatagaaatgtgatgagaagcctcagcgctgtaaaacagagggtggaggaaagcttttcctctctcaaatgagctttgcgaggtatatttcttgaaggatagaaagttgaagtgtttaggacttttatgtctattctactttggcttagtttacatgattcttagtttattagcctagaaatggccaagaaaacttaaggctcaataattagtta

SEQ ID NO: 786794 - DNA, 591 bp, Homo sapiens
gaagactattaaatgttcagttctttttttattctgatttcctgtgtatccaggggcctcttatttggctgcatgtatgagtttggctgtaatgaaagtattggccgtatatgaccataaacaggcattcctatttctgtcacatttatattggtcattctgtattaatacatctatatcctgatttctattgaagcatggttatttttgtttgcttctaagcaatgtagctaccctattgacgctgataaaaataaatttctgaacctataagaccgaggattgggcctaggttgtggtaaattggcaagataatggaygctaccctgtcaagagccctctgaagagaaaagtctgccacccttcaccaggtagaaactcctggcagtgccacattttccagtttgacgccctgtgataccctgaaaagacagatgtttgactcttttcaaataatattttaacatattttaagatgcaaaggcattgtgtcagacttttttcttaagaatatatttcattaccactcagaagttagcttccaaaagaaataagtgtgtgcaaaggtttatgatagtggtgtagagaagt

SEQ ID NO: 786795 - DNA, 621 bp, Homo sapiens
atggaatcatcatcgaatggaatcgaatgcaatcatgaaatggtatcaaatggaatcatcttcttatggaatcgaatggaatcatcatcacatggaatctaatggaatcatcatcgaatggtatcaaaacaaaacatcgaatggaattgagtggaataaatcaaatggaaccgaatggaatcatcatygcattgaatcaaatggaatcatcgaatggaatcaaatggaaacataatcgaatggaatcgagtggaaacatcgaatgggctctaagggaatcatcatagaatggaatcgaatggaatcatcatcgaatggaatcgaatggaatcattgaatggaatctaatggaatcatcatcgaatggaatggaatagaatcatcatcgaatggacacgaatggaatcatcattgaatggaatagaatggaaatatcatcgaatgtactggaatggaatcatcatcaaatggactcgaaaggaataatcaccaaatgtaatcaaatggaatcatcattgaaaggaatcaaatggaatcatcatcaaatggaatctaatggaatcatcattgaatggaatcgaattgaatcatcatcgaatggaaacgaaaaggaaaatcatt

SEQ ID NO: 786796 - DNA, 606 bp, Homo sapiens
gttagtttcgaagacaggatccagagattatttaatatgtaataggtcacctgaaatgtttactgaaaacagcttggatcagcccagttttctaccactgaactatgcatttgctttaaaaaacacaactctggggaatattggctgcttccaactgtgttgaaggtgttaaagaaaagagcataaaattaaaaatgatcatctgaggcctttatagtctctgctcaagagactagagtcttccattcttaacraaacacccaaatatcttcataattgggcaaaatttaaatatcagagataattttatcttgaagattgttaaattataatggtgagtcactaccttgccacgtctctaagtcaaaaattaggtctttgtttaggaatcaatggtactctgcaacttggaaataggaagattttagaggactcaaacactgactttcttgtgtgcaaaaaaaagacaagtctttccttgcaaggatacctctaatgctcatacaccacctcccctaacgttaatatagcttccaggtcactaaccagtgtcagagagcagcccatgcaactagaaattcaaaagatgtcgaacacagggtcaag

SEQ ID NO: 786797 - DNA, 616 bp, Homo sapiens
aaatcaataacaaaatcttatccaaaagtaatccatgaattttagaaactacaaacagcttccaaatgattcatggaagcaagaagaaattataataaaaattagaacatgcttaaaattgaattaaaatgaaaagattaccaatcaatatatatgtaaaataactgaagcagtacttagagtgaaatttaccagaagcaattcacattcttgggaaggacaacagcatgcatttagagacttrtccaagatgtatattagttctttgactctctgtcctaatgtagtccagagacctgagctgtctggacattctgtagcatgttacatttttccattttatttaccagttaaaatagactgggtaagaaataacatgctggatggcctagagagacacaagcatccctgagagagaaaatcatctgaagatttaaggatctgtgacatcagtcacagaagattttagagggcccatttttccccccctatactaaggaatactgttctgacacatttgctgagtgacacagaaggcttccacctttgacaaaagcttagggcagaaaaggcctctgcagcaggtccaggatccagggcaagcagccctactgtt

SEQ ID NO: 786798 - DNA, 616 bp, Homo sapiens
aaatcaataacaaaatcttatccaaaagtaatccatgaattttagaaactacaaacagcttccaaatgattcatggaagcaagaagaaattataataaaaattagaacatgcttaaaattgaattaaaatgaaaagattaccaatcaatatatatgtaaaataactgaagcagtacttagagtgaaatttaccagaagcaattcacattcttgggaaggacaacagcatgcatttagagacttatccaagatgtatattagttctttgactctctgtcctaatgtagtccagagacctgagctgtctggacattctgtagcatgttacatttttccattttatttaccagttaaaatagactgggtaagaaatarcatgctggatggcctagagagacacaagcatccctgagagagaaaatcatctgaagatttaaggatctgtgacatcagtcacagaagattttagagggcccatttttccccccctatactaaggaatactgttctgacacatttgctgagtgacacagaaggcttccacctttgacaaaagcttagggcagaaaaggcctctgcagcaggtccaggatccagggcaagcagccctactgtt

SEQ ID NO: 786799 - DNA, 616 bp, Homo sapiens
aaatcaataacaaaatcttatccaaaagtaatccatgaattttagaaactacaaacagcttccaaatgattcatggaagcaagaagaaattataataaaaattagaacatgcttaaaattgaattaaaatgaaaagattaccaatcaatatatatgtaaaataactgaagcagtacttagagtgaaatttaccagaagcaattcacattcttgggaaggacaacagcatgcatttagagacttatccaagatgtatattagttctttgactctctgtcctaatgtagtccagagacctgagctgtctggacattctgtagcatgttacatttttccattttatttaccagttaaaatagactgggtaagaaataacatgytggatggcctagagagacacaagcatccctgagagagaaaatcatctgaagatttaaggatctgtgacatcagtcacagaagattttagagggcccatttttccccccctatactaaggaatactgttctgacacatttgctgagtgacacagaaggcttccacctttgacaaaagcttagggcagaaaaggcctctgcagcaggtccaggatccagggcaagcagccctactgtt

SEQ ID NO: 786800 - DNA, 526 bp, Homo sapiens
gtaaccaagtctttaaatttaacttcaaatttcagaaaattgaggggatagacaaacaaactaaatgaaaccatgaacagtcccacaattccagaatgtgagatattctacgtgacaactagcatggttcctttaaaatgtcaataccggctgggcacggtggctcgcacctgtaatcccagcactttgggaggctgaggagggtggatcatgaggtcaggagatcaagaccatcctggctaacgtggtgaaaccctgtctctagtaaaaatacaaaaaattatctggccgtggtggcaggcgcctgtaatcccagctactaaggagggtgagkcaagagtatctcttgaacccaggaggcagaggttgcagtgagccaagatcacgccactgcactctagcccggtgacaaagcaagactccgtctcaaaaaaaaaaaaaaaaaaagtctatgccatttagcaagggattaagtatggagaaatgtactggattacaaaataagagacaaaaacaaaatgtagtg

SEQ ID NO: 786801 - DNA, 541 bp, Homo sapiens
ttaaaaataaaaagttattatttatattacttgaaggtaagataaaataacaacattgtttgttaactgagcaccaccatatgccagagagagtgctaagcactttacgtggattatctcattgaatcctgacaacactgctaagaaacagatacattcatagacttcattgcaagatgagaacactgaaggactgagagactagaaaataattttcctgaggttataggcaagtaacatggtattcaaaacaggtagtctggccctatgagcctgcttttctaacaactaagaaagagccacaggaaattaaggtatattatgctgccaagttaaacagtctaacaagaagtagcaatatattttagtaggaggagaatctccttgaataacagggcaaaatyacaaggtttccctttctgttcattcatccttgcaggcatgcaatacgtatttgtctcctgcatgtcaggcactgtgttaagtgccagggagaaataatgaaaaacaactgcaacaactagacactgtccctgtcctt

SEQ ID NO: 786802 - DNA, 585 bp, Homo sapiens
gctgctggaacctatagccatgctgattcaggtatgaaggtcttccgtatgaagccagctgataaaaactgggagaagtggcagttttttcaaacacccaaatcttggcaaaaataaataaaaaataaaaaataacaagacataagaagaaacagagaaacctgatgactaaattaaaggagcaaaataaatctccagaaaccaaccctaaagaaatagataaatgagttacctgacaaagaatccaaattaactctcttaatgaagcccagtgacaacagaaatagacaactaagtgaaagcaggaaataattcatgaataaaatgaawatattaatggagatagaaactaaaaaaaaaaggaaccatacagaaactctggagctaaggaatacagtagctcaattgaaaaattccctatcggaaatcaccaatagactgtgtaactgcccaatgggttcacctcgtgccctgcttagacagagctgatttatcaagataggggaattgcaatggagaaagagtaattcaggcagagctggctgtgcgggagatcagagttttattattactcaaatcagtctc

SEQ ID NO: 786803 - DNA, 567 bp, Homo sapiens
ataaaggggcagagagccagttaaaaaaataataaccaaaaacttctcaaacttaaagaaggaaatggacatacaaatccaagaggctcaaagaactccaagttggataatttgcaaaagacctacaatgagacacattacaatcaaactgtcaaaagttaaagacaaagagagaattttgaaaggaacaggatcaaagcaacttgtcacatacaagggagatgcyatatggttatcaatggaattatcagcaaaaactctacaggtcagaagagaatgggatgatatattaaaagggctgaaagaaaaaaaaaactgtcaaccaagaactgtatagccagtaaaactctacttcaaaaatgaaggacaaacaaagagttccccagagaagtaaaaggtgagggagttgatcaccactagacctaccttacaaaaaatgttaaagggagtcctccaagtggaaatgaaaaggcattggatagaaatacaaaagcatacaaaatataaacttctttggtaaaggtaaatatatgagtgaacatagaatcctttaatactctaatggtg

SEQ ID NO: 786804 - DNA, 567 bp, Homo sapiens
ataaaggggcagagagccagttaaaaaaataataaccaaaaacttctcaaacttaaagaaggaaatggacatacaaatccaagaggctcaaagaactccaagttggataatttgcaaaagacctacaatgagacacattacaatcaaactgtcaaaagttaaagacaaagagagaattttgaaaggaacaggatcaaagcaacttgtcacatacaagggagatgctatatggttatcaatggaattatcagcaaaaactctacaggycagaagagaatgggatgatatattaaaagggctgaaagaaaaaaaaaactgtcaaccaagaactgtatagccagtaaaactctacttcaaaaatgaaggacaaacaaagagttccccagagaagtaaaaggtgagggagttgatcaccactagacctaccttacaaaaaatgttaaagggagtcctccaagtggaaatgaaaaggcattggatagaaatacaaaagcatacaaaatataaacttctttggtaaaggtaaatatatgagtgaacatagaatcctttaatactctaatggtg

SEQ ID NO: 786805 - DNA, 614 bp, Homo sapiens
catggaatggaattgaatggaataatcattgaaaggaatcatcatctaatggaattgaatggagtcatcatcattgaatggaattgaatgacatcatcaacaaatgcaatcgaaaggagtcatcatcaaatggaatggaaaggattcatcaaggaatggaattgaatggaacaatcatcgaacagaaacgaatggaattatggaatgcactcgaatggaatcatcattgaatggaatcgaatggtatcattgartggacttgaaagaaaccatcattgaatggcatcaaatggaatcattgaattgacttgaatggaatcatcatcgaatggaatcaaaaggaatcatcgaatggactcgactggaatcatcatcaaatggaatggaatggaatcttcgaatggaatcatcattgaatggaattgaatggaatcatcgaatggaatagaatggaataatcatcaaatggaatcgaatggaatcatcgaatggactcgaatggaatcatcatcaaatggaattgaatggaatcatcgaatggcatcgaatggaaccatcgtctaatggaatggaatggaatcattgaatggactcgaatggaaatatcatcgaaa

SEQ ID NO: 786806 - DNA, 646 bp, Homo sapiens
gtattccttgagtccaggagttaacgaccagcctgggcaacatggtaagaccctgtctctacaaaacagccaagcatggtggtgtgtgcctgtagccccagctactcaggaggctgaggtgggaggatcacttgaccctgggaagttaaggctgcgtgagctgtgatcacgctcctgcacccagcytaggtgatagagtgaaaccttctcacaagaaaaaagaaaatattttaagatgtttgtgttctccaaacattaagttagtgttagtcatattgtgttccagaggttggtttatggttggataccaaaacattttttcagtagagagaatattataaggaaatataaatcaaagagagacagcatgtaaaggtctatgacagaaagacaagttttctatttactagaaggcaggtattgatgccacagcctttggatgttaatgattaagcataggtttattttgcagacttatcagttaccagtttagtgcgtgagttctctatgctgatattctgcatcttctttcaacaggttttttagtctttattaatttgtattgcataaaatatggggcactagcactacaagaaatatttgatggtatacaaccaaagtaagtttgtttttattattttttaaa

SEQ ID NO: 786807 - DNA, 597 bp, Homo sapiens
ctccatctcaaaaaaataaaaataaaaagaagaaaaacttactactgtttttgaactataattttttattgtaatatttttaacacttaatgcttacttgagtgtattaccaaagttaccccagggcaccccttcttcaatgaagtacccagaatgagttttttttttttttttgagacggagtctcgctctgtcgcccargctggagtgcagtggcgcgatctctgctcacggcaagctccgcctcccgggttcacaccattctcctgcctcagcctcccgagtagctgggactacaggcacctgccaccatgcccggctaatttttttgtatttttagtagaggtggggtttcaccgtgttagccaggatggtctcgatctcctgacctcatgatccacctgcctcggccccccaaagtgctgggattacaggtgtgagccactgcgcccggcccagaatgaatttttataaatagtcgaagacacaaaagatcacactggtcggcttccagtgttgccgccagcaagtacgctccctgcgaaagtgcatcaagtcagggccccaggctcagcttctctaagaaccttcagtctg

SEQ ID NO: 786808 - DNA, 623 bp, Homo sapiens
ttacttcatattgtaaattaagagaataatgaaggcattacttctaaatacattaaatttcttcacgagacaaaaataaggacagttgtgttcattttcatggccatcctttaaaagctgaaaatgtttttaatgagtcaaagtacttaaaaataaccagtggcaacaaagaacagaaatgacaggtctctcaggaaatagccaaccaatgcagaaaccagcaaaccaaytaattagaagttctattataaagaaacagttactttaattttttttaagtatcaaaatgatttttaaagctggtcctcaagaaagagatgaatgaccagagcaattaagctacttgaggagtcctaacacattctctcttactgagagcaaaaaggactgcaaaactcaaaagaaactcaagcgaaatgtgactctggatagcagaggcataagtattaccttattcaacaaaattccccaagagtgcagttgttcctttttactttcagaatcagaacaaaataacagaggcgttccattgaagatctacataatggtcttagaagacaagtcgccagtgtcaagaaacaagtccagaaccattcagaagtcagctatgaccttatttcatt

SEQ ID NO: 786809 - DNA, 620 bp, Homo sapiens
acaccggacagtaaacgcagctgctcaggcccggtgcctctcttcatgccttgatgtgaagctggcccctcaattctcaaaccaattttatgaaatactttactacccatttctcctcggccagtttccagctggaagcaacagccctgggctggtataacaagcgatgttcacaaaaactaacgtggttgcatttacaatgagctgggccaacaataattcttcagcaactgggcgtccctggagagagtgctccccttgatttgcttttcctagttggactttccctctgaagggcaggaactgtccccctcgtagcaaggctgcctgyaccaggccttgcccaaggagctcctcactttttgtagctggaattctcttaggacaagtgagctactaagaggtgcttctttaccttcagcccctggatgatccacatacatgagcttggtgtattatcaacattaataaaaatagacaccaattatagagcaactaacagaggaattcagctgaatgaacatgacacctaagatcgaggagctccctgggggcaaagcagcacttgtgatgggtgccattattagtccccacccttcaggtaaggaagttggggcatt

SEQ ID NO: 786810 - DNA, 620 bp, Homo sapiens
acaccggacagtaaacgcagctgctcaggcccggtgcctctcttcatgccttgatgtgaagctggcccctcaattctcaaaccaattttatgaaatactttactacccatttctcctcggccagtttccagctggaagcaacagccctgggctggtataacaagcgatgttcacaaaaactaacgtggttgcatttacaatgagctgggccaacaataattcttcagcaactgggcgtccctggagagagtgctccccttgatttgcttttcctagttggactttccctctgaagggcaggaactgtccccctcgtagcaaggctgcctgcaccaggccttgcccaaggagctcctcactttttgtagctggaattctcttaggacaagtgagctactaagaggtgcttctttaccttcagcccctggatgatccacatacatgagcttgstgtattatcaacattaataaaaatagacaccaattatagagcaactaacagaggaattcagctgaatgaacatgacacctaagatcgaggagctccctgggggcaaagcagcacttgtgatgggtgccattattagtccccacccttcaggtaaggaagttggggcatt

SEQ ID NO: 786811 - DNA, 599 bp, Homo sapiens
attaatatttcaagggtaaaggatgccatttctcttatatatcctatatttagggctggaatccaacctagtcaataatctagccctgatcacatatgcatattcataaaaatgcacctagctgccaattctctcctccttcttgcgatttaaactcatcctttccaattaagaaacttccttctttttgcagaaattggggtcactgtagggaaaggggggtgtctctgattttattttatccactyttttcttcattcggtgaagtctcttcttcatagctcccaattacaaatagcttcatcttgattgcttccctggagtcataaccctctcacagatccacacacacatttgcacacaggttgagcactaggttacctggaggtcccaaagccacatttggaaacactactcggcacagcaaatgacatcgcaaagtcgatgaaatgaaattgtcaagcgtaagaaaatgcaagccgtgcttcagaacgcgctgctgcccatgtgatgtgcaagtggcatcgagtctgcaggataaattcatcttcagacagaaaacaaaagtggaattgagtggtatttaagcatctaaaaat

SEQ ID NO: 786812 - DNA, 605 bp, Homo sapiens
ggtctttgcagatgtaactagttagtatagggtcatactggatcgagtaagtgctaaatccagtgactggtgtccttaaaagaaaggacacagacacacagagggaagaaggccacgtgacacaggacacagaggttggaaggatatgtccaaaagccaaggaacaccaaggatgaccagcagccactggaagctggaagcggccagaaagcgtcctcctctagagcctgtggaagagcctggcctgcgggcaccttgatttggggcttctagcctccaaaaatgcgagagaacaagtttctgttgttttaaaccacaaccgcaatttgttacrgcagccctgggaaactaatgtaagttaccctatccgtgcctcagtttcttcatctgtgaaacaggtataagggcaccaacccaaggtgatccggatgatgaaatgacagtttccagcattttcctcctgtgtgccgggcactgtgccaagtgccataaatatgttaacttatgtaaaacgctgtgtaattctgctttaaaatcttattatgctcagattacatgttttttaaaaaaagtgttggctacaaacagtatgtataattctgttt

SEQ ID NO: 786813 - DNA, 619 bp, Homo sapiens
tgaagaaatctgttaatggaaactttgataaatacaatgaacagatttggttcttcctcatccacataggttggaagcaacaagtattttgattgttgactcatacttctccagtgaagtgacaatgtgttgatggattaaacacagttatttttaagctgctttgacattctctaggcaaagtattatcaggaacagagccctgagatttgagagttgcagatgctttcatgattcttcactgtctgtctctccttacataagtgtttccagaaagctaataaaattattcctgaaggttaaaaacaaggaagttatgaaccggatttgaggttgaaattaggyagggggaacatgaattattttctgtaacgtacaagtggaaacaatttaatcaatcctttttatttttattgaatgtagacagaaaattcagtgcaggtggctgcattgcatttcatttacaataattaaaaaatgtttgagtaaaacagctctgttttggtggacagagatccaggacacccactttcacttacaggtgatccgctctttcactgatcccagcatctgctgcttctgtgtcacaccgctgggggaatgggggatccagagctga

SEQ ID NO: 786814 - DNA, 619 bp, Homo sapiens
tgaagaaatctgttaatggaaactttgataaatacaatgaacagatttggttcttcctcatccacataggttggaagcaacaagtattttgattgttgactcatacttctccagtgaagtgacaatgtgttgatggattaaacacagttatttttaagctgctttgacattctctaggcaaagtattatcaggaacagagccctgagatttgagagttgcagatgctttcatgattcttcactgtctgtctctccttacataagtgtttccagaaagctaataaaattattcctgaaggttaaaaacaaggaagttatgaaccggatttgaggttgaaattaggtagggggaacatgaattattttctgtaacgtrcaagtggaaacaatttaatcaatcctttttatttttattgaatgtagacagaaaattcagtgcaggtggctgcattgcatttcatttacaataattaaaaaatgtttgagtaaaacagctctgttttggtggacagagatccaggacacccactttcacttacaggtgatccgctctttcactgatcccagcatctgctgcttctgtgtcacaccgctgggggaatgggggatccagagctga

SEQ ID NO: 786815 - DNA, 619 bp, Homo sapiens
tgaagaaatctgttaatggaaactttgataaatacaatgaacagatttggttcttcctcatccacataggttggaagcaacaagtattttgattgttgactcatacttctccagtgaagtgacaatgtgttgatggattaaacacagttatttttaagctgctttgacattctctaggcaaagtattatcaggaacagagccctgagatttgagagttgcagatgctttcatgattcttcactgtctgtctctccttacataagtgtttccagaaagctaataaaattattcctgaaggttaaaaacaaggaagttatgaaccggatttgaggttgaaattaggtagggggaacatgaattattttctgtaacgtayaagtggaaacaatttaatcaatcctttttatttttattgaatgtagacagaaaattcagtgcaggtggctgcattgcatttcatttacaataattaaaaaatgtttgagtaaaacagctctgttttggtggacagagatccaggacacccactttcacttacaggtgatccgctctttcactgatcccagcatctgctgcttctgtgtcacaccgctgggggaatgggggatccagagctga

SEQ ID NO: 786816 - DNA, 520 bp, Homo sapiens
ctgatgaaggcatggtcctggctctgctttgtccagctagtgacaatgttagtaacccgcattattgagcacttaataaacaataattctcacagcccgataaagtagttttttatggcatcctcatttttagatgaggaaatagaaatgcagagatgtgatagcttgcccaagatcagtctgtaagaggtataattagagtttgaagccaggtagtcagagtttttttttttctggatattttgcaragaaagtttgagacttaaggaaagagcaaagatgctcttgtgtttaagcagatccattgagcactttttgggtcatggtctctgtacccataaaactctgaaaagtacaggggttgcaaatcatatgcgtgcgtaagccaagcaggtagaatagaggcatgaagttggccagatggtctgtggtgagcaggggagctctccgtggggccacctccctgcagctgtagccagtgagaaagtgagcccagtatggctgatctctagaagggaag

SEQ ID NO: 786817 - DNA, 599 bp, Homo sapiens
tgggaaaacatttgttctctaaaagaaagttgcagatcatactgcaaagtgacagctgagcaaaggctcccccttgagaagggcatgtgctactcagctcatggcatctgggctctcattgataatggggggtaggttggaagattcttggaagccacagcaagacacaccacacctgggctctcataatcattttgccaccctagagagctccagacacacgattggccctctaacagaggaacattttaatacaagtgtgtactgctcaaggactcatttgytaagttaggggcagactccttggtaccaccaaatcctatttttcctaaatcggtcaatgtattgtcatatcccctgtgtgcagttttaactctgtgagtctggatttgaatggaggcccagctttattctagctgtgcaactgtgggcaagttccatcttctccaaagttagcttcctcagggtattgcaagaattaaatagcaaaatgcacataagtgtctggcgtagagtaagtgatagcttcctttcttttcctcattttaatcaattacccagttggtggatgtgataacaaatgaacttcctgaagatca

SEQ ID NO: 786818 - DNA, 577 bp, Homo sapiens
gtgccagataggaagtaaaactttgcaaggtatggcaaagttccccagaaggctgtatacacttgaaatcagtgtctaatatatggtgccatttctcccatagccagggttcatggatccacaaatcagggggtggaattgggagtggcaccwctcatcattatccctagtgacctattagcaaaatgtttgcttcctgttcttgtgactttatgctttcctatcctagaggtcttagttccaaagagagagatgcttccaccaggagacacaacactgatttcattgcactggaatttaaaactgctgcctggctgctttggcttcctcatgcttccaaagcaacagacaaagaagggggttacattgctggctggggtgagtgatcctgactaccaaggggaaattggactactactctacaatggaggtaaggaagaatatatctggaatacaggtgatcctttacggtatctcttagtattactatgccatgtggttaaagtcaatgaaaaactaccacaacccaattcattcaggactgctaatggcccagacacttcaggattgaaggttt

SEQ ID NO: 786819 - DNA, 538 bp, Homo sapiens
ctttctcctacttcatccgtcagcaacatttggccctgctggtcacgctttcttgaaagcctgtcttcactttgcttcttgtaccccactctttcatgaatcttcttttaactcattggctactccttctcagcctcaatttctagatagccstcatcttccttaattctaaatgttaggggtactaccaggctcacttttaagaattttttttaataaatattcagtctgtagttgatcttaactaattccttgaccttaagtacaatctataagctgtcaactcccaaccttattttccagccctgacatctcccctgatctcatcttactgcttattcaacatctctacttgatggtctaataggtatcccaaatgtcacatgtccagagctgaatttgtgctgcattcctatcactccccccagtcagtaagtggcaaccctaaacttccattttgttaggccaaaaaatcttagcatcatcctgtctcctctttttactcatactcccttcaatgtatcgggaaattctactg

SEQ ID NO: 786820 - DNA, 629 bp, Homo sapiens
gctttttttacactttctttgcaagatatatggtgctggatcatggactccatcaccgatgaaaaataaaattatgtgtttattggatttgagtgaccttttcttccaacaatctcaggaaaccaaacttttagcacatccactccttaagtaattttaacatgcagagaggatgagaaggtcaaacagttacaagaagtctgctagccaatgtcagcggaatgcattaggtgtcagtagagtttctatttcaaatattaacaaacaggacataaagctacagtatagctggggtgaagcaagaggcatgcygggaaatgtgctaaataaccctcaggaatcgggcagtgcagccagccttctcagagagtgcaggagaggaagaagtaaaaggcaatgtttttaaaaccgaaagctaggatttttatcaggaaagatgcctcacactggagccttaccctcattcaaatatttattttgcttgtgtaaattcagtcatttgtaaaggtagaaaactctcttttccatttgcttcattaattactgtttgcctcctttcactgaacaaattttgcaagattttatgaagtgttttctttgtctgatcttctgtaatagccacctatagt

SEQ ID NO: 786821 - DNA, 668 bp, Homo sapiens
aagataataagagtagatttagatttaaatttgaaaatgaaatttgcaaacaatatgattaatgccaacacattgtggactggtgaaaggtctgtgacattattacacaggaaatgatacaaccagcatgttccccaagctgtgtttcatgggccactatttccgcctgataaatagaccatgagaacaggatggacaagtgaatttagaaataggatattatattgccctcttggagagatcagtgcctgttagccttttaaagactcttaagaggtagaagtttggtttgtttcccaaatgtatttgattagagaacaattttagaaaatgaaacacttctgccttgtttccaccagtaagggaygggaaattactcccttcttgtattttccttttagataggaatgcgtgtagtactgcgtgacatcatttaaatgaaagttgccctgtagtcttgtcatttttttgtgcatttctttcacacctaaaattaatgctctcaaggtttaaatttttatttgtaaaactggcatctttgtccaaggtaactcttttttacatccaagaaaagcaatttgtcaaaattaaagcgtactgcttttatcattatcctccataagagaactgatcatattctttttgcttatctctaagatatgcttttc

SEQ ID NO: 786822 - DNA, 668 bp, Homo sapiens
aagataataagagtagatttagatttaaatttgaaaatgaaatttgcaaacaatatgattaatgccaacacattgtggactggtgaaaggtctgtgacattattacacaggaaatgatacaaccagcatgttccccaagctgtgtttcatgggccactatttccgcctgataaatagaccatgagaacaggatggacaagtgaatttagaaataggatattatattgccctcttggagagatcagtgcctgttagccttttaaagactcttaagaggtagaagtttggtttgtttcccaaatgtatttgattagagaacaattttagaaaatgaaacacttctgccttgtttccaccagtaagggacgggaaattactcccttcttgtattttccttttagataggaatgcrtgtagtactgcgtgacatcatttaaatgaaagttgccctgtagtcttgtcatttttttgtgcatttctttcacacctaaaattaatgctctcaaggtttaaatttttatttgtaaaactggcatctttgtccaaggtaactcttttttacatccaagaaaagcaatttgtcaaaattaaagcgtactgcttttatcattatcctccataagagaactgatcatattctttttgcttatctctaagatatgcttttc

SEQ ID NO: 786823 - DNA, 606 bp, Homo sapiens
caaaatccacaccctttctattatacattatatcaatcaagaattcattctatagcaatagaacttgttgatggtggtttaaaactgtgggatttattttctcacatgaaaggtagtgtggagacacctgggcgttggcaatggcccagtgtctgggtgatgtcagggcaatgatactgtgatgttctcagcctttcctcacggttgcaagactcaagggaggaagatgagaaggggaagtaggcmctcaaatccaaaaactttcttaggaacctcacagcagatttcatttatatcccattgtccataacagagttaaggaggaggatgataaagagttggacaagccaatgatcagtgtctacacaatcaggttgtgatgtttgatagtagattcttttgatgttgtctctgtagggtaattgttaaatgatcaagcagttcctctgagctcatctccagcgggtacattctgggtcagaagaactgagttttcaagtgcatctcgggtatctggtcacttttgcttctgccaacatagtcttgtccagtgtcagagagaggacatgctgttaagtgctgccacttttcatgtacttcctacaa

SEQ ID NO: 786824 - DNA, 634 bp, Homo sapiens
ttttaaaaaaaactcagaaaactataaataggaacttctcaatttgataagaccatcttttaaaagcctacagctaacattgtatgtaatgatgaagaccaaacacttccccctataatcaggaagaaggcaaagatttcaactctcaccactctctctcaacataacgtgggaaattctagccagcctaataaggcaagaaaaggaaataaaaggcatccagattggaaaggaaaaagaaaaataaccactcaaaacaaaaacaaaaaactttacagaattaatgagtccagcaagatctcaagatgcaaaatcaacatggaaagaytgtgtttctatacactagtaagctagtaaaaaaatgtggaaaatgaaattaaaaatacaatacaatgtacaatttcccgaaaaagagaaatacttaggtataaaacctgcaaaacatgcatagtacttgtgtatgaaaattataaaacactagcgaaagaaatgaaaaagatctaataaattaggagacatagtaagaccatgggttaggatacttatgttaaagatgccagctgtctccaaatttatatagagatttaacacaattcctaccaacatcacagcaagagatttaggaaatagagaa

SEQ ID NO: 786825 - DNA, 522 bp, Homo sapiens
ttccggccttgcctcctcccaggacacagccggccctcagccctgctgctcccccgccccaggtcccttgagcctccagctgctctgagctttatctgtcttcactgaccccctggcccagtcctcagctccagcccagcacagttccggctgcttccgcctggtctgtatstgttccccatcagaggccccattggagctctagcccttcatcagcccagataaaagagatggatggaggtgactttgggggatgcccctcctcacaagcccagaggtagagccctgggttctgacaagggctccctgaggagggttaggggtgggggtgaagactgctgagctctctggaagcccagtccctgcccatctctatcctgcctccgcctttccccttttcctaaggcccaattcctaaggcctcctccaggcagatgccaagactgcaatcaccccattctccaacacacccacttcagcaggaagctctgcactgggcaccctgcccccatctccatgcag

SEQ ID NO: 786826 - DNA, 587 bp, Homo sapiens
ggaatggaatcaaatggaatggaatggaaaggaatagaatggactggaatggaatggaatgaaatggaatggaactgacttgaatggaatagaatgcaatggaatggtatgaaatcaaagggaatggaatggaatggtctcgaatggaatggaatggactcgaatggaagggaatggaatttaatagaatggacccaatgggatggaatctaaaggaatggaatggaatggactcgaatggaatggaatggattggaatcaaatgctatggaatgcaatggaatggactggaaaggaatggmatagaattgacttgaatggaattgaatggaatggacacgaatggaacagaatgggatggactccaatggaatggtgtggaacggaatggacacgaatgaaatggagtggaatagactcaaatggaatggaactgaaatgacatgatttgtatggaatgtagtggagtaaattggactcgaatggaatggaatggaatcgaatggtctcggatggaatggaatggaatggaatggaatggaatggtttggaatggacagaaatggaagggaatggataggaacaga

SEQ ID NO: 786827 - DNA, 587 bp, Homo sapiens
ggaatggaatcaaatggaatggaatggaaaggaatagaatggactggaatggaatggaatgaaatggaatggaactgacttgaatggaatagaatgcaatggaatggtatgaaatcaaagggaatggaatggaatggtctcgaatggaatggaatggactcgaatggaagggaatggaatttaatagaatggacccaatgggatggaatctaaaggaatggaatggaatggactcgaatggaatggaatggattggaatcaaatgctatggaatgcaatggaatggactggaaaggaatggaatagaattgacttgaatggaattgaatggaatggacacgaatggaacagaatgggatggactccaatggaatggtgtggaacggaatggacacgaatgaaatggagtggaatagactcaaatggaatggaactgaartgacatgatttgtatggaatgtagtggagtaaattggactcgaatggaatggaatggaatcgaatggtctcggatggaatggaatggaatggaatggaatggaatggtttggaatggacagaaatggaagggaatggataggaacaga

SEQ ID NO: 786828 - DNA, 587 bp, Homo sapiens
ggaatggaatcaaatggaatggaatggaaaggaatagaatggactggaatggaatggaatgaaatggaatggaactgacttgaatggaatagaatgcaatggaatggtatgaaatcaaagggaatggaatggaatggtctcgaatggaatggaatggactcgaatggaagggaatggaatttaatagaatggacccaatgggatggaatctaaaggaatggaatggaatggactcgaatggaatggaatggattggaatcaaatgctatggaatgcaatggaatggactggaaaggaatggaatagaattgacttgaatggaattgaatggaatggacacgaatggaacagaatgggatggactccaatggaatggtgtggaacggaatggacacgaatgaaatggagtggaatagactcaaatggaatggaactgaaakgacatgatttgtatggaatgtagtggagtaaattggactcgaatggaatggaatggaatcgaatggtctcggatggaatggaatggaatggaatggaatggaatggtttggaatggacagaaatggaagggaatggataggaacaga

SEQ ID NO: 786829 - DNA, 641 bp, Homo sapiens
gataataaacgtgtattgttttaaactgctaaatttgtgacaatttgttacagcagcaatagaagactaatacaattctttacacccaaataaattccatatgtatcaatgatgaataaatatgattacaaaataattaaaatttcctgtacaataaattatcacaaataaaaatcaaaattcaaataacaagctgggaaaatatttgtaacatagaagccaattggataattaacctactatttaaataatgtgcacaaatcaatagtaaaatttattctcacccrtagtaaaatgaaatcaaattaaaagcacatgagttatcacctttttgcttatcatattatcaaacaccaaaaagttttgttcagggtgtgaaagaacaggcactttcatttcatattgtttgtgatgtaaattgttaattcctttgaaaagcaatttgacaataccaaaattttaaatgcacatacctttaataattctacattttaaaatttatcctaaagatacaactcattaatgtacctaaagatatttatacaggacttccatcacttatgcaaaatgtgtactaaccgtgctttagaatttaaaattgcttagagtttagaaagataagttggtgcatacaatacagt

SEQ ID NO: 786830 - DNA, 631 bp, Homo sapiens
tcttatctggtttaggaagtttacattttctttatctggtgatcttctagtcaaaggacaacccagtcaaatctaacatctcaatatcttgaattcacctccatctcctttataaagacagatcatttattcatggtaactgtggctgaagtrgaaatatccacagtaattataccactcctttacccacttactcttttaaacaacatagtactgtattctagaaagagatacaaaaatatagttaatttacatgaatcatctcccaattttacttaaaaatatttctggttcctttattaccaaatgaagcccattctaccttcagtaatatgctgtataacaaatacacattttaacctaacagcttaaattttaagatatttccctgtttaaaaaaaaaatcagttcaacaacttaattacttattgacttgctaagacaaatgaagatttgtattttacacacataaggaatgtttataaagcttcttttcttttctggcctatgaaattctgtatgtccatacatggtcaaatacaaagaagtcagcgacatatggaagagatccagaaaacataactgcaaactagtgccattcacaggatccaactggaccctatcatctgct

SEQ ID NO: 786831 - DNA, 622 bp, Homo sapiens
cctgtaggggaggaaataaacctgtttctctaccctcctaggttcaatggctgggcccaggaatcaaactgatgaaaaactatcaagagagaaccaacaacattttaattatgtacacacaaagttttaattacatgcatacaagggaatccagcaaagaaacaagactcaaggaggttgccggatgattaaggtttatatactatctttggctaagcaaaggaaaatgagtttggggcttccaggtggggaaggcaagttataaggtgaggagaagtatggtaagtaaggtttgtcctgttatacaggtaagagcctttcaggtgatgacagcwgtctccaggagtcgctctcttcctggtacggagccatcatttttatgcagttagagaaaggttaaaaaaaaaaaaaaaactcttcctgcactgccggttctcaattccccacaggtcaaaataatccatatgctaaaggggtctattttgaggtggcatcttctggtacctttcaatcccaaaagactggtgggtcataaatactgcttgcttctgttgacccaaaacaactgggagacaggatgaaatgcccaaacacaatgtgaaggaaataagcaaaaacacca

SEQ ID NO: 786832 - DNA, 622 bp, Homo sapiens
cctgtaggggaggaaataaacctgtttctctaccctcctaggttcaatggctgggcccaggaatcaaactgatgaaaaactatcaagagagaaccaacaacattttaattatgtacacacaaagttttaattacatgcatacaagggaatccagcaaagaaacaagactcaaggaggttgccggatgattaaggtttatatactatctttggctaagcaaaggaaaatgagtttggggcttccaggtggggaaggcaagttataaggtgaggagaagtatggtaagtaaggtttgtcctgttatacaggtaagagcctttcaggtgatgacagcagtctccaggagtcgctctcttcctggtacggagccatcatttttaygcagttagagaaaggttaaaaaaaaaaaaaaaactcttcctgcactgccggttctcaattccccacaggtcaaaataatccatatgctaaaggggtctattttgaggtggcatcttctggtacctttcaatcccaaaagactggtgggtcataaatactgcttgcttctgttgacccaaaacaactgggagacaggatgaaatgcccaaacacaatgtgaaggaaataagcaaaaacacca

SEQ ID NO: 786833 - DNA, 622 bp, Homo sapiens
cctgtaggggaggaaataaacctgtttctctaccctcctaggttcaatggctgggcccaggaatcaaactgatgaaaaactatcaagagagaaccaacaacattttaattatgtacacacaaagttttaattacatgcatacaagggaatccagcaaagaaacaagactcaaggaggttgccggatgattaaggtttatatactatctttggctaagcaaaggaaaatgagtttggggcttccaggtggggaaggcaagttataaggtgaggagaagtatggtaagtaaggtttgtcctgttatacaggtaagagcctttcaggtgatgacagcagtctccaggagtcgctctcttcctggtacggagccatcatttttatgcarttagagaaaggttaaaaaaaaaaaaaaaactcttcctgcactgccggttctcaattccccacaggtcaaaataatccatatgctaaaggggtctattttgaggtggcatcttctggtacctttcaatcccaaaagactggtgggtcataaatactgcttgcttctgttgacccaaaacaactgggagacaggatgaaatgcccaaacacaatgtgaaggaaataagcaaaaacacca

SEQ ID NO: 786834 - DNA, 582 bp, Homo sapiens
gggtagctgggattacaggcatgcgccaccacgcccagctaatttttgtatttttagtacagatggggtttcaccacgtttgccaggctggtttcaaactcctgatctcaggtgatctgcccacctcggcctcccaaagtgctggtattacaggccaccacgcccagctctctaaaattaatctttaagtgcccaagaaatgcggtcttcagataagttccccaggaccttttaatgctaacctgttgtgcatacctctgtaggggttgagagaggggaatcggggcaaggtgagagggagccactcaggcaacaaaacaccctaaattctgcatgcttgctctttaagaccatggtccatgcctggcttttggccagtggagaccaaaggcttgggattytgcagaaacagtcacttggccaccaacaaactagaagaagaggagaaattccactaccttgttgaagtgagaaccctctgaacatcattgcttccccacaggacatggccagggacagacaggtatggggagaactgcaagatcagcctcacagcacctttaatccatttaattcccaaag

SEQ ID NO: 786835 - DNA, 583 bp, Homo sapiens
gcatggtgaaacctcctctctactaaaaatatgaaaacgtagctgagcatggtggtgtgaacctgtaatcccagctactcgggaggctgagacaggagaatttcttgaacccaggaagtggaggttgcagagagccgaggtcgcaccrctacactccaacctgggcaacacagcgagtctctgtctccaaaaataaaataaaataaaataaaataaaaatataagtagaagggaagaatttgaatggttctagcctaaagaaaagacaaatttttggcttgcacgtttccaaatcaagagaagcccacatgagaatcctcactcagatccagacctgatgcaaataaagagactctggattttgagctgaaggagtgaaggatgtgccatctcaaaatatgtcaggttggtatattggtgattatttcaagtggaaaacactgggaaaattgtagttcagtaagggatcgctgacctgtctcttcctgtgggcagcaaaccataaagattcttctgagaagcacaccctccctgtaccagggtgagaaaatagcccttatcaccagagacgggaaactggggg

SEQ ID NO: 786836 - DNA, 711 bp, Homo sapiens
acttggtagacggtaacagggagaccggatctagtctgaaggtcagggtaaaacgcttggacaaaattacatatgagctaagatttcaaggagtaggagttaaacagatgaaggggcagagagtgaggaatagaagcacattccaggcaaaggaaacagtatattaagaagaatctaggctgggcacrgtggctcacaactattatcccagtgctctggaggccaaggcaggaggacagcttgaggccaggaattagagaccagcctgggcaacatggcgagagcttgtctctaaaaaaataagaaagaaaaaaattagccgagtgtggcggcacatgtccacagtcctagctacttggaaggctaaggcaggaggatagcttaagcccaaggagtttgaggttaccggtgggctatgactgcagcactgcactccagcctggaagacaaagcaagaccctgtgtcaaataaataaataaataagaagaagaatctatgtcaaaaaaggttaaggtttgtgagaggaattaaaaggaagccagcaagtcagaaagatataatgaagggaagagtgactgataaggtaggcaaggggtagtttcatgcagggcttgtacgctgtgttaggaatttagtctttcatgctaaaagcaacaggaaccactgaaagattttcaagcctgggagtgacaatccgattcacattttta

SEQ ID NO: 786837 - DNA, 609 bp, Homo sapiens
gaaatatgtgggaaggcacttgagaaaagagtgagacaaatagataaacaagtgtgtgaaaacaatggtctcagctcagctagttcaatatctgaatgggagaatctcatcaggagaaatgatgatagagagattttgaagaggcactgacagggtaacttactaggcttagcttggatttgatgtcatcagtaaagtgaaccattacaaatctcgggcaagttagccacatggtagaaatggtaactgcaaggtggggcacggtggctyacgcctgtaatcccagcactttgggaggccaaggcaggcggatcacctgaggttgggagtgcaggaccagcctgacccaatctctactaaaaaaaataataataatacaaataattagccgggcgtgatggcaggcgcctctagtcccagctactcaggaggctgaggcaggagaatgaacccgggaggcggagcttgcaataagccgagatggcgccactgcactccagcctgggagacagagcaagactccgtttcaaaaaaaaaaaattggcaccaatcctactgaaactattacaaaagatagagaaagagggagtcctccctaaatcattctat

SEQ ID NO: 786838 - DNA, 609 bp, Homo sapiens
gaaatatgtgggaaggcacttgagaaaagagtgagacaaatagataaacaagtgtgtgaaaacaatggtctcagctcagctagttcaatatctgaatgggagaatctcatcaggagaaatgatgatagagagattttgaagaggcactgacagggtaacttactaggcttagcttggatttgatgtcatcagtaaagtgaaccattacaaatctcgggcaagttagccacatggtagaaatggtaactgcaaggtggggcacggtggcttacgcctgtaatcccagcactttgggaggccaaggcaggcggatcacctgaggttgggagtgcaggaccagcctgacccaatctctactaaaaaaaataataataatacaaataattagccgggcgtgatggcaggcgcctctagtcccagctactcaggaggctgaggcaggagaatgaacccgggaggcggagcttgcaatragccgagatggcgccactgcactccagcctgggagacagagcaagactccgtttcaaaaaaaaaaaattggcaccaatcctactgaaactattacaaaagatagagaaagagggagtcctccctaaatcattctat

SEQ ID NO: 786839 - DNA, 577 bp, Homo sapiens
aattcattaactatacacatttaacaccttctcaagaaatgaaatgttttagcttgggattgaaaggagctactgacaaaattggcttttgaaggctaagaaataaaattttaccaatagaaattgctttttccatgctgcagtgagcatctcacttaatttcaactcatctggcttggtgtttagaataggagaaaaaagaaacagaatctttttgttctaaattattctctaaggatatatatcctaaattatccttaaagtattcctttagatgtgaaattttttaaagaaaacttattttcaaatgaatgcctttgtactgtaactagayttttagaacaagaagtaaaataatctgatcttgaattcactgtctgacacaaaataacgtcatccatatttgtatctaatatcatctagagcatacagtagaagtgaaaacagggttccaatacagggatcccagtgattcccacacatcctagtatctgcacctcacattgcaccagcattgatctttgtaaccaatagaatatgacagaagtgatgaatgttacttccaagattatataat

SEQ ID NO: 786840 - DNA, 632 bp, Homo sapiens
aaattaaacttgtaaataatcaaacaaaaagaactagttaaaaatcttgagagaaacacagaattaaatattgtggtactcttaaaagtaatgatttttaatacatatatttttaagaaacttgaaaatatataaactggcaattaaaatttaagcataacctctcatgttatgaacaataaggaaagatttacaaatgtacactatcactttgcttaagggcattggggaagacacaagacaatgaagaattgctagaacaatattccactaaaggaaaatctagagcaattttttcagcagaaggaaaatgctcccaatataactcacaaaaaaaatatagattttaaaaaaagtatgtaakggacaatgggaatatactgcctgtattaaaaaaattctaacaatgattgcagggaaaatatagatacgtatgtacgtgcatgtgtgtgtgtatttatgtatttatatttatgtttataagtataaatatatgatgtattctgtattatacagattatatgattacatatgcttattcatatttataaatattatgaatgcatttatacttatggaatatattttgtatgtttataaatatatacatctatctatataaatatttatct

SEQ ID NO: 786841 - DNA, 508 bp, Homo sapiens
ttataaagtgggctaaggactcaaataacatttttccaaagaagacatacataggtcaacaggtaagtgaaaaagtactcaatgccaccacttaccagggaaatgcatattaaaaccaaaatgaaatatatcatactcagcaatatgactattatcgcacacattaaaaataacaatatgagttggtatgaaggtgaagaaattgtcactcttgcatggtgttggtgaaaatgcaaaatggtgcagacactatggaaaacaatatggaggttccatgaaaaattaaatacagaactatcatatgatccagcaaccccactkctgggtatttatcgaaaatattttaaatcaggatctgaaaaatgatattagcattcctatgtttatgacagcaataacaatacctaagatgtgaaaacaatctaaatgtccattgacacttgaatgaatatacaatggtatatatacacaaaagattactcaaccttaaaaaagaaagacatcctgc

SEQ ID NO: 786842 - DNA, 581 bp, Homo sapiens
taatttctttgaagatactgtgtagcttttcgtgttgatcccttaaattctttattatatatatattcctagacattttatatcttttgatgctatcgtaaaagatatagtttggccgggcgtggtggctcacgcctgtaattccagcattttaggaggccaargtgggtggatcatgaggtcaggagatcgagactatccaggctaacacggtgaaaccccgtctctactaaaaatacaaaaaattagccgggcgtggtggcgggcgcctgtagtgccagctactcgggaggctgaggcaggagaatggcatgaacccgggaggcagagcttgcagtgagccaagatagcgcctctgcactccagcctgggcgacagagcgagactccatctcacaaaaaaaaagatatagtttaatttaactttgtgtcttaatttattgttgctaaaatatagaagttaaaaaaaggtaggctttttatgtctagtaaccttgctaatttcacctattagcttgaataatttaactgttatttatgctgcactctctcattatacaagcatgtaatttgtgaaagaaa

SEQ ID NO: 786843 - DNA, 553 bp, Homo sapiens
agaaggtgagattgagactaactgctaataattaccaggtttcttttttgacatgatgaaaatgtctggaatgaaatagtggtgatgtttgtacaacatataagtaaactaaaaatcactatattgtgcattttacaataatgaatgttgtgtgaattgtgtctcaatttaaaaactttttgaggtatattgtttaatttgcaaaaacagatggtctmtggcttatggtagtttaacatacaattttttgaccttatgatacgtttattaaggtattaagtacatttttgacttatgagtttatcaggatgtactccatcataagtcaaggaacatcgatatgtggtgatgtttgtattattgtttgaaatttattttcatattaattctcttataatcaaagaaactgtgtattatttaaatcttttgacatttgttgaaatttaatttatatactagtatatgatccatttggtcgatagtttataattataaaaatgtgcattcagttgtagttcattatagtgatctatatatgtcatttaagtcaagt

SEQ ID NO: 786844 - DNA, 608 bp, Homo sapiens
cactgaacaactttgaaaaattagaaaagcataaagaagaaaatgtaaatcacctataagttcaccatccagagacaaactcagttagtcatttgatatatattcttccactattactttacaatattttttcacaaaaaatattataatatatacacattataatgtagtttggtgttctttttatttaaaaatatgtgtaaacatctttccatgtcattaaatgtttctctcctgtagttctttggttttcattttggctttaagcagtyaccataatttaataataaatcttcattgttggacactgaagttgtttctcaaatttggaattgttatagataatttttatacaattatccttttattcatatgtatgcaatatggtctaagtataatcctataagtgggattggtgtgtcaaagtgaacaaacattttaagatttttgatacatgtatatggttaagttgcctcctagaaaaattatatgacttgacttccattcaagatgatgtgagtgttcattttgctacaccatctattactgaataaaattcatttttgactgggtgcagtggctcatgcttgtaatttcagcgctttggg

SEQ ID NO: 786845 - DNA, 542 bp, Homo sapiens
aattagaaaagcataaagaagaaaatgtaaatcacctataagttcaccatccagagacaaactcagttagtcatttgatatatattcttccactattactttacaatattttttcacaaaaaatattataatatatacacattataatgtagtttggtgttctttttatttaaaaatatgtgtaaacatctttccatgtcattaaatgtttctctcctgtagttctttggttttcattttggctttaagcagtcaccataatttaataayaaatcttcattgttggacactgaagttgtttctcaaatttggaattgttatagataatttttatacaattatccttttattcatatgtatgcaatatggtctaagtataatcctataagtgggattggtgtgtcaaagtgaacaaacattttaagatttttgatacatgtatatggttaagttgcctcctagaaaaattatatgacttgacttccattcaagatgatgtgagtgttcattttgctacaccatctattactgaataaaattca

SEQ ID NO: 786846 - DNA, 608 bp, Homo sapiens
aagatcattcatcatgaccaagtcgaatttacaccagggatgcaagaatggttcaacatatgcaaatcaattaatgtgatacattatatcaacagaatgaagaacaaaatccatgtgagcattttaactgatgctgaaaaagcatttgataaaaattcaacatcccttcacgataaaaatactcaaacaacttggtatagaaggaacattcctaaacatartaaaagccatatatgaccgaccaacagctagtatcatactggatggggaaaaactgaaagccttcctctaagatctggaacacaacaggaatgctcactttcaccacagttattcgacatagtactggaagtcctaactagagcaatcagacaacagaaagaaatgaatggcatccaaattggaaaggaagaagtcaaaataaccttgtttggagatgatatcatcttatatttggaaaaacctaaagactctacaaaaatactatgagaaccaataatgcagtaaagttgcaggatacaaaatcaacatacaaaaatcagtagcatttctatatgccatcagtgaacaatccaggaaataaatcaaaaaagttatcccatttacaa

SEQ ID NO: 786847 - DNA, 592 bp, Homo sapiens
agaggttggaagaattggagggctcagaagaagacaggaagatgagggaaagtttataacttcttagagacttgttgcattgttttgaccaaaatgctgatagtgatgtggaaaataaagtccaggctgagttggtctcagatggagatgaagaacttcttaggaactgaagcaaaggtcacttttgttatgtattagcaaagaggttggaagaattctgcccctactcaagagatctgtggaactttgaacttaagagagatgatttagtgtatctggmagaagaaatttctaagcagaaaagcattcaaaatgtgccctggctgcttttaccagtgtatgcttatatatgtgagcaaaaagaagatctgaaactggaacttacatttaaaaggaaagcagaacgtaaaagtttggaaatgtgcagcctggccatgtggtagaaaagaaaaacccattttcaggggaggaattcaagctggctacagaaatttgcataagaggagcctaatgataacagccaagacaatggggaaaatgcctcaaaggcatttcagagacctttgcagcagctcctgccatcacaggtgtg

SEQ ID NO: 786848 - DNA, 586 bp, Homo sapiens
ctctggggccagtgggaggctcagcctggaggctctgagacctgctcagcccttgttttactgggaccgctctgctgcatgtagagggaagatgccaggtgtgcggtgtggagcttagggagcttagagccgctggaatggtccaggagacgtgctggtggcctggcgcaggttgaggggggcaggmggaggtggggaggtgtagccaactctggatgtgtgtgcgtgttaattgaaattttcttttgagaacattgtagattcacattcggttacaagaaataacatggagaggccggacgcggtggctcacgcctgtaatcccaacactttgggaggctgaggcgggaggatcgcttgaacccaggatttcgagaccagcctgggcaacatagggagacccccatctcaaaagaaaagaattagttgggcatagtagcatatgtctggggttccaggcatttgggaagctgaggtaggacgattgcttgggcctgggaggttgaggctgcagtgagctgtgattgcaccactgcactatagcctgggcgacagagtgagatcctgcctggaaaaagaacacaga

SEQ ID NO: 786849 - DNA, 586 bp, Homo sapiens
ctctggggccagtgggaggctcagcctggaggctctgagacctgctcagcccttgttttactgggaccgctctgctgcatgtagagggaagatgccaggtgtgcggtgtggagcttagggagcttagagccgctggaatggtccaggagacgtgctggtggcctggcgcaggttgaggggggcaggaggaggtggggaggtgtagccaactctggatgtgtgtgcgtgttaattgaaattttcttttgagaacattgtagattcacattcggttacaagaaataacatggagaggccggacgcggtggctcacgcctgtaatcccarcactttgggaggctgaggcgggaggatcgcttgaacccaggatttcgagaccagcctgggcaacatagggagacccccatctcaaaagaaaagaattagttgggcatagtagcatatgtctggggttccaggcatttgggaagctgaggtaggacgattgcttgggcctgggaggttgaggctgcagtgagctgtgattgcaccactgcactatagcctgggcgacagagtgagatcctgcctggaaaaagaacacaga

SEQ ID NO: 786850 - DNA, 586 bp, Homo sapiens
ctctggggccagtgggaggctcagcctggaggctctgagacctgctcagcccttgttttactgggaccgctctgctgcatgtagagggaagatgccaggtgtgcggtgtggagcttagggagcttagagccgctggaatggtccaggagacgtgctggtggcctggcgcaggttgaggggggcaggaggaggtggggaggtgtagccaactctggatgtgtgtgcgtgttaattgaaattttcttttgagaacattgtagattcacattcggttacaagaaataacatggagaggccggacgcggtggctcacgcctgtaatcccaacactttgggaggctgaggcgggaggatcgcttgaacccaggatttcgagaccagcctgggcaacatagggagacccccatctcaaaaraaaagaattagttgggcatagtagcatatgtctggggttccaggcatttgggaagctgaggtaggacgattgcttgggcctgggaggttgaggctgcagtgagctgtgattgcaccactgcactatagcctgggcgacagagtgagatcctgcctggaaaaagaacacaga

SEQ ID NO: 786851 - DNA, 561 bp, Homo sapiens
gctccagcctgcacagatgcggcatcatggcttctccgtgtccctcaggccttcgtcaagatggttggacaccacgtcgccttcctggaagcagacgtgcttcaggctgagcgggaccatggggccttccctcaggccctgcggaggtggctgggatccgcagggctccccwccttcaggaacgtgagtatcctgccccgagaagtgaggggagggcctctcccccttcgctccgcagaccccagcgtggggaggagcatgcaggaagcagagttcaggggggcacatttcacttctgcagacaggaaacgggtacaggcggccaggcacctcagcctttctctgtcccctgtgagccctgggctgtgacggttcgtgtgctcatgtaccatttattgggcgcctactgtttgctgagtgccatctgaggttactgtggtgagcagaaacagctcccgccctcctgcccatccttgcacacttagggacagtgcccaggatgacatctagaattccggccaggttgcccttcctgaggcaggagtcagcctcaagctggcc

SEQ ID NO: 786852 - DNA, 561 bp, Homo sapiens
gctccagcctgcacagatgcggcatcatggcttctccgtgtccctcaggccttcgtcaagatggttggacaccacgtcgccttcctggaagcagacgtgcttcaggctgagcgggaccatggggccttccctcaggccctgcggaggtggctgggatccgcagggctcccctmcttcaggaacgtgagtatcctgccccgagaagtgaggggagggcctctcccccttcgctccgcagaccccagcgtggggaggagcatgcaggaagcagagttcaggggggcacatttcacttctgcagacaggaaacgggtacaggcggccaggcacctcagcctttctctgtcccctgtgagccctgggctgtgacggttcgtgtgctcatgtaccatttattgggcgcctactgtttgctgagtgccatctgaggttactgtggtgagcagaaacagctcccgccctcctgcccatccttgcacacttagggacagtgcccaggatgacatctagaattccggccaggttgcccttcctgaggcaggagtcagcctcaagctggcc

SEQ ID NO: 786853 - DNA, 561 bp, Homo sapiens
gctccagcctgcacagatgcggcatcatggcttctccgtgtccctcaggccttcgtcaagatggttggacaccacgtcgccttcctggaagcagacgtgcttcaggctgagcgggaccatggggccttccctcaggccctgcggaggtggctgggatccgcagggctcccctccttcaggaacgtgagtatcctgccccgagaagtgaggggagggcctctcccccttcsctccgcagaccccagcgtggggaggagcatgcaggaagcagagttcaggggggcacatttcacttctgcagacaggaaacgggtacaggcggccaggcacctcagcctttctctgtcccctgtgagccctgggctgtgacggttcgtgtgctcatgtaccatttattgggcgcctactgtttgctgagtgccatctgaggttactgtggtgagcagaaacagctcccgccctcctgcccatccttgcacacttagggacagtgcccaggatgacatctagaattccggccaggttgcccttcctgaggcaggagtcagcctcaagctggcc

SEQ ID NO: 786854 - DNA, 653 bp, Homo sapiens
aaacacagctttatgccaaaactgcattaggacattctttttattgatattatttttaatacaaataatacattaatacaagtttttttggcaatttattttagcaataaataatttgcctcttactctgctaacaagttaaaacaggggttggcaaactatgtccataggacaaatctatcccacagagtgtttctgtaagtaaagtttcattggaacacagccacatcctttcagttacacattatctatggctgctttcctcctgcaattgcaaagttgaatagttgtgacaaagcctcacgaagctgaaaatatttgctgtgtggttcatatatatatatatatatatatatatatatatatatwtttttttttttttttatattatacttcaagttctagggtacatgtgcacaacgtgcaggtttgttacatatgtatacgtgtgccatgttggtgtgctgcacccattaacttgtcatttatattaggtatatctcctaatactatccctccccgctccccccaccccacaacaggccccggtgtgtgatgttccgcttcctgtgtccaagtgttctcattgttcagttcccacctatgagtgtgaacatgcagtgtttggttttttctccttgcgatagtttgct

SEQ ID NO: 786855 - DNA, 611 bp, Homo sapiens
ttgatatttttgaatttattgagacttgctttatggccaagtatatggttgatttagagtatgtcccatgtgcaaatgagaaggatgtatattctgtggttgatgggtggagtgttctgtagatgtccattaggtccaattggtcaagggtcaaatttaagtccagaatttccttgttagttttttgcctcagtgatctgtctaatgctgtcagtgggatttttgaagtcccccactattaatgtgtgactgcctaagtcttttcgtaggtctaaaagcactcrttttatgaatctggttgttgggtgcatatgtatttaggatagttaagtcttcatgttgaactgaactctttatcagtatgtaatgcccttctttgtccttttttttgctgttgctggcttaacgtctgttttatctgatatctgatatatccatctctttcctttgagcctatgggtatcattacatgtgagacggatctcttgaagacagcagatggatggatctcatttttttaaatccaccttgccactctgtgctttttatatggggtatttagaccatttgcattcaaggttagtattcatactgaggaatcgatcctattg

SEQ ID NO: 786856 - DNA, 642 bp, Homo sapiens
tgatgacagcagtccacagttacaggcacttgctgaacgaggggctctgtatacacctcagctcattgactcttcccacaaccctcttgtcacctaccatttagcaaatgaaaaaaccaaggctctgaggtgagttgtttgcccagagtcacccagtgctgtttgaacccactcacataaccaaccaataccattaygtaatttttgaggtcttttatctctgtgatccacttaaaaattatccaagtatctttatttgtactaagcctccataatgagaaacagtgttccagatggtggctagttttcaaagacatctctctttggaattcttctttagaacaaaaagccccagaccacttatccccattcatatcccctttggacctagggagaaggtactatttataggtgatcacctgagtttattgtcccttgtgctgtgccagaaataaaggtccccacctgctcttattagctctactaacaggataaggaaagtggccctcagagagctactgcttttgtgacaaacaaatgatacaagaaaaaaaaagtggctttttaattttagtgacctggggcaggacttccaaatgaaagtttatttctaaaaactaaaaggtaaatttaatatacttt

SEQ ID NO: 786857 - DNA, 584 bp, Homo sapiens
atgcacctgctcccgggaaagctctgagcctagtgctccttgtgtgaggtttaacaggacaggctcagtggccactctgagagcccgcccacccggggaaggtgatgcacatgcagcctccagatggccaaatcaggcagcatgtctggcccaggtgtcacagaagccggggcaggaagagcctctggggccggatgtttcaccaggtctgggaggactcagtaaatattaaacagcccctggcatgccagacaagcttccagacgggcacrtgcaacctgccggccccagccctcacgtgaggttgctacagcagtccttctgcctggtgtggttggcagaggccttggtactcggctgttgcaagtgcaggctctggaggcagacagggccgggctcaagtcctgcacctgcccccagcctccaggcgggacaattataggactgactgcacaggcttcaggtgaagactccatgcaacaaggacgtgagccaaccatttacccaggtgcctggcggtgctggccactgggtgatgatgacaggcatgcactcggcacttgccaagctcaaattctgctctc

SEQ ID NO: 786858 - DNA, 658 bp, Homo sapiens
agtggcctgggacaatgaggggaacctgaagtgctgtgggtgcaagaggtcctgtgttctcagccctgctcagctccagatgctgtgcaaccgtggcccatcaccgctcctctctgagcttcaggttgccatgggtgacctctgaggccttcctgctcataactgtggagtcagagaaaacagccctgcatggcaaggagggagatttgtgttcttggtgtcccaacagggccaaggacctgctggggaaccccaggcaggttgccctctgtcttgtctcactttcttcattgtgaaatgatgaactctgagattattcttgtgctgctgcttcatgtgtcaagacttgcagggagagtgtawccctttggggtccaaggtggcctggctgagtcggtcattccaaccccttcagtcctggatttcttctccctgagcagctttactcctgtggcctcaagttggcctggagaagcttggctgggctggaccatcccggaggcgacaggcatgctgggggagcggacaatgttacaaaatgttccccagaggagctgcctatatatgcagaccacacctgtgcttctccccggtcacgtgtgtgggctgaccttgcagctcacaaaggctcatgggcattaactgtccattaccagga

SEQ ID NO: 786859 - DNA, 603 bp, Homo sapiens
gcatttgaccgtgaccccagccaggctgggctttggggaggagggaaacagccagcatgggccccctccccgcagggctggtcccacacacagccccagaccaggctgctgcttcctgagccgatgaattattaccgggagatttccttccctgtctgcgcctcctcacaggggctcccagctcacttcactttcgctttctcccccttctccccctcctctctgcttctgaccctcaggcagcttgaaattcctctgtccagccccctcccaattccacctccaactggagatgccaaccaaggcgtgaactgggcccggaaggcgaagaggggcttgccttgtaggctcattcatttatttgctccttaggcakattttgacacttgggaccctgggagtagaagaaaaccatgaatgagactgagacaggccttctgcagccgagaggggaaggcgagctgtaaacaaaggatttcaagacaatgtggtaggagcaagccagggtctggtatcagagagacccagttccggttccaaggttagctgcttcccagagtctcagttgcctgctctgaaaatgagataataatagtacccatt

SEQ ID NO: 786860 - DNA, 620 bp, Homo sapiens
ttctttgcctgcctaacaggcatgctccttatttagggattagccacagtgagacttccatggaaagttgaatgtggccctaatcgggggcagggttgggtttgcccactgtccctgtcggtgcattagatcaggttaatcagaccaaatcacgtacaggattaggcaggccacagcttgaagcttcatggcagaaagggctggatcggtgttgacttmcatttttcagtggggtgtgtgtgatgggcttgctgaggttttctgtggctcatcaatggtctgcccatgtgccagctcccacagcctggctgcctcccagggacctttgctctcaactgcttggggagatttgcttatcctgggcgtcagggcactcatcagcacagacctccagccagggtggccatagggaaagagcaggtggtgtgcagagatgtcaaacaacagcaaagggttctgggtggggagccacgcaggccagcagagtccttgggccgggcctgcttcacgggcacatagagctgggcagccacacaggaccctgcactaaaaaaggccctgtgcttggtttgatgctctgtggtttatgtcttgaaattcttaataagtttggagcattt

SEQ ID NO: 786861 - DNA, 629 bp, Homo sapiens
aaagattccaggcacggcttaactggatcctcagctctgggtctcacaaggcttcagtcaagatgttggctgaggctgggatctcctctggaggcccagggtcctctcccaaacagatgtggttattggcaaagttcatcttgctgcagctgcagaactcatggaggcctggttcttccaggatagcagaagcatggctgctactatgaaccttgcccttcttccttctctgatctctagagcttctttcaaaaggttcacctgggctgggtgtggtgcctcgcgcctgtaatcccagcattttgggaggctgaggtgggtggatcatgaggtcaggagatcgagaccatcctgaccaacatggygaaaccctgtctctactgaaaatatgaaaagtagctgggcatggtggggtgcgcctgtagtcccagctacttgggaggctgaggcaggagaatcgcttgaacccgggaggtagaggttgcagtgagctgagaccgtgccactgcactccagcctggcgacagagcaagactccatctcaaaaaaaaaaaaaaagaaaagaaaagaaaagaaaaaggcccacctgatgaggtcaggcccacctaggatcatctccctttgatgaa

SEQ ID NO: 786862 - DNA, 592 bp, Homo sapiens
aaacgcaaaccgacagttatttaaacaattctctattgttggatatttaggctggctccaactttttgctcttgtaaataactgtacaatggatatcctggtatataagtctttgcacacatctctgattatttccttagggtaaattcctagaagtaaaattactggtgaaatgattcacacatattaagacttttgataaatgccatcatatttgcctagaaagtttatgacaaataacatttccaacaagaatgtgagtctgtctccccagcccctcctcatcttctccagtcctgggatacattaacgaaaatgcagaggaaaaaaacataaataattctacctccaaagtaaaccactgttaacaatttrgtgaatatttcctccagattttttactgtgtacttgtactcatgtatgtgtgtgtgtttcagaaatggaatgatgtatacatattgatttgtgacctgatttttattttattttattttacttttttttagatggagtcttgctctcttgcccaggtgggagtgcagtggtgcaatcctgacttactgcaacctccacctcccgggttcaagtgatt

SEQ ID NO: 786863 - DNA, 635 bp, Homo sapiens
caatttagtactattcaatcataaaaaagaatgagactctgtcatttgcaacatcacggatggaactggaggtcattatgttaaatgaaataagccaggcagagaaagacaagcatcacacgttctcacttattttgggacatgaaaataaaaacaattgaaatggagacagacagtagaaggatggttaccagagggtgagaagagtagtgaggggatgatggggaagtagggacgattaatgggtaccaaaaaaattgttagaaataagacatagtatttgatagcataacagagtgacaatagtcaataatttaattgtacatttaccaataaataagagtataattagattgttaataacacaaaggataaatgcctgagggaatggataccccattttacatgaggtggttacwatgcactgtatgcctgcatgaaaatatctcatgtactccataaatatatatacctactctgcacccacaaaaattaaaaattaaaaataacatattcatatcctcagggaaactgaggaaaaccttataacacagttatttactatacctcaatagagaattttatctcctcagttctattattggttattgtaataaattaactcctcagttcta

SEQ ID NO: 786864 - DNA, 635 bp, Homo sapiens
caatttagtactattcaatcataaaaaagaatgagactctgtcatttgcaacatcacggatggaactggaggtcattatgttaaatgaaataagccaggcagagaaagacaagcatcacacgttctcacttattttgggacatgaaaataaaaacaattgaaatggagacagacagtagaaggatggttaccagagggtgagaagagtagtgaggggatgatggggaagtagggacgattaatgggtaccaaaaaaattgttagaaataagacatagtatttgatagcataacagagtgacaatagtcaataatttaattgtacatttaccaataaataagagtataattagattgttaataacacaaaggataaatgcctgagggaatggataccccattttacatgaggtggttactmtgcactgtatgcctgcatgaaaatatctcatgtactccataaatatatatacctactctgcacccacaaaaattaaaaattaaaaataacatattcatatcctcagggaaactgaggaaaaccttataacacagttatttactatacctcaatagagaattttatctcctcagttctattattggttattgtaataaattaactcctcagttcta

SEQ ID NO: 786865 - DNA, 527 bp, Homo sapiens
atggcaactatattataccatgttgcctttgtcagtcattagaaaataaacaaaatggccaggcgtggtgactcacgcctgtaatcccaacactttgggaggcctgtaaccccagaactttgggatcacaagatcaggakttcgagaccagcttggccaacttagtgaaaccccgtctctactaaaaatacaaaaaattagccagacatgctggcgggcacctgtaatcctggctactcgggaggctgaggcaggagaatcacttgaacccaggaggcagaggttgcagtgagccaagattgtgccactgcactccagcctgggtgacacagtgagactccatctcaaaaaaataaataaataaaataaaataaagaaaataagattaaggacagagtcctaaggaatacctttatggaaactgcccaacgacactgatgtactaattatctctaggtattgtttttcactcactcacctaatatcactaacacttagctaatcagccaccatcttaacccaaagct

SEQ ID NO: 786866 - DNA, 634 bp, Homo sapiens
cacacttggactaacaaggttctacaaggcaagttctctctctctcctttgcacattaccaaatacctagcaagtgataagacttgaatctaggggatcctggcaggtcttcaacgtatagctgagtggaccaatacctccactgtttcctccatatcctttctaagtaccatgttctgwccaggaactaatgaaaattttccttctcctggccaggtgtggtggctcatgcctataatcccaacattttgggaggcctacgcaggtggatcacttgaggtcaggagtttgagaccagcctggccaacatggtaaaacccatctctatttaaaatacaaaaattagcccagtgtggtggcaggtgcctgtaatcccagctactcaggaggctgaggcagggaaatcacttgaacacagaaggcagaggttgcagtgagccaagatcatgccagtgcactccagcctgtgcaacagagtgagattccatttcaaaaacaaaacaaaaaaaattttccttctcccttaccccattaaaagaaagtgttctaaagtttccaagcttaaccactgtatactttctgttaaagtagactattttccaaaatagtaatccataaataattcaaactattt

SEQ ID NO: 786867 - DNA, 634 bp, Homo sapiens
cacacttggactaacaaggttctacaaggcaagttctctctctctcctttgcacattaccaaatacctagcaagtgataagacttgaatctaggggatcctggcaggtcttcaacgtatagctgagtggaccaatacctccactgtttcctccatatcctttctaagtaccatgttctgaccaggaactaatgaaaattttccttctcctggccaggtgtggtggctcatgcctataatcccaacattttgggaggcctacgcaggtggatcacttgaggtcaggagtttgagaccagcctggccaacatkgtaaaacccatctctatttaaaatacaaaaattagcccagtgtggtggcaggtgcctgtaatcccagctactcaggaggctgaggcagggaaatcacttgaacacagaaggcagaggttgcagtgagccaagatcatgccagtgcactccagcctgtgcaacagagtgagattccatttcaaaaacaaaacaaaaaaaattttccttctcccttaccccattaaaagaaagtgttctaaagtttccaagcttaaccactgtatactttctgttaaagtagactattttccaaaatagtaatccataaataattcaaactattt

SEQ ID NO: 786868 - DNA, 439 bp, Homo sapiens
gtcttttacttttggcaaaaacatcttagaagtggtgccagggcacacaggtgcaggtaatttttattggtaacaagttctacactcaatggctcatcttgctttccctgctgagatgcaggctaatatcatatagtagcatatgggctctgggagcacacagaggtttgaattgtggctttaccactcactatctgtgctagcttaagcagaagaattaccctaagatccaatttcttcatctatgatatagagataatggtagttcttacctttcagggttactgtgaggattwagcaaaataaaactgatagaggtcttagtgcctacccatagaaagcactaaatgaacattagctctaattaatattaactccctagaaggaaaactagatgggtccagaacactcaatagaggcctctctataactggacata

SEQ ID NO: 786869 - DNA, 627 bp, Homo sapiens
taggttcttaaaattaatatttgttatgacatttataattattgattagtaacaaattatctcctagatattacattaaagaatttttagccgggtgtggtggctcacacctgtattcccagcattttgggaggctgaggtgggtggaccacttgagaccaggagttcgagaccagcctgggcaacacagtgaaaccccatctctacaaaaaatacaaaaattagctgggcatgctggcatgtgcctgtagttccagctacttgggaggctgagatgggaggatcactagagcctgggaggtcaaggccgcagtgagctgtgatcgcactgcactccagcctgggcaacagagtgaaaccctgycttcaaaaaaaaaaaaagaagaagaagaaagaattttcaaaaatgtgcaggattaattttcaataatgacattatagttttatctccacatgttatacataaagcattcattcatttattctctaacaaatgcttactgtgagtttactattgccagagactggcaatagtaactagacaagaaagaatcaagggaaaatctttttaggatagaacaggtatgattatgtctataggctggcattaagaaaccaattaggaga

SEQ ID NO: 786870 - DNA, 665 bp, Homo sapiens
acctacagggttctgcttcaacacagagcagcccttcttgttaagaatacattttgtttgtcagaatctcatcactatttctccaccacttctccctcttttttctcatatgtgtgttctccctgagggaggcaacagaggacacaggcctagagcaatggtacctgctgctttttaatagtgatgttaaggagcaggaactttagctgcactggctgccctggcaaatcttcaggttggccttggtggagtctcatagctcrtggtcttatcctcagggttgcattttcagagaatccaagacactgaaactctttgagcctcacttttctaatctgtaagtggggataccaatttctatctggtcaggttgccataaaggtaagttgagatagtatatgccacgtgcttagcgtggtgcctgggactacctgtgatacataaatgcttagttgtagtataaatcataatgatggaagtgatagttaatccagagtgcattcgactcaagaggaactgattctacctatcccacaagatgaccagttgacaaatcggagtgacaatggtaagaaatgtgtctgcctacatatagcctggagtatgcaagtcctacagcatcctttgcactgtaggaaatgctgcaagtctgcatgggagcttgg

SEQ ID NO: 786871 - DNA, 665 bp, Homo sapiens
acctacagggttctgcttcaacacagagcagcccttcttgttaagaatacattttgtttgtcagaatctcatcactatttctccaccacttctccctcttttttctcatatgtgtgttctccctgagggaggcaacagaggacacaggcctagagcaatggtacctgctgctttttaatagtgatgttaaggagcaggaactttagctgcactggctgccctggcaaatcttcaggttggccttggtggagtctcatagctcatggtcttatcctcagggttgcattttcagagaatccaagacactgaaactctttgagcctcacttttctaatctgtaagtggggataccaattyctatctggtcaggttgccataaaggtaagttgagatagtatatgccacgtgcttagcgtggtgcctgggactacctgtgatacataaatgcttagttgtagtataaatcataatgatggaagtgatagttaatccagagtgcattcgactcaagaggaactgattctacctatcccacaagatgaccagttgacaaatcggagtgacaatggtaagaaatgtgtctgcctacatatagcctggagtatgcaagtcctacagcatcctttgcactgtaggaaatgctgcaagtctgcatgggagcttgg

SEQ ID NO: 786872 - DNA, 559 bp, Homo sapiens
atgaggagcaaaatcacatcttacatggtggcaggcaagaggcctcgtgcaggagaactcccatttataaaatcatcagatctcgtgagacttactgaatctcaagagaacagtatgggggaaacggcctccatgattccattatctccacctggccccgcccttgacatgtggggattattacaattcaaggtgagatttatgtggggactcagagccaaaccatgtcaatgccattgtgtgattagaccacagttgatttatctatcacattggatggacatttgtgttgtttccagtttcagtcgattttgaatagtgctgctaggaaccttcttgtacatcttttggtgaatgtgtgaaatctattttgtttygtacaaactgtttatctcccctctttttaacaagcctccctccccttatccaagtcaggcagggtaatccaagagtgggtgattggaagggaaaagaattccagctgcccaacttctggctcctatcttccttcctccccaagcaacttcctccaccctcctccctcaggacctgggattca

SEQ ID NO: 786873 - DNA, 646 bp, Homo sapiens
actccaggcacatccctgaggatccaagcttcaagatgttcctttcaggtcccagaccatggcccaactctacagacttaggctccaggcccagccagtgctaggccagtcactatcaactcagtctcaacacctgctctaacaacaggttagtccccatagatccaggcttctggctggtccccatggacccaggcttcaatcccagcccaaaatattcacactctcrcccagcctacccaaggacttcaaaaacaaactcagtggtggaccctattagtcagcatgcccagaatatctggacaggttgattggtaaatagctttgctgccaaagtcagattatagagattaaatgaggtacctacttattcataagcacagacaccaatacaaggccattataaaatatggcactggtatctaacctgaaaaaatggaaatctgaaaactgcctgacaaagagttcaaaatattcattttaaagacctcagtgagctacaaactaacataaacagacaactaagtgaagtgaggaaaactgcttgaacaaaataagaagttccagaaagaaaaagaagttataaaaaaaaagcaccaaataaaaattctggagctgaattaagaatacagtgattaaaataaaa

SEQ ID NO: 786874 - DNA, 512 bp, Homo sapiens
caaaatcaaacacaaaattttaaaatggcttacaagaccttatattatctgcaatcctcactcctagcttaagtttcacagtctctcataacttcctattcccattatactggtttctatgctgtattctattgctggcttggaaccttcacacttgctggtctctgttgctgaaatkctcttattgcaggtaactgcatgaaacacttgtattccttatgcttttaatttttttaattcaaatattactttctcagtggtaaaattgccttccaccaatactgcctatcctttactgctttattttcctttatagaaaactgaacatctaatatactatatatttttactactcattttcatctattactctgtctgaaatattagagacatggagccaggggagatttttttttctcttttcattgctatacacttgcttctagaacattacatggaatatatttatgtatttgataactatttattgaataaataaaattacttgttat

SEQ ID NO: 786875 - DNA, 512 bp, Homo sapiens
caaaatcaaacacaaaattttaaaatggcttacaagaccttatattatctgcaatcctcactcctagcttaagtttcacagtctctcataacttcctattcccattatactggtttctatgctgtattctattgctggcttggaaccttcacacttgctggtctctgttgctgaaattctcttattgcaggtaactgcatgaaacacttgtattccttatgcttttaatttttttaattcaaatattactttctcagkggtaaaattgccttccaccaatactgcctatcctttactgctttattttcctttatagaaaactgaacatctaatatactatatatttttactactcattttcatctattactctgtctgaaatattagagacatggagccaggggagatttttttttctcttttcattgctatacacttgcttctagaacattacatggaatatatttatgtatttgataactatttattgaataaataaaattacttgttat

SEQ ID NO: 786876 - DNA, 615 bp, Homo sapiens
ctgggagagaatccatccgaagtgaaaaaaggaattacatggcataagtagggtactatccattaggattcacttcagctgaatatagcagggggcaaaaatccctaaaattaactatagcttaaacaaaacaaaattgaaacttattttctgaccagatgtggtggctcacatctataattccagcactttgggaggccaagatgggaggatcacttgaacttaggcattcaagacaagcctaggcaacatggcaaaaagtcatctctacaaataacacaaaaattagctgggtgtggtggcaaacacctgtagtcccagctactcaggaggctgagttggaaggattgcttgagcctgggaggtcgggtcgaggttgcaatgagctgagattgcccctctgcactccagccttggcaacagaatgagaccctgtctccaaaaaaaaaaaaaaaraaagaaagaaagaaagaaaaagaaatttatttttctttcaggcaaataaggtccagaaccaatggcccagtactggtctgatcccaccgtgtcattaagaacataggtttcaatatttctgcttcactgtttgagaacatagcttccatccacaagctt

SEQ ID NO: 786877 - DNA, 640 bp, Homo sapiens
gttcctaaggagtttatgaaactgccataccagccctgcaccgcctgccttctggctttaggagagagggaaaaaaaagtcttccatcctacataggctaatatgattacgggtctcagtcattagcagccagaatgaatcctaagcaatacacccattcttttgcttaaattagaatcagtaactttgcttctaattacagatgagtccgtttccttggaattaaaggaagtgtaactaggakcccaaggggcaacaggcatccctcaaaaactataatactacggttgcctctctctctcctaatacttctgcccttggccctgtgctgctgaatctcccactgacccaggtgggagtctgtgcaggtgataggggaatccccagatcctgcacatgcaggcacaagtgtgcccgtggggatccagggtggaacacttagaatgatgctgattgggactggttctagaagacagtaaagatgtacatcttgaaatcggcaggtgaggcacaaggtcttggcctctctacgcctcagttttctcatctttgaaatggaaagaaagtaagatcctatcatagaatatagctgagggtttcaagttactggacatagaaatgctttgtagccaggcatggt

SEQ ID NO: 786878 - DNA, 486 bp, Homo sapiens
taacaaacttctccaagctaaaggaggatgttcgaacccatcgcaaagaagctaaaaaccttgaaaaaagattagacgaatggctaactagaataaacagtgtagagaagaccttaaattacctgatggagctgaaaaccatggcacaagaactacgtgacacatacacaagcttcagtagccgatttgatcaagtggaagaaagggtatcagtgattgaagatcaaatgaatgacatgaagygagaagagaagtttagagaaaaaagagtaaaaagaaacgaacaaagcctccaagaaatatgggactatgtgaaaagaccaaatctacgtctgattggtgtacctgaaagtgacagggagaatggaacaagttggaaaacactctgcaggatattatccaggagaacttccccaacctagcgaggcaggccaacattcaaattcaggaaatacagagaatgccacaaagatactcctcgagaag

SEQ ID NO: 786879 - DNA, 607 bp, Homo sapiens
atgtgataaatgacaatgcaactgtagcaaaagcactcagtcttctctctatatagcaccccccgccccgggtaggactgtttagcctgaatttcccacacatattttatacatatctaatctacgatttcccatcttcccactgacaccatcaactggcagcctggtggctttgagcattttgcaggccatagtccaagctattggtacaggccattggcacaaccggctggcatgccaactgcccatgaggtcagcagcatcacgtcagatmctttctcctcccaccaggcacgcctggcagcagttagatttaccgagtcactcatgtcatttgggaacgccctgtgtgctgtccttacaagagaggtgttggttatgttgtgcaacaaagagagatgttgctaggaagcttctgaatttaaccacagagcaaagggttcacatgtggtccacacaactagatgaggccatggtgtggagctagaagtatcaagtggtctaccaaacctatccagtctgcttgaatgcaactattattataatacacctggcttggaagtaaaatggtgaaccggatggaactacaagatgacacgcctaagcg

SEQ ID NO: 786880 - DNA, 428 bp, Homo sapiens
gatgcaaacttggttcatcattgcaaatcaataaatgtgatttatcacataaacagaactaaagaccaaaaccacttgattatctcaagagattcagaaaagatttttgataaaattcaacatccctttacttgaaaaactctgaccaaactagataytgaagaaatgaatatacctcaaactaataagagccatagaagacaaactcacagccaacatcatactgaatgggtaaaagctggaagcattctccttgaaaaccggcacaagacaaggacgccctctctcaccgctcctgttcaacatagtattggaatttctggccagagcaatcaggcaaaagaatgaaataaagggcattcaaataagaagagaggaagtcaacctatccctgtttccagatgacatgattctgtatctagaaaacc

SEQ ID NO: 786881 - DNA, 623 bp, Homo sapiens
aggcctcacccagctcccacgcaatccacaggggtggtctctcccaccatgcccctgctagcagcaccaagtctgtttccaggcagtgggcaagcagggctgagaacttgcaccaggctacctgcttcccatctgtgaaagaaagtagggctttaattttcctgttcaagttgttaccaagatcagctggagatttccttctccctgtggcattttcccagtgcctctggccgccctccagaaagatccctgtaatgccagacaggaatggcttgcttgtggacccagaaagctcacaggactttttsctctgatgcctctatccgtgtatttcgcttggctgtctaaattgactcagctccaggtaaggtcagaatcttttcccataaactagacattaagtttccccagtgaggatgtgtgttcgggggctgagaatctccctttcccactttctcagtttgggcagtcacattatctcaggtgtctcctgggtcctgcaggagcggtcctctttcttcagagggtctgtgggtcctctcgggtttcctgatttattcctgcagtcgttctgtagccaaaattcaccgtgtgaacctccacacgctgctctgttcatccca

SEQ ID NO: 786882 - DNA, 623 bp, Homo sapiens
aggcctcacccagctcccacgcaatccacaggggtggtctctcccaccatgcccctgctagcagcaccaagtctgtttccaggcagtgggcaagcagggctgagaacttgcaccaggctacctgcttcccatctgtgaaagaaagtagggctttaattttcctgttcaagttgttaccaagatcagctggagatttccttctccctgtggcattttcccagtgcctctggccgccctccagaaagatccctgtaatgccagacaggaatggcttgcttgtggacccagaaagctcacaggactttttcctctgatgcctctatccgtgtatttcgcttggctgtctaaattgactcagctccaggtaaggtcagaatcttttsccataaactagacattaagtttccccagtgaggatgtgtgttcgggggctgagaatctccctttcccactttctcagtttgggcagtcacattatctcaggtgtctcctgggtcctgcaggagcggtcctctttcttcagagggtctgtgggtcctctcgggtttcctgatttattcctgcagtcgttctgtagccaaaattcaccgtgtgaacctccacacgctgctctgttcatccca

SEQ ID NO: 786883 - DNA, 638 bp, Homo sapiens
ataatttgtgtttactaatatgaagaatgaaagatggtggaaataacagtttagagtttatgtttagtagggtttatagtttgtgttccctgtcatcaaaattagttgcacatgttcatctgttaatgctaatctgtatggagtattttatccttgcaaatgtcttttcatgaaaattgttattggcacatactaatcttgatccattatcttgatttaacttggcatattaatcatttggaatacatttttagaattctgttaggttttcgtgcctttgagcgtgtcattgcattacagattaatcacttaatgaagataagaagtggaaagttytcagttgtagagttaaatagacttatggaaatttcctttcagtttgcatgaggtcaaaaatatttggctggaaatgtaatttgaaaatttatctgctgcccgtttgtcaggaaaggagattttgcttctttaacttttgtcagaaaaagaatgtgttaactttcaacagcataaaacagcttgaaagtacttagaattcaaacaatgtttgcagttgttaaatgactatcgtaatataagttttgcatataatcattgttttggcttataattttagattgattacattaataccatgaaat

SEQ ID NO: 786884 - DNA, 605 bp, Homo sapiens
ctgtttcatgaaggaaatgtgacaacctattcattacagtcagttaccaatatagagagctgttcccaaatgtttagaattagctggactgtctactgtagacacagaatttattttttaaaaaactctctttccgagagtttcagtgctttcagagcactgccttttgtttytttgcctgacgttggtgttttgccaagtgctggtatttggaggtttgatggacagcattcgaagtgaggcatcagtcttccttaatttgttcaaagcctctttatgcagcagctaatccttcctaattatatttctaggaaggatgttcttaactcagacgggaagaagacatagacattttgacattaggatgcacttcactccaagaaaagaaatttgaaaggaaacactctcccaattcccattccttaccccctgggcacaagcaaccattttcccctgccccatttatgaagctcttttctctccctctccattcctctttcattcctgtggctcctatttatctcctggcttaatgaagctattttgaaggagctaaaaaaaattcagaaaaaaccatttccgtgtagtgaggcaggcatttcaca

SEQ ID NO: 786885 - DNA, 675 bp, Homo sapiens
tacttagttctaaatgacacataaattgcttttaatttaaaaaattctaactggctatataccttgatatggagatgagaagtaagcaaaactgcgtagagttccatgaaagtgttttgaaaaattagagaggaaaaacacattttgagaccagaatagaagaccattatcttttcataggctaaactgtgtagtcaggatttgaattttaaatccggaaaagagagcaagcttgaaatgggagtgatggtgaggtggacaccaaattattttatagtctactgtatttcttcatactttctagataaaaaattctttttgggttgttttatgcattgtgagaaattcggaagaatggagaagaatgcaaaagcatatcaaatcactgtaaacatttaatagtctacaaatatttaacacttgctgtgtactcarttttttgtaggccgtttgttagaattgagttcacatggggtataattctacgttcacgacttgacattctcaacctcagttcagcattttttctttttagaaaagagatcgttcataatgattataatttacaacacacatattttaaaggatagtaataaaaaaacccaaactgttgtacccactacgtagctgaagaaataaaaacactgttgtcattatcttagaggctcttacgtg

SEQ ID NO: 786886 - DNA, 538 bp, Homo sapiens
ctgggcaagggaaagctgataatggttgcttacggttgaggttttagatgacgaagcttggttttgtgtgtgatttagattgggactgcaccaaaatgaggaaggagagtaggtgtaaaatctcgggagtgcaggggaggaatcaaggagcagccagaaaagagagatcgaatgggaccggttttggaatctgggagtggttggggaaggctaggtagagtagggcatggaggcccatagagatttcattccttggtatggaagaaaaatgagcaagagttacttgaagggtaagcagtggtttgagatcctgggtcytgattatgggaggcagtaatcagtagttagtgagatcctgaaagcaggagagggctgctcagagagaattcacagggcatccaactgtgagtgtagacccagatgcttggagcagtgggtatgagaaactcaagctcctgagagcgctgtctgccaacacacatgacgattagcagacccttcctggtggttaaggagctcacaggtcagtggaagacat

SEQ ID NO: 786887 - DNA, 538 bp, Homo sapiens
ctgggcaagggaaagctgataatggttgcttacggttgaggttttagatgacgaagcttggttttgtgtgtgatttagattgggactgcaccaaaatgaggaaggagagtaggtgtaaaatctcgggagtgcaggggaggaatcaaggagcagccagaaaagagagatcgaatgggaccggttttggaatctgggagtggttggggaaggctaggtagagtagggcatggaggcccatagagatttcattccttggtatggaagaaaaatgagcaagagttacttgaagggtaagcagtggtttgagatcctgggtcttgattatrggaggcagtaatcagtagttagtgagatcctgaaagcaggagagggctgctcagagagaattcacagggcatccaactgtgagtgtagacccagatgcttggagcagtgggtatgagaaactcaagctcctgagagcgctgtctgccaacacacatgacgattagcagacccttcctggtggttaaggagctcacaggtcagtggaagacat

SEQ ID NO: 786888 - DNA, 605 bp, Homo sapiens
caggtgcataccaccacacccagctaatttttgcatttttaatcgagacggggtttcactatgttggtcaggctcgtcttgaactcctgacctcaagtgatctgcctgcctcagcctcccaaagtgctggaattacaggcgtaagccaccgcgcctggcctaaaagatttcagtttttaagggcagttttaggttcacagcaaaattggagaggaaggtccagacttcctatataccctggcccctgcaacccctctccccgtcccataggcatagcttctcccattrtcaacatctaccagagtggtacatttgctacaaatgatgaacctacattgacacatcattattccccaaagtcctagggttcacccttggttttgtacattctgtgggtttggacaaatgtataatgacatctatctatcattatagtatcataatgagtattattgaaaggtgacagcgtgctggcagccctcgcagccctcgctcgctctcggtgcttcctcggcctcggcgcccagtctactagatgagtatttgccgtctgggtttccttgattagaggggcctggctattttgctgtatccggggatccata

SEQ ID NO: 786889 - DNA, 642 bp, Homo sapiens
tgtcccatcatgtttgtcatattttattcattagaaatgagtcccttgatctgccttatactctaggggagaggattctgcaagaatctggactaccaggcagtgggatcattgggtgccatcttagaggctgccttgcacagcmtctaggaggtggctgcagaatggattttggagcaggaacagggggaagggaagcagggaatcagaagggtgtggtccacaagctaatggaaggaggatagaattcaagtataggctaggttatgatgtcgtaacaagtcataatctgaggggcttgaaataacaaagatttatttcttcctcatgcagatagtagttacaggctgttttgggctttgtgccatatcatcacacgtgggacatgttcatcacgggtcgtctggggattcttctttatgtcattttcactgtgggacctaagctgacaaagcagcttgaatgtggaaaaactccaactgtgcttcccccactatactctcacaaagcaaatctgacaccggatgtgtggggatttctgcccaccagcaagcaagcagtcagttctgcagtgcacaccaactgaatgtcctttaattgaattctgacactgtctacctggagacagcatcggatcccaca

SEQ ID NO: 786890 - DNA, 642 bp, Homo sapiens
tgtcccatcatgtttgtcatattttattcattagaaatgagtcccttgatctgccttatactctaggggagaggattctgcaagaatctggactaccaggcagtgggatcattgggtgccatcttagaggctgccttgcacagcatctaggaggtggctgcagaatggattttggagcaggaacagggggaagggaagcagggaatcagaagggtgtggtccacaagctaatggaaggaggatagaattcaagtataggctaggttatgatgtcgtaacaagtcataatctgaggggcttgaaataacaaagatttatttcttcctcatgcagatagtagttacaggctgttttgggctttgtgccatatcatcacacgtgggacatgttcatcacgggtcrtctggggattcttctttatgtcattttcactgtgggacctaagctgacaaagcagcttgaatgtggaaaaactccaactgtgcttcccccactatactctcacaaagcaaatctgacaccggatgtgtggggatttctgcccaccagcaagcaagcagtcagttctgcagtgcacaccaactgaatgtcctttaattgaattctgacactgtctacctggagacagcatcggatcccaca

SEQ ID NO: 786891 - DNA, 600 bp, Homo sapiens
ttcggcacttctccttgctgccgccatgtgaagaaggacgtgtttgccttccccttctgccatgattgtaagtttcctgaggcctccccagccctgcggaactgtgagtcaattaaacttctttcctttagaaattaaccagtctcgggtacgtattagcagcatgagaacatactaatacagaagtaaagcagcaggtagagcccagccccctagagtccccatccaggctgtgccctccacaggtagctgccacttattgcccaaaagcagctttaatgcttgccatctgtccrtctggggactgggagtgaccaccactgaagacaggtagaggctggtcctgttggggatgctgtcctttactctttcctgagctttcctctgtctgacatctctcctctcctgtcctggctctgcagaatgttgtagctatgctaatcaccctcctccccacctccaaccatttcatctgctgttacattatccctacctgagaggtaagagctctgtgaactgatctgagttgcaggtaggaagtattttccctacatgttggtgaattttccataagatgacaaagaattgtgggctgtacta

SEQ ID NO: 786892 - DNA, 600 bp, Homo sapiens
ttcggcacttctccttgctgccgccatgtgaagaaggacgtgtttgccttccccttctgccatgattgtaagtttcctgaggcctccccagccctgcggaactgtgagtcaattaaacttctttcctttagaaattaaccagtctcgggtacgtattagcagcatgagaacatactaatacagaagtaaagcagcaggtagagcccagccccctagagtccccatccaggctgtgccctccacaggtagctgccacttattgcccaaaagcagctttaatgcttgccatctgtccatctggggactgggagtgaccaccactgaagacaggtagaggctggtcctgttggggatgctgtcctttactctttcctgagctttcctckgtctgacatctctcctctcctgtcctggctctgcagaatgttgtagctatgctaatcaccctcctccccacctccaaccatttcatctgctgttacattatccctacctgagaggtaagagctctgtgaactgatctgagttgcaggtaggaagtattttccctacatgttggtgaattttccataagatgacaaagaattgtgggctgtacta

SEQ ID NO: 786893 - DNA, 623 bp, Homo sapiens
ggctttagggaactctgttggagagcctgcaggcaagtggatcaaaaaatcaaactgttgagaggggtgtaacatacaaagcaaggttacatcccttacagtccgtctccttaccacatcccactctctggaaaccaccattgacaagagtttcctgtttattcttataaaaaactcctgtgcgcaaacaggcacacattgcttttaaacacacatgatttgtttgttctcattattcagattgtaccacctgacacccttgactctgctgttcccttttgccagtcagtccagctcggtccgtcccacagctgcggggtagagtccaccatgatccagtttgtttcaccaggtttcygtgagaaacagctggatgtttttggtttccagcctttgggggttgaatgataaccctcatcccccaaaaagatatgtccacatcttaatcctcgaacctgtgaatgagatcttattggaaaattaaggatctagagatgagatcatcctgatgtaaccatgtgggttctaaatccagtggcaagtgcccttagaagacacagaagagaagacacagggagaggagatcttgtgaggatagaggtagagattggagtaatgcagcc

SEQ ID NO: 786894 - DNA, 695 bp, Homo sapiens
catttttcttattatgagaaataatggacaccttctctggacacatctgggcacatctgctcaagtttaccttcaggacaggtttccagaagtagaattttggttctaggtcctgaaatattttccccttcagatgtatttcatatcacatgcatccttgccttaggaataataatgcaagtaacagtagcaattactgtgtgttgagtgctttttgtgtgtcaagcattgtacctacattatcttattcatcctgacaataaccctatgacacatttattattatcctctttttatggatgcaacactgagatttagagtattgaagtcacttgcataagatcatatgcttacataagaggcaggggggccaggattcaacccaccctctaactccaaattctgtgttcttagctatgttgctgggttgggaagataaaccacattttagactttttggccctgtgttgtatggaygtggtttggcatgttctggccactgggtgtggtgggttctgggaggtgacagactcagttataattacaggaagaagtctggtctggcaggcagcatgtggaatcaatccatggtgcattgggagtctggtgaaatagcaccatgcagatggtccatcttggcgtaatgggatcccaacaggtggactgaacatccaggagttagaacatcagtgata

SEQ ID NO: 786895 - DNA, 357 bp, Homo sapiens
tgtgacagctttttcaagggcacaacaccttactctgtttcctcctgcctttgctctgtaaggctgctctggcatggcccaaactttgagatgacttttcctttctccttgccaattttagaatctttctgttcarcatcatcatctgatagagatttgggactaagtaaaatgaatgttgtatgattttccctgtaattttagatccccaaatactgctcttggccaactacactattccctgtggcttttttactccaccacatttgagtaatattgttggcatggacataagtaaacagtttgaaaatgttgtgttttgtaaactagaagatggatgggctggttttttaatgc

SEQ ID NO: 786896 - DNA, 632 bp, Homo sapiens
tttccagttctagccacagggcgtatgacagtgcctggtgcaaaattgagcatagaattgtcactcagtattttgttgaatgaataaggcatgagtcaaacttggccacttgcccaagggcacagagctgggatggggtggggggggcttcacactcaaatctctgtgaccccagagcatagctccctcttgtacgtgtctgctcatcagtagatgagcttgggcaaggaggtgtgtagtcacattttttgattttctctcaggctcggtagtagctcctcaaggaaacaaaccatttctaagaattctttgtatcctttatggtcccttgaatataataactcacaaatatttgccaattgtccaattaaggccgccatgttcctctttctacacctttgttaktatgacacgtagctgtatggtgattctttttctgtacttgtgtctttcctattggactctgatctacttgagagcaagaaatttgtctccatcttttgtctgcagttcttggcacaatgcaggcatttaagagggggctcaattggatgaataaagataacatggatgggattaaaacaaatttaaagattatttagaaaggtattgtcttcctttgaatgaactct

SEQ ID NO: 786897 - DNA, 614 bp, Homo sapiens
ataaaagttatccttaacttctgggccataggaaagcaggctgtgggctggatttggcccatgaactgtagtttgctaactttttctctaaaggatagtagtgctttttttgtgtgtgccagaacatgaatataactgtgtgtccttggaacggtataaagctttgattatatcatagctagacatctcccttccaacattgttttggatattaaaaacaaaaaacaattctgtgttgaactatgctttggcgatcaagagtcagattactgtgaattgcaattagttttttctagcattatgacttacataaactgtaaagtaatttacaagcaacattattcatcttsaatatcaccatccactgttagaatttgaccctctatgatgtatatatatggattgttagtaagaaccgtatgtcggatgtcagataaaggaacagtctattttttttccttccttttggtagccgcggtgtactttagacaagaatgttgtgagtcaaagaggaggctaaggtttcagctctgactcagctttggtaaaataaagtcattaggcagtttgctttggagacttcatctgctgaatgaagatgcttttttatggta

SEQ ID NO: 786898 - DNA, 613 bp, Homo sapiens
gattactgtgaattgcaattagttttttctagcattatgacttacataaactgtaaagtaatttacaagcaacattattcatcttcaatatcaccatccactgttagaatttgaccctctatgatgtatatatatggattgttagtaagaaccrtatgtcggatgtcagataaaggaacagtctattttttttccttccttttggtagccgcggtgtactttagacaagaatgttgtgagtcaaagaggaggctaaggtttcagctctgactcagctttggtaaaataaagtcattaggcagtttgctttggagacttcatctgctgaatgaagatgcttttttatggtagcattgttataggcatgtatatatgggtgtgcctactggtgcacttttaagtaaagagaagagatgagaagagatggccttgggtgccatcaatcctgatattaataaactatatagtttgccccattatctagtccctgcagagaagattaagatgtacaagatccagtcctgctcttaaggagattttgaaatgacaaatgagctatacaaaggaaactatacaaagctatagaattagccctttgattaatttaggttat

SEQ ID NO: 786899 - DNA, 505 bp, Homo sapiens
catcttttttaaaattattattttaaaaaatgttttttcgagactgggtctcattctggtttgcccaagctggagcacagtggcgtgtgtacacacctgacacacctgacagcaacagcttgactgaagcataccctgagaatgaccctgtatggcagaagcgcctggcagcaataacaacctaagaaattagggttgctatgtggaggttgctggggtggagggtgctaagcgaaggtgctatataaactgcatgctttttacaagcagtagcaattctcctgtccagcccactgccgctgcactgtccctgtatgaaagttccccctggttaaaccctrtgtctcccttgctggctctaggtctctttttcagcctcttgacccttgtgccatccctactggagtcaataggggtccagcaggacagcatgatcatagctcaccgcactatgggctcaagcagtcatcccgcctcagcctcctacgtagctgggactatagac

SEQ ID NO: 786900 - DNA, 586 bp, Homo sapiens
gttgattgccttttccctgtataaacatactttcttgtttctttgcatttgtttgccccaactgttatttaccacctcaggcagctgcaaaattaatcagtcatttctagttgttttttgaaagacttttcactgaacaagcttagaattaggtcaaataaagatagtcttgcaagtgagcttttccagggaatcactagactgggcatatgatgacagttttccagaaatgcagctttaaaggtgtttcaaacccattctgccccctccagtggctgccaggccactagttttcacgaagattgcaggctcttggtattcaagactactacagaactggagaagaggggattggaatggtacaagttaaaatgccatgaascttgctcttcttaccaagatttagcatttctcttgaataaatgcttcctgtattattgcaagtctttggttaattttcagagttctgaaaaagttggttctgacacttttggccagttttctggttattttgtagtggagggaattttcagatgttcttataccattacatttgctactgtctgcctgtggaatagtgttgaag

SEQ ID NO: 786901 - DNA, 552 bp, Homo sapiens
gtgcattaggtaactgtcttagttctgttactacacatgataacttaagtaattctttcatcatgggatatcatggactaccagtgtttaaccctcttatgatcactgcagcctttctgtcttcaaacccaaccagatcagataccaatcacacatttccatttgccccaggagtacattrcctgaaatcatttctatacccaattactataatggtcattgtttaattacagaccactacagtacgctgtaactggctaaagcagaaaggaatttattaggtgaattggcctccagaatttctggggtgacgtgggtaccataccgtcagtatcgggctgtcaagagaaatgccttcaatcacgcagtgagatgatttcagcaaaaattctgctgcggctacagtttgtggttgaatacatctctttataggtgactagagttatagttaggtactttaatagctattgtattgatgtttgaagagaggaattacatggattatattctaaaactttatgtttattttgactgggacttaaaagtattttt

SEQ ID NO: 786902 - DNA, 587 bp, Homo sapiens
agccagcttgccttcacgatttgccctggaaataagctctgcagaaatctcaaccagggcctctctatcaggtgattatctccctccattcttgccccatcctgtggccacccatttttctatgttttcttttgtccacctgactagcccaatcaagagagcgtttgtgggggaagagatatgctcctggttcttaaagaattatcttttgggttttcccagcacatgttaactgccctgtttccccctctctctttattggtgacaaggatggtattgccrtaaatcatggcttgtgtataggcagaatggtgttgtcggaggcagagaggacgtggtctttggagtcacactgactgtgtcgaacctctcctctgtctgtgactgactctgactctttgtcgcctctcttaggagagtgagattgaccaccttgcagggtgggtgtgaggaacgcatgagtaatgtgtggaaagctcatggtgtcagtgcttggcacacatagcagatgctcattaagagctaattattttggttgttattgtaaagagaggaacaggagtaactataatatatgaaagaagctc

SEQ ID NO: 786903 - DNA, 587 bp, Homo sapiens
agccagcttgccttcacgatttgccctggaaataagctctgcagaaatctcaaccagggcctctctatcaggtgattatctccctccattcttgccccatcctgtggccacccatttttctatgttttcttttgtccacctgactagcccaatcaagagagcgtttgtgggggaagagatatgctcctggttcttaaagaattatcttttgggttttcccagcacatgttaactgccctgtttccccctctctctttattggtgacaaggatggtattgccataaatcatggcttgtgtataggcagaatggtgttgtcrgaggcagagaggacgtggtctttggagtcacactgactgtgtcgaacctctcctctgtctgtgactgactctgactctttgtcgcctctcttaggagagtgagattgaccaccttgcagggtgggtgtgaggaacgcatgagtaatgtgtggaaagctcatggtgtcagtgcttggcacacatagcagatgctcattaagagctaattattttggttgttattgtaaagagaggaacaggagtaactataatatatgaaagaagctc

SEQ ID NO: 786904 - DNA, 612 bp, Homo sapiens
ctgaaaaggtctgttacactgactagtagaaaaataggctatgctttctatatttggtttttttttttttttttttggagaccgactctcactctgtctgtctcccaggctggagtgcagtggcgcgatctctgctcactgcaagctccaccttccgggttcatgccattctcctgcctcagccccccaagtagctgggactacaggctcccaccagtacgcccagctaattttttgtattattagtagagatgggatttcattgtgttggccaggaaggkcttgatctcctgaccttgtgatccgcctgcctcagcctcccaaagtgctgagattacaggcatgagccaccgcgcccggcctctatatttgttttattcttccctcccccatataaagatttttggtttgagagttaatttatagatctgatttttgagagttcagcatattatatgtttttttttgtttgttttttgtttttttttttttagagtcagagtctcttctctgttgcccaacctggagtacagtggtgtgatcacagctgactataaccttaaactcctgagtagctaggtttacagatacgcaccaccacactcagctacc

SEQ ID NO: 786905 - DNA, 585 bp, Homo sapiens
attccttgaggattcatccatgtagtataaatattttgttcatatttattgctgagtagtattctattacatgaatattgcgcagtttgtttattaattcaccctttgaaaggcatttcagtcaggttttggttattacaagtaagctgctatgaagattaatgtatagctttttgtgtgaatgtaagttgtcagttctctgggatatatgcaggtttttgttttgttttgttttgctwtgttttgtttaaagacatggtctcactctgtcacccagactagagtgcagtgccatgatcatagctcactgtaaccttgaattcctgggctcaagccatctgcctgcctcagcctctgatctggagtagctagaactacaggtatataccaccacccctggctaatttttaaaaaactattttttgtagagatgagatcttgctatgttggccaagctggtctcaaactcatggcctcaagtaattctcccacccccgcctcccaaagacttggaagtacaggcatgagccactctaccctgacaggtttgtaattttttaatttttttcttgaacttttaagtca

SEQ ID NO: 786906 - DNA, 285 bp, Homo sapiens
catatagccaagacaatcctaagcaaaaggaacaaaggtggagggatcacactactggacttcaaactatactacaaggctacagtaaccaaaacatgatagtactggtacaaaaacagacacatagaccaatggaayggaatagagaactcagaaatataactgtacatctacaaccatctgatcttcaacaaacctgacaaaaacaagcaatggggaaaggaaatatggaattatgtaaagagactgaatcagtgactcactggtctccctgaaagagatggg

SEQ ID NO: 786907 - DNA, 618 bp, Homo sapiens
aattgaagaggacacaaaaaaaatggaaggatattccatgttaatggattggaagaatcaatatcattaaaatgtccatacatactacccaaagtaatcaacagattcaatacaattcctatcaaaataccaatggcattcttcacagaaataaaaaaaaaatcctaaaatttatatgaaaccacaaaagacacagaagagccaaagtcaccctgagcaaaactaacaaaactggagtaatcacattaccttacttcacactagactacagagctatagtaaccaaaacagtaatggtactggcataaaaacagacacacagaccaatagaacacaatagagaacgcagaaacaaattcatacatctacagtgaactcattttcaacaaaggtgtcaagaacatacactgggaaaaggacagtctcttcaataaatgttgccgggaaaastggatatccatatgcagcagaatgaaactagactcctatcacttgctattaaaaaaataaaataaaatcagccgggcatggtggctcaagcctgtaatcctagcactttgcaaggccaaggtgggtggatcacttgagatcaggagttcaagaccagcctggccaaca

SEQ ID NO: 786908 - DNA, 584 bp, Homo sapiens
ccaattgctaaacttaaatgtgaataacagaggagagtctctcgtataatgttacagtaactcttctagtcctgggaccagacctttacatttgaatgaaagttcaaacagattcaattaacactgagttcaaattctgaacgaaagttcaattcttaaaaaatctggctgggtgcagtggctcacacctgtaatcctagcactttgggaggctgagacgggcagawtgcctgagctcaggagttcaagacgaacctggccaacatggtgaaaccccatctctactaaaatgcaaaaaaaagaaaaaaacagccaggcatggtggcaggcgcctgtaatcccagctacccaggagcctgaggcatgagaattgcttgaacccaggaggcagaggttgcagtgagccgagatcgtgccactgcactccagcctgggcaacaaagtaaaactgtttccaaaaaaaaaaaaaaaaatccaattgtccttctttttaccccatcttccagactattccccattaatttttatttttcaattttagaagaaatatcatttatgtttgttttggttttggtttcaaaaaa

SEQ ID NO: 786909 - DNA, 422 bp, Homo sapiens
tcaataagaaaacataaaactgtctgatggaaaaatagcttgaggaaatgaacaggtatagcagaaaagaagggctgcatatagtttaaaaacttgaagagatgtttaatctctttgcaaatagaaaaacatacgcatttaaattgaaataccattttcatgttccaaaattaaaattattagaaatatgatggtatacagtgatggtaatatgggagaaaggaaacatcctaggcaatttggctaagcttttctgagraagatttaggcaatatgccattaagatttaatgtgaacaaatgggaaatttgcccacataaatcaatggaaagatactctatttttcaaaatttaatctgaaaatacctaagcccctgatatttttctaaaaactggaatgtccctgtggtcattgggtttta

SEQ ID NO: 786910 - DNA, 551 bp, Homo sapiens
agagcggcgttctcaagttcagcactattagctgttgaagtggcttaattctttgttgtggggagctatcctttgtggaaccctggcctgtgcacactctatcccctcctccacaaacctctgataaccaaaagtgtccccaaacattggaaatgtcccctggcaggtaaaatgtccctcatttgagaacctctggtcaagagtttagtaaataaattatagtggtatgtctatgaaatgaaataatatgtaacaataaaaaaatgtgctacttaaacatgcaagaaattgttgaatctcaaaaatattatgcttaaggaaaaaagacaaaaagarttcatactctataattctactgaaatataattgtagaaaataaaagctgatatatggtaataaaaccagattagtactggattgacgatgtgttgaaagtcaaaagaagaggcttgagatctctttatagtgtgatagttttacaagtatatacgtatgttaatgtttaaaaatttcacacctcaaaaatgtgcagtataccagatgttaattat

SEQ ID NO: 786911 - DNA, 551 bp, Homo sapiens
agagcggcgttctcaagttcagcactattagctgttgaagtggcttaattctttgttgtggggagctatcctttgtggaaccctggcctgtgcacactctatcccctcctccacaaacctctgataaccaaaagtgtccccaaacattggaaatgtcccctggcaggtaaaatgtccctcatttgagaacctctggtcaagagtttagtaaataaattatagtggtatgtctatgaaatgaaataatatgtaacaataaaaaaatgtgctacttaaacatgcaagaaattgttgaatctcaaaaatattatgcttaaggaaaaaagacaaaaagagttcatactctataattctactgaaatataattgtagaaaataaaagctratatatggtaataaaaccagattagtactggattgacgatgtgttgaaagtcaaaagaagaggcttgagatctctttatagtgtgatagttttacaagtatatacgtatgttaatgtttaaaaatttcacacctcaaaaatgtgcagtataccagatgttaattat

SEQ ID NO: 786912 - DNA, 627 bp, Homo sapiens
tgaaccataggcacatttgaaaaacctgggggagccaaagcttttttaagggtaaaaggtgaagttccccatcaaactaccattggcattcttcacagaattagaaaaaccaattttaaatttcatatggaatcaaagaagaccccatatagccaagacaatcctaagcataaagaacaaaactggaggcatcacactacctgacttcattactacagggcctcagtaaccaaaacagcatggaactggtaccaaaacagacatatagaccaatgaaggtgaacatagacctcagaaatacaccamacgtctacaaccacctgatctttgacaaaaacaagcaatgggaaaggatcccatattcagtaataatgtgggaaatctggctagccatatacaggaaactgaaacttgaccccttccttacaccttatacaaaaattaactcaagatggattaaagacttaaatgtaaaaccccaaaccataaaaaccctagaagaaaacctaggcaacaacattcaggacataggcatggtgggcaaagacttcatgacaaaaatgccaaaagcaattgcaacaaaagccaaaattgacaatgggatctaattaaactaaagagcttctg

SEQ ID NO: 786913 - DNA, 627 bp, Homo sapiens
tgaaccataggcacatttgaaaaacctgggggagccaaagcttttttaagggtaaaaggtgaagttccccatcaaactaccattggcattcttcacagaattagaaaaaccaattttaaatttcatatggaatcaaagaagaccccatatagccaagacaatcctaagcataaagaacaaaactggaggcatcacactacctgacttcattactacagggcctcagtaaccaaaacagcatggaactggtaccaaaacagacatatagaccaatgaaggtgaacatagacctcagaaatacaccacacgtctacaaccacctgatctttgacaaaaacaagcaatgggaaaggatcycatattcagtaataatgtgggaaatctggctagccatatacaggaaactgaaacttgaccccttccttacaccttatacaaaaattaactcaagatggattaaagacttaaatgtaaaaccccaaaccataaaaaccctagaagaaaacctaggcaacaacattcaggacataggcatggtgggcaaagacttcatgacaaaaatgccaaaagcaattgcaacaaaagccaaaattgacaatgggatctaattaaactaaagagcttctg

SEQ ID NO: 786914 - DNA, 627 bp, Homo sapiens
tgaaccataggcacatttgaaaaacctgggggagccaaagcttttttaagggtaaaaggtgaagttccccatcaaactaccattggcattcttcacagaattagaaaaaccaattttaaatttcatatggaatcaaagaagaccccatatagccaagacaatcctaagcataaagaacaaaactggaggcatcacactacctgacttcattactacagggcctcagtaaccaaaacagcatggaactggtaccaaaacagacatatagaccaatgaaggtgaacatagacctcagaaatacaccacacgtctacaaccacctgatctttgacaaaaacaagcaatgggaaaggatcccatattcagtaataatgtgggaaatctggctagccatatacaggaaactgaaactkgaccccttccttacaccttatacaaaaattaactcaagatggattaaagacttaaatgtaaaaccccaaaccataaaaaccctagaagaaaacctaggcaacaacattcaggacataggcatggtgggcaaagacttcatgacaaaaatgccaaaagcaattgcaacaaaagccaaaattgacaatgggatctaattaaactaaagagcttctg

SEQ ID NO: 786915 - DNA, 450 bp, Homo sapiens
agtcaagcatactgaaaaacgtatacagaagagtgcatgttgggattttggagactaaattggatataaaatatgttatttctactaattttccactattttgactttaatcccatgccctaatataaagtatataagaatgagaaatatagtttatgtatctatcaaaatagaacataaatgtttgtgaacatttgaatctgtcagcttctcttgctcacgtgcctgtagtgcctgtactcrggatgctgaggcaggagaatcgcttgaacccaggaggtggaggttgcagtgagctgaggtcacaccactgcactccagcctgggcaacagagcgagactccatctcaaaaaaaaaaaaaagaagaagaaaaagaagtgactcaactgattgatgtgtaaaacctcattgtaaaataatgttctataaatgagacattcatgcagtta

SEQ ID NO: 786916 - DNA, 560 bp, Homo sapiens
gtgatcatattacttttatttactatgagcttcagctgaaaagtccaaaagaaactttaatttcagatatttaatgaaatcattatagctgtggtaatttcctttagctgggtgtgagtgtgtgatgtgagcgtgtgattgtgtgtgtgtgtgtgtgtgtatgtgtgtgtgtactctggcagcatattccaaatttctgtaaaatttcagtttgaaattaatagaagacatattaaattgtttaaactctttgttatttaacttctataytactttagttgattactctgtattattacggcaaagctttgatatgttgccctgaatttaaatgaaaaggctgttcggcataaaaacaggaatattttattaccaaaaagaattaactaccatatgtcatttacagaaaagagtaaattcttcagggcatagaaaatacacatttccttctgtttgtgtggaaataagcaaaatacctgttataatagattcctcacagaattttgtgaagcttcaggtaaacttgaaagagaaaaattaaaatgctagagtttcataat

SEQ ID NO: 786917 - DNA, 615 bp, Homo sapiens
tcatgtctcactgggctaaaatcaaggtgtccacagggctgtgttcctttctggaggcttgagggtagaatctgtttccttgctgtatcaggtgttggctgattttagttccttgcagctgcaggactggggtccctgtttccttgctatctgttatctgggggtctctattagcttctagcagcctctcttttttttttgttttttgtgktttttttgttttttttttaatgattaagtatagagttttttttaggctaaagcttgaggatagccacctgagggcatacattcaagttgccctgagtgcacattcctattagcagtagttacaggtggcacttgtttgtttttattgctacattatatttatacatatttaagggatctctctcctgttcttatacatcacctcctacatctcatccccaaatacttcccacgctgccatctcccttactcccctgggctaatgtgattagatggggcgcactggtaatccagcatagcctccccatctcaagattcatgcccttaatcatatctgcaaagtcccttttgccatgtaaggtaacatagtcacaggttccaggggactagaatttgaacatcttt

SEQ ID NO: 786918 - DNA, 639 bp, Homo sapiens
agcctttttacaatgtgaccaggattcaactcattcatatcaaatctcagtaaaattactccttgagtttcggtatacaaagcaggtatgtgtaatactgtttacagaaatagtctctaatatacaactcaatacagtgaatctgaagtgcaaaagcaaattcttgwgttctctgcttagtggtagtaggaaggcttccagtggttaaaaaactgcagattacaacatatcaactttcaggtgggccagtcctaaacactcataattggtttactttgctgcaaatcattattccaaaggtttgattcacttgtagccccacttgggtcttaaattgcatttcaaagcactcctatcattcatccattttcagaactaccattaggagtgatgtgaatttggcacaataatcaatgagaagatattatatgagtccttttaaaattttccttcttgagcaccacctcaagtgcagtttgtgaaatctgggttttagaagtattttttttatcttgctatcattttcactaagttaagttcaagaacttcggatatgtattccacagttttttttccgaaaagagatttgttgtcactattgttaatttctacctaaagccatttaaacatcttaattaa

SEQ ID NO: 786919 - DNA, 555 bp, Homo sapiens
atggatctgtgcccaaatcccccggaaaagtgctgaagaggacagtcacagaagacatagtgacgacgttcagctcccctgcagcctggcttctggtcattgccctgataatcacgtggtcagctgttgccatcgttatgtttgatttagtggattacaaaaacttttcaggtaagttccataaaatttggctttaaaattaaaattaattcaaatggaaagaaacagtgtcccctcyagttcctgcttggtttctgtttcatcttagtgtgaggaagaaacaccccacaaatgtgcttgaggatcactgaaatctgtttcattcttccctttttcctcctattctctttctttgtcggtggtacttattgatttccaatgaaattgatatccttatttgcaagagctgaacaaagcctgaatgttgcagttcataaagataatagttaaaaagcttgggtgaagatttcgtttggaactggtactttatcaagcattaataaggaataatttgtaggttttacacttggcaatataaaaccaaaccaatcaaaa

SEQ ID NO: 786920 - DNA, 528 bp, Homo sapiens
tacccaaagcatctgtgatggtccaggagccttttgaggtgatcgggcagtgtcagtcttcagccgctaagccaagaagatctgggaaggagtcagtcagagagccttgggccagagttccaggggctctgggagtggctgccgggtgagtccgatttccagtggggtcctgcacagatggcacactgcttaggaggaatcctgggctatgggcatttgttggcccagtggccggatttccggcacttgtggcaaggtcctgggggaggaggttctggaggaatccctggcagctgcagttcaggcgtttggagttcttgtgtgctggagatgtggctggggtttgwctcacagtggaggcaaggaattgcaactcagaaatacattgctacttggctgcctctactctatcattgtacaccttgaaggtgaggttaattaagtcctgttgcggggtttgagggctggaatttaatttttggagtcttatttaatgtcgggagcagattgggtaataaaatgtatatt

SEQ ID NO: 786921 - DNA, 528 bp, Homo sapiens
tacccaaagcatctgtgatggtccaggagccttttgaggtgatcgggcagtgtcagtcttcagccgctaagccaagaagatctgggaaggagtcagtcagagagccttgggccagagttccaggggctctgggagtggctgccgggtgagtccgatttccagtggggtcctgcacagatggcacactgcttaggaggaatcctgggctatgggcatttgttggcccagtggccggatttccggcacttgtggcaaggtcctgggggaggaggttctggaggaatccctggcagctgcagttcaggcgtttggagttcttgtgtgctggagatgtggctggggtttgactcacagtggaggcaaggaattgcaactcagaaatacrttgctacttggctgcctctactctatcattgtacaccttgaaggtgaggttaattaagtcctgttgcggggtttgagggctggaatttaatttttggagtcttatttaatgtcgggagcagattgggtaataaaatgtatatt

SEQ ID NO: 786922 - DNA, 621 bp, Homo sapiens
tagcttccgggttcattttaacttttttccactatgaagtgcccttttttatttttagccatgctttctgcctcagagctgtctttgatattaacatagtcacatctgccttatttggttaatagtacaaagtataacttcttcatctgttaacttttcatatttctgtatcatatttcagatgagggctttataaagagtatatagttgagttttgtatttttaattctgtttttatctttgaaacagagtatttagttatttttatgtttaatgtaatttaatttaatgtaattacmaatatcttttagcttcgccatcttactcagccatttctatttgtccttcctgttttgggttttctctcccatctggccttcttttagattgagtttttaaatatttcttttcatctcctattagcttggatgatatgcagtcttaagattcttgtactgttcgccagagaaaacttcattcttcacttaccaaagtctcatactaattgttattttcaccctgatcctgaacaactcaaggaacttggaacactttaactatgtcattgttttatgtaatttaattatgttctatattttgaaggccacaaggcatcactgt

SEQ ID NO: 786923 - DNA, 600 bp, Homo sapiens
atacatacatgtttatacagcatttacacagtataaatgcatatgaataaatatgaagtatacatatatttgatttgtgatgtacagaataaaatgtaaaattaaagattttaataaatattgagttcctacaacatatcagacactgcatgaagcactaaaagaaaacatttgatttttttttttttgcaaacctgctttataaataatgtaaagtataacgtatattatggatataattttcgtttttgagatggggcctcactctgttatccaggctggagtccagtggcatgatcatagctcactgcatctcaaactcctgggctcaagggatccttccaagtcgctgcaagcacaggcacatgccacgacacccagctaattttttttgtagagacaggatcttactgtgttgccaaggctggtctcaaattcctagcctcaagtgatcctcctgcctyggcataccaaagtgctaggattataggcttcagccactgcccccagcctaatttttataggtcttttttgctttattatatatttttaactgacacatatatatgagttacatgtgatatttccacacttacatac

SEQ ID NO: 786924 - DNA, 554 bp, Homo sapiens
ggactcaggctgcgtgaccactggcacaggatccaggctcgtcccttgtccactacagaccccagatggcctgaatcagatgctcttggcagggaagagcgtgagcaaaatggcaaccaggcctgagagggtcccccagacacagccctgagttctgtctctctggaaaggccgwtttgtgcagcaagctcttgggaggtagataacccagtctgacaagcgaccttgaaagaattacagcaataatattttcagttggttgggccaatcttggccaatttctccagagcgttaggtgcgaacgtcagtctgggactccacattgctcatgcatgtgtttgccgtgtcccctttgctgttttaagtgtttatcctgtggcttgtacaagcgacatcgctctcttccctggtgagagccagtctccaggcctccctcccccacactctgctagaagtgcagcgaagcaatgagaacaaggatcttgttccaagcccactgagcaagtgctagcatttagtgaccttctgcaccagtaattcggtccttcggggat

SEQ ID NO: 786925 - DNA, 756 bp, Homo sapiens
ccactgagcaagtgctagcatttagtgaccttctgcaccagtaattcggtccttcggggattgaaattgattttcctcctttctgtgtgtgagcacaacccaagtgcacagctctgttatgaatgctgatctcaggtgtgtatttaaaggtgaacagcaacactcttgaagacagaaatgagaaaagttgtttgcatagcctctgtgaatggacgggatgtctgctccaaagactggctttgaatttctccaagcccttttgtgtgtatgtgcatacatgtttgtgtgtgtgtgtgtgtgtgtrtgtgttggggtgaggtagggtgtccaaaactgtaagtgaacacatgtaaaactactcaaattccttcccatgaagctggtccaagagtggggtgtttgtctctggcacgagatttaagaaggtgtccaaagagtcagtactcaagattaaaatgttttaatgctgtatttttttaaaaatccaagtgaatggaatgatgagcaaaatctgcaaattttaaataagtaaacaaccagcattactaatttttttcttttgcttcaggctccagtacggcttggcagggcacctttttgtataacattttgatattttattcatcatggatttttctatgttcattttaatttttgcaatattggaaatattctaaacatttagaaatattggaaatattttatatcttgatcgctgagttttctgggatcccctcatggtttgcatcccaggtg

SEQ ID NO: 786926 - DNA, 598 bp, Homo sapiens
ttcaaatgcaataaaatatcacaaggcaaatgggggcagagcaagatcacaaggccagggtgaaattagaattactaatgatgttccatgtcccactgtgcacacattgtcattgataaacatcttaacaggaaacaaggttcaagggcagagaactggtctgactagaatttgccggtctggaatttcctaatcctagcaagcctgggggtgctgcaggagaccagggcatattttatcccttatcttcaagtgcataagagagacactcccagagagaccattttagaggcctgtccctgggagtgcattcttttcccacggctgttccttactgcgaaaaagaattcaggtatatttctcttattcgyttttgcgagaagagaaatatggactctgttctgcccggtcctgcaggcagtcagactttatggttatctcacttgttccctgaaaattgctgttatcctgttccttttctacatgcccagatttcatattgttcaaacacacatgctctacaattaatttgtgcagataatgcaatcatcacaggatcctgaggctacatacatcctcagattatgaagatgatggg

SEQ ID NO: 786927 - DNA, 642 bp, Homo sapiens
agtaagtggccagcttaaaagaggcactcactgtttcctggttatccttaataactagtctgaacatgggttgtttctgccttagtgttccatgtgataatcaggtcaccgtaagaagttgtgagttcaggctgggtgtggtggttcacgcttgtaatcccagcactttgggaggctgaggcaggtggatcacctgaggtcaggagttcaagaccagcctggccaacacggtgaaaccggctgtggtggcggacacctgtaatcccagttacttgggaggctgagacaggagaatcgcttgaactcaggaggcagaggttgtagtgagccgagattgcaccactgcactccagcctggccagtaagagtgaaactctgtctaacaacarcaacaacaacaacaacaacaacaaagttgttgtgagttcagaatcctactccagagtggttgctttgtggaagagttgagcaagacaatggagccataactaccagatactcagtaagccttaagcacctgtccctctgctttcatggcttggcagctttcagcatgttctctggcaaaagctggccctattttgtaggagagacttaaactacctcctcatcctctgcagagccagagcataccctggggtc

SEQ ID NO: 786928 - DNA, 656 bp, Homo sapiens
taactaccagatactcagtaagccttaagcacctgtccctctgctttcatggcttggcagctttcagcatgttctctggcaaaagctggccctattttgtaggagagacttaaactacctcctcatcctctgcagagccagagcataccctggggtctgtggagtgattaaatatggaaaatccaggaaggaaaataattcttttctttctcaccattgtgaacgtacagcaggtgacttcccaaacgcaaaagggagctgatgtccacccttcacccctgctgacaatatcaggagtacagtgttcacctcccagggaagatgctgtcctttgcagaccaacagagcccaccggctgtgagracaggacactcccaagctgcggacagcatccagcgctcggtgatgggcagaacacttagctttccatgccccaaccctgatcttgtctcaaacaggccttgtcctgctcttgcagagctggatgctgacttcctcttcagtggccctccaggagtgccttgttcgtgtccctctccctcctggcagtggagtcccaagtgtactcacagccaggtggggccaccagagggaagacagcaaacagccctggctggcaggaagggccagctctgcttcctggggaagactgtgcc

SEQ ID NO: 786929 - DNA, 584 bp, Homo sapiens
gcagaagaacagctaatatgcactcagtattcaccatatgccaaacattgctttaaatgcttcttaatacttttttttttaacttgctcctgtcaacaacccaatgaagaagtgtaagtatcattatccagccctacccttccatttatttattttttgagatggagtcttgctctgtcatccaggctagagtgcagtgcatgatcttggctcactgcaaacttggcctcctgggttcaagagattcccctgcctcagtytcccaactagctgggattacaggcatgtaccaccatgcccggctaatttttgtatttttagtagagatgggttttcaccatgttggccaggctggtctcaaactcctgacctcaagtgatcaatctgccttggcttcccaaagtgcatggattacaggcatgagccaccacgcccagcccattattccctttttatagatgagaaaactgaggcccttagagtttgaatcacttatccaaggtgactcagcaagcaagtgtccaagtatgatttaaacacagctgtctgatggcaagtgtatgctctttgttattacaataatg

SEQ ID NO: 786930 - DNA, 621 bp, Homo sapiens
taatctagcctccagtattatggttttgtttttgttttttgataacttttatttatttttttcttttaagacacagtttcactctgccgcccaggctagagtatagtggcacgatcttggctcactgcaacctctacctcccaagttcaagcaattctcatgcctcagcttcccgagtagctaggattacagrtgcgtgccaccagcccaaggaaaaaaccatcccccttgctggcttttaagaaataagctaatttttgtactattaatagagatggggtttcatcaggttgaccaggctggtcttgaattcctgacctcaggtgattcacctgccttggcctcccaaagtgctgggattacaggcgtgagccactgcacccagcccagtattaccgttgaaaagtctgatgccattcgggttccagattatttgcatgttttgttttttccccctctgaaagcttttagtatcctctttttgactctactgttctttttactattatgatgaagtgtgttggtgtgagtctatacatttattttgctgacccttttgatttgggagtccttcagttctaggagagaaaattttgggtggaaggctgaggattatttctc

SEQ ID NO: 786931 - DNA, 621 bp, Homo sapiens
taatctagcctccagtattatggttttgtttttgttttttgataacttttatttatttttttcttttaagacacagtttcactctgccgcccaggctagagtatagtggcacgatcttggctcactgcaacctctacctcccaagttcaagcaattctcatgcctcagcttcccgagtagctaggattacagatgcgtgccaccagcccaaggaaaaaaccatcccccttgctggcttttaagaaataagctaatttttgtactattaatagagatggggtttcatcaggttgaccaggctggtcttgaattcctgacctcaggtgattcacctgccttggcctcccaaagtgctgggattacaggcgtgagccactgcacccagcccagtattacygttgaaaagtctgatgccattcgggttccagattatttgcatgttttgttttttccccctctgaaagcttttagtatcctctttttgactctactgttctttttactattatgatgaagtgtgttggtgtgagtctatacatttattttgctgacccttttgatttgggagtccttcagttctaggagagaaaattttgggtggaaggctgaggattatttctc

SEQ ID NO: 786932 - DNA, 597 bp, Homo sapiens
tatagcctgtaaaactgagtcaattaaacctcttttctttataaactatccagtctcaggtagttctttacagcagtgtgagaacagaccaatacagcatgggatcccaagtaactaggcattcagagaagaaacacagatatgtctgggaactggatgayggaaggtacagggaagcacagtaagtaactttcatgggtcctacactctacaacatattcttggggttggaatgagtcaaacaggagactgatgtctaggatggaattggctctttttgttcccagctgtaggtctcttccttaacagatcacggtaccttcattacaaatggcctgggaagcgtacttaatgcagaaaccccagcaaattcttaggggttagtcatgcagttatacattttcattctgggacttctaggggcttaataaaatcccttcattggatcatttaatccaacataaattatttccctacacctactttatacttgctccctgattttataccagtgagtatagcctgatgtaattaaacattctgaattttcaatgatacccagagaagagtgtgataaccaattctctcaaaagcaat

SEQ ID NO: 786933 - DNA, 607 bp, Homo sapiens
tataaaattctaggctgacaattactttctgttagctttgaagatactattccattgtcttctgacctctattattactgataggaagctgggttttccctactttgtagtttatcttttcttttatagtattttagattttgctttttctcttttttttatagtygcactgcaatattttttggagttgatttgtacttatttatttttcttaacatactaaatacattctgatcttgcaactaatgtttctcttttgttttggaaaattatcatttaatatacctacaaaattcctaaaaatgtaatatttctgtctattcgagtcatattctgggcaaatcctttagtactgtaccattattcagctcataaattctttatctctatgcagtctagaatttagtttgtcattttaattctttatttctgaaatctttattgtctgaaatatcttttttttcattttaaaaatacctattttctgtcattttcctccctattttttactccatcatttatttttcttttaaattaatgctaatcattcatttgtctctttaagtctcctaagtatgttaaagtcttttctagactgcgaatatta

SEQ ID NO: 786934 - DNA, 526 bp, Homo sapiens
tgagcagtcataggttgagcattttacaaagcatgcagataccctcctttgtgttttaataatcaaatgacaggcgtaagataactaagttcaacttgaatattaaaagctgtagtccatttcttctttatatgtttaatgactatatagttatttggctaaattaatttttttctgtgcttaagttaatttttgtacaatttatgtccatatttgcttggaaccttagcgcaatatttgagccagaagacttgcaaagcttgagctaaatgaaataaaattgttggcattaaakgaaagctaacaactttgaagttttaaaatctctgatggtttgagtataagaaatgactccattggatgaggtgaggtaattccaagatacagggtactgataatactaaacgtaccttgatgactaattaagcagtttctgagtataggtattatgctgtaaaaccaaactggaaatggactatccatggagcatagtgtatagctgagttatcaatgaaaatgttaattc

SEQ ID NO: 786935 - DNA, 500 bp, Homo sapiens
ccttcacctcatttgaacttcagggttagaaaatcttcccatagagttgggaagcaccgcgagtccatgttctaacgctatttttacactgtaggacagaggtccagtgtgtgttgtttggtcttgtggtccacaaggggcaaactcytcacttaaaagaaggaccagctgtttttccttgctgtgtttccaggaaagggtccacatagacttatattgaagttggaattttaatgaagcttttaaagcctcatccttttactcccttagttgttagggaaaagagcaaaatgtttgaactcttagtatctggaaaataataatggtaatcagacctgacatttgttgactgcttattctgtgccaggcactggacagctgaggctttttatgtctatgatcttatttaagcttcataacaacttgtagcaatgactgccattttactgatggagaaatggagacacataggttaaataacttgcatcagctcaaaacag

SEQ ID NO: 786936 - DNA, 619 bp, Homo sapiens
tctgcctgagttcatgtgagtggtagagccagaatttgactggttctaaggtgatgtcaccccagggtctacacttacctaccactttgtcacagcaggtctggaggcaggtgttctgggtttgacgggagttcagtgtcaggatgcaagagtcagtgtgtctgattccctgggcctccccttcatggctccatgccctgctccactacacgacttctagagcaggaggctaggggtgaggggtggggcacaagcactcttcctcatgctgccctcacctctaatcaggcaggacagtgtcttccagaaacacccagagagttcccctaacatctcatggaccagagtggggtcttgtggcgcctcacatcaatgctgacaagaaaatggagtgaccrtgagtgaatgatttcagttgaaccagttctcattcctagggactaaatgtgttgccacctgaatgaaactggtttccgtcatctgcaagaaagagggctgaatggtgggtagaacccaccatgcttggcctagcacatttgctttatccaagggagaggactcaggcacaggaacccatccttgcaggaggcaggacctgacccttgggtgacatcaagga

SEQ ID NO: 786937 - DNA, 553 bp, Homo sapiens
gctgttaccacccatttatacctcagtgtgaatgaatatttgatctttctctagttggttttttgttcagtaggggtagcgggtgggaggcaacaggatggaagtggatagaggagacaagggccacagataaagggaagagaaagcgagagagcagaacaggcccctacagctctgaaaacaagtggtcaaatggactcccttgctgaaggcctgctctagctaggaaccaccagatacacacgtwtgcagaggggcatctgcagtgctggaaatgagcatgattccccaaggaagacccctccatctccctccctgggccccccgggggtacttgggccatcctggcctaccagggttcccgcttagaggaaagcctgtgcgtttccctgacctgagctgggcgcacggtgccggaagtcgtccttggtgaggatgcagagggcgcgtccgttcatctcgaacccgtgctccgcggtgcatggcagagagtactcctgctctgcccagcgcagccagtgcagcacgtcctccctgctccacagtgcgggct

SEQ ID NO: 786938 - DNA, 627 bp, Homo sapiens
tatgatcgccaaaattaaaaatacaattgatagcctgaaaaaaagttaagtcaaaaaaaaaaagaaaaaatgttaagtcaaggaaatctcaaagaaagaaaatcagaagttgaaaacatgagagaaaagataggtaatacagagaaacaatatgaaaggaccagcatctgattaatgggaattccagggagggtgaaacagaggaggaaatgatcaaaacaaagcaaaacagcttcccagaaataaagggcacaaacattcatattagaaaatcctggccggacacggtggctcacgccggtaatcccagcactttgggaggcygaggtgggcggatcacgaggtcaggagatcaagaccatcctggctaacatggtgaaaccccatctctactaaagatacaaaaattagctgggtgtggtggtggacgcctgtagtcccagctactcgggaggctgaggcaggagaatggcgtgaacccaggaggcggagcttgcagtgagcagagatgtctccactgcactccagcctaggtgacagagcgagactccatctcaaaaaaaataagaaagaaagaaactcctaccaagttctcaggacagcaaatggcgaaataaaaacttcacc

SEQ ID NO: 786939 - DNA, 576 bp, Homo sapiens
ctgggattacagaggcaagccgctgcactagcttagtttctacaaactttttagactggttttcaaagcccttggaatgtatttcaactgattggtccaacctccttactcttcttttagaaccctatgctctaactaaattgtatctttatctgaccaaatcttacctcaatgatttttgaaaattactttctctaagatgccttttttgagtcttccaaaatcatgtgatctctcactactttgtctacagcacttttagttctattgagatatatcatatcctacgatttgttacagtcattgtatatttttcttatacaaaacaacagagataatgcatattagactgtatattaatatgtattgtatattaaatgtatattgatatgtatattaratatgtatacttacctattgaataacactgtctttaacaatcattgtaggttacaaccaggcactccctaagaacttggaattaagagaacaaatgtctcctgagaactaaggggcaagattaatgtatgtatagtggaaatgggtgagatgggcagtaattggaaggggagaggc

SEQ ID NO: 786940 - DNA, 470 bp, Homo sapiens
cgatttagttaaacatctttctaggctgccgcatccttatcacctattacaccggcctgcatccttatctcccattagtctttcttctctctctctcgcttttttttttttttttttttttttttttttttgagaygaagttttgctcttgttgcccaggctggagtgccatggccccatctcggctcaccacaacctctgccttctgggttcaagcaattatcctgcctcagcctcctgagtagctgggatcacaggcatgcgccaccacgcctggctaattttgtatttttagtagaaacagggtttcaccatgtcggccaggctggtctcaaactcctgacctcaggtgatccgcctgcctcagcctcccaaagtgttgggattacaggcgtgagccacagcacctggcctcttctcttttcaagagccacattccatcaggggaagtgtgtaaattggtacactga

SEQ ID NO: 786941 - DNA, 470 bp, Homo sapiens
cgatttagttaaacatctttctaggctgccgcatccttatcacctattacaccggcctgcatccttatctcccattagtctttcttctctctctctcgcttttttttttttttttttttttttttttttttgagacgragttttgctcttgttgcccaggctggagtgccatggccccatctcggctcaccacaacctctgccttctgggttcaagcaattatcctgcctcagcctcctgagtagctgggatcacaggcatgcgccaccacgcctggctaattttgtatttttagtagaaacagggtttcaccatgtcggccaggctggtctcaaactcctgacctcaggtgatccgcctgcctcagcctcccaaagtgttgggattacaggcgtgagccacagcacctggcctcttctcttttcaagagccacattccatcaggggaagtgtgtaaattggtacactga

SEQ ID NO: 786942 - DNA, 438 bp, Homo sapiens
aagaatggctaagaccacaatgagctgctaagataatagaggtggacttcaggagccttacatcagtgctgtctaataaaaataagtgaaccacatatatgattttaagttttctagtagctacatttaataagtaaaaagaaatgagtaaaattaattttaatgatatattttatttaatctaatatatccccaaataaatctaaatattgtcatttcaacatrtaatcaatataaaaaattattaatgaaatattttacattcttattaatttaagtcaagtcttcaaaatctggtatgcattttgcacttacagcacatctcaattcagactaggcatattttgggtgctcagtagccacatgcagccagtggccactgtactgtactttactggacggccagccatacaaaccaaggggagaaagattgtcaaa

SEQ ID NO: 786943 - DNA, 495 bp, Homo sapiens
tggtgttgctttatcagacttgaccttaaaaaggttttaagatttatttattcatgtttgcaaaaagtttttcttgctgataggaagaaagtttttcaaatcaaaacttcatgtaactgaattgtgaccttttacatttgagatccatgatagaattaatatttgaagttttcatttggagatactgtggtagctgtcttaactgccttaaaagaattagtccacagctgattggaaatgtagaacacctasttgtccttgcagctgattggggaagtacctgtttatactctgaaataatttcagtgctttttaaaaaaaaaagacaaattattaaacactttgactttgctgactatgatctagcatggtagagactttgatataatactgtttataaatgaatttattgaggggcaagatgaaaaaaatctcatagctatatcagtatgctatacgggtcagctatatcagtatgctgatcagcttaggttt

SEQ ID NO: 786944 - DNA, 636 bp, Homo sapiens
tataatatgatcccatttttgtaattgaataaaaggcaagaaaaacaccctttaagaaaattttgtataccctgtgtatatatgagtaagcctagggaatggtatagaatgatattcagcaccgaaagagtagtaggtaggaaattgtacttctatgctgctttatatatgtaaaatgaatgtttttatttttataattaaaaatctaataaaaacagtaagttagatggckcagagataggattgaaggaatcagcatacaattagtgaagtaatgaactcaagagttattcatattttagaggaaaggaatgtggcataaactcacagcaaatataagtattttataaaattaattaattttagcagtagtgaatggatgaccaatttcaagagaaatgatgaatacattttctctgccatggaacatagtcaagatttagttctttctatgtagatcctctgagctactgctgaattaaaaacagcactaagaaaaaactgtagtttttacttggccatcctaggagttccaggactttgtagcatacaaagtgaacagagatgatttaaacttctttgtgcctgttttgttttgtatgactaatgggctgttcccctggccttgatttgcca

SEQ ID NO: 786945 - DNA, 603 bp, Homo sapiens
aggcattttcaagtgagtacgtctatcccaccatgtattttctttatttattaacttcttctttcccctgttccttttttttctctcgcctgcctttctttttttcttttccacttctcatgctttatgcccaccagcattatcagaaaatactaattagacaccttttgtttacactttgggttaaagctatacagatkgctgtccaaacaaatctgctggtaccatttaataaggaatattttttacccattatctttgcctgttagtctcaatttgttatcaaacacacttctatttagttttccttaaccccgggctctcactgacttttgcttcttgactacttcctaatttcatttcaaatatttttctagattccagatgtcactcccacaattcaaaatgctcttactattccatttaacgtgtctaggaaggttatagtagataaattgaaaaagcaaccttctgacacttttgttagaactccatcatcatccttagaaagaaaatgttaaaatattatagagttcgtgccactcttcttaccctattcccacatacaaagaaggcaaatttgagcaattaacatatgaagga

SEQ ID NO: 786946 - DNA, 614 bp, Homo sapiens
gagcacagcggacaccctgctggatccggagggatgggagtcagtggtgggtctgcagtggcaggtctgcggtggcgggtctgcgatggcggcaaacagcagtggtggatggcgagcgaaagctcagctcgagccataacaaacatggaccagaagagtgcagttacaagatttaatagagtgaaatagagtgaaaacagagctcccacacaaagagaggggacccaaagagggttgctgttgccagcttgaacgcctgggtttgtatcccgatccttgtccctcccactgtgctctcaggcaatagatgattggctatttctttgcctcctgtttttgcctaattagcattttagtgagctctctgattggttgggtgtgagctaagttgcaagccccgtgtttaaaggtggatgcggtcaccttcccagctaggcytagggattcttagttggcctaggaaatccagctagtcctgtctgtcagtttgagccataaagttagctcatgctggtaccaagcactgataggagatttgtcaaaggtcaggggcacctccactcagatccctttatggttaccaaatgtgaaccccaaaaatttgagacaggtct

SEQ ID NO: 786947 - DNA, 607 bp, Homo sapiens
taactacatgtctcataggtctctgctggtggttctgaagccaaacctctgatcttcacatttgtccccactgtcagaagactaccaacccatactcagttggctgacacctctaaattccttgttaaaattccagaagaatcaagtgataagagtccagaaactgtaaatagggtaggattatttttattcttttttaatttcaaacaattatattaaattttgataatgatgacttggaaatttgtgtatatttcctgtgcttaaattaaggtgwctgtgactctaagtttgactaaaaatataataatgcaacagaagcataaatgttatcaaattgcatgttctctctaatgcattatcttcaatttttttcagtttgacatcctattgtttgctattgacatgacaaattctgcctcctggcacattctctcaaatgtttcttaagaaaataaaaacaaaatttaaaaatgtttaaatttatctcaaaagaaaatataagacaaaacagtgagatattattatttacaggtaatgaattagcaacattaaaaaatgtaatacctgatgttgggaaagttgtggaaatattggcatgcttaca

SEQ ID NO: 786948 - DNA, 539 bp, Homo sapiens
taaatggtaaagaaaacctagaacagccttgagggagaaggagttagagcatcagtaacaaaccttgagaacaacatagagggttatgaatggtagaggaagaagagatggaaataatttgtgttaaatagatgccaatagggaagtttgggatcactaataagggatttacaggaagaggtaaaatgaaggactgattctgagctactgactgagaatttgacaggtgcccatgtmttctttctgcatacatattttcatgcctttacttcctctttttaaaaatttattaattagagaaactcaggaaaatcaatctttttataaaaaaagaatccttcacccctgagaattttataaaatatggtgtcacatttttatattggtacaaattaggatacatcgtggcatatttgcaagttagaaaggaatatgttgcatatacttattaatatattaagaaaatataataaaaattatgtgcagattaatataaacatggtaaacatctttagacttttcagagcctttctcttaga

SEQ ID NO: 786949 - DNA, 598 bp, Homo sapiens
aaaaatttatatataactttgtgtaaaggaagtttttaagctctgaaatggagtggcatatagttgcctgtaatttctaggctgatattttactgtggcatttcttcgcttctcattctaataaaatattaacatggtaagctaattgtttctgtcagaaacaagttgttcagcataataacccttttcttcatttgataacgtrtcatttaacttggtagaactgtctgaaaattatgtcatattctttcccattttcatctctactcttgctttctggttgcccattctagcaatacaagaccaagtcaagctacaaggcttttgcagcaatccctacaaacacattgcttttggaacagaaggtcagtgttggctcaaaaacagtgaattttacatttttaatgtgatttttaaaatgttttctaaaatttctgttgggaagatttctgttttaaagttctgcctttactaaaataacattccattcttagtttaggatgatgtggtgaaaacattttggtgaatataattggagatattattggtttattgctagagactgaatatgagcctagggatgtttagtccactgtca

SEQ ID NO: 786950 - DNA, 619 bp, Homo sapiens
ttgcctatttaattttttaaagcatgagttgctaaactccaatcttattaaagatatttccttaggtgagaatattttaaaatctctttatgtcttggcagggcgtgatggctcatgcctgtaatcccagcactttaggaggccgaggagggtggatcacctgaggtcagaaattcgagaccagcctggccaacatggtgaaaccctgtttctactgataatacaaaaaaaatttaactgggtatggtggcagatgcctgtaatcccagcgactccaggggctgaggaaggagaatcacttgaacctgagaggtggaggttgcagtgagccgagatcgcgccactgcactccagcctgggtgacagagtgagactcagtctcaaaaaaaaaaaaaaaaaaaaatctttatgtcttaaaaatttaacaaaaccttattgctaatttagcacatgacctatattagagaaacattgcttaatttarattctagtgcaagaggcaaatgtgttcccaatttctttaataatggagaagagtccaggactcaaatctatggtaaatggttctcgggtagttgtctactatgtgcataatttaaaaaaattatcaaattgtatt

SEQ ID NO: 786951 - DNA, 694 bp, Homo sapiens
tgggcaggttgaattcaggctaaaagttccttaagcaagacacataagacccccttataatgctaaaagatggcatttacaaggaaaatacagtcattagaatatgaaaaaccaaaatataacctctatcttcataaggcaaaagcaggagataagatctggaaaaagtgaaaatatattattggtaaaatattttgttaacttgtttgttcagtttatcatagatcarataaaaaataggcaaaagtagatcatctcgagtaaatctaatttatatatattcagactctatcctgcaaacaaaacaaaatattactctttttaatatctgtggaactctcataaaaactgactatacattaagctaaaaaagaaaacctattaattgccaagatggaaacaatatacacaaatttatctgatcacaaaaaatttataaattaataacaaagttagaaaacaaaaagttcctgacatttgtaaattgaaaattttgctttttcatgaaactttatcaaagaggaaattcagaataaaatttctgtgttttactttttttattctctaactttattgaggtataattgacaattaaaaattgtatatattttaggtaaaaaacttgacgttttgatacatgtatgtattgtgaagtgatcaccacaatcaagctagcatatttatcacctcatgc

SEQ ID NO: 786952 - DNA, 499 bp, Homo sapiens
ttttggtgtctgttcttttgctgtcatatcaacaaacaaacaaacaaacaaaaacattacccacaacaatgtcaagcagaagctttttttcttgtttgcttctagtagttatacagttttgaatcttatgtttatgtgtttaatccattttgagttgatttttgtatattgtgtraaataaggatccagtttcattcttctgcatgaggacatacagttttcaccacaccatttattgaggagactatcctttcaccttgtcaaagattagttgtccaaccataatgggtagatttatttttgttccactggctatagtctgcttttatgacagtgccatactgttttgattactatggctttgtaatacactttgaaatcacaaaatgtgataccttcaaaaaagggtgtttgaaaaatttctttggattcactgagagtatttttaatattgtctttttggcttgcatacgacttctgatctttctataataagctt

SEQ ID NO: 786953 - DNA, 630 bp, Homo sapiens
accttctatgacctttcacatgaagtgttcaatcttttcttccccttacattttcggtaacttttgatcattatttttacaaatatttattcccacatgggactctcacaatactgattttgtcacttttgattctgtatttcatgtctcttactcttcatatttttctatttattattttctgattccttcaagagsaatccttgatctaatattccagttcaagattttggtcagtatctattctttccttcaattcctgtattacattctttgttgaagctaacatagctttttcttctaaatcagatttattgaggtaatatttaatcactgtaaactccatccttttagtttacagctctgagttttgacaaaagaatccaatcatataattactaccacattccaaacaaaacatttccatcaactgaaaaagttccttgtgctcctttttagtatatactttcctccaatccaagtcctgagaaaccacttatcttttcatgtgttcttatgcttttgccttttcaagaatatcatataaatgtaattatatagtctgtagtcactttagcctctacttagtagaaggcatttgaaattcatccatattattgcatggatcag

SEQ ID NO: 786954 - DNA, 637 bp, Homo sapiens
cgaacatgtataaaaccatcagatcttgtgagaactcactcactattgtaagaacagcatgggtgaaaccactcccatgatccaatcacctcccaccaggtccctcccctaacacttggggattacaattcggattacaattcagagatgagatttgggtggggacacagtaaaaccaaatcagacgatgtatccatattcaccttttttggaatattgacaagtttctctccaaagtagatttaccaatttattctccctttagcaatatgggacctgttgctccacattctcactagcatttggtattgccaatttggtgggtagaaaatcatatttcattatgattttgatttgcattttcctgattactagtaagattgaatatctttcatttttttttggtcatttgtatttctgtgaatttcctcctcatataatttgcaaattattttatttaaaaaaamtgaattatagagcacttaatatactttgacttgcaaatcctttcttgattttattactgcaaatatattctccccagctatagaatactgtagtatttttcataactctctagaagcagttaactcatgtgtaatgttttgtatttgtctatctgtttttctcataagat

SEQ ID NO: 786955 - DNA, 583 bp, Homo sapiens
ttcatctcagaaagtgggcctacaaaagaaaaatttcgggcagtactgaatgcacatttgaaattgataattgttaatttaaaataaaattaattagtttgtttgaaagagtttctccaacaatgttttgcttctcagatacaagtatggagaaaaatggatggtaaggtcaatttagggttgaggtcttttttttttttttgtaagtgaactggtcacaggaagagaggaagattaaaaaaagtgaaagtattaaaatggcttataatattaaataatatgagataagagktaaagccagaataaagctgatgaaggtcagtgatttggaagtcccaatgatgtggatgttgcactagtagcactagagaaatgaagatggtggataggaggtagagttctgagtgtgggacatttgtaattgaaatttctgacagtttctgttttactggtgaaggtaaagttaaggagctttctgggagtgaatgattgaattggagtagatgagaacatctttgtaattgaggagctcaaaaaatggaaaagacagagatttctacatgaattttgaaataggcaaaaa

SEQ ID NO: 786956 - DNA, 604 bp, Homo sapiens
tagatattatgaggggcgtattactaacttagaaatggtctttagtgagatatttagacagggtaagttttttttttttttttttttgagacagagtctctctctgttaccaggctggagtgcagtggcgcgatcgtgactcactgcaacctccgactcttagacagtgtaagttccatcgatagtaagaataagcagttcaaagtamggaaggcatgatgtgtcataatttatctcatggccttggcgtctaacattttcaacatggattcattgttttgaccagtgccttatgtacaaacaataagaacactctccaggttaagagtaagacagagtctttatcattttataattttatatgtcctcaatgccaagcttagcactcagtaataactaagtgcccaattcttattttgagtgttgtctttctgcttagctgtacatcagtcttgagggggagaaataacataattcaattagcacattatcatggattagagctcttgaactttgagaaaggaagattcaggacagttagagtcaacagagaaaaagggaaaagaagcatcttaacggtatcaaacctgacattatattcagg

SEQ ID NO: 786957 - DNA, 551 bp, Homo sapiens
tcaggatgtggttatgtttagaaattttttaggcagtaccgttgtaaaagcataccttattcattgaagcatcagttttcattcatactttgtttctactttattcactgaaagttatagctgtcaacttttaaaaagttcatagcatgtgacataccagttgtggagctgtatttgtatcttagatacttaagtagcattgaattatacaaattgtgcaaggtgtttgaaraaataaattttcatcattatatatgctttagaaggtaaagctacttactgcttataatggttatatgtattttgtaaccatggggtgcttattatgaagactttcatatattattttttaaattttatttggatggaacataagatagacctatagtcatgacatggaaagataagggaaggcctagttacagaacctggggacaaagttgcaatttcacctctttactcctaaaggattatctttatttcttactcaaatgaaattatgggatggattatttgaactacttcagtaatttccttgccaaaaccactct

SEQ ID NO: 786958 - DNA, 551 bp, Homo sapiens
tcaggatgtggttatgtttagaaattttttaggcagtaccgttgtaaaagcataccttattcattgaagcatcagttttcattcatactttgtttctactttattcactgaaagttatagctgtcaacttttaaaaagttcatagcatgtgacataccagttgtggagctgtatttgtatcttagatacttaagtagcattgaattatacaaattgtgcaaggtgtttgaagaaataaattttcatcattatatatgctttaraaggtaaagctacttactgcttataatggttatatgtattttgtaaccatggggtgcttattatgaagactttcatatattattttttaaattttatttggatggaacataagatagacctatagtcatgacatggaaagataagggaaggcctagttacagaacctggggacaaagttgcaatttcacctctttactcctaaaggattatctttatttcttactcaaatgaaattatgggatggattatttgaactacttcagtaatttccttgccaaaaccactct

SEQ ID NO: 786959 - DNA, 623 bp, Homo sapiens
aaacatattttttaactcattaaaattttgatttcaatttctaagtgattataagttccagtggactaaatgcattctagttgatcttgttttgtgatcactctactgctgattagaatctctactagaaattttgtattttcaagaggaggaacaaagagcagaaatgggataagtaaaattttaactatmttcttgggttcaattgtattgctctggtgagagaactcagcagcaggcagaagaggacaaaggcatgatgcatattcaatgagtaatgcacttataagtaagtttctttaaatataaaacatattgaagataataatactctattcctagctaaggttatagtcttgtcttctcatgagagtaaatatccttgaggacaggtaccacctctgttcaaaattgatccttcccaacccctacttccacactaccccatacatttgtaggcaggcactagattgagctcaataaatgttttgaggagtaactaacagagttatcatcacaacagcttcagttaaacttagagctatttctacttgtctgatgagtgtcattttttgttctgtagtctctccctaatgaatccttctttttagtaattcttaaaa

SEQ ID NO: 786960 - DNA, 603 bp, Homo sapiens
aggaacgggcaaagatttcatgacaaagacactaaaagcaaatgcaacaaaagcaaaaattgacaaatgggatctaattaaatttaagagctctacacagcaaaagaaactatcaacagagtaaacagacaacctacagaattggagaaaatatttgcaaactatgcatctgtcaaaggtttaatatccaggacatataaggaacttaaacaaatttacaagagaaaaacaacccccaccaaaaagtgggcaaagggccaggtgcggtggctcacgcctataatcccagcactttgggaggctgaggcgggcagatcacctgaggtcgggagttcaagaccagcctgaccaacatggagaaaccccgtctctactaaaaatacaaagaattagctgggtrtggtggtgcatgcctgtaatcccagctacttgggaggctgaggcaggataattgcttgaacctgggaggcagaggttatggtgagccgagatcatgccattgcactccagccttggcaacaagaacgaaactccatctcaaaaaaaaaaaagtgggcaaagaacatgaacaaacacttttcaaaagaagacacacatgtggcc

SEQ ID NO: 786961 - DNA, 563 bp, Homo sapiens
tggataaagaaaatttggcacatatataccatggaatactatgaagccataaatcaggatgagttcatgtcctttgcagggacatggatgaatttggaaaccatcattctcaacaaactaacacaggaacagaaaaccaaacaccacatgttctcattcataagtgggagctgaacaataagaacacatggacacacagaggggaacatcacacactggggtccatcagggggttggsggctaggggagggacagcattagaagaaatacctaatgtagatgatgggttatgggtgcaacaaaccactacggcacatgtatacccatgtaacaaacctccacattctgcatatgtaccccagaacttaaagtataataattaagaaaaaaaaaaagagagagagaaagattctcgtgcctcagcctcgcgagtagctgagattacaggcatgtgcaaccatgccagactaatttttgtatttttagtagagatggggtttcaccatgttggccaaactggtctcgaactcacgacctcaggtgatatgcccgcctcggcctcc

SEQ ID NO: 786962 - DNA, 563 bp, Homo sapiens
tggataaagaaaatttggcacatatataccatggaatactatgaagccataaatcaggatgagttcatgtcctttgcagggacatggatgaatttggaaaccatcattctcaacaaactaacacaggaacagaaaaccaaacaccacatgttctcattcataagtgggagctgaacaataagaacacatggacacacagaggggaacatcacacactggggtccatcagggggttgggggctaggggagggacagcattagaagaaatacctaatgtagatgatgggttatgggtgcaacaaaccactacggcacatgtatacccatgtaacaaacctscacattctgcatatgtaccccagaacttaaagtataataattaagaaaaaaaaaaagagagagagaaagattctcgtgcctcagcctcgcgagtagctgagattacaggcatgtgcaaccatgccagactaatttttgtatttttagtagagatggggtttcaccatgttggccaaactggtctcgaactcacgacctcaggtgatatgcccgcctcggcctcc

SEQ ID NO: 786963 - DNA, 563 bp, Homo sapiens
tggataaagaaaatttggcacatatataccatggaatactatgaagccataaatcaggatgagttcatgtcctttgcagggacatggatgaatttggaaaccatcattctcaacaaactaacacaggaacagaaaaccaaacaccacatgttctcattcataagtgggagctgaacaataagaacacatggacacacagaggggaacatcacacactggggtccatcagggggttgggggctaggggagggacagcattagaagaaatacctaatgtagatgatgggttatgggtgcaacaaaccactacggcacatgtatacccatgtaacaaacctccacattctgcatatgtaccccagaacttaaagtataataattaagaaaaaaaaaaagagagagagaaagattctcrtgcctcagcctcgcgagtagctgagattacaggcatgtgcaaccatgccagactaatttttgtatttttagtagagatggggtttcaccatgttggccaaactggtctcgaactcacgacctcaggtgatatgcccgcctcggcctcc

SEQ ID NO: 786964 - DNA, 568 bp, Homo sapiens
gaggttgctgtgagctgagattgcaccactacactctagcctgggcgacagagcaatactctgtctcaaaaacaaaaacaaaaaaaacaaacaaacttagaaccatttgacccagaaatcccattattgggtatatacccaaaggaatataaataaatcattctatcataaagacacatgcatacatttgttgattgtagcactattcacaatagcaaaggcatggaatcaacgtaaatgtctatcaatggtggattggataaagaccatgtagtacatatacatcatggaataccatgcggccataaaaaagagtgagatcatgtcctttgcagaaacatggatagagcaggaggccattatccttagcaaactaacgcragaacagaaaaccaaataccacaagttctcacttataagtgggagctaaacgatgagaactcatggacacaaagaaggggacaacagacactgggacctacttgagggtggagggtgggagaaggaagaggatcaggaaaaataactattggatagtaagcttagtacctgggtgacgaaataatct

SEQ ID NO: 786965 - DNA, 629 bp, Homo sapiens
ttacttttatgcctgtaccgtgctttctttataactgtagttttgtagtaagtttggaaattaggaagtgtgagtccttcaactttgtccttcattattaacattgctttgactattttgtgtctcttgcatttctatattagttttaagatcagcttgttgatttctgcaaaaaaacaaaacaaaaaacaagaaagccagcggtgattttgttagagattgcattggatctatagatcaatttggggagttttgtcatcttaataatattgttttccaacccatgaacatgggatgactttccatttatttaaatctttcatttctttctacaatgttttatagttttcagtgaacacgacttttacttcttttaacagaggtccaaaagaggtcaaacctctctactgactgcaaggctgccagagtttgaatacgatgccactgagcttgggatccccaagttaaaatatcacagacmcctactagcttactaagattcagcagtttctcttggatagaccatttaagtttgtttgttctgtgccttagctttatttccaaagttccagaaaagacaagtcacagatcgggagaaaatatttgcaaaacatatataccatgaccca

SEQ ID NO: 786966 - DNA, 579 bp, Homo sapiens; identical to SEQ ID NO: 765655

SEQ ID NO: 786967 - DNA, 625 bp, Homo sapiens
tggatagcattggatgaacattgccaaattcccatgtttatatcttacagtgctttccaattttcccatgcttcttttctatatctaatgccatagattcatctcaagatggtgaagcagaactacagactggcttgcccaattcyattccctcttctcgtgcgtcttcctgccctgtagtaggggaaactcattctccacactcacttgcagctcaagctcctcatgtgacttaggcactgctaagcagatgcagtgatgtgagtcttggaaggagcgagtgagaaaagtcagctgttggccttgtgcagggagaggggaccttctgacaagcatagtggcaatagccagcaggggcagggcagctacggacccagaagcttcctgatcatggcagaggcctggtgcttccggggccctgctggcaacagctcccttagtagaccggttcttttgagaggttcagtctagattgtgtaccttcaaccctcccaatgattttttggagctattagtagccctttatacctctccttttgcatacactagccagaggattctgtaatttacaacaaaaatcacagcctcacacagatggatcctatacataggatgccatcatcaa

SEQ ID NO: 786968 - DNA, 627 bp, Homo sapiens
ttcaacatttgaaaatcattcaatgtaacacactgcattaacagaacaaagaaggaaaccacatcatcatctcaattgacacagaaagggcatttgaaaaaaatccaacatcctgttgtcataaaacacactcagaaaactaataggccaggcgtagtggctcatgcctgtaatcccagcactttgggaggccaaggtgggtagatcacttgaggtcaggagtttgaaaccagcctggccaatatggtgaaaccccrtctctactaaaaatacaaaaatcagctgggtgtggtggcacgtgcctgtaatcccagctacttgggaggctgaggcaggagaatctcttgaacctgggaggcggaggttgcagtgagcagatattgcgccactgcacttctgcctgggcaacagagccagactccgtcaaaaaaaaaaaaaaaaaggcatctaagaaaacctgacagctgttttccccctaaaagcaggaaccagacaagcagtttccttggctaaaacctccatttctacatggaggcaactgaacgggaaaatgacataaaaggtatccagtttgtaaaggaaaaagataactgtctctattcacagatgacacaatcttgtatatag

SEQ ID NO: 786969 - DNA, 644 bp, Homo sapiens
agaaatgatactcaaacttatgaaaaggtgttcaacctcacttaaacacatgaaaagatgttcaacacaagagaaacaaaaataaacagacatcatgtatggcatctatcacattctcaaatatcattacacactgtcaacaagactatggsaaacgggttctatggtacattactggttctgtcatacataattgcatacacacatgcaaaatggtgaaatctacatggagcagaatttagcaataactcacaaaacaacatatccatttaccttttgctgcagcaatctcatttttctagaaattaatgctaaacgtatatctccaacaatacaaaaacatacgaattagggttttcactgtggcactatgtctaaactgcaaaatactagaaacaacctcattgctcataaataggagaagagttgaataaactacattacatccacacaatgaaatactctaccactggaaagaatagataggtctgtaatttttgatatggcatgatttttaacatacttattaaatgataaaagcaaaaaaaagtatgcaacttttattttaaaaagagaagaggagagatatatatgtatttacttctttgtacagaaaaaaacctgggaaggtaggaaggaagtgt

SEQ ID NO: 786970 - DNA, 590 bp, Homo sapiens
gagggctataagtgaaatttttgatattatgcacttatgagacactgaaatatgcaatccattttatttattgctgtggaaagtagtgtgtatattactttatagtagagttctacaggtataaattttataattgaaatagatattaattattacacataaatgttactattttttatttgagtttggttatttttagttagaaactgcctatagtttaaccctgataacacggttaaatttttacttacaaatatagtaaactaaaagagctttttcattctagcatgcccatattgtgggcttatgttttcaccctctgcaatattccaaacttgtctttaaaggaaaatgagacattctatcaatgattatggggaggtaggggaaagacagaaatgccttagaattatctgggtgattttacaaaaccgcaccacacagaygcacacgcgtgagcaagtgtgcacacatgcatgcgcgtacacacacacagacgtagaagtcctatttcttcaaagtaaaaacaagttgagtgttcatactctgtatcagaaaaaaataccaaaagtttaatgaagagcttactc

SEQ ID NO: 786971 - DNA, 595 bp, Homo sapiens
tccaatgactcaattctttcttttttttttcttttttttttaattacattttaagttttagggtacgtgtgcacaacgtgcaggtttgttacatatgtatacatgtgccatgttggtgtgctgcacccattaactcgtcatttaacattaggtatatctcctaatgctatccctcccccctccccctactccacaacaggccccggtgtgtgatgttccccttcctgtgtccatgtgttctcattgttcagttcccacctatgagtgagaacatgcggtgttcggttttttgtccttgcaatagtttgctgagaataatggtttctagctccatccatgtccctacaaaggacatgaactaatcattttttatggctgcatagtattccatggtgtatatgtgccacattttcttaatccartctatcgttgttggacatttggcttggttccaagtctttgctattgtgaatagtgccacaataaacatatgtgtgcatgtgtctttatagcagcataattcataatcctttgggtatgtactcagtaatgtgattactgggtcaaatggtatttctagttctagatccctgag

SEQ ID NO: 786972 - DNA, 599 bp, Homo sapiens
ctgcgtttctgaaaaatgatagctttcccgcaagacatatggaaacaactgctttcccgaatatgtaatgtctcagggtacagacgaagccagtcagcttgacagataacagtgaggagagaaatatatgaacatttctctttgggccaagaagyaataatgtgtcttactagagttactgcctctattaaaactagatacaggatattaattgtattacacaggagttcagaacaagggctagagcacagctccataacagcatggaaactgtcacttcccagtttagccttctctaattaagtcccagtggggtctcctgttcatttcagtaatgtgcacttctcaggataaatgatatctaaatgcataaaaaaaccctgcacctaaattggtcaccaattcaaattcttactagacggcagtgactgcaaattgttatacacacctcccatgtctgtttgtttacaagtatgcatttgccagttactgggctctctctgcctcttccaagcagaacatcactatagtaagtcctcaaagggtaacccagaaccaaacaccagctatgtggagctacatagaaaattcagtctgag

SEQ ID NO: 786973 - DNA, 650 bp, Homo sapiens
tttcagataaatactgtactgaaaatcaaaacatcacaaaggatctaaacagaactgccatcaggagcttcaaggatggaagattttaaacatggcttagataatattttcctaaatttggagccagacaaagatgaccgaatagaatgggaggacagtatgaactcagagtcttaatcctggggggtttcttacaccttcyccttagacatgtttaattagctggggcctgttgtatttatttggtagatttggatacaaatggaaaaaaggtcttttcatctctttttatcagtagacccccaaagccaaggcaggtgtctgtgggattaaacataattacaaagggagagagagagggaagaagggagctagataataattcccaacagagctggaatttgagaacgggagcaggtgctgcaagaggccccatgtatccaactaatttgagccacgatgttgtgtaaaggcccacatattcatcctttcaacgcggagggccctggcagcctgtgagtacaaagacaggatgccaggatggccagccccggcaccatggctaccagggtaaccagaccctgcttctcactgctgcctttgttgggtggcagccacgggaaacaaagtgccacttcttaccattgtac

SEQ ID NO: 786974 - DNA, 583 bp, Homo sapiens
gaagtttttctcttagggactctaaattctcttttttatcctatttcctattctcactcaccttcagaagtgaattctacctttctctcaggctggagtgcagtggcacaatctctgttcaatgcagcttccgcctctcaggttcaagcgattctcctgcctcagcctcccaagtagctgcaattacaggcacctgccaccatgcccattaactttttgtatttttagtagagacgggatttcaccacattggccaggctggtctcaaactcctgacctcgagtgatctgcctgccttggcctcccaaagtgctgggattaaaggcttgaaccaccgcgctcagccacaatacatatgtacttttgtcagaactcagagtaactggaaaataatgaaagtatgatgtaatraattcacttcaccctcaaaagatcctgattcagcagttcagagctatggctgtgagatctacacttgtgtaaagctcatcagaatattttaatgctgctgtcagggttggaaatcactacaggtttagaattcacttctgaaggtgagtgagaataggaaataggataaaaa

SEQ ID NO: 786975 - DNA, 520 bp, Homo sapiens
gggggttgttagaagctctacttcggatcccacttctgatgccatcctgacaaaagaaaaacttcagccaaattaagctgaaaggagtttaattgagcaatgaatgactcatgaatcaggcagtcttcccagccagagtaggctcagtgactccagcacagccacgtggtagaagatttatggacagaaaaaggaaagtgwtgtacaaaaaatggaagtgaggtacagaaagagccatattggttacagctcagcctttgccttatttgaccatggttcaaacagttggctacatttgattggccaaaactcagtgattgacaaaagtgtaggttacggtcagtttacacctccacttattattgttcatgatatacagagaaacctttaggctgaacttaaaatatgtaaggaggcagctttaggctaaacttgatttaacagtacttactattaccagtgagttttgtaacttcctgtgataatttattgctcattagtgtccttttctctctgattg

SEQ ID NO: 786976 - DNA, 616 bp, Homo sapiens
gctcatttaccatttcaaaaatcctaggtccctaaagaattatgctaaatctattctgctagtacactataagtggatcaacagagcctgaaagatagcccatctatttacagcatggtttactaaatattctatggtttactaaatattctaagctcactattgagacctactgctcaaaaaaagagattcctttgaaaatactacagctgattgacaatgcacttagttacctagaagatctgatggagatctacaatatgattcatgttgttttcatgcctgctaatacaacattcattctgcagcccatgaataatggaataattttgaagtttgagtcttattatttaaaaaatrtattttataaggctaaaagaatgattcctctgataaacgggtctaaacaaagtaagttgaaaaccttctgactaggtttcatcattctacatggcattaagaacatttgtgaagctgggcacggtggctcacacctgtaatcccagcactttgggagagtgaggcaggcagatcacgaggtcaggagtttgagaccagcctggccaacatagtgaagccgcgtctctactaaaaatacaaaaaattagctaggcat

SEQ ID NO: 786977 - DNA, 538 bp, Homo sapiens
ttttgaagaagttgattccagccctcatgaatgactttgaagagttcaagatttcagggtaggaagtaactgcagatgtggtggaaaacaaaaacaaaaactagaattagaagtagagtctgaagatgtgactgaattgctacaataaaactttgatggatgaagagttgctttttgtggawgagcaaagaaagtggtttctttagatgaaatgatgaaatctacttttggtgaaggttaaacattgttgaaatgaccatcgaggacttagaatatttcataaacttaatcgataaagcagtgacaaggtttgagatttttgactccaaatttgaaagtagttcaacagtgggtaacacgctatcaatcagcatcacatgctaaatgaaaatctttagtgaaaggaagagtcaatcgatgaagcaaacttcattgctgtcttgttttaagaaactgccacatccgttccaaccttcagcaactatcactcttacagtagccatccacatcaaggcaagatcctttaccaggaaaaaat

SEQ ID NO: 786978 - DNA, 538 bp, Homo sapiens
ttttgaagaagttgattccagccctcatgaatgactttgaagagttcaagatttcagggtaggaagtaactgcagatgtggtggaaaacaaaaacaaaaactagaattagaagtagagtctgaagatgtgactgaattgctacaataaaactttgatggatgaagagttgctttttgtggaagagcaaagaaagtggtttctttagatgaaatgatgaaatctrcttttggtgaaggttaaacattgttgaaatgaccatcgaggacttagaatatttcataaacttaatcgataaagcagtgacaaggtttgagatttttgactccaaatttgaaagtagttcaacagtgggtaacacgctatcaatcagcatcacatgctaaatgaaaatctttagtgaaaggaagagtcaatcgatgaagcaaacttcattgctgtcttgttttaagaaactgccacatccgttccaaccttcagcaactatcactcttacagtagccatccacatcaaggcaagatcctttaccaggaaaaaat

SEQ ID NO: 786979 - DNA, 538 bp, Homo sapiens
ttttgaagaagttgattccagccctcatgaatgactttgaagagttcaagatttcagggtaggaagtaactgcagatgtggtggaaaacaaaaacaaaaactagaattagaagtagagtctgaagatgtgactgaattgctacaataaaactttgatggatgaagagttgctttttgtggaagagcaaagaaagtggtttctttagatgaaatgatgaaatctacttttggtgaaggttaaacaytgttgaaatgaccatcgaggacttagaatatttcataaacttaatcgataaagcagtgacaaggtttgagatttttgactccaaatttgaaagtagttcaacagtgggtaacacgctatcaatcagcatcacatgctaaatgaaaatctttagtgaaaggaagagtcaatcgatgaagcaaacttcattgctgtcttgttttaagaaactgccacatccgttccaaccttcagcaactatcactcttacagtagccatccacatcaaggcaagatcctttaccaggaaaaaat

SEQ ID NO: 786980 - DNA, 624 bp, Homo sapiens
ataagtgctatgtatgtgctgagaagaatgtatattctgttgatttaggatggggagttctgtagatgtctattaggtctgcttggtccagagccgagttcaagtcctgaatactttgttaattttgtgtcttgttgatttgtctgatattgacagtggggtgttaaagtctcccactattattgtatcggagtctaagtctctttctaagtctctaagaacttgctttatgaatctggttctcctgtattgggtgcatttatatttaggatagttaactcttcttgttgcattgatccctttaccattatgtaatgcccttctttgtcttttcttgacctttgttggtttaaagtctgttttatcagagtctagaattgcaacccctgctttttttctttctttccatttgcttggtaaatcttcttccatctgtttattttgagccyctgtgtatctttgcacgtgagatgggtctcttgaatacagcacaccaatgggtcttgactcttaatccaatttgccagtctgtgtcttttaattggggcatttaacccatttacatttaaggttaatgctgttatgtgtgaatttgatcctgtcattatgatcctggcaggttat

SEQ ID NO: 786981 - DNA, 658 bp, Homo sapiens
ctaaccagttccaatgagatgaactgggtacctcagttggaaatgacaaaatcaccttccttctgtgttggtctcgctgggagctgtacataggagctgtgcctatttggccaccttggcccctctcctgtttctagttcttgaaggtgtaaattttggttgtgaattttagatctttaatccaatcatttacaaaaaattgtttcttagcactggttttctttatctcataatttttttgcattttttgcatgttgtgttttaattttcattttctcaagatattttctaatgtgatttttctttctaatattttataatgtgattttttgacccagtagttgcttaaaagtgttgtttaatttccacatatttcagaattatcaagttttttctactttaatatatagtttcattccattgtgattgcaaaagatattttgtatgatttcattcktattaattactattagttttatggccatatatattatctatcctgcagatatttccatgtgtactttggaaaaatgtgtactcttttgatctcgcgtgatatgtcatgtatatgtttgttagatccaattggtctatagtgttgttgaagagccatatgttcttttttctttttttttttttttttgagacagagtctcgc

SEQ ID NO: 786982 - DNA, 559 bp, Homo sapiens
cagctcttcctctatatgaaattcctgtgtaactctatgctacttctactttccagaagaatgaagtctcagttaacaaggaattgatattcatagactcaatcgactgagttaatagtgtgccatatagtcaaaatgttttgggtaaaccctattataatagtcctttttggataatgattagaacttgagatgaaagcaggataacttttatagttatataaatgtcctataaaagttatcctgcttttggccgggcacggtggctcatgcctgtaatcccatcactttyggaggccgagatgggtggatcacctgaggtcagtagttcaagaccagcctggccaacatggtgaaaccccgtgtctacaaaaatacaaaaattagctgggcatgatggtgggtgcctgtaatcccagctacttgggaggctgaagtgggagaattgcttgaacctgagagggggagattgcagtgagccgagatggcaccattgcactccagcctgggtgggtgacagagggactctgtctcaaaaaaaaaaaaaaaaaagttatcc

SEQ ID NO: 786983 - DNA, 625 bp, Homo sapiens
taggacaatattattgaagcatgtaaaaaaaacagtgagttttaattaacttttagaagattctactcctactccttggcttatcaatagtgcattgcaaggttcacttggctcactataatttttattttaatgatgttgttttccagggctgagtttagactgtgatttccttagatttatgcatgtaacttaatctaaaactgaacctgacaattttttctaactgattgttccatttaactgtattctgtctctttggaaaatgtgtgtcctcatattgcagaaatgcctcttaaatttgatttgaagaaggagtcaattttttttttttgggtggggggacggaatctcactgtcacccaggctgtagtgcagtggcgygatctcagctcactgcaacctgggaggagtcaactttacagaggtacatacatgtcttctacattcttttaaagaatgtagctaattaatctgatttttaaagactaagttaagtattaacaaggaattcagggatctttgcctcattcagactgtagttacaaggacagagtactcattagagatatttttgatatatgaatgcaccaaaggcattctcagttgttggataaatcatgta

SEQ ID NO: 786984 - DNA, 553 bp, Homo sapiens
gccttgtcaagctcatgtagaagggggaagaaacaccacaaatgtcagtgtttgccaaagttactggaatgcgtgtaataaagtgaaatgcttcatttattactattctttaaagaaatagtattttttttatttttattttctttattttattttttgagacggagtctcactctgttgctcaggctggagtgcagtggcgcgatcgatctcggctcactgcaagctctgcctctcgggttcacgccattctcctgcctcagcctcctcagcagctgggactacaggtgcctgccaccatgccgggctaattttttgtrtttttagtaaagacggggtttcaccgtgttagccaggacggtctcgatctcctgaccttgtgatccgcccgcctcggcctcccaaagtgctgggattacaggcgtgagccactgcgcccagccaagaaatagtattttttacttttattcaaatctatatagaatttatctatataaatgcctgcttaacattaacatatttttaaaaatgtaattggctaattatatttaga

SEQ ID NO: 786985 - DNA, 597 bp, Homo sapiens
agccactttcttagctagaccttctggataatttgctgtagcttctccactagcacttgccactttaacctgcacttttatgttatcaaaaggtcttcttaccttaaatgtcataaaccaacctctgctagcttcaaacttttcttctgaagcctccttacctctcttagcctttatagaactgaaaagagcccgcttgctctgaattagattttggcttaagggaatgttgtggctggtttgatcttctatccagaccactacaattttctccatatcagcaataaggctggttcactttcttatcattcatgtgctcactcactggagtatcacttttaatttctttcaggaatttttcctggccaggaacagtggctcatgcctgtaattccagcactttgggaggccaaggtgggtggatcacttgggcccagaagttcaagaccagsctgggtaacatagtgaaaccccatctctagaaaaaaatgtttaaaaaattagccaggaatggtgatgcacactagtagtctgagctacttagggggctgaggtgggaggatcccttgagcccaggaatcaaggctgcagtgaacc

SEQ ID NO: 786986 - DNA, 676 bp, Homo sapiens
cacttgagcaaatattatctcttttgtctgtgaaatgagtatgacaatatctaccagggttgtgaggatttgaaaacatggaggagaagcactgagattgggttggcacatggcaggtgctcaaaaatgatacctattgctgtgttttttatggatgtccaatataagaccttaaagaactscttgttttgttaaaaaaaaaactcttcctggtgaacttttagacagaactgcaaaagggcaggtgcaaatatttgtccagctatggtcagcccagcccctgacccctagtgggcacattatgtctgctgccaaaactttccaagtggtttagcccccctggctggcattgaagaggcagaggttgtgggattaatttccacagtctgattagctttcagagaaaactctgacttgtagcttggaatgtcatagtggcctgagaccacctcttgaaaaaatactagcaatactggctattaaagagcatgagaaccccaacccatgcaactccatcagggctggcagcctttcttatttttttaaattaattaatttctttttgattgacaaataattgtgtatatttacggggcacagtgtgatgttgtgatctatgcataaattgtagaaagattcaatcaagctaaggaacatatgcaatgtcttaatgagg

SEQ ID NO: 786987 - DNA, 620 bp, Homo sapiens
ttgttgacccaatgatcattcaggagcaagttatttaatttccatgtatttgcatggttttgagggcttcttttggagttgatttccaattttattccactgttgtctgagacagtacttgataaaacttcagttttcttaaatttattgagacttgttttatggcctatcatatggtctatcttggagaatgttccatgtgctggtcaacagaatgtatattctgcagttgttgggtagaatgttccgtaaatatctgttaagtgcatttgttccagggtatagtttaaatccattgtttctttgttgaccttttgccttgaagacctgtctagttctgtcagaggagtaytgaagtcctccaatattaattgtgttgccatgtatctcatttcttaggtctagtagtaacagttttataaatttgggaacttcagtgttaggtgcatatatatttagaattgtgatattttcctgttggacaagtccttttatcattatataatgtccctctttgttctttttcactgctattgctttaaagtttgttttgtcttatgtaagaatagctactcctgtttgcttttggtgtccatttgcatggaatatcttccaccact

SEQ ID NO: 786988 - DNA, 620 bp, Homo sapiens
ttgttgacccaatgatcattcaggagcaagttatttaatttccatgtatttgcatggttttgagggcttcttttggagttgatttccaattttattccactgttgtctgagacagtacttgataaaacttcagttttcttaaatttattgagacttgttttatggcctatcatatggtctatcttggagaatgttccatgtgctggtcaacagaatgtatattctgcagttgttgggtagaatgttccgtaaatatctgttaagtgcatttgttccagggtatagtttaaatccattgtttctttgttgaccttttgccttgaagacctgtctagttctgtcagaggagtattgaagtcctccaatattaattgtgttgccatgtatctcatttcttaggtctagtagtaacagttttataaatttgggaactycagtgttaggtgcatatatatttagaattgtgatattttcctgttggacaagtccttttatcattatataatgtccctctttgttctttttcactgctattgctttaaagtttgttttgtcttatgtaagaatagctactcctgtttgcttttggtgtccatttgcatggaatatcttccaccact

SEQ ID NO: 786989 - DNA, 620 bp, Homo sapiens
gagttgcaaatgatgaccagatgttcaggttctaatcctgccctgataccctcaagatgagaacatcgacttttccattgagaaaagggacctggcaggggattgaggcagtcacccaccctgttatccgagtttgcattattataggccagcttgtggcaggtttttacaagttacagtttacagaatacttacctatacataccaaagggcaatagtgtctttaggtttattacattatcaatattggttatctctaaggatgcataaaggtttatttctattactkccttgctcttctgcaccttagtttcctacctataaaatagggataaaacacaccttccttagaggttgttggaggcctgaatgagatatttgccatgtgtcttacacagtactggggaggctggacaatcataataaatcatgatggttaagtttctgtgtcaacttgattgggctaagggatgcccagatagctggtaaaacatttctgggtgtgtctgtgaaggggtttttggaagggattagcatttgactcagtagactgagtaaagatcacccccaccaatgtcggggggcattgtgcaatctattgagggcccaaatggaataaa

SEQ ID NO: 786990 - DNA, 515 bp, Homo sapiens
agggcatttacccaatgcctgtatccccattgtatcttagaagtaactaacttgcttttgattttacaggctcataggcagaagggactttctttgtctcagatgagactttggacttggaatttggggttaatgctggaatgttgtgaaggcacaattgcattttgaaatgtgagaaggacatgagatttgggaggggccaggggcaaaatgatatggttttgctgtatccccactcaaatctcatctagagttgtaatccccacgtgtcaggggaggggcctggtgggaggtgattggrtcatgagggcagtctcccctatgctgttctcatgatagtgagtgagttctcatgagatcttatcgtttaaaagtgtggcacttccctcctcactctctttcctgccaccatgtaagacatgtcctgcttccccttcaacttccaccatgtttgtaagtttcctgaggccttcccagccatggggaactgtgagtaaattaaacctcttttgttt

SEQ ID NO: 786991 - DNA, 614 bp, Homo sapiens
taatccgttgcagtagaaaagatggttgcaatttttatttccattttaaggcgaggaaacagctcaagtgattttatgtaaggtcatacaccagtaagtactgggttgtgaaccaggacccagggttgttggtttccttggccagtacttttttctgttccaccgcagccttccgtgaagatgctgtgatttatgtttccttcatttcatactctgctgttttccaggggcccccagcccagttccttcctccattcmcaccagggctggctattatattacataactccagcagtgccatttattttgtgttccctgatattgtacaacgagagggttccaggaggggtgccatgcacatagattacgtagaattccatctatgggggcagtttctaccccagggttagttaaaaccgtagagggataacatagatgagtaaaatggctttctatgctcaggagacttacaagaattagtttttttcctttgtccccccctcaatattataccacttagaacactagataattctatactactacttgtagaaacagtcaactgagtcctgctaaattaaaaagaaagagacaccactggtttattcctttgg

SEQ ID NO: 786992 - DNA, 624 bp, Homo sapiens
aagcataacctccacaaaagcaggacacttgatctgtgaccctgatatctagaacactactaggcccattatagatgcttgattaatgtttattggatgaatgaataaatgaataaaaatatgtgcactcagagcacatgtatattatgcrttaattcccaaatatttatcaagtttctattacgtgcctagtgctttttcgcatgccagggtttcagcagtgaacaagatacacaacctgtgcttacaaaatgtaatgtctagtgtgctgttcaatatggtagtctctagccacatgtggctacgtaaattagctaaaattaaataaaattaaaaattcaatttcttaattacactagccacatttcaagtgcttacacgtagttagtggcaaccatagtggagagtgcaaatgtagaacatttccatcatcatcagaagttctactggacagtccttgtttagtgacaagacagagaaaatcaacatggggatacttccattgcaaagggatacagtatatgctatgtaaagaatatgtacaggttttaaagggagcatctaggagaggctactagcccagattagggtgtggctgggttgtcagggatggcttcctggagg

SEQ ID NO: 786993 - DNA, 539 bp, Homo sapiens
accatgatctctacacaaggagggtagggcagtttaggctactgatccaggcaagtgggtgctccaaatgtctggagatgtgcttagtcatggagtggagagggcccccttgcacagcatctctgcatagggaaggtggggcaactcaggctcctagtccatgtgagggagtgctccaaaggcctggagatctgcctactgcctgtgtgtggagcacagagagccccactgcaccacaatctatgcacaggaagggtaagatgttcaggctgctgatataggctaggaggggctctgaatacttggagatctgcctgggcatggagcagagccccactgcaccacgatctatgtccgtgaaaggtggggtggcttargctgctggtccaggcaagcagatgctccaagtgcctggagttctgcctaggggtggagcggagagggccctactgcaccatgatctcaggggaacaggctggggcactcagcaaggacacatgcagattggttccaggttgccaagctggacttggttgcac

SEQ ID NO: 786994 - DNA, 505 bp, Homo sapiens
gatatcagggaggaaggattaactttagataattgtgcatgtctgctgctatatatttgtcagattgcattccaaagctaatatggtagaaatttgttgtaatgtatatctctacattaactccccttcttctctatgcctggagaaagagttgatgtcatgtgcaaagtgttcttgagctaaatgcattgtccttaaaatcaaacgaacttgccctccacttcctccttctcctgggtggttgaccatctgcagatcacaagactgcacagatacagctgtaggatttgcgtttatgaaatgctgactttatcatatgcctcaacttgctagacctattcattctgatttggggtataygttgacagtgacctaaggctacagagcactgagatctctctgggtcaacttcataagtatatgtatatcaagagggttggagtgttcatggtttgtattgggtgacgcagagggtactctaagccagaaataaactgtcttgata

SEQ ID NO: 786995 - DNA, 645 bp, Homo sapiens
caccctcagataaatgatggtggtgtgataaataagtagacattggacagctggaaaaaggattccagccctggctctgatatttgctagtcttacagggcttcagatgatggctggctacactctctgagtctcaagtttccttatctaaaaaatgaagataaacagtgctaccttcatgcttctattgaaaggagccaatgtatgtgaaaacaccatgaaagagtgtcartgcaagctggtgacctttttttcactcattcattcaatcatttattttctttttaagtgtatttattgaatttctactatgcatcaggcactttactatcagctgtcggtataaggctgactaaaagttggtgtagtacctggtttcatgaagtttacctgctaatgtataggaaaatattttgacttaatataagaaaggatgttctctcggtgagggaaaccaaatgcttaggtgtcactgagcaagccatttgaaaactgggaatgttcagacacagtctccacaactttttgcaaggtgcaaaagaaaggaattgagaaatagactagggttgggttggatgcttctataatcccttccatttctgagtttatctgctgtttcttcctcataaactctgttatgaccat

SEQ ID NO: 786996 - DNA, 661 bp, Homo sapiens
caatgatatatctggttttctatccatttgtatttacccttctttgtgctatttgagcattatatgcacatattcatgtttttaaatcaaatttaagaagtgttcagccattatttcttaaatattttttcactcctttctcccttctcttctcttggtacgcttattacttcaaatgttggtgtacaaaattttgtctcacaggtccgtaaagaacactttttwaaattctttttttctgttttctttttttaattttagattggaaaatcttcattgacctatactttctgctaaaaataattccctcacttttattcatctgaaaaatgcttgagaagaaattaatgtttcttatctttatttttcaaacatagttttcaaccaagattcttggttgattttttttccttcaccactttgaatatgtcaactcacttccttctggcactcattttatctgatgaaaaattagcttttaatcttattgaggttgtattgcacacagtccctttcgtgaagcttccaaaatttttaaaaatttatctttcaatatatttgctatgatatgtttgggtgtgaatttctttatttttgtgctaatcctatgtattccactttttggaagttaacagttgtgtcaaatttgggaaatttttgg

SEQ ID NO: 786997 - DNA, 547 bp, Homo sapiens
ataaaagaattcaacaaagtttctggatacaagattaatgtacacgaatcagtagctcttctatacaccaacagcgaccaagtggagaatcaaataaaagaactcaaccccttttacaatagctccaaaaaaaaaaaaaaaaaaaaaaacttaggaagacacctaacaaaggaattgaaagayctctacaaggaaaactacaaaacactgctcaaagaaatcacagatgacacaaacaaatggaaacatatcccatgctcatggatgggtagaatcaatattgtgaaaatgactatactgccaaaagcaatctacaaattcaatgcaatccccatcaaaataccactatcattcttcacagaattagaaaaaaaaatctaaaattcatatggaaccaaaaaagagcctgcatagccaaagcaagactaagtgaaaagaacaaatctggaggcatcacattacctgatttcaaactatactataaggccatagtcaccaaaatagtgtggtactggtataaaaataggcacatagaccaatggaacac

SEQ ID NO: 786998 - DNA, 589 bp, Homo sapiens
atagtaacataggaaaataacaatactaatagcatgtcacaagctgatcacaagtctttgtaataaagtacactattcttaacaacctatagaagcaagcactatgtttaaggtagtgagttcttccttttgctttctaaggacaccctactctgtaattgagtagtctctaataaactatcttaacttcactatactctgcagctcgccctgaattctttcctgtgcaagatccaagaatctgctctcagggtctgggacaagatcccttttccggtgacagtatctatactttactcaaaaactctcacgtccttgcattaaaagatttctacatgtcggggaggaaatgtttcctcaaccctcccagggttcctggctggctctgaaataaaacaaagacagattaacaggaaaaaatatacaaatttatttaatcagarttttacgtaacatggggccaagcacagtggttcacacctgtaatcccagcactttgggaggctgaggcgggtggatcaccggaagtcaggagttcgtgaccagcctggccaatgtggcgaaacccagtctctactaaaaatacaaa

SEQ ID NO: 786999 - DNA, 599 bp, Homo sapiens
cgggatcctagaatctgtctttccacaagctttcttggtgattcttatgccatcagtgtgtgtaaaccacagttctcaactctggcaatccatcagggctgctgttagctaacttgaatgaccactcagaactctcttccatatgaaatttacataaggctcattaagacaattcttaaggaatctctatgaccttaacttggtgtacaggaatggaaacatacttaggataatccttgagtgataatatattttatattttgaaaaatgatttcttccaggccctaactttttttaaaaaaaatgttaagcatacgaagagtggatctcacaatacacattgttctatgttgctattcttagatgtgcattgatatttctaaagtgtttcaaggtcatttggcagaacawgctaaggaaaattatatacatgtttgcaaagcctgagcttgtgcaccaccctttccctttagctgcaatcattttctataaagccagtaatttcagttttccagagtcctttaaaacaaaaacaggtgaaatattgagttgatttttaatctctttctgacgtatttctaaagtttcctctttagaat

SEQ ID NO: 787000 - DNA, 612 bp, Homo sapiens
cataaaacttgcggcataaaagtgaagatgatttcttcaccttttcttcactatttggacctgtcataaatttccttaagcaattggtgattgatgaagtaggagtgttattcttacgggaaggtgagaagagagaagtaatggttcaccaartaaccgtaaagacctcttaatgatttgtggggaaggtcttgagaatagctagcagggaaggaaagcatgtgtacctggaggtcttcagctgggacagagacctttgcattgctccatgtgttggcttcagctgggacagagacctttgcattgctccatgtgttggggcaggtcttccatttcaatctcctctgccctaatttattagccatacttgtgctatttattacttttaaaccctaatccttttttccgtaatttgtttacattttgcagagtgccagcattttacaatgtgtcttttatgtctcacagaggtcatcattaagttagacctttggcttcatgtgtctcccgagagatggtttataaaatttgcatccttctggcacaggtggtgtggcttagggattagaacacagcctgcctgagttcacacctcatctctcccacttaaca

SEQ ID NO: 787001 - DNA, 644 bp, Homo sapiens
gaactcaagtgaggataataaatgtcagaggaatatttatagcttggtatgtggagactttccaggtccctgttctgcaataacacagatccatctgctaagagcattagaattgtgtattgttacttcttttttttcactcaagttgatagattctgaaaatagaaaattacaatatacaaatattttaacctttttttactcaaataattattaaattaggagttaattaccaagggcaaagtttctccgcaattccttgctattggaagcaagcccagaagaaaccttagctcagtcttatataagccccctgtcatcattatgctgacagatctacctgaggatttattgtaggattgtcagaccttgggggtctgaggttagtcgactccccagtctgtcrttggggttatgattgtttttattgctgtaccataaacatagttaccactgatactattgtcagctaatgtattcttgttcaaagatctgaggaagagaacctttacacacaaagacagtttatatgtatttgtaccaggaggttatttaacccttctcctatgataagcaagggcaagaaggacctctctggttctgttccatctttgtatcctgacctaaagaattttcatagagct

SEQ ID NO: 787002 - DNA, 621 bp, Homo sapiens
gtgttaagtgggagagatgaggtgtgaactcaggcaggctgtgttctaatccctaagccacaccacctgtgccagaaggatgcaaattttataaaccatctctcgggagacacatgaagccaaaggtctaacttaatgatgacctctgtgagacataaaagacacattgtaaaatgctggcactctgcaaaatgtaaacaaattacggaaaaaaggattagggtttaaaagtaataaatagcacaagtatggctaataaattagggcagaggagattgaaatggaagacctgccccaacacatggagcaatgcaaaggtctctgtcccagctgaagccaacacatggagcaatgcaaaggtctctgtcccagctgaagacctccaggtacacatgctttccttccctgctagctattctcaagaccttccccacaaatcattaagaggtctttacggttayttggtgaaccattacttctctcttctcaccttcccgtaagaataacactcctacttcatcaatcaccaattgcttaaggaaatttatgacaggtccaaatagtgaagaaaaggtgaagaaatcatcttcacttttatgccgcaagttttatggcactcag

SEQ ID NO: 787003 - DNA, 607 bp, Homo sapiens
cacacacacacacacacacacacacacacacacacatccctcagattggaggttgatttctcaaggaaacaaggacaagagagattacttgattatcaacatcatgggttatcccttcatatgcagactgccattttccaaaacccactatcttcaagaaagattacctttagagttggaaggaacttcataactgagatggtctcatctcaagttattgatcaagcaaggagacaggaagaaagagacttgcccaaggtggtaagaccagtaccagcctccacagccctgaattcagtgctccatgtaccccaccaccttaaacrtgtatatagctaactgtgaaaaatatgtagacatctcaccacttttcatttaaaaaaaaaggttaggatgttttaataatcactgtaacttacaagttcccagcattacaggctgtttcatctatttatgcatccatccacacaacagtgtttggaaacctattgagctacctgcctatttcagtgcttgttgcctatttcagggcttgttgaaacacatgtagagcaacggctcagaggaagaagggatcaattttataaagatttaaaatttacaaatg

SEQ ID NO: 787004 - DNA, 496 bp, Homo sapiens
tacatcacatgggaaagtctgtctttagcctcaacctagagccccctgtgttcctgcagcaaggctgaacattgctccataactggccttccttttccagtgcgcaactaatgcccaggatgaaaatacagtatgaaaagatgacgtcaggtccagttgcctttaacaacagcccaaggtacaaaaacctaaaaacccctgtggaaagccaaagccctgtggrgaaaccccaatgataaggtatctgaagacttagggatattttggttttcaggggagactgctgattttctgggttattcaggcaaaatccagttgagaagcaaatctaactttctgtttctgtgaccaaggttccatgaactgcatccattttatgtttagtagggatgactggttcaaactgtgggagatcttaaggactcatgtgcatggcctttataacattgcaatagtaacagctaccattaatgacccatagatcattgtatacagc

SEQ ID NO: 787005 - DNA, 645 bp, Homo sapiens
ttgccttctgccctctgctctgtgccctgtgctccctactcccgcagagcactgctcctgctttcgatgccaacagcatttactgtgaactgacctcacttgcctgaagaagtgtggggagggtggggaaggggtggttggctctccagccccagagtgctctgtggccctgggagggcatgggtggcacctgagccaggctcccacggttccgcctgcagatcgcctcaggcatggcgtacgtggagcggatgaactacgtccaccgggaccttcgtgcagccaacatcctggtgggagagaacctggtgtgcaaagtggcggactttgggctggctcggctcattgaagacaatgagtacacggcgcggcaaggtgggcaggggctgtgtggtatgtcgcgcttggcctgggacaggtcacgtcccgctctgagccccagttttttcctcagctgtcattcctcatggtgcttatctarcagagcggtcatgacaggaggtcagagctgccctgacctttctcgttcctgcaggtgccaaattccccatcaagtggacggctccagaagctgccctctatggccgcttcaccatcaagtcggacgtgtggtccttcgggatcctgctgactgagctcaccaca

SEQ ID NO: 787006 - DNA, 646 bp, Homo sapiens
cctgcctggccatctccctgaagaccccacctcgctctacttcccatgctctaattttttgaatgtacacatcatcttgctcatccagcttctgtcttggtctcctggctcagtgtgtttttttcccactctctcaagaagtgttatttaattttgctctgagttggtgcatccttcctgctgtgtgtgtgtttgtatgtgtgtgcacacacacatgcgtgcgcacagcttccccctagctccctctctttttctcaagctcataaagtttcccactttctccaggtcttgctgtgtgtgcatgcacatgtgtacatatgttggtcttcattggattccatcctctctgtttttctcagtgattcttcatccatctgctagtccatacatccaacacaccatacttgttgagccaggaccagggtctgcctgtktgtcctgtgtctttctttccttcctgactcctcctgctttacctaccctcacatcttggggccccaggttcctgtcctggatcattccctccccagcttttcaccagctccctgaggttcacagagtcattctttgcattgacactccagcatcccctgcagcccagaccctacttgttctctcctcatcctgccagtgaatcgtggctcac

SEQ ID NO: 787007 - DNA, 646 bp, Homo sapiens
cctgcctggccatctccctgaagaccccacctcgctctacttcccatgctctaattttttgaatgtacacatcatcttgctcatccagcttctgtcttggtctcctggctcagtgtgtttttttcccactctctcaagaagtgttatttaattttgctctgagttggtgcatccttcctgctgtgtgtgtgtttgtatgtgtgtgcacacacacatgcgtgcgcacagcttccccctagctccctctctttttctcaagctcataaagtttcccactttctccaggtcttgctgtgtgtgcatgcacatgtgtacatatgttggtcttcattggattccatcctctctgtttttctcagtgattcttcatccatctgctagtccatacatccaacacaccatacttgttgagccaggaccagggtctgcctgtgtgtcctgtstctttctttccttcctgactcctcctgctttacctaccctcacatcttggggccccaggttcctgtcctggatcattccctccccagcttttcaccagctccctgaggttcacagagtcattctttgcattgacactccagcatcccctgcagcccagaccctacttgttctctcctcatcctgccagtgaatcgtggctcac

SEQ ID NO: 787008 - DNA, 594 bp, Homo sapiens
aaaaaaaaaaaggtgggccaggtacagtggttcatgcctataatcccagcactttgcaaggccaaggcagattgcttgagcccaggatttcaagaccagcctgagcaacatggtgagaccttgtctctacaaaacatttttagaaacttagcygggtgtggtggtgtacccctgtggtcccagctaattgggaggctgaggcaggaggattgcttgagcccaggagtttaacgctgcagtgacctgggaggcggaggctgcagtgagccaaggtcacaccactgcacttcagcctgggcaacaaggaggctctgtctcaaaaaaaaaaaaagctgcagtgagccatgatcatgccatttcccttctgcctgggtaatagagcaagaccctgtctcaaaaagaaagggttgtttttttgttttgctttgtcttcaaaaaaataaaaagaaaaatcctcatgcaccaagcccaggtgtcctaattgtgtcctcattattaaatgcctaacttcccgtggtggactgttagcaggaagcgactgggatggacttaacattcacttagcaaacagctacctccctagccactggagga

SEQ ID NO: 787009 - DNA, 640 bp, Homo sapiens
agctaatttgtttattttaagtagagacagggttttgccatgttggccaggctggtcttgaactcttaacctcaagtgatctgcccaccttggcctcccaaagtgctggaattacaggcttgagccaccatacccagcctgtttttcctttatttttagtttttgggaattttgtttgtttgtttgtttttcttatttatttgttttgttttgtttctcctttagtatagattgggatgcataaagwccagagtcttaaatgcacagcttgatgaatttttacccagacatgccgctatgtaacttacccaggtcaagatcaagatttaaaacactcctgcctaggagacaccctcatggccattccttgttagtgtctaccccacataactattattctgactcctgccaccttcaattacttttacctgttcttgaacttctgggggtaggtaaattattaaacctttctgagcctcagtttattttttaaagtgatagtacttgtgctatagggttggattaggagaatcaactgagacaacacatgtaaaatcattcgagaaatatttgtaaaacccttgatgcttaataagttaaagctgtttgtttatgaatggccattgttgacctcaaagtc

SEQ ID NO: 787010 - DNA, 617 bp, Homo sapiens
gccgggcgcagtggctcatgcctgtaatcccagcactttgggaggctgaggcgggcggatcacaaggtcaggagatgaagaccatcctggctaacatggtgaaatcccgtctctactaaaaatacaaaaaattagccgggcgtggtggcaggcgcctgtagtcccagttacttaggaggctgaggcaggagaatggcgtgaacccgggaggcggagcttgcggtgagccaagatcgcgccactrcactccagcctgggcgacagagcgagactccgtctcaaaaaaacaaacaacaacaacaacaacaacaaaaattagccgtgcgaggtggcgggcacctgtagtcccagctactcgggaggctgaggcaggagaatggtgtgaacctgggaggcggagattgcagtgagctgggattgcgccactgcactccagcctggacgacagagcgacactccatctcaaaaaaaaataaataaataaataaaaaataaaagaggtatctaagttctcatagggttgttttaaggattaaatgagttaatatatgtaaagtaatgaagaggctcttaaaagatttctggggaggatcctcctatacttcttttgctgtatg

SEQ ID NO: 787011 - DNA, 617 bp, Homo sapiens
gccgggcgcagtggctcatgcctgtaatcccagcactttgggaggctgaggcgggcggatcacaaggtcaggagatgaagaccatcctggctaacatggtgaaatcccgtctctactaaaaatacaaaaaattagccgggcgtggtggcaggcgcctgtagtcccagttacttaggaggctgaggcaggagaatggcgtgaacccgggaggcggagcttgcggtgagccaagatcgcgccactacactccagcctgggcgacagagcgagactccgtctcaaaaaaacaaacaacaacaacaacaacaacaaaaattagccgtgcgaggtggcgggcacctgtagtcccagctactcgggaggctgaggcaggagaatggtgtgaacctgggaggcggagattgcagtgagctgggattgcgccactgcactccagcctggacgacagrgcgacactccatctcaaaaaaaaataaataaataaataaaaaataaaagaggtatctaagttctcatagggttgttttaaggattaaatgagttaatatatgtaaagtaatgaagaggctcttaaaagatttctggggaggatcctcctatacttcttttgctgtatg

SEQ ID NO: 787012 - DNA, 617 bp, Homo sapiens
gccgggcgcagtggctcatgcctgtaatcccagcactttgggaggctgaggcgggcggatcacaaggtcaggagatgaagaccatcctggctaacatggtgaaatcccgtctctactaaaaatacaaaaaattagccgggcgtggtggcaggcgcctgtagtcccagttacttaggaggctgaggcaggagaatggcgtgaacccgggaggcggagcttgcggtgagccaagatcgcgccactacactccagcctgggcgacagagcgagactccgtctcaaaaaaacaaacaacaacaacaacaacaacaaaaattagccgtgcgaggtggcgggcacctgtagtcccagctactcgggaggctgaggcaggagaatggtgtgaacctgggaggcggagattgcagtgagctgggattgcgccactgcactccagcctggacgacagagcgacactccatctcaaaaaaaaataaawaaataaataaaaaataaaagaggtatctaagttctcatagggttgttttaaggattaaatgagttaatatatgtaaagtaatgaagaggctcttaaaagatttctggggaggatcctcctatacttcttttgctgtatg

SEQ ID NO: 787013 - DNA, 577 bp, Homo sapiens
caattaatgcaatttgttttcttgacattataacagctacattttgatactgatgaaattatagtagatcagtatttgaggcattaattaaaattttgatgaggtcaagttttccgtcacacaaacagtccaaaataaaaatcayattttaaatactgtgataatggggttaccaagaccacatcttaaataatgattgagattatttcaagataattttatctaagtagcaaaattaagttatttgagtgaacgttttatttcctattttcttcaggtttaataatactacaaatattgagtgatgcaaaaaaaaaaaaacctgaagaagatgactgaagtaatagctgccatttatgaaatatttaattatatcccaggtactgtgctaggctctttacatgaattaactcatttactactcacatagctctctaacgcaggtacttttatcattattttatgttacaggtaaagacactgagacaaagaaagatatagcaacctgcccaaggttttacacatagcaagtggcagaaatggggtttgattcctgactcaccacacccaagagcag

SEQ ID NO: 787014 - DNA, 458 bp, Homo sapiens
tagtgtatttagaatttctatatttagcagttaagattttctttagttaccatttgcaatattcaagcagccacagcaaaggaagcttctcagatagctcaagaattttaccactggggaagcatcacaggttttattttcccgatctctgactataacctaaaccaaaatctcacttgctaaaatggcaactaattttaattgtaaacaaatatttttctttaatcagaatgatgtcacaatcttactaagccagagccaggccaggkaccagccttttgcctgtctaaaggtaacaataaaatgtaaatacctcctagaagagatgacttttacaaagaggagaaatagagaatttacaggtgacatttaattttctcagctttcactgaaaaaaaaaaaccctacacaacaatccaccatcctcttggtgaaactgatttaaaaaagtcatttgc

SEQ ID NO: 787015 - DNA, 697 bp, Homo sapiens
gggcctgcccgccgctcggttgtcagcatctcctgtagccggcgcgcacactgcgcgcaaacacgccccccaaaatccccacaacctgtcaaacgggccctacagctcggagcctcctggcaggagggagaaacttgtacccagactcgccagcagccagaatgctgctgtttgcctatgagaacaatttttaaagcggaaataatcatgataatgaaataaaaggatcaaaagcatcttgactttttctgagcctttggraaaaataaaattgttgttttctaccagcccgcgaatattcccagtcgcccgtggcgacgcgggggtggggtcggcgctcaaggcagaaagcgcgaggcaggtgcccaggagagccgcgcagaaggggactgactggggggccctggtccccgacgccatttgaggggcagcggcgcccgccttacctgtggatgcagtttccatggcaacgggcgactgccgggcggggcccgagccggcttcccgcgacgccgcttcccgggccctggcgcccaaccccgggctgggctccccagcctgcggcgccggcgtggcccctttcggcgtcaccgcttcgttctccccctccccccggtgcctgagccactgggacccggggccggccagcggcagcagctcgtcctgcggatcccccggcgcggccatggctggcggt

SEQ ID NO: 787016 - DNA, 472 bp, Homo sapiens
gccttggatccatctgaaaacaaagctgacaagtttctcaccacctagcaacacaaaaaactctaaacacaatccaaagaatccccaagggaaacagcttcaagaatcttgaaaatcatacctatttttgtttgtaatgtgtgaaattattacaagtatgttcaccaagaggactattgatggatgactcacaatttagctaaattcaatgaaccacacactgtgcctatcccagtaggtgactcatgcattttttatttcaagtatcaagtgtttgccaaaaacagtmtttaaaaaaagtaatgaaaattgttctgaaagagctcatgaatagggtaggactacccaccgacaacctcatttgtgctctgaccacttacatgggatttggtgggtctgctacagcagcgctcgacagagagtgcgctccccacagcaacggtggcaggcggagggcaggctctgcaactca

SEQ ID NO: 787017 - DNA, 663 bp, Homo sapiens
gccaggatccgtgctgttttgtttcaatcttctttatactgctgaaaacaggaaagcctcctgtcacgcagactccgggattctcagagcccaataaaggttagtgacattttcaattcatgtttgttttcattcttctaatcatgaactctgtgtcagcctgagaaaccagctgagagtaatccataaccttttataagtgaaacattaactcacagctcgttctgatgtctttttaatgtaatacaaaagcaaaagcaaaaacacaataatatacatgatagaaacacggtagccaaatgagaaagtttgttggaactttcacagcacagagtaccacctaatttaatggccaaatgttatttactaactagcctagattgagaataaatataaatacaccaaccagagtaacatccaaatagataatcaagaagaaattactaaaatctttcaagaytgccattaattaccaatgcagtgttcatattagaataggcatgcaccacagaaaatacttttttcttaatccataatttgtattaatgcatcattccttggaaagtagtagtcttcactaaatgggcgagtttcgaagctgatcagaaatataccgctgtatcatcttccctaatacccatacccactgttctataagatgct

SEQ ID NO: 787018 - DNA, 627 bp, Homo sapiens
gtcattcaggaggaggacactgctgtgctgcccggtcccgccggaccattccagttcaaagagtacctgctgcagttggtggaagtgcaaagccttttctgtttgataagaaactggccaagatacccggcttatggggagcactggatgaccacagccacctgtggacttggcaatccactggttcctgcacccgggtaagtttccgggcagagctgcatttattgacggctatgaagaccsgtcagtgaaagtgaaactgcatcttggcatcttggcattggccactgagctctccacttatgcactgtgtatgtctctcccatgcctaaggacattctgggggtggatgttttgcacggcttggcagctgtgccgtcacagacttcatggacccctggacaatggaaccgggacagtccactgagagccagaaagagtttgccttcgtgggaagatgacaacgggctttctcagtgttgctgcagggcttgcatagccccatcatatatcatggttttgttgatgatattatattaacctctgatttgcttgcaggtttagaagaggcagcacccctcttgcctgggattgggataatgcagctgagacggccttcctggtagc

SEQ ID NO: 787019 - DNA, 627 bp, Homo sapiens
gtcattcaggaggaggacactgctgtgctgcccggtcccgccggaccattccagttcaaagagtacctgctgcagttggtggaagtgcaaagccttttctgtttgataagaaactggccaagatacccggcttatggggagcactggatgaccacagccacctgtggacttggcaatccactggttcctgcacccgggtaagtttccgggcagagctgcatttattgacggctatgaagaccgrtcagtgaaagtgaaactgcatcttggcatcttggcattggccactgagctctccacttatgcactgtgtatgtctctcccatgcctaaggacattctgggggtggatgttttgcacggcttggcagctgtgccgtcacagacttcatggacccctggacaatggaaccgggacagtccactgagagccagaaagagtttgccttcgtgggaagatgacaacgggctttctcagtgttgctgcagggcttgcatagccccatcatatatcatggttttgttgatgatattatattaacctctgatttgcttgcaggtttagaagaggcagcacccctcttgcctgggattgggataatgcagctgagacggccttcctggtagc

SEQ ID NO: 787020 - DNA, 630 bp, Homo sapiens
ctactcactacaatgtatacacatacatatgcagatgtcagggttcccaagcccaccctcaggtttgatgatttactagaaggactcacagaactctgaaaaactgttatgtatactgatggttatggtttattacagcaaaaggataaagatcagaattagcaaagaagccaggtgcagtggctcacacctgtaattccagcactttgggaggctgagacgggagaaatgcttgaagccgggagttcaagaccagcctgggcaacaaaacaagactttgtctctaccaaaaaaaaaaaaaagttttaaatcaggcatggtggcacctgtagtcccggttacttgggaggctgtggcaggagaatagcctgagcccaggagttcaaggctgcagtgggctgtgactgtgccactgcactccaccctgkgcaacggagtgagacactatttctttaaaaataaattaattaattaaaagtaaaataaaatcagcaaaggtaaaagactcctagggtggagtcgaagaggaactaggaacaagtctctagttgtctctctgagcagagttgcatggacagcacttaactctcccatcagtgatgtgaggcaacacaagagaagcattgccaa

SEQ ID NO: 787021 - DNA, 654 bp, Homo sapiens
cgctggcaagcatgagtcatatggccacacctagaggcaaacaagagtggggacctagacattatttttatctatcgtggaattttctgggaggcactgagaacaaagagcagatgtatttgagtgtggaacactcgccaaaacyaagacaattattggaacactgtcagccattccagctgctgtggagtgaaatggcgtagaatggtgatggctggagctgacagtggttgggcagcggggtagaagagtgaaggtgtggcttgaagcaccgcactatgaccctaggaaggcaagtacatctctaatagaaatgacagcctgggacaccacgcattcagaagtagatacaggagtcatttgcccttgctggtctatttttggctctcgtggaggtccaaatgtttctgtataattctggatattgttcaaggtgcaggaaccctgcaagacttggtcctatgctgcccgagctgaaggcaaccagagtatcgctatggcatttccctaaatgctagctgtacgaaagcgcatgttctgcagcaagactttctaagtttaaatcccagttctgccacttcccgtgtgaccttaggcaacttacttcatctctctgtgcctcagttttgtcatctgtaaaataaggatatctac

SEQ ID NO: 787022 - DNA, 501 bp, Homo sapiens
tttttcctgagcagaatctaggttaagaagctttgcaggctagtctgtatagactgatattaacttttccattaagtagggcagactgaattactgtttcagaatttgatgatggatgaagaagcaatgcaaaagtgacaccatcctayatttgtagtggtgacattatcaatccatttcctttgtgttgttaaagtaatgggcatcctaaagagacaagaaatattttttttcttttatgtatgtatgtatgttttttttcttaagcatgttggctgtgaagagaatccgaaggaagctgtcatcaaaactgagttctaagctcagaaaagtgaccaccgtgaacatccccagaaaagtggtctagtacagaaaacaaagaccatgtcaactctatgaagtttcagcttctgaacaacagacagaaaggcaccgtttcacttgggaataaaatatgattccattgtcttaggaattaccaagcggcagcatgttctatta

SEQ ID NO: 787023 - DNA, 599 bp, Homo sapiens
taatttttactaattttgttgttcaatgaattattttcatgttagcaggatctacatgtatcatttttccatatttatcctaaacattttaaaaatgctgttttcccagaccaaaagaaatataacaattagatttttgaagtcagttgaaatccaaaggccaatttctatgcccaaagttctcagcaaacattatcaaaatcttaggtcaagagatcgatcaggttgataagtgcatttgccttgcatattgttttttatctttacccagatgcttaacatatattccaaagccccactggtatttaaaatatgcactcaggtaaatggtgatgggagtggaggaggaaaacaaacatttatcaatattagaatcatcaaacttgccaacagccaaaaaccattagyaaattctacaagctagaaaattataacaattaggctttaacagtttttagtacactggttgtagcaaaagtatgtaataggagcactgcagtaagagaattgcaaatagcgaggatctcttgaaagataattgaagtagtgttggtttttctactagagaaacttcttcagagagtttaatgaatttgtga

SEQ ID NO: 787024 - DNA, 517 bp, Homo sapiens
agcaggggtgagaacagaattggctgggcaaagtggcacatacctgtaatgccagtgctgtgggaggctgaggcaggaagattatttgaatccaggggtttcaagccagcctgggcaacacagtgagatcttgtctctacaaaatataaagaaaattagccaggcatagtggcacacacctatagtatgagctactcagaaggctaaggcaggaggattgcttaagcccaggagttcaaggttagagtgagctatgattgtgccactgtactctagcctggatgaaaaagtgagaccctatytcttaaaaaaaacaaaaacagaaggattaagtgacatttagaaagtaggagagattggatttggagactgagtctctacatgtgtggcagagggaacagttagcctccagcacgtctggccagaatatttgggtagatagtgataatgataagtatgaattatgtaggaggagggatggagaagattattaattcgattggacagataaaaaatt

SEQ ID NO: 787025 - DNA, 517 bp, Homo sapiens
agcaggggtgagaacagaattggctgggcaaagtggcacatacctgtaatgccagtgctgtgggaggctgaggcaggaagattatttgaatccaggggtttcaagccagcctgggcaacacagtgagatcttgtctctacaaaatataaagaaaattagccaggcatagtggcacacacctatagtatgagctactcagaaggctaaggcaggaggattgcttaagcccaggagttcaaggttagagtgagctatgattgtgccactgtactctagcctggatgaaaaagtgagaccctatctyttaaaaaaaacaaaaacagaaggattaagtgacatttagaaagtaggagagattggatttggagactgagtctctacatgtgtggcagagggaacagttagcctccagcacgtctggccagaatatttgggtagatagtgataatgataagtatgaattatgtaggaggagggatggagaagattattaattcgattggacagataaaaaatt

SEQ ID NO: 787026 - DNA, 613 bp, Homo sapiens
taagttcagcctaaaagtttctccatatatagtgaatcttaacctaactggatgtccaagcagacttgtaaaccacagcagatcagttttagtcaatcacaggcagccaactgtttaaatcctgttcaaaaaggcaaaagcaaagctgtaaccaatccccctgtttctgtacctcacttctcttttctgtatggcactttcctttttctgcccataaatgttatctgacmatgtggtagccccaggagttcctctaaacctattcttgttagggcagtgttgatcaagtggggaggggtgctgcctgattcaagattgttctttgctcaataaaactctgttagactgggctcagtcgctcatgcctgtaatcctagcactgtgggaggcccaagtgggtggatcacctgaggtcaggagtttgagaccagcctggccaacatggtgaaacccagtctccactaaaaatacaaaaactagccgggcgtggtggcgcatgcttgtagtcccagctatccagaggctgagcaagactccacccccgttcccccccaaaaaactctgttaaatttaatttgtccaaagtttttcttttaacaatagtaaatttagt

SEQ ID NO: 787027 - DNA, 549 bp, Homo sapiens
cttcccaagacccttctgcagcttcttccttgggagaggcccatgcccttcgttaagtccccagcatgcagcagtcgctgcaaagcccatccattcaggtatttggtcgttcattcgtccagtgactattcatggaggtgctaccctgaccrcatcaccctgggtgcaggggacagagcaggaatgacgggagacctcgtccttgctctccaggaatgtatgcacagtggagagagaaagtcagcagtcacagaggtaataatgcattgaccacagtcctctcagcgtaaccatggaggaggtgctgcagatatctagaagaaacacgcacaccgaggtctacagggggagctgaagttggctagggaaagaagtgtggaagagcacttatttaataaacccagcagccactgttttaatgctttacaaatactaactcatttaaccctcctaataactctatgatgaagtactattagaaacctcattttacatttgaggggtgaaatgacccatccacaatcaccctgctaggcacagtcttagcca

SEQ ID NO: 787028 - DNA, 649 bp, Homo sapiens
cccgggcctctggttgcatcctggggggcacttctgcactcccagcctcctgggtatggattggggtgaagatgttgtgcagtgaggggtgggagccccacaccctaatagagccaagctggccacactgcctgtctttcccaattagttccccaaagggaacaaagccttatttcttccctcccttagttcccaggcactggttggggaaaaacaatccttggcagctcaggggttaaaaataaaacacagcgagggggaaaacaagccgggcagctgcagcggctcctcagagcccactccaggctaaatagaggccccagcaactccttggagacttgaaccctgggcgatggaattttcccttgcatgaaggctattgtcctctggaaagggccagggccagaggagggcctggggagcactgatytccccagcccacagccagggagctcctgagagcccaagggctcggtcccacccagctgggtttgggtgaaaaggcaacggggggtgcagcccacccctccccctttgggaaaaagggagggcttgggcttccaaaggcctgggtaccagttgttgccccactcctcagcccaaccagctagtcacggatggaataaaaggcttggttcccttggcaact

SEQ ID NO: 787029 - DNA, 421 bp, Homo sapiens
agaaaatatgcagagaggctgggtgcagtggctcacgcctgtaatcccagcactttgggaggctaaggcaggcggatcacaaggtcaggagttcgagatcagcgtgaccaacatggtgaaacgctgtctctactaaaaatacaaaaaaaaaaaaaaaaaagaaaaattagccgggtgtggtggtgcacgcctgkaatcccagctactcaggaggcgaaggcaggagaatcacttgaacctgggaggcggaggttgcagtgagctgagattgtgccactgcactgcagcatgggcgacagactgagactctgtctcaaaaaaaaaaaaaagaaaatacgcagaggatggcaacccagggaagagaaagtcacgtgagctcacctctgtgctctcgagtgcatataaattcatgtaagtttca

SEQ ID NO: 787030 - DNA, 638 bp, Homo sapiens
cgagattccatcccccccccccccccacaaaaaaaaaagatacagggatccttgggcccagcccagtcccaggtagaagaggctctgcttgattaactcttcttttggggttggataccaggctctacagaagagcaatatgaaratgtctctgtccttgctgaaattcagacaagcagcgtctcctctaatcctggtgggaacgatggggaaaggggagtggatggagagtcccactagaggactaagtggctgtggaaaccaacatgccagaatgtgctggcttatgcatctgacaacttgcagggacatttctgcatgctgtgaggaccagtgattattcccagccagtcatttttcttaatgacttggactcatcaaactcatggccattttgaagccaataaagtaagtgggagatttgaggttcaaaaagaccttaataggcagtcatgatgggagtaatcttacaaggctacatttcatagtaataaacataaaaccctgaaactgggtctaaaaaaccgaaacctgtctccaaggtgggaagatatggtgggaccacatggaaaagaggccgagaagactctaaatgtgattcagcagtgtggtgatgcagctgaaaagagttacttcaa

SEQ ID NO: 787031 - DNA, 533 bp, Homo sapiens
acagcccttggccagtggtcattttgagggtgcagggggaatgctagaagaggctggtaattgtggggtgtattaaagactcttggccgctgggcaaaccccacctgtgggaggctctgagggtcagccctggtactgatgaggcaggtggcacttcttgatgggcatagtggcagagaaatcctagaaattrcaaccacacccctccctgtctggagtggtggggtggggtgggagcatcctgggccctgctccccagctgtccaaggcaaatcgactggagtccatctggctgtccccaccggtccaggcatgcttcccatcctggggcgtcagtcctcagtgggtgcggctgaggggccggtggatcagtgctctgcctgggcacacccggagctgagcggcatcctggggtgagggggctcaagagctccaggtagacacccactggactgccttatcttttctaggctctgtgctgatggtggccacctgcttctctggcaagtgtggttgagggctgtttccatagg

SEQ ID NO: 787032 - DNA, 619 bp, Homo sapiens
aatatggtatgtaacatgcaatggaatattgttacgctgtaataagggaatgaatttttgagatatgctacatcagtgcatcttgaaaatattatcctaagtaaaataagccagacaccaggcagatattgtgtgattccatttatacgaaatatctagaattttgacatagagacaaaaagtagattagaggtaactgggggatataggaaggaagggatggaaatttatttcttaatggttagagttacagtttgtgataatgaaaaacttttggaaagagatagtgagagtatatgtacaacatttgaatttaattaataccactgaattgtacacctaaagatggktaaaaggaccagttttgtatgtagcacaatttttattttttatttatttattgagacagagtatcactctgttgcccaggctggagtgcagtggcatgatctctggtcactgtaacctgtgcctcgcaaattcaagtgattctccaccctcagcctcccaagtagctgggactacaggcgtgcaccactaaaaaataacaaaatttttttagtagagatggagttctcactgtgtagaccaggctggtctcaaactcctgacttcaggt

SEQ ID NO: 787033 - DNA, 662 bp, Homo sapiens
cttcagccaggcttagcgctggcaaagaaaatgagcttctttataccatgaccctgagtagtagagacaaagccatttcctccagtcccataagaagtggcacaagaggcagctccaagaaaatgggcattttaaaagcatgtgtgtttgtgtgtttcagttgcttgagaaataacttccaggtccttctcaggcatgctacaaagctaatgccatgggtgattcagcctgaggacggcagtgctgttgcccttccataagctcctagagccatgacaatgtcctcccccagaggtgctgcagtgaagcccacatttggaaggcaagacacactcctatgtcacacaagctttcagtcatgacacagcctacctcacagctgargtgcctccaaccctgtattcactggagtcgttcaggtgtgtgttctgtgaaactgatcagcctgtttaatttggaacttgcctatgattgccccatcagcctatgttattctgggcttccaactgtacatttcagatccagttttcacatgcctgagaaactgtgttatgagacaactaagatatttaagaacttttataagcattttcactgaactcgcaagtttgcttagagcagtggttgtcaaggtaggatcccttggcctaggtgtgccagca

SEQ ID NO: 787034 - DNA, 486 bp, Homo sapiens
cgccttggatgaaaggagagttggtcacaagaccatatttagctcacaaaaaattcactccaactcagaactcagcagcaccaacaacccaaagccaagatgtagctgccccgaagagaaaacttcccctttactaaaatcatacttggaagtctgtgtgatacaccaactctcccaactcaattccgatcaagtcaaaattcttggtcttagaattggggggcaaatgaaacgtgaggattaggaccaagccacacgtgcctaagcattccctccaatttctctcacaggccctaaagtggtggragaagagagggagggccaggtggcctgaagccattccaaacggctcaggggggtcagtgtgatcttactccattactccatctctctgctgcaaaaccagatggagctggtcacgacaggatgtggagacaagatattccaaatggaggaaaccaaaagagtgaacaccctgagccagga

SEQ ID NO: 787035 - DNA, 601 bp, Homo sapiens
ctgaaccagccgcctctctcctctccacaatccacccctaagagaggcacaggggccccgtcgggggtcgatgctgggggtgggcgatggagctccttcaaaagctgcctcttcttctcctcccccatcgtggaaccgcgwcttcctcctccacctcttttcttagcctgtgcctgttcttcctttacaacccactgtctatgtgagccccacctggaccatgccagcccagaggttcagaaattctgtgcagaaataaggagggcacgcggatagcagttctggaggatgtctgataatccaaggtcatccaaagatttctgttggaaagtagggggtctgaagtgaaaagaccaaaatgaactcatcctggatgtggggaaggtgatgacagcgtctgtgccagacacttcaagtctacgaattccttcatcaccaccattttacagatgaggagggaggctaggagctgaacagccagcatgagaaccgggagctgtctgattccaaagcccacgtctcctctccctgccacccagccataaggaaggatttttttccaacacttaatctctctctgcccaataatgaaaggcagctg

SEQ ID NO: 787036 - DNA, 555 bp, Homo sapiens
atgcctgtactgtcttctttatttttttttatattatttaaattttatgtaatgagaatgtctcacacattcaaaaaaataaaaaaaaaaccagaaatctattttcattgtgggagaaacatggaaaaataataggcttcctggtgacttttttttaaatcyccaaatagattaaaaaaaaaaaagtagggccaggcctggtggctcacacctgtaatcttggcactttgggaggctgaggcgggtagatcaacagaggtcagagttcgagaccagcctgaccaacatagcgaaaccccatctctactaaggatacaaaattagtcaggtgtggtggcacaggcctgtaatcccagctacttaggaggctgaggcaggagaatcgcttgaatctggcagaggctgcagtgagctaagatcacgccattgcactccagcctgggcaacgagagtgaaactctatctaaaaaaaaaaaaaaaaaaaaaaaaaaacccaaatcccttaatctctaggctcactagcaggaacaaattgcacatttgtaggactctatg

SEQ ID NO: 787037 - DNA, 555 bp, Homo sapiens
atgcctgtactgtcttctttatttttttttatattatttaaattttatgtaatgagaatgtctcacacattcaaaaaaataaaaaaaaaaccagaaatctattttcattgtgggagaaacatggaaaaataataggcttcctggtgacttttttttaaatctccaaatagattaaaaaaaaaaaagtagggccaggcctggtggctcacacctgtaatcttggcactttgggaggctgaggygggtagatcaacagaggtcagagttcgagaccagcctgaccaacatagcgaaaccccatctctactaaggatacaaaattagtcaggtgtggtggcacaggcctgtaatcccagctacttaggaggctgaggcaggagaatcgcttgaatctggcagaggctgcagtgagctaagatcacgccattgcactccagcctgggcaacgagagtgaaactctatctaaaaaaaaaaaaaaaaaaaaaaaaaaacccaaatcccttaatctctaggctcactagcaggaacaaattgcacatttgtaggactctatg

SEQ ID NO: 787038 - DNA, 555 bp, Homo sapiens
atgcctgtactgtcttctttatttttttttatattatttaaattttatgtaatgagaatgtctcacacattcaaaaaaataaaaaaaaaaccagaaatctattttcattgtgggagaaacatggaaaaataataggcttcctggtgacttttttttaaatctccaaatagattaaaaaaaaaaaagtagggccaggcctggtggctcacacctgtaatcttggcactttgggaggctgaggcgggtagatcamcagaggtcagagttcgagaccagcctgaccaacatagcgaaaccccatctctactaaggatacaaaattagtcaggtgtggtggcacaggcctgtaatcccagctacttaggaggctgaggcaggagaatcgcttgaatctggcagaggctgcagtgagctaagatcacgccattgcactccagcctgggcaacgagagtgaaactctatctaaaaaaaaaaaaaaaaaaaaaaaaaaacccaaatcccttaatctctaggctcactagcaggaacaaattgcacatttgtaggactctatg

SEQ ID NO: 787039 - DNA, 634 bp, Homo sapiens
aggcctggtggctcacacctgtaatcttggcactttgggaggctgaggcgggtagatcaacagaggtcagagttcgagaccagcctgaccaacatagcgaaaccccatctctactaaggatacaaaattagtcaggtgtggtggcacaggcctgtaatcccagctacttaggaggctgaggcaggagaatcgcttgaatctggcagaggctgcagtgagctaagatcacgccattgcactccagcctgggcaacgagagtgaaactctatctaaaaaaaaaaaaaaaaaaaaaaaaaaacccaaatcccttaatctctaggctcactagcaggaacaaattgcacatttgtaggactctatgcccaaatgcattttaaatcattcaattcgaaaaccgtttctttcactataactctccaagagccaatgttttagaaacaatgttagccatccgggcactattgtgacactgaagatgtagacaagcagyaaactcacagccaaggagcctcaaatcccaatccacacagtaaagtaactctctcagcaagtcaatggcactcgttgaacctccactgctttgactgtaatgagatcatctctgcaccccccacagctttccagtaaaagggg

SEQ ID NO: 787040 - DNA, 539 bp, Homo sapiens
cttactgctcctctccagcgcctcagccagctcccagcctgggacccagaaaggcccagagcccgcgctcatgccagcacacgatatcttcggtactaatccccggatttcattaatctctatcacaggtccaaagaggaggggtcgctgaggctgggctaatctccctcccgagtttgacttccaactttccatgaaggccttagccctattgcatcccatgggaccaagtaaaaaccttaggctcccagaagatcaaggggatgtttatctggcatctagggatcaacttctggaagaaaaaaatacagcaatatatctaaatccatttcttcaggaaattaatgaatggaagggctgctcttagcagagtckccagaactgaatatgcagagggcttaagggttccttttctaagtaagagctgtctcactgcttcctttttttattttttttttttttttattttttatttttgtgagacagggtcttgctttgccacccaggccggagtgcagtggcacaatcatggctcactg

SEQ ID NO: 787041 - DNA, 657 bp, Homo sapiens
acacacacaaggttcacaatatacaggtctttgtttcttttctttctttttttttagatggagtttcactcttgttgcccaggctagagtgcaatggtgcaatctcagcttactgcaacctctgcctcctgggttcaagggattctcctgcctcagcctctcaagtagctgggatgacaggtgtgtactaccatgccyggctaattttgtatttttagtacagacagggtttcgccatgttggtcaggctggcctcaaactcttgacctcaagtgatccacttgccttggcatctcaaagtgctgggattacagccatgagccaccgtgcccggccaggtctttgtaagaagtacaagtttcatactaagtacaatgagaatccgctgaagaggctttaatcaggatcagcctacttttaaaagatcactatatgatttaaggaaagaaaatggattagagatttttgctaccattatggaaggccaggtgattagtaacagccctcctgctgaaaacaccttaaaaggctagattgaatattttttaaagtctaaagagaatcattgacttaaaagatgataagggatccctggtcttaaatctaggagaagataagaactcagatagggaagcccaacatgccaagccacttttt

SEQ ID NO: 787042 - DNA, 657 bp, Homo sapiens
acacacacaaggttcacaatatacaggtctttgtttcttttctttctttttttttagatggagtttcactcttgttgcccaggctagagtgcaatggtgcaatctcagcttactgcaacctctgcctcctgggttcaagggattctcctgcctcagcctctcaagtagctgggatgacaggtgtgtactaccatgcccggctaattttgtatttttagtacagacagggtttcrccatgttggtcaggctggcctcaaactcttgacctcaagtgatccacttgccttggcatctcaaagtgctgggattacagccatgagccaccgtgcccggccaggtctttgtaagaagtacaagtttcatactaagtacaatgagaatccgctgaagaggctttaatcaggatcagcctacttttaaaagatcactatatgatttaaggaaagaaaatggattagagatttttgctaccattatggaaggccaggtgattagtaacagccctcctgctgaaaacaccttaaaaggctagattgaatattttttaaagtctaaagagaatcattgacttaaaagatgataagggatccctggtcttaaatctaggagaagataagaactcagatagggaagcccaacatgccaagccacttttt

SEQ ID NO: 787043 - DNA, 657 bp, Homo sapiens
acacacacaaggttcacaatatacaggtctttgtttcttttctttctttttttttagatggagtttcactcttgttgcccaggctagagtgcaatggtgcaatctcagcttactgcaacctctgcctcctgggttcaagggattctcctgcctcagcctctcaagtagctgggatgacaggtgtgtactaccatgcccggctaattttgtatttttagtacagacagggtttcgccatgttggtcaggctggcctcaaactcttgacctcaagtgatccacttgccttggcatctcaaagtgctgggattacagccatgagccaccgtgcccggccaggtctttgtaagaagtacaagtttcatactaagtacartgagaatccgctgaagaggctttaatcaggatcagcctacttttaaaagatcactatatgatttaaggaaagaaaatggattagagatttttgctaccattatggaaggccaggtgattagtaacagccctcctgctgaaaacaccttaaaaggctagattgaatattttttaaagtctaaagagaatcattgacttaaaagatgataagggatccctggtcttaaatctaggagaagataagaactcagatagggaagcccaacatgccaagccacttttt

SEQ ID NO: 787044 - DNA, 625 bp, Homo sapiens
attatgcaattgaatgattgtttgataatggagagaaagagaaaaacgaaggcaacacgaaaagctcaaattctctgagaactgataatgctgattcctagctcacggactcctaaaatttcttttttattttgagatggagtctcgctcttgtcacccaggctggagtgcagtggcacgatctcagctcactgcagcctctgcctcctgggttcaagcgattcttctgcctagtctcctgagtagctgggattacaggcacgcaccaccatgcccggctaatttttgtacgtttaatagagacggggtttcgccatgttggccaggctggtctcgaactcctgacctcaggggatccacccgcctcggcctcccaaagtgctgggattagaggcrtaagccagcgtgcccacccagccagattcctaaaatttctaacttgaaagtaagtttctattaagcaagctgttcatacttgacttctaaaaaacaataacaaggaaattctcagcattgagctgaaaggaaactcagagattttctttctagaagaaaacaacacataacactataaacataaaaatatattcctattttgtgaattgtataaattgtccattctgat

SEQ ID NO: 787045 - DNA, 583 bp, Homo sapiens
ccgatttgttttcttttatattaaaatcgttcatctgtggagatttttttctgaaaataaacacagttcagggtagtgttcatggggctgattacagcttgtcagttcttgtctgcctccttttatccctggaagtcactgccaacttctgcaccaacctctctcccacagacttttcaaaccgacaagatcatcccgtcctgcctggttwgtgggagaaaacagcaagagtaggagtggaagcaagagagtcatatatatgcctctttggattttgagtggggacgagttgtattattacgtaggttgaggagaacaccaaaggtagagaggtatttgcaacgtcctatgttgaaattctggaagaagctccacagggcagcttcatgccaacatagggtggccccagctttgttaagaggatagaatagtgtggtcaggcagagacaggatataatttttaaactgagttaaacctaaagtgcttgttcattattgattcaaacaaagtttgaaacacactggattaatgatttttttcattatacagagatggaagggttcatgagaaaaatgagaactt

SEQ ID NO: 787046 - DNA, 477 bp, Homo sapiens
gcatcttctttatatccaagatgatataaaatatgatgtattatttatctcttcttaaaataattggacacttttttcataaaagacattatctgtgattatttatccaataattaattcagtttagaaatttaattaaacattaggartttttagtgtcattttgaaagaccctattatgaaattatgaaaacagtaaggtcaggaaatgttttctgttattgaccttatgttatttgtttatttaatttagaactctttacaaataacttactggggtcaaaactgctctgacactggtatcagaaacacttttgagaaaagtgaatttactttgtatttcaagttcaaagggatttagatttggtagattttggaaacttctcgccctgcatctgctaaaaaccaagcaacttcctttctgaatttttaatctcataatgcccctgtagtcattaaagaaccaatgcatgatag

SEQ ID NO: 787047 - DNA, 635 bp, Homo sapiens
attatatagtcatgtaatttcttaaaatattatatctattttgagcaaaatatctgaaagttttctttaagaattcctttttgtttctattataaattatttaggaaaaggttatatttttatgacaggttttttccccccatattataactttaacatgttttctttgatataaaaatataaatcaagtaccattatatttatatgtcattaagrtactgttcttgagcctatatcatgtatagcgtattgtgcattattttttctggcaaccataatctagaaatgggctatagaatgaaattcattaatgctatgttatactagaaggcacagaacataaagtaaataaatcttttgtaatatcataccaaccttataaattgctttaagggaataacaatctataggggtggtagatgattttctaatcagatattacacaatatacatcaaatattctcattctgtagtatttaaaataagcagttgtctacaacatacaatcaccagtcacaataaactattcatgcttttgtagacccccaatttgataactgcataaaacaaccaaatattttagaagaagaaatattataaggaatgtatatccaagcttctgtggttcgaccagg

SEQ ID NO: 787048 - DNA, 614 bp, Homo sapiens
tgtagtttggctaatagtattgtgggaatgtttttgttgttgttgttttgcttttttgagacagggtctcactctatcatccaggctggagtgcagtggctcactgcaatctccacctcccaggctcagaggatcctcccacctcagactcccgagtagctgggactgcatgcgtgcaccaccacaccagggtgtcaatgataatgtcttcattttgacaaatggatcatggttatgtaagtagttaacgttaggggaagctgggtgaagggtatgagaacctttctgtactacctttataactcttttgtaaatctaaaattatttccagaaaaaagattttggttttgtttatgaagcctagaggtaatttaaatgcatgatccttcacttgctttccttttgggaaggtggaccatcattaggggtgcggtacacatttggtcagtctggccagctctggcttcttcyagggaaaaagctacaccacatcccccaaattctgcagaatgccataccacctgtcccattttctgacattagcccagctgcctgtcagagtgtgacaatgcccaggaatggggatggtgggcctgcagagccagggaggaaaa

SEQ ID NO: 787049 - DNA, 599 bp, Homo sapiens
ccgcgtaggcacccactcagctgagggccttaaatgccacctgcaataaaataaaaaccttacagttgccaaccatttcatctggttttgccctgagaatctgcaaatcctcttccattggtcagaagtttcacagctgaagagataggtaatattcttgatgaagtcagttcaagatcaagacaatggaaatttcttgcaacgactttcatcttctgtgtctattggtcgcataacttaagcgtgttggtatctctgttagtggtgaagtcggctgcaaaccacaaaacacctgactgctacggaagatattaacagggacttttttccttctgcataacaggaagtcttgagtaggtagtcgaggttgggtagaggacacttctgtttcaattcyacatccctagggctttggaatatgaatgattcatgttgccttgtggtggctaaatggctaccgtcccctgtccctggaggcctcacaattcttttccaggtagggagaagggggagaagggtggagcacactaaatggcaaacaaatgtaccagctgagtctgtgtgttcatctggaatgcaaagcttttctggaagcctct

SEQ ID NO: 787050 - DNA, 527 bp, Homo sapiens
gtatgtctggattcaggtttggctggatccagggaataaaagggtgccatctacttcgtctcacagtctcttttgctttcacctgcctgctccatcctcaggcaggttcctctcaggcaaaggtaaaacagtcaccagcagctccaggcctatgtcttgccaacttagcaccttttctcaagggtttcagcaaaagtctcagcactgactctcactggactatattatgcacccatcactgaacccattactcactggagcagacacagattctgtggattggccagacttgrgtctggtttctgctcctgaagtggtgaggtatcacctacacctaagagttgaggaggcatggctctccaaagcatgttgtcaggagctattactagagaacaaaagtatgctgggaaggaaaaaacccacagtggtcctcccagattcatctgcatcagtggtgatcaaagtgtgttccctgaatctaaggggaagcatcaacatcacacgggagcttttagaaatgcgattca

SEQ ID NO: 787051 - DNA, 593 bp, Homo sapiens
tagagatgcctcagggcaaccagagtaattgcagcgtgcagaaatgaaagtccttttaaacttctgttgacagcctacaatgtgcttgggagttgctggaaataaaaaaactgaatcaaacatagccctgcctcttaggagtttaaaatttggagggagagacaggtatgtatgccactaaccgagctatcctttagtttgcaaatggcactaaaacagcggttcaaatcaagtgctgtgggaacacagaaaattaaatatggttgaattaaatctgataggaaggataaggaaagacttgataatggaagtgatatttaaactgggccttgagaaatgagtaggaacatcaggtggaatgctaggggagggtagaaaggacagcacatgcagaagagtgagagaatgagatggtacgatgtgtctgccacccagtgagaagccgagtgyaactggagtggagggagcactaggtaagtcgtagaggtaaagccagaagacacactgcccctggatggggaagggctctgactcttaatttaaagaatgtgggccacaatccagtaagagactggatggtgtcattagtatca

SEQ ID NO: 787052 - DNA, 612 bp, Homo sapiens
cacagccccaagtacaatctttggcatatagttgagctcaataaatatattttgaaaaaattaatcaaaatgataaaataagtatggactatgactaactgatgatgcttatgacgtaggtgggaatacaggctcctatattaaaaaagttattgtggctaatactatcttattttggattttaactggttaatttgcttaatagactagcccacttggttgaaggattcaaattctaaatatacgaaaggttatttccatttcaaaaagtgatgcagaaagacaaatagcatgttctctcactcatatgtggattctaaagatgaccgcatagaaatagagagtagaatagtggttaccagaggctggtaacratagaagggaagggaggatgaatacagttacataggaggaataagtcctggtgttccattgcacagtgaagtgcctatagtagctagaagagaggatgttgaatgttctcagcatgaagaaatgataagtgtttgaggtgatggaatgcttaccctgatttcatcattacacaaggtatacatgtatcgaaatatcaccttgtacttcatatatatgtacagttatgtctcaattaaa

SEQ ID NO: 787053 - DNA, 486 bp, Homo sapiens
tacaatgcactgcgctgggctctgccttaattctcatgggcccctccatcctgccccgaccccgggcagcaagtcctactatcttccagttttacaaacgagcaattgaggctttcagactttgccaagattatattccaaatgaggggattcaaacccaggctgwcagcctccgcagtgcaggctttcttcaccagcatcatcacacatggtgataactcccaaggttcacagcttgtctgttcactatgcatcgtgctgaggggcttccatgcacttcctccattcccgctcacaacagtatctcaggttacaggtatgggcctgtggaggcacggcccctcctcacaacgacaagcaagtggcaatggccaatggaagcccagcaacttgtttcagtccacccccaaagtagcacttcttttccactggaatgggccccgaggaggaggaaaaggaggcacaagatgagcaggcttaggccta

SEQ ID NO: 787054 - DNA, 486 bp, Homo sapiens
tacaatgcactgcgctgggctctgccttaattctcatgggcccctccatcctgccccgaccccgggcagcaagtcctactatcttccagttttacaaacgagcaattgaggctttcagactttgccaagattatattccaaatgaggggattcaaacccaggctgtcagcctcckcagtgcaggctttcttcaccagcatcatcacacatggtgataactcccaaggttcacagcttgtctgttcactatgcatcgtgctgaggggcttccatgcacttcctccattcccgctcacaacagtatctcaggttacaggtatgggcctgtggaggcacggcccctcctcacaacgacaagcaagtggcaatggccaatggaagcccagcaacttgtttcagtccacccccaaagtagcacttcttttccactggaatgggccccgaggaggaggaaaaggaggcacaagatgagcaggcttaggccta

SEQ ID NO: 787055 - DNA, 627 bp, Homo sapiens
ccttactctgactggtggagcacagtgacaatttgcatcttgtggaattagtgtgactgtagagccagtgtccagtagtcaccaaaaagtctgtttacttattttttccaatacacaatcaccctagtaagagggttatttggttggtcagctgaaacatagaccaataagttggtaaattactagagccctttctaagcccttgggctacaacattgagtatagaatctctattatgggctaatattaataaattcaacctgaaccaattttatattcctgctgcaattttataaatttaattgaatttataatttataaatttatattaatatgtaaaattatatataatttaaaattaatataatttaaccatttatataatacatagatgtatcacttagtttataatttaaaaattataattttgcagatttaatttacaatattatatttctacacctttaatatctatttytatacaatttcttgaaatttctgtgtattcattgaaaaaaatcttgcagttgttttgaagtgtagtgcttctcctagtgctccacactttggacctcactctttaggacctgttagaacttgaacatacttctaattccagaagagaca

SEQ ID NO: 787056 - DNA, 624 bp, Homo sapiens
tcaataaatgagtggataaagaaattttggcatgtatgtatgatggagtaatactcaagtcataaaaaagaatggattaatggcatttacaacaacctgcatggaactggagattattattctaagtaaagtaactcagaaatggaaaaccaaacattgtatgttctcacttataagtggaagctaacctgtggggatacaaagtcataagaatgatacaatggactttagggacttgagggaaagggtgggaggagggtgaggcatcatatactacaaattgtgttgtgtatactgctcaggtgataggtgcagcaaaatctcacaaatcaccaccaaagaatttactcatgtagtcaaacaccatctgctttccaaagacctataaaaagtatatatatatatgtgtgtgtgtgtgtgtgtgtgtgtgtgtgtgtgtgtgtgtgtgtrtagtaaaacaaaaacaaaacactaaaaaagtcttatgtaatataccgagttcagaaaaaaaaagacctgattaaggaataaaggactatttaagccactaaaaaaaagaaaagaaagaaagcgatgggtagaaagtttattgaaagggataataacagagaactttccaaactt

SEQ ID NO: 787057 - DNA, 552 bp, Homo sapiens
acaaacatagaagtttaaaaaacaaaaaaagatctattatatcaaattttctggaggtgagaagtccaggtaggtattggccagtttctctcctcagggtttcaaaaagctgaaatcaatgttccagtcaaagcttagtatcatcctcttcagatcagattaaggtgctcttccaagctcagagttttgtatttgtttaaatgcacagtaattaaaagtttttttttttttttaakcagcaaaagcagttaaagtaaataaaaatattttagcctaaaatatatttatttcacatattctgaagtggccctgccatgttgtttttcatgggggaaatttgcatctgtagatctgttgattcattaatgcagtcaatgcttcccttgtccagatctaggaaagattaaatgagaatctaacacctttataggtctgaaaagaaatatttaccacctattttctctgaaacctgctacctgtgaggtttcatctacataacaagattggttttgctagtcaagcctcttcctttctccttccaataacctgtct

SEQ ID NO: 787058 - DNA, 552 bp, Homo sapiens
acaaacatagaagtttaaaaaacaaaaaaagatctattatatcaaattttctggaggtgagaagtccaggtaggtattggccagtttctctcctcagggtttcaaaaagctgaaatcaatgttccagtcaaagcttagtatcatcctcttcagatcagattaaggtgctcttccaagctcagagttttgtatttgtttaaatgcacagtaattaaaagtttttttttttttttaagcagcaaaagcagttaaagtaaayaaaaatattttagcctaaaatatatttatttcacatattctgaagtggccctgccatgttgtttttcatgggggaaatttgcatctgtagatctgttgattcattaatgcagtcaatgcttcccttgtccagatctaggaaagattaaatgagaatctaacacctttataggtctgaaaagaaatatttaccacctattttctctgaaacctgctacctgtgaggtttcatctacataacaagattggttttgctagtcaagcctcttcctttctccttccaataacctgtct

SEQ ID NO: 787059 - DNA, 592 bp, Homo sapiens; identical to SEQ ID NO: 730459

SEQ ID NO: 787060 - DNA, 592 bp, Homo sapiens; identical to SEQ ID NO: 730460

SEQ ID NO: 787061 - DNA, 585 bp, Homo sapiens; identical to SEQ ID NO: 730461

SEQ ID NO: 787062 - DNA, 585 bp, Homo sapiens; identical to SEQ ID NO: 730462

SEQ ID NO: 787063 - DNA, 589 bp, Homo sapiens; identical to SEQ ID NO: 730463

SEQ ID NO: 787064 - DNA, 613 bp, Homo sapiens
ggaatgctcaaagataaataaaataagataaaacttctgctttttgaaagacacttttaagagaatggtaagctgccagctgggggaagaatttgaaagtcatgtgcttgatacaagacttttaccccaaacatataaagaactctccaaacatagtaataagaaagcaaataatcaaatttttttwtaaaaatcaaagaatatatacagatgacaaataaacacataaaaagatgctcaaaaccaacagagaaatgcaaattaaaaccagagatactaatacctaataaaatggcttaaactaaaaagactgatcataccaagtgttgacaaggatgtagaagaactggtaatttcatacactgctggcgggatatcaaaaatacaggccctttgaaaaacagtttggcagttaaacatatacctaccatatgatccagtcattccattccaagagaaatgaaagcatatatccatgcaaaggcttaaacacaaatgtttatggcatttaatagcaacaggtgagtgaataaactgtgctatttccacatgatggaatactataaaaaggaatcaactatcaatatgtgctataacatgactttcaaaatta

SEQ ID NO: 787065 - DNA, 613 bp, Homo sapiens
ggaatgctcaaagataaataaaataagataaaacttctgctttttgaaagacacttttaagagaatggtaagctgccagctgggggaagaatttgaaagtcatgtgcttgatacaagacttttaccccaaacatataaagaactctccaaacatagtaataagaaagcaaataatcaaattttttttwaaaaatcaaagaatatatacagatgacaaataaacacataaaaagatgctcaaaaccaacagagaaatgcaaattaaaaccagagatactaatacctaataaaatggcttaaactaaaaagactgatcataccaagtgttgacaaggatgtagaagaactggtaatttcatacactgctggcgggatatcaaaaatacaggccctttgaaaaacagtttggcagttaaacatatacctaccatatgatccagtcattccattccaagagaaatgaaagcatatatccatgcaaaggcttaaacacaaatgtttatggcatttaatagcaacaggtgagtgaataaactgtgctatttccacatgatggaatactataaaaaggaatcaactatcaatatgtgctataacatgactttcaaaatta

SEQ ID NO: 787066 - DNA, 620 bp, Homo sapiens
gtattcaagtgcatatgttccaaagtgctgttctgttgatataataggaaaaaaaaccctattatcacaaaggaattgggctgtgtgtacagttaactccaaatcattattttaccctatatagcattatttttgagatttgacacaattttccagaggaaaaattttaaatgcaagaattagatcttaccctttaggacaacctgcttgctgtctcccagacagtgtatcttatttcacatgtgccctgtatawtatggaattgcctcccttggaaaaacaaccagaaagccccagaagcacgtggtagaggtagtcaggttcatctccaagtaacaaaggaagctgaaacctgggttaataaaacaagcccaatttagtctgctcttgtttggaaatttcaccttcaaaggtgttttctggcttgagttagatttaagtttctgggtataagtagtggaagttgtttagatatccagcatttagtagactcctttgtgtatttgaggaattccctaattaggtctttgtattagtctattttcatgaagctgataaagacaatttacaaaagaaagagaggtttaatcaacttacagttccacgtggctgaggtagcc

SEQ ID NO: 787067 - DNA, 633 bp, Homo sapiens
atatgaccagatgtccccagtgtcactcccagagttaggaagaacaccaatgtagagctacattttcattcgtgatggtaattcggggctgatttaaattaaattatactgaccagaaagctgcctaattgttaaaattactaaatccagtgactttcagaawtgctgattccatgcttctcatgtgcagaatgttgagggtattaaaaaataactttaatatagaactttacattaagaaaatcacaaacccttaaaattgtaggtttaggtctgaagtcaacacagacgagttaaacaatctatttgcttcctgttacagaattaaagtatatccacattctttgtccttttaactagcattctaataacatcttccaccttcatactcaattttgggataagtaaaatgactttctccccaaatgcctgtaatgaaaataccaatgttttttatttaacacttcaccatcttcagtcacttatataatattgatcaatgagtcaacattatttaaaaatatgagaattatagtgagactctaagtcctaacccctctgggccttgatgtccacaaatgaacaggtaactgccaactgaagttccttaatcatttctaaaattggtctact

SEQ ID NO: 787068 - DNA, 634 bp, Homo sapiens
agtctcccgagtagctgggattgatggcatgcagcaccacacccagctaatacttaaattttttttcagagacgaggtctcactatgttgccccaagtggtctgaactcctaggctcaagtgatcctcccaactcagcctcccgaagtgttgggattacaggtgtgagccactgctcctggccaatattttcttattatataaatgacagtaagatttagatatgcagaaaaaaaggaaaaataaatgtattttsaatgagttatagtaagttcaaaattttaaaatgaagggcaagtattcaacctgacactgataacattagaatctaatcaaaatgggataacagcaaaagttatttccttcccacctatttttgcatatatcctgattgaccacctgcaagacttttactatgcttgaggtgctgctactaatttacattgtaggcctgttttagatgagtcatcctgtgaaaaaagctgtggcctcaactatatgtaatcttttatgccaagtaatattattaaatgtttcttggaacatctgacaaaaggtacattctgctctgccagcctagtgctagcaaaaatatttctccttaataacccaaggtaaagagcatatatatttct

SEQ ID NO: 787069 - DNA, 606 bp, Homo sapiens
ggcaaggaacaattggctattgaactctccacataaagatagacaagcatgagcatgtcagccccagactcaaggaaaggccataaatgactgtctcctgtgagaggccatcttgggaacaatgaggaacttgtcctggtctggactagctaagtgccttccagtagtagtgactgccaggatgggctgtaggagcaacaaagagggagtcaatcttctcagttattctgttggaatttccttatgctgagaaaatgagctgggaatctatcctgaggaggcaactttgctgcagtcagaattaaatattcagaaaagcagagagggwaggactagtctatgacatgaattctaagaaattcctgaaaatggggaaggagtgggcctaagtgctaactgattttgcaattgcacttacccggaaccagatatattctaaccatttgagatttcagagtctgaaaacttgacacaaaataatcattgggtatttatgtatgtatgtatgtatgtatttatattcatttagagatagagtctggctctgtggcccaggctagagtgcagtggcatattcctagctcactgcagcctcaaacttctgag

SEQ ID NO: 787070 - DNA, 602 bp, Homo sapiens
caaataataagtgcaaaaaaagaaaaatagaaatataaaaatcaccattttgcaactcctaatgaaataatgtatcaagcaacaatcattgaaggtcccaaaatcatcagatgaaaggttgatggggagctttccagtggaagggacaggtggacaccacctgaatgtatcagtcagttttggcatcagtaaagggggggcagctgaacactgtgtgtttcataatgtgatatactccctctgaagtactgccaaacaaacttgaatctgatcaacactcagtagcagtgtagaggaaatccaagggacagaggaacaaaccaaacaataccatgaggaagcaatcaaccaaatcaaaaatgtagaacctccttcaggtcacataaccygatatctctaccaaatcaaaggtattaaaaagaggtggtagatattaaaaagaggtggtagataagggagtttttaaagaataaaaaagacttaggagataaaacgaccaaatacaatgtgtggaccttgcttggatcctgatttgaacaaaccaactgcaagaaggctataacaaatcaggaaactgacgatggactggctattactattta

SEQ ID NO: 787071 - DNA, 523 bp, Homo sapiens
ataagaggagaccttcaagctgagactcaaagaatgagaaggaacccgtgataaaaagagcttccgagtgagatctcagtgctatgcatgtgtaaagggcttgagatgggtgtgagtgtctgggagttgtcagggttggttggggggcaggtatctgtagcccagggaagacagaatggggtgcagagtgggaatggggagagagttaagggaagtgaggattggatcaagcaaggccttgcaggtcacagtgagatgtttggatttaattctaactacaatggaaagccactgtayatttttatgcagagaaatgacatgatctgaattatgctttgagaagtgacatggtctctgggacagctgtctggaggaggcactggtggaaaggcaggaagagcagtgagtagagatgatggaggctacctgggaggtgactgaggttgtccagccagaagatgctggtgcctggaggagtcgatggcagtgtatagattcaagacatatttttgggcctgggagt

SEQ ID NO: 787072 - DNA, 623 bp, Homo sapiens
catcagtgagcactcttttgattttaagtgacagataactaaaccaaactttcctaagcaaatgaattcaatgactcaagtcattgaaaagttcaaggggacagctagctgagctctcagtgtgactaggggaatgctttctatcaggccctgttttatctctccctgttcctcagtttcacttctgtgttggttccgtttttaaatgagttcgctcctgatatggcaagataccagccactatgccagaactgccatttctacagcttcacagcaaataggaagagagggcttctggctcccattggaatcagaagttgaggctctgattggcctcagtttggttctgtgcttattcctgaacagtcatgtgaccatgagttgctgamtggctgacggctgttctcaggctccaccactaaggtggtatgacagtccacccagatcacatggactgatagggaggaaggggagggtcctcacattgaaatcagggctattgccagaagagcacgaaatgggtgtcgggaggcaagcaccacatgttcaggagaactaattcttcttgggcagccaatcaaatgtggagtctgataaatacaattttgcttcccattccccat

SEQ ID NO: 787073 - DNA, 623 bp, Homo sapiens
catcagtgagcactcttttgattttaagtgacagataactaaaccaaactttcctaagcaaatgaattcaatgactcaagtcattgaaaagttcaaggggacagctagctgagctctcagtgtgactaggggaatgctttctatcaggccctgttttatctctccctgttcctcagtttcacttctgtgttggttccgtttttaaatgagttcgctcctgatatggcaagataccagccactatgccagaactgccatttctacagcttcacagcaaataggaagagagggcttctggctcccattggaatcagaagttgaggctctgattggcctcagtttggttctgtgcttattcctgaacagtcatgtgaccatgagttgctgaatggctgacggctgttctcaggctccaccactaaggtggtatgasagtccacccagatcacatggactgatagggaggaaggggagggtcctcacattgaaatcagggctattgccagaagagcacgaaatgggtgtcgggaggcaagcaccacatgttcaggagaactaattcttcttgggcagccaatcaaatgtggagtctgataaatacaattttgcttcccattccccat

SEQ ID NO: 787074 - DNA, 623 bp, Homo sapiens
catcagtgagcactcttttgattttaagtgacagataactaaaccaaactttcctaagcaaatgaattcaatgactcaagtcattgaaaagttcaaggggacagctagctgagctctcagtgtgactaggggaatgctttctatcaggccctgttttatctctccctgttcctcagtttcacttctgtgttggttccgtttttaaatgagttcgctcctgatatggcaagataccagccactatgccagaactgccatttctacagcttcacagcaaataggaagagagggcttctggctcccattggaatcagaagttgaggctctgattggcctcagtttggttctgtgcttattcctgaacagtcatgtgaccatgagttgctgaatggctgacggctgttctcaggctccaccactaaggtggtatgacagtccacccagatcacatggactgatagggaggaaggggaggrtcctcacattgaaatcagggctattgccagaagagcacgaaatgggtgtcgggaggcaagcaccacatgttcaggagaactaattcttcttgggcagccaatcaaatgtggagtctgataaatacaattttgcttcccattccccat

SEQ ID NO: 787075 - DNA, 623 bp, Homo sapiens
catcagtgagcactcttttgattttaagtgacagataactaaaccaaactttcctaagcaaatgaattcaatgactcaagtcattgaaaagttcaaggggacagctagctgagctctcagtgtgactaggggaatgctttctatcaggccctgttttatctctccctgttcctcagtttcacttctgtgttggttccgtttttaaatgagttcgctcctgatatggcaagataccagccactatgccagaactgccatttctacagcttcacagcaaataggaagagagggcttctggctcccattggaatcagaagttgaggctctgattggcctcagtttggttctgtgcttattcctgaacagtcatgtgaccatgagttgctgaatggctgacggctgttctcaggctccaccactaaggtggtatgacagtccacccagatcacatggactgatagggaggaaggggagggtcctcacrttgaaatcagggctattgccagaagagcacgaaatgggtgtcgggaggcaagcaccacatgttcaggagaactaattcttcttgggcagccaatcaaatgtggagtctgataaatacaattttgcttcccattccccat

SEQ ID NO: 787076 - DNA, 559 bp, Homo sapiens
aaatagtgcatccatcacctcaggcatttatcctttgtgttacaaacaactcggttacactcttttagttattttaaaatgtacaataaattattgttgactgtagtcaccctgttgtgctatcaaatattagatctcattcattctagatgactaatttttatacccattaaccattcccacttccccstcccctagtacccttttcagcctctggtaaccatcctactctccatttccatgggttcagttgttttaaggcttttagctcccacaaatcagtgagaacacgcaacatctgtctttttgtgcctagcttatttcacctaacataatgtcttccagttttatccatgttatagcaaatgacaggctctcattctttcttttttttatggctgaatagtactccgttgtgtataggtgccacattttcttttgtattttcattttactttaagttctgggatacatgtgcagaacgtgcaggtttgttacataggtatatgtgccatggtggtttgctgcacccatcaaccttcatctaggttttaagccc

SEQ ID NO: 787077 - DNA, 607 bp, Homo sapiens
gggaagccattttacatagcattgaagtcaagaaaggcatccctgaggaggttacacttaattaagtaaacaccttaactaagagacacttcagaatatggcagaggggatgcgtgtaaagattgatttgataaacaaaaaggctgaaatgtagaaagcaaaggagagagtgatatgagaggcaggagatctttcatgcaggatcatgaataatttttatatctttctcagcgggaagccattgacgagtttggcgcaagggggtgtaatgatatggtttatctttttttaaaaaaaagtttggctgctttttgtggaattaattagggggcaagattaaaagcaagacaataaattaggataatattgtagtagtcaaggtagaagtggtcggggcttcaattagcatgatrtcagtggagactggggaagagaagttgataggttgaggatatgtttggatgtagagcttacaggacttgatgaactgtacattgagtgtcagaataagaggaatcaaaaggttttgtttagcctgaggtattagtggtactgccatttactgagatggagtagactgatagaagaatgagaaggaaattaacaa

SEQ ID NO: 787078 - DNA, 642 bp, Homo sapiens
tctgttcagattttctggttcttcatgattcaattttggtagggtttacgtgtttaggaaggctaatatccagaataataaggaaattaaacaactcgattgcaaaataatctgacaaataatccatcaaaaatgagcaaaaaatctgaatagayatttctgaaaacatacaaaaggccaacaggtataggaaaaaaatgctcaatatcactaatcatcagggaaatgcaaatcaaaatgacaatgaggtaccatttcactccaattagaattgctgttaccaaaaagacaaaaaacaaacgaacaaaaaacaactgttggtgcagatgtgaagaaaagggacctcttatacactgtcagtagaaatgtaaattagtacaaccattatgaaaaacagtatgaaggtttctcaaaaaattaaaaatacaactatcatatgatccagcaatcccactactgggtatatatccacaggaaaacaaatcagtatgatgaagagatacctgcactcccatatttactgcagtactattcacaacagccaagatatgaatcaacctaagcatccatcaacagatgaatagataaatatatagtatatacacaatggaatactattcagctgtaaaaaggaatggaatc

SEQ ID NO: 787079 - DNA, 638 bp, Homo sapiens
cctaatctgtggtattttgttattctgtgcaaactaatataccacattcagagacatttctaagaatctttcctttaagtatcttataagtacatgtctagaattttctggaagtcttgatatcatatgcttttaatttttccataatattaaaacttgtaactgcatatgtaatttattttatacctttttaagacttatataagtttatccatcagaagaaattacttgccaaacstcatgccctaatttgtgattcagaaaatgtagtcattgaacctatacaggaaagacactgaagaagttccttcgataaaacaaaaatgatcttccaaagtgataattgcccatttttgacctagtgagatttacctgtatttgtaggaagggtaacattagcattatttattataatattaactcatataaggaaacttttccataccataattactaaagcaggggtcagtctttactataaatgtcaaagcagtccatgtacatttaatttttgtttcttactaaaatgtatttctgaagttttagtcacaaagtagcttttaaaataacaatgtttcttaagtcttaaatgcctttcttaccaattataatgacaaatcaattatgagatcagcctc

SEQ ID NO: 787080 - DNA, 568 bp, Homo sapiens
acatatcagtagtactttatttcattttattacaaataatgttccatggtatggatctatcatattttgtccattcatcaattgatggacatttgggttgttaaccacatttggctatgatgaataatgctactatgggtattcgtgtacaagtttttgagtggacatatgttttcatttctcatggctatatacctacgaatggaatttctgggtcattctgtacctgtatgtttaacatattgacgaacttccagactgttttccaagtagctgcagcattttctgttcctgccagcagtgtatgaggcttctattttctccacatccttagccacacctgtttgtctttttgactatagctgtcctgtgtgtatgaagtgttatctcattgtggttttgattccatttccctgatgactaatratgttaccatctattcaagtacttactggccgtttgtatatcttctgtggataaatgtttgttcaggatttgaacccatttttaattgggttattagtctttttattgagttatgggaattcttttaaacattctagatata

SEQ ID NO: 787081 - DNA, 585 bp, Homo sapiens
tggttactgaccaggctacaaagctctagaagacttcactcacatgtttagttcttctcaatgataccctctctcttcacaaggtgtctcatcactcagtaatctggcttgagctcccttacaacatggcatctagcttccccagagcacatgaaagtggaagctgccagcttcctaagggctacctctggaactggyacactattatttccactgtattctattgggcagcaaatcacaaggtcaagaggagaggaaataactgcctcttgatggaaggagcagcgtacctccagaggagggaagggattgttggtggccatctttggaaattgtttagtgtagttttcttatttgtttattatagttttcttatctattaaatgagatgttgaattagggagtttctaagggcctgtcaaactctacatttccgtaatactatacttttttttttttttgagatggagtctggctctgtcgcccaggctcgagtgcagtggcacgatctcggcttactgcaacctgtgcctcccaggttcacgctattctcctgccttagcctcccgagtagctgggactaca

SEQ ID NO: 787082 - DNA, 563 bp, Homo sapiens
tccaacgtttttgacctgaactggaagaatggagttacaattagttaccatgtttgagggtaaacattaatagtttggttttgaacctgttaagttgtagatgtctatttgactcccaagtggagatgcacagtaggcaattggatatatgcctctggaggcgagagggaggtctaggctacagcaaaaagactaggagctctcagcatgtaaactgcccagtgtctgaaaccttgagactgatgaaagtgcagatggaggcaaggagaggtctaaggactgagccctggactctctagtgtttagaggccaaagtgatgggacaagccagcaaaggagactgagaaagtgtgkccagtgaggagggaggagaacgagcaaagctgacttctggtgtcccaagaaatcaaggaaagcaggaagtgaaagaaccactttgttagatggtgctgaggtaaagtagtatgaggatcatgaactgaccattgggcttggtgacatgcagatcattggtaaccgtgacagaagctgttttagtggagtaatgtgaataaaaggatgtc

SEQ ID NO: 787083 - DNA, 603 bp, Homo sapiens
tgcatagttaaaatgatctgattagttgagatggcttttgttttccagaaaggtgaatttaacattctccatggaagatgtaactgtcacggggtcttgggcaccatctggtctgagttaggtacaggacaataaaggagacagttaatctataacaaagatcagtgattggaaggaggaraaggtctgttctttggtctctcttagtcatttatagcaacgagaacaatgaggaagacagttaagctctaatctaagaagcagaactgcaaatatgcagccgtggctcagtcgccagggcttaacttctcccatggcataatacttttagacagttctaaaattttattttcttttacagggctcacctgaaacaattatattttaacaaggcaatagtaagaacaacaacaccaattcccaccgagggctaactctgccaggcacagttccaagtgcattttgcatattatctcatttaatcctctgctgatgtgatcgtgttatgtgttattatgtccatttcacacctaagctctgtgtttgtgctccgaatttccatggaaggagccactcagtgctctaacacttggtgtgtgagtc

SEQ ID NO: 787084 - DNA, 603 bp, Homo sapiens
tgcatagttaaaatgatctgattagttgagatggcttttgttttccagaaaggtgaatttaacattctccatggaagatgtaactgtcacggggtcttgggcaccatctggtctgagttaggtacaggacaataaaggagacagttaatctataacaaagatcagtgattggaaggaggagaaggtctgttctttggtctctcttagtcatttatagcaacgagaacaatgaggaagacagttaagctctaatctaaraagcagaactgcaaatatgcagccgtggctcagtcgccagggcttaacttctcccatggcataatacttttagacagttctaaaattttattttcttttacagggctcacctgaaacaattatattttaacaaggcaatagtaagaacaacaacaccaattcccaccgagggctaactctgccaggcacagttccaagtgcattttgcatattatctcatttaatcctctgctgatgtgatcgtgttatgtgttattatgtccatttcacacctaagctctgtgtttgtgctccgaatttccatggaaggagccactcagtgctctaacacttggtgtgtgagtc

SEQ ID NO: 787085 - DNA, 603 bp, Homo sapiens
tgcatagttaaaatgatctgattagttgagatggcttttgttttccagaaaggtgaatttaacattctccatggaagatgtaactgtcacggggtcttgggcaccatctggtctgagttaggtacaggacaataaaggagacagttaatctataacaaagatcagtgattggaaggaggagaaggtctgttctttggtctctcttagtcatttatagcaacgagaacaatgaggaagacagttaagctctaatctaagaagcaraactgcaaatatgcagccgtggctcagtcgccagggcttaacttctcccatggcataatacttttagacagttctaaaattttattttcttttacagggctcacctgaaacaattatattttaacaaggcaatagtaagaacaacaacaccaattcccaccgagggctaactctgccaggcacagttccaagtgcattttgcatattatctcatttaatcctctgctgatgtgatcgtgttatgtgttattatgtccatttcacacctaagctctgtgtttgtgctccgaatttccatggaaggagccactcagtgctctaacacttggtgtgtgagtc

SEQ ID NO: 787086 - DNA, 617 bp, Homo sapiens
ggtggggtgctttgggctgcaagtaacagaaaatccaactcaaagtgaattgtgtgataaagacaatgcaccacctcgcttatcatggtctgagttcctccatgagggttgccgcctggtgcgtcctctgtaagctccctgaagcaggggcctaggctgaccttttttctccactgcccccgagagcatagaccagggcctggcacagagaaggcgtccartgaggattccacccaggacaccatcaaaccctcatcgctacatggtctattaagttgtgttcccccaacagcagttaaagaaaccaaagcttggccaggcacggtggctcacgcctgtaatcccagcactttgggaggccgaggtgggtgggtcacttgaggtcaggagttcgagaccagcctgaccaatatggtgaaatcccatctctactaaaaataagaatacaaaaattagctgggcgtggtggcatgtgcctgtagtctcagctactcaggaggctgagacaggagaattgcttgaacctgggaggcggaggttgcagtgagccaagattgcgccattgcactccaacctgggcaatgagagtgaaactccgtctaaaaaaaaaaaaaaga

SEQ ID NO: 787087 - DNA, 578 bp, Homo sapiens
atctactaagcacccactatgtgccaggcactgttctaggtgtggggacacaacagggaataaaagagacaaaaccccctgccctctgggagcttaaattctagcgaaggaagagcaggcaagaagcagaggagtcaatcaaatacaagtgccacggagaagagggagacagagggggagcatgggaggaggggtgactttcgatgggaggccaggsaaggctgggctgagagggagaggcccaagacctgaagaggtcatgagtgcacaaatacctggagaatgttcccgaccaacaggacagcatgtgcaaaggccctgaggcaggagtgtgctgggcacttttggcgaaggagtcagaagaccacagactacagggcgttgggatttcctctgggtgaggtgggaggcagcgggggctcagataggacgaatgtgacctgatttacgcagggtacatgtggagaaccaggggcaagggtggaagcatgggacaagggaggagacgactgcaagagtcccagcaggagaccatggtggctgagacccggggctacccatgggaggtgagaagtggc

SEQ ID NO: 787088 - DNA, 578 bp, Homo sapiens
atctactaagcacccactatgtgccaggcactgttctaggtgtggggacacaacagggaataaaagagacaaaaccccctgccctctgggagcttaaattctagcgaaggaagagcaggcaagaagcagaggagtcaatcaaatacaagtgccacggagaagagggagacagagggggagcatgggaggaggggtgactttcgatgggaggccagggaaggctgggctgagagggagaggcccaagacctgaagaggtcatgagtgcacaaatacctggagaatgttcccgaccaacaggacagcatgtgcaaaggccctgaggcaggagtgtgctgggcacttttggygaaggagtcagaagaccacagactacagggcgttgggatttcctctgggtgaggtgggaggcagcgggggctcagataggacgaatgtgacctgatttacgcagggtacatgtggagaaccaggggcaagggtggaagcatgggacaagggaggagacgactgcaagagtcccagcaggagaccatggtggctgagacccggggctacccatgggaggtgagaagtggc

SEQ ID NO: 787089 - DNA, 556 bp, Homo sapiens
aagagaaagatgctgtgtgactctgggtaggtcagggaacctttctgagcctctgcttcctcatcgacacaataaacaggcaacgcaggaacaccttccccaccaggttcttggggggctatgttgcttggaaagtgtccactgggcacagttcctcacacatgtgggcaccagtgttataatgacatccacagggagagctggaatagtcaaggaaggcctcccaaggaggcaggataggagcaaggattctgaggtcagacatggaaaggccaagagccactgcaagcaggccaygggccaacggggctcccctgggacccaagacttgggggaaggcaaagccttccaatctgggatcgaggcaccagcacaggggagaagagatgctcccacctggcatccctccccatcttctggtcccagcaccctgggggcttccttctgggaaccactcctcccccactaccatgtggtagagctacatccctcacccaggaggcagctgccccagggaaacagagagaaattcccattcttactgaaggtggtttga

SEQ ID NO: 787090 - DNA, 631 bp, Homo sapiens
ggcctgctggcccacatccatcccagagttgctgggaggtaatggatgggaaattgctctgagaggctgcacagggtccagtaggagtgttattaatggatgcactggacgacgcccatgccaggggcactttaggacaaagtggtttcttctccctcctggtgagtccatgttatcctaaataccagcactgagagagcccaaacttcaaacattccyatcctctccttcaaggaatggaaacagcagggcctagagaaggcaggagaaccatccaaggccacgttgcaagttcctgccagagccccagtgtcaggatcaggctcaagactgaaaaaatactgaaccatcccattcccaggtgacaggagagtaagtaaaatcacttttcttttcttttcttcctaaaaggttgttacttcccctagggcaagagggggatgagactctttgccgggtggatgggctgggaaaaacaacagtttgcaaaacaaattaaatgtgttaaatggccagtttctcccaccagtgggtctctttgccctcagcaagtgacttctcaacttctcctttgtggttttcaaaacattcccctaaatttctttttttgttttgttttgtgacagtcttg

SEQ ID NO: 787091 - DNA, 631 bp, Homo sapiens
ggcctgctggcccacatccatcccagagttgctgggaggtaatggatgggaaattgctctgagaggctgcacagggtccagtaggagtgttattaatggatgcactggacgacgcccatgccaggggcactttaggacaaagtggtttcttctccctcctggtgagtccatgttatcctaaataccagcactgagagagcccaaacttcaaacattcccatcctctccttcaaggaatggaaacagcagggcctagagaakgcaggagaaccatccaaggccacgttgcaagttcctgccagagccccagtgtcaggatcaggctcaagactgaaaaaatactgaaccatcccattcccaggtgacaggagagtaagtaaaatcacttttcttttcttttcttcctaaaaggttgttacttcccctagggcaagagggggatgagactctttgccgggtggatgggctgggaaaaacaacagtttgcaaaacaaattaaatgtgttaaatggccagtttctcccaccagtgggtctctttgccctcagcaagtgacttctcaacttctcctttgtggttttcaaaacattcccctaaatttctttttttgttttgttttgtgacagtcttg

SEQ ID NO: 787092 - DNA, 583 bp, Homo sapiens
ataacaatccaaggagataggcactattataacccattttacagagaagaaaactgaggcagaacctgcacattggtggtgagaaggcctgtaaaagactttagctttctcatctctcatcacgtgaccttggacaagccacttcccctctccaggcttcaatctctaagttgtacaaggtgatcattctggtctaaacagtttgttactccttgaactcttttactaaaaatcaaagcacacattaaaaaaaaagaatgaaaaattggaaacaacactgcctgtatagggggtatatgtgtgtgtttgaagagccaactagtgaaactttaaaagctaaaaaagcctaaaaaaaaaaawatatatatatatatatatatactaataaacgttattttttttttttggagacagggcctcactgtgttgcccaggctggagcacagtggtgcaatcacagctcactgcagcctcaaacttctaggctcaaacgatcctcccacctcagcctcctgagtagcagctgggactataggcatacaccaccacatccaactcattttttattttttctttgtagaga

SEQ ID NO: 787093 - DNA, 594 bp, Homo sapiens
gcccatgaatggggccggctggggaacaactggaaccctggtctccctagagctgggccattggcatctgggggaagcccgatttgctggggtcggggctgactggctgggccattacccgccgggggcctagagcccacggggaagttgggccaggttgcccctgctagaaccttcccagagtctagagcaggtggccgtgatgccctgctctctgcggctgggactccaactactcctgtcccctccccrgctcactgcctgtgggtcactcccgctgctcccagatggccatgctcattccctccctccacaggccttttgccctggctggtgcctctgccagggactcttcccctaatccttgtgtggctggctcccgctcctactcgcgccccagctcaagggtcacctcctcagaggccccccgaccacctgtctcaagcagccctgctctcacccccctcactctccatctgagggccctttaaggtctttcatggtatttaacaaaaatatcaggcatcacatgtattgtgggcttgtctattgtcaatgccctctcccttcactggggtgtaagcaccccatgga

SEQ ID NO: 787094 - DNA, 637 bp, Homo sapiens
ctcagaatgaagcgggccatcctggacacgggccacactttgtaactcccatggggcatgcacatgcctcttttccctcccttctttcctggtgcccttggagaggctcagagaaactaccaaggccagccacaaccctgcatttctacttgcaggtgtgtacacaataaaatgaacacagatgttccctaaagaacacacagtaggctgggcatggtggctcacacccataatcccagcactttgggaggctgaggtgggaggatcacttgaagtctggagttcgagataagcctgggcaacatagcaagaccctrtctctgcaaaaagaatttagctgtgcatgatggcatgcacccgtagtcccagctactgtggaggctgaggtgggaggattgcttgagcctgggagatcaaggctgcagtgagctgtgattgtgccactgcattctagcctgggccacagagcatgaccctgtctcgaaagacagaaagaagaaagaacacatagcagactggtaggctggtcatagcagcactattcacaacagctcccaactgtccaccaatgaaggatggatacattgtgggccccccataccatgaaatattactcagccataaaaagaaacaaact

SEQ ID NO: 787095 - DNA, 579 bp, Homo sapiens
aaaaaaaagaatgaacaaaatcactcagccaaggtaaagaaagagaaaaaacttactctgctcaaacctactgttcacttttcctgcggccccctgttaaatgctactaacagctggagaccagacttctattcttcactctctgaacatgttcacagctcactacaggagaaggagggatcttgccttatacctgtcatcattcatcctcccaggctaggctctacctcttccttacctgtgaggaagctctgtagctgtccctgggattggaaagaggtcgactctgagattctgtagaacaggatgcgttcgaagatgtttcatcaagagatactggaagagaggaaaataaaggttagtccctagtgcctgctgtggctccctcacccatccmttaaagggtccttaccatcgttttcaccactcacagtgctggcttcattagacccacagctctccacatcagccgtgtcctctggctcctctccctccactgtagctggatggcgagaccactgcagggcatccttctgtgacagcaaggtacaactcaggtgaacaaaaccctacaaattc

SEQ ID NO: 787096 - DNA, 425 bp, Homo sapiens
gggagtagggggaaggggttgaagctgcatcttttaaaacaaaagcaaaacaacaagttccctgactgagccagctaaatggaatcctgtttccatgcagaaacttgctcctgattctgccatctctagggcttcaggtgtagtttcactggaaaggaggascccacccaagaggtggggtcgacatgatgaaatccattgtcctggaggggcctgggaggcccaatggactttaacaacatattctttcctttctcttgaaaacacattgaacctacgctcttgccgcagtactaaggcaggctggagggtggtcagttccaacagcttgaactcagaaaaacatgacttcaaactgtagcttatgctgatctttagatctaatccttgtgtgggtagggggagggagccccttccccagtctt

SEQ ID NO: 787097 - DNA, 601 bp, Homo sapiens
caaggagggaactgagcaagatctgagctctgtgtgcccccacacttccctgcagacctcttggaggccagggaggaggcacacaggggagggggccgggccaaggagaagaggccaacagcactgctgctgtaaataccgagmcctgggcactcaggaaacacacctgctccccagagacccgccctgctgcccagtttgcatttctgggtggtggagggccccacccaagggcagcaggggccaggaggtaggaagccttggtcttctcactaagagctcctgggggcatgccaggatgaggggccacagcccccaggccatgtcacagagagaagctgtggcccagagttgggggatcggctagctcaagaccatacttcggggaagggccggccagatccatggcacagcacccaggacctgcctacaggatgccacatattgggcccgaccactccatcctcccagaacccttccatgccagaccctccccagatggcctggctgtggcctctctgcccttctctcctggttggagcttggggtcatagggagcttttggaaacaggtgacccaagaaaccctcaatcctggcatc

SEQ ID NO: 787098 - DNA, 601 bp, Homo sapiens
caaggagggaactgagcaagatctgagctctgtgtgcccccacacttccctgcagacctcttggaggccagggaggaggcacacaggggagggggccgggccaaggagaagaggccaacagcactgctgctgtaaataccgagacctgggcactcaggaaacacacctgctccccagagacccgccctgctgcccagtttgcatttctgggtggyggagggccccacccaagggcagcaggggccaggaggtaggaagccttggtcttctcactaagagctcctgggggcatgccaggatgaggggccacagcccccaggccatgtcacagagagaagctgtggcccagagttgggggatcggctagctcaagaccatacttcggggaagggccggccagatccatggcacagcacccaggacctgcctacaggatgccacatattgggcccgaccactccatcctcccagaacccttccatgccagaccctccccagatggcctggctgtggcctctctgcccttctctcctggttggagcttggggtcatagggagcttttggaaacaggtgacccaagaaaccctcaatcctggcatc

SEQ ID NO: 787099 - DNA, 530 bp, Homo sapiens
aactgatatgaatgatgtgatgtacacagagacatcaatcttagcaacttaaccccagccattttatatataaatgagacaaaattggcactgtatgtatataaatggcacataaatattatcacttataggtaaacttttaaaataaaattttccagatagatttttccatattaggcaatgactcccaaataaacatgtttgtacaccgaactagtccacatttaaaatcaagattttatcaatatgttatttttaccgaacagcattgccataatggcacttgcagtaacagtacccatctgccatcttatttcaaaaaaaaaaactctttgagctcactgttgccagtttatccttaaatccttatttaggcctcaggtggctactgttatgggaagttgyaaacccagcaactattcagttcccttgaggtttctgtttgttcaggtcttggccttctctgttggcctgtgccaattaactgggacggcacagtgtgtggcaccagatttttcttcctttcctat

SEQ ID NO: 787100 - DNA, 609 bp, Homo sapiens
ctggagggtatgaacaggtgtcacgagtcagtcttcctcaggtgcttcagggtccaggtcatagtccagctgccctgccgcaggcctgtgctcccacctaccacagactgggacacagaacccaacatcagtggagcctcgtgtacacccctagtttttctagcttgcctgctgcagccagaccattatctccccagartgctcttcatgactgcttaatgaccagaaagacttgagtttttatatccaatgtcaagagtaaattattaaccacctaggaaaacagaattttggagtagtcttgtactttgagatacataaatatatacatacctaccaacatacatacactcatatatgcctggaaatatgtatgtatatgtatattttactcccttcttcaaatatctttagtggatccttagtccttggtgaataaaatctaaaataagttcttagcttagcattcaaaactggccactatctggcctgacaactaactcccttgatgtattctgttaatacgtagctgaactctttgttgagctgtttaccatctttcaaatcccagttctggtatcaactcccaagaagacagtctttcctcat

SEQ ID NO: 787101 - DNA, 563 bp, Homo sapiens
atgcctggaaatatgtatgtatatgtatattttactcccttcttcaaatatctttagtggatccttagtccttggtgaataaaatctaaaataagttcttagcttagcattcaaaactggccactatctggcctgacaactaactcccttgatgtattctgttaatacgtagctgaactctttgttgagctgtttaccatctttcaaatcccagttctggtatcaactcccaagaagacagtctttcctcatttcgacactctattytgagcaaccataatactttgtatatatctccctaatcacattacatattgtgttgtaggtttttgtatatttgtctaatcctcttctcctggccctgcattataaacagtaggtagaaagcttgttattaaaaacagaattaatagcacaatgtgcttttgaaaacggaaagcacagagttttggggatgctttgcatttagagccgtcttcactggcattgacgtcatagccgcggctaacagggcttattctttgtcaggcaatgagccaagcatgacatgtgaactattttaa

SEQ ID NO: 787102 - DNA, 636 bp, Homo sapiens
aaaactaaattaaaacaaaatgccgccatcaccagtgctaacaaaaaatccttcaagattgaaaatttgaacctgctgaacaaattcggaagctgctttttgtaaaatcaaatttcttttttagtaaaataaattatagcttattttcacgtcagcattatttgagcttagagaaattgtggccaaagtttaaccaagcagggtagcttgacatgggatatatatacctgaaaaaacaggataaatataaatattctaaatttgccaggtatagtggctcatgcctgtaatcccagcactttgggaggctgaggcgggtggatcacctgaggtcaggagttcgagaacagcctggccaatatggtgaaaccccacctctactgaaaatacaaaaattagccaagggtggtggygcgtgcctgtaatcccagctactcgagaggctgagacaggataatcgcttgaacccgggaggtagaggttgcagtgagccgaggttgcgccattgcacttcagccagagcttgctgttagaaggcccttttctaaaatctactaatttcatattataatttgaattttcacttaaattagtgtgtgccagtggatctgtcctcccttgctgtcattgtatctc

SEQ ID NO: 787103 - DNA, 576 bp, Homo sapiens
tctgctcagaacttccaaaaattagtcttttatttttttcctaggtgccttaaaggtcttgtagctctccccatcatcaagcaaaaccaaccaaaatttaaatggctgatgtcctttatcaatttttggatgcctgacaaaggggcttaagaattttagataaataaaacaaatgatgaattgctggaaatgcataggaaacaaaatgactatttatagaacaaaataaaagacttccacgggaaacttaaaaacatcaatggttttatatatgcatatatatgtaaaacccaaaggagaacaaacagcaaataaatgaaaattagaagcagaaggaaataaacaggaaaccaaccccaattgttctcctactcagtttaccttagaggctaaagtgttaaccagcatcttaaaraaacacataatagatattttgttcctgatatacaattcaatgtatttaagtctatcaataacatgatatattttgtgcaattaagacattcactttgggtatatgaccagtaattactttggtgctagtactatctatgcagaattgcaaatatagtgtga

SEQ ID NO: 787104 - DNA, 625 bp, Homo sapiens
tataattcctatcctcagtaaccttaaattttagtgaaaacctaggaagcaagaagtcctgagctgcctatcagacattagcattttatagatgagaaccatttgacaatttgaagggggccaccagcacccgcctctgagttccctcagtatttactgatcattatttttactatcttagccagcggagtgtagcagggcaacacgtggggagaaggtcagcagggaaacatgtgagcaaaggaatctgtatcatgaataagttcaaggaaaggtactgtgcctggatgtgcacgtaggccagatttatctttcactttwcataaacatctcagtgtagcaaagagtaacagagcagcattgttgccagcttatcttgcctctagccacagggtggttttctcctatctcagaatcgaacgaatgggaatggtcggctttacactgagacattccaatcccagggaggagcaggagacagaagccttcctcttatctcaactgcaaagaggcctccctctttcactactcctcctcagcacagaccctttaccggtgtgggcctggggcatggtaaggtctttcctttccaacaaggccatatctcaggctgtctcagtggggg

SEQ ID NO: 787105 - DNA, 589 bp, Homo sapiens
cattatatatgaaggaaagagacagtcattttcagacaaacaaatcctgggagaatttgccattaccaagccaccgctacaagaactgctaaaaggagctctaaatcttgaaacaaatcctggaaacacatcagaacagaacctctttaaagcataaatcacagaggacctataaaacaaacatacaagttaaaaagcaaaaacaccaaaatgaaaaaaaaaaaattacagaggcaacaaagcgcgtgatgaatgcaatggtacgtcacatttcagtactatcattgaatgtaaatggcctaaatgctccacttaaaatatacagaactgcagaacagataagaactcaccaaccaactatctgctgccttcaggagactcacctaacacrtaaggactcacttaaaggaggcagaaataggcatttcatgcaaatggacaccaaaagtgagcaggggtagcaattcttatatcagacaaaacaaactttaaagcaacagtggttaaaacagacaaagagggatggtatataatggtaaaagtccctgtctaacaggaaaatatcacaatcctaaacatgtatgcatct

SEQ ID NO: 787106 - DNA, 582 bp, Homo sapiens
gaaaaaaaatcataaagtgggatgaaacttatagttccacaacagcatgacagggagtataaatggatacactctctcagaaagagtaacgacctacatatgtagtaatgtattttaacccaatcttttcaattctgatactctaatgaaataacttttttaaaatacagaagaggcataagcacatagaagctcagcaaagtattacatttattaaygtaatactttaaaaaattgatacagatcatttattataaaaattaaaatagttctaaaaccagggttagaattctcctcctcccaccctttgcaactagagaactaatttttttaagttaaagtacaccttacaaaaaatgcaggagggttacctgcttttgttttttaattacattaaaatagtatctttttaggggctggaagatttggcaaattattctaatgcctgccttaattaagttttacttcaatgtcaaaactaaggtctttgtcatgaagttttaatattaaaagcctgtaatactgaattaatgataattagttaacaattcaaataaaacttactttaattttaaaaataac

SEQ ID NO: 787107 - DNA, 582 bp, Homo sapiens
gaaaaaaaatcataaagtgggatgaaacttatagttccacaacagcatgacagggagtataaatggatacactctctcagaaagagtaacgacctacatatgtagtaatgtattttaacccaatcttttcaattctgatactctaatgaaataacttttttaaaatacagaagaggcataagcacatagaagctcagcaaagtattacatttattaacgtaatactttaaaaaattgatacagatcatttattataaaaattaaaatagttctaaaaccagggttagaattctcctcctcccaccctttgcaactagagaactaatttttttaagttaaagtacaccttacaaaaaatgcaggagggttacctgcttttgttttttaattrcattaaaatagtatctttttaggggctggaagatttggcaaattattctaatgcctgccttaattaagttttacttcaatgtcaaaactaaggtctttgtcatgaagttttaatattaaaagcctgtaatactgaattaatgataattagttaacaattcaaataaaacttactttaattttaaaaataac

SEQ ID NO: 787108 - DNA, 594 bp, Homo sapiens
tatagaaaagaacctacgtgaaatattgggggtgaatttcgcccaatatctggctgaatttcccccgatagatgtgtgccactacgcccagctaattttttgtatttttagtacagatgggattttgccatgttggccaggctggtcttgaactcctggcctcaagtgatccacccgccttggcctcccaaagtgctgggattacaggcatgagccaccgcacttggccagaaacaccaaactttcttttctttccttttttctttttctttttttttttttttgaaacagagtttcgctcttrttgcccaggctggagcaacgatcccagctcactgcaacctctgcctcccgggttcaagcaattctcctacctcagcctcctgagtagctgggattacaggcatgcgccaccacgcccggataattttttgtatttttagttaagaccgggtttctccatgttggtcaagctggtctcgaactcccgacctcaggtgatctgcccaccttggcctcccagagtgctgggattactggtatgagccacagcacctggccccagaaataccaaactttctaataggtggcagt

SEQ ID NO: 787109 - DNA, 602 bp, Homo sapiens
ccttggtgatgagtgagttctcactctattatctagttgaaacagcttatctattatccagttcacatgacagctgattgtttaaaagagcctgacacctcctcccttctatctatctctctccctctctcaccatgtgataagctggctcgycttgccttatgccatgattagaagctttctgaggcctccccagaagccaagcagatgctggtgttgtgcctgtacagcctgcagaaccatgagccacataaacatcttttctttataaattacccagcctcaggtattcctttataacaatgcaaaacaggctaacacaatcattaatcaactagatccaatgaacatgtatattacgctccatccaacaatgacagaaaacacattcttttcaagcacacctggaacattcaccaagatagatcataccctgcagcttaacaaatttggaaaaattggaatcatacaaaatatgttattaccataatagaattaaactataaatcaataaaaggaagacaatagaaaaaacaccaaacacttggaaattaaacatacttataagtgacccatgggtcaaagaagtcttcagagagatt

SEQ ID NO: 787110 - DNA, 510 bp, Homo sapiens
tgtttcaactcccaggcttaagggaaataatctttgatataagaagttattgtggaaagtcattaagctgtcatgcccaaaccaaatgttcataccccactccttatcaaagagcaccagaaaatgcacccacacaagatcccctgcaagcagagaccatatgctttgttgaaatggttgagctaagagatcaaagaagctttaatagaaaaccaaagccatactcaaaccatcctgcagctaaaacagaatctcagcatgtcaaagcagaaaggaaaatcagcatgaaaagatattttatttaacactcacaggacgctgcctaggaaccaggcactattccaggcaccgtccaagtgttyactcatcgaatccctgctgcaaactgtgaggcaggtggtattagctcagtcatccccatttcacagatggggaaactgagggacggagcacttaagtcctgtgcacccaggtagctagatccagagtccacgacatgcatgtgaccac

SEQ ID NO: 787111 - DNA, 636 bp, Homo sapiens
tttctattaaattagccaatacattttctttttcatttttttgtttataccagtttgatttggatctctgtcccttgcaaccaaaagaagcctcactgatatagtctctgattaagtttccctcctttcattggtacataggaaggaagctcagagtcaaaattgcagcccacatgtagcaagtggacaggatcctattgaatgaattttgtataatgggcttgtccctcgttttatcttcttttttctattctttttttcttcactcacattgtatcttgttatattttacatgtttttctaagccactacaaattctttttacaatatgacaataaatagtagagattgtttcccacattgtcctgaatctggactacaataaaactaaaggtttatttctaacgtacatcattggtttcctgtccagacttcatctctcccttctyttccaaccctggttttgtcctagaaatcactcttcttccatgtagcccatgtgctttagggaaggctgaccttaccacagcttcaggatgggcctgattaatccaagagtaacctcatccttgtaaggaattgattcaggaatttacaccactgagataccaggagaagtttgctggtggattctac

SEQ ID NO: 787112 - DNA, 606 bp, Homo sapiens
aggatcccagccatagagttttaaatacacatttacaatgaatccaagtccactttcaaagaacactatgcactttacaggtagtgcgagtaccttataataacaaaataatcctaattctccctcccatcccttatgtctttgctgtcattcatttttgttatacataagcatttaaaaatatacacagaaatatgcatgattgaatacattgttgctattattttgagtgaactgctattttttaggtcagttagaattaaataatttatttcaccttatttcttctccagtgctcttcctttctttatgtaaatccaaatttctgacctatatcattttccttctctcttaagcaggggtccccagcacctgggccacaaactggtgctggtmcaaggcctgttagggctgcacagcaggtggtgagcagcaggcttcttagctccacctcctgtcagatcagcagaggcatgtgattctcataggagtgtgagccctattgtgaagtgtgcatgtgagggatctaggttgcacacccttatgagatctaatgcctgatgatctgaggtggaacagtttcatcctgaaaccattccccacaaa

SEQ ID NO: 787113 - DNA, 630 bp, Homo sapiens
ggagctgcatgcaggactaccaagattcctccccacagttatgaaaccgatttttccgggactggttgttctagtcttctgggtgccaagtctgacttttctgggaatggttgatccacactggaaggtttccagatgtgttcccyaggcattcctggtggtaggaagagtagaggcctgggtattctgtagatgctgagccctgagtcatattgttgcttattctttggtcagttggctttctaccacctcttagctttcattctctgtaactagcttgtatgctgtttgtagctaagattcagggtattggaaagttcttgcagctgctggaggctgcggtgtttctgtctctgaaatccatcattaattacacacagctgggccggagagaacatgattctggtcttctgtttcttctcctggatcttatcttcattcttcactgtgctcttctctgcagaaatgtgtagttttactctgggactagtggaagaattagagctttcctgaataaatagatccacggaggaaggaagatgagagagcctctgagtgggacacctcctcatatgtcatttgcaaggatggataactttcatcagggccacgagtcacaggcattggtga

SEQ ID NO: 787114 - DNA, 630 bp, Homo sapiens
ggagctgcatgcaggactaccaagattcctccccacagttatgaaaccgatttttccgggactggttgttctagtcttctgggtgccaagtctgacttttctgggaatggttgatccacactggaaggtttccagatgtgttccccaggcattcctggtggtaggaagagtagaggcctgggtattctgtagatgctgagccctgagtcatattgttgcttattctttggtcagttggctttctaccacctcttagctttcattctctgtaactagcttgtatgctgtttgtagctaagattcagggtattggaaagttcttgcrgctgctggaggctgcggtgtttctgtctctgaaatccatcattaattacacacagctgggccggagagaacatgattctggtcttctgtttcttctcctggatcttatcttcattcttcactgtgctcttctctgcagaaatgtgtagttttactctgggactagtggaagaattagagctttcctgaataaatagatccacggaggaaggaagatgagagagcctctgagtgggacacctcctcatatgtcatttgcaaggatggataactttcatcagggccacgagtcacaggcattggtga

SEQ ID NO: 787115 - DNA, 575 bp, Homo sapiens
tgtgttcattgtgcatatctagaattaaatatttttaaatttcattaaactgaattatgcaatgttctaatgtctgtgtgtgtgtgtgtgtgtgtgtgtgtgtgtgtgtgtacacagagagaaagcgagtgccttaaggctagcgaacatagctaaaaaaattgctgagaatcagaaggattattcaacacaaaattttaaatgtatggggaaagaaaggatttaataagaatcaycaaaagaaaaaacttttggtaaatagattccaggctaaatttgtttttgctaatatgcagataaaataactagtgggcctcttcttaatttatagatgtgtgaaaattaacctaaagaaaaagtaagagagaaaattgatttaaggtataataagtggcttggagtcaagcaaaattgataagataaaccagatctcttttaagcttgcttctgcaggcaaaataagctttaattcaaaacctcattgaatctgtattagtgagtatgtagagtatatagcaactagatcataggaaaggtcactctcactatcccctgaggcagagttggttgttctt

SEQ ID NO: 787116 - DNA, 643 bp, Homo sapiens
tttcatttaaaaacaagtcaggattcaatctatgtttgctatataaaggtattaagtatatgaggaaaataagtgtatatatattaatattgcaattatatgtctttggagctcagagagattaaattatcaagcctgtgctcagccaggattagaaacaattctttttaattccaattactttaaattttactaaaaccaattgactaaatccaaaagtaaaaaaaagtactgaattttgcaagaaatgaaattttataaacatttttagaaaacattatktcacacatactaaaaagttgcaaaaattatacaaagaactttaggaggccaaggcgggtggttcacttgagcccaggagttcaagatcagcctgggcaacatggtgaaaccccatctctactaaaaatacaacaattagccgggcatggtggcttgtgcctgtaatcccagctactcaggaggctgaagcaggagaattgcttgagcatgggaggcagaggttgcagtgagccgagatcacgccaccgccctccagcctgggtgacacagcgagactccatctcaaaaaaaaaaaaaaaaaaaaaaaaaattatacaaagaatctctgtcaacactttgctaaaggcctcaaatgttaaca

SEQ ID NO: 787117 - DNA, 654 bp, Homo sapiens
atttcgtccatccctaaagaagtgaggatcctgggaatttaaccacatcaatgcagccttttttacactattaactgaagaaaaatggatgccctttacagattttttaaattagggggaaaaaaaagttgcagccaaatcaggacyataaggtggatgcctatttaacatcgaaactctcaaacttgcccttgtttgatgagagcactgagcaggagcattgttgttgtagaggactctctcatgaagtttcccaggcatttttctgctaaagctttgactttctcaaaacactctcataatgagcaagacattattgttctttggccctccagaatattccgaagcaaaatgccttgagtatcccaaaacaccgttgccacgacctttgctcttgaccagtccatttttgcttcgattgggccctttccacctctcagtagccattgctttgattgtgttttgtatttaggatcatactggtaaggtcatgtttcatctcctgttaacaattcgaagaaatgcttcagaatcttgatctgcttgtttcaaaattccagtgaaagctctgctcttgtctgcagctgatctgggcacaatggttttgatactcactgactgaaaagtttgctcacttttaatttttcagccaga

SEQ ID NO: 787118 - DNA, 588 bp, Homo sapiens
ctaatatgtcagatctatgagtactaagacccagacatggtcaaggtacattactaagtaaaaaaactgtcatcatgttccatgagtccctttctgttaaaattttttaaaagttaatgtctatataaaaaactctgggaatatacaccaaactgctgaaagtgattgtctttgaagagacaaatttcaaggaacttactttytacataatgaatttctatatttctataatgtttacattttatatgtcatatctacaataggcaaaaaaaaccccacaagagtaaaatgattttgttcaaagtttttccttttttttttttttttttttttttttttttactttaagttctgggatacatgtgcagaacgtgcaggttaaacaggtatacatgtgccatggtggtttgctgcgcccatcgacccatcagctacattaggtgtttctcctaatgctatccctccccttgcccctcaccccgacaggccctggtgtgtgatgttcccctccctgtgtccatgtgttctcattgttcaactccacttacgagtgagaacttgttcaaagttttaaaaaaactgagaaac

SEQ ID NO: 787119 - DNA, 658 bp, Homo sapiens
ggggctgcctgacgcagcttccatagtgactataatttattcacaggcccatgtatggaggtttttcttctaaatatcattattctaagcatcatcatgggcacagtggctcacgcctgtaattccagtactttgggaggtcgaggcgggaggatcacgaggtcaggtgatcaagaccatcctggctaacacggcraaaccccgtctctactaaaaaatagaaaaaattagccaggcgtggtggcaggtgcctgtagtcccaactactcgggaggctgaggcaggagaatggtgtgaagccgggagacggagcttgtagtgagccgagatcgcgccactgcactccagcctgagccacagcgtgagactctgtcttaaaaaaataaaaaaataaaataaaataaaatagaaatcattattgtctaggcttttggagaagcatatgctgtgaaaatgatcacggctgtgctcctaaaagccagtcatgtttctgtaacagttttctgcatggaccctcactttcagaaatgcaaaggtggcctgagagctgggcacctcacttacttgtaggagtatggttttggttcctctaatgtgcctgatgtagaagagagggaagtcggcactcaacgaagaggaacaccattgtcaggattag

SEQ ID NO: 787120 - DNA, 586 bp, Homo sapiens
gggactacaggcgcctgccaccatgcccggctaattttttgtaattttagtagagacggggtttcaccatgttggccagatggtctcgatctcttgacctcgtgatctgcctgcctcggcctctcaaagtgttgggattacaggcgtgagccaccgcgcccagcctgttcctttttattgtgagtagtagtccatggtatggatgtgtcacacagaaatttcattttttttttttttttttttgagatggagcctcgctctgttggcccaggctggagtgcagtggcatgatcttggctcactgcaagctccacctcccrggttcacgccattctcctgcctcagcctcctgagcagctaggactacaggcacttgacaccaagctcagctgattttgtttttgtatttttagtagacacagggtttcaccgtgttagccaggatgttctcgatctcctgacctcgtgatccgcccacctcggcctcccaaagtgctgggattatgcgaccggccagaaatttcatttttatgtaatcaaatttgtaagtcttttatttcatgggtttggtgtttggggtgacaga

SEQ ID NO: 787121 - DNA, 611 bp, Homo sapiens
atcatctcccttagcaaactgtttgctcacagacagcaggggatttgggtctgactcagttgtatgttcacagtgtctagcacataattagctttcaataaatgtctgccacatgctagataaatcaggatagtaacttaaatattttacagacctataagtagtcattaatttcatcataatctgtcaggggatttcctaataaagctatttaattccatcataatagcttgggcttaaagagcctttcagaatgctgtaaggtcagtaactcttactattctccgcttttcctctgttctagttttgtggtttcaagttacacatgcacacatgtatgtgtgtgtctctgtaacttgaaatttcatcctactcctgtacgttgtattaatagacaattcttaaagcactcatgtttgatctcttacaacattaycaaaaaccattggttttgggaacaatcacttattaccttttccccatactaagatgttgccacttgaatctccagtaatggtgtcaccgttttcagagaaagtcacacagaggacaaactttggcttttcttgtttctgtagaatgtagtaaaaaaattatatatatatttaatc

SEQ ID NO: 787122 - DNA, 524 bp, Homo sapiens
agaaggaaaaccagttaccaattctgattttgatgcctctgtttaaccctgcattactaactcctcacagctcaagaaataaagtctttcacgcctcttcatgacatgcaaagtcttatttctccaattctttcttccactaaaactcttcacacaccttcaaattcagttagacattcacagttcccaaaatctgtcaggacctcccttctcgggcccatggaccagctggatgaggttctttgctgctccctaatgtgagccgctgcccacgtgctgctccctcactgctccctctccgaggggctgagattcccacagggcagcgcactgctctctcttcttggctgccacctgcrtggcatccaacattgtgtttgcctctcctgcaaatctaagagttccttgaggacaggaatgtgtgaagttaatttctgtattcccaatgcctgacatagcacttgacaaaaaggaattattcacataaggtttgctgaatgaacctcttttgcctcagcttttat

SEQ ID NO: 787123 - DNA, 703 bp, Homo sapiens
tctcatcttccagtgtaaaatgtggtgttaaaattgtctacccataggtggtgctgtttacatagttcttgaatggctgtggctttcaaatgaaatgcagtcatgggccagacacgggtgtttctgtcaatgatggaccacatagatgtctgtggtcccacaaaattataatactgtatttttatggtatcttttctatgtttagatacaccaatatttaacactgtgttaccactgcctgcagtattccctatagtcatgtgctgtacaggtctgtagcccaggagcagcaggctagaccatcaggctggaccatgaaggtttctgtaaacacacactccatgatgttcacacaatgagaaaacacctaacaatgcatttctcagaatgtgcctgtcattaagtgatgcctgatcgtatacaatatccttccatccattcaacaaatagttattgagcactcatgttcaccaagtgctgtgtaaagtactagagatacaaagaataagaatggcacggcctggkcctccagagcctaagggagggcaagcggtgtgtgcagcatggtgaagggaggagagctacagagtcacagataaagttaacaggcagttacgacaccatctgaaaagcactgctctcagactagagagccaggggaggctcccagaaaaaggggatcctgagttgggtctcgaaggat

SEQ ID NO: 787124 - DNA, 574 bp, Homo sapiens
tctctactaaaaatacaaaaaaattagccgggtgtggtgacgcacacctgtgattccagctactcgggaggctgagacaggagaatcgcttgaaactgggaggtggaggttgcagtgagccgagatcgcaccactgcactccagcctgggygaccagagcaaaactctgtctcaaatgataataataacatatcagtaataatgtatcatactaatataagatgttaattaacaggagaaactatatgtgtgcaggaggtgtataggaactctctgtacaaccttctcaatttttctataaatctaaaactgttctaaaatacaaagtctattaatttaaaaaagaaagaaaagcattcattcatccttggggatggggctggggtctccattttggaaagacacatacatacatacacatccctccagtgattcctacacatattcaagtttgagaaacatctgggatactaagggttacagtggataacgtccttacaaagaaatcacagaaaaaaatacccatccacacatcaccaaacaaatcatgtcttatggcagcagtaaggacaca

SEQ ID NO: 787125 - DNA, 512 bp, Homo sapiens
tttacagccactgaaaaactatttttttttcatgatagttttatctggaagcaatgccatagatgaaaattcgtttcatgtgttttctggtgtgatccgtgcacttttgatgacattattacaggcaggtcatcgtggatgtttttgatgttcagggtgaggaagacatttccttctgccattaggaaaggtaaaagagtttggtactgaatttgatttactataattgctgatcactggacgatgtggcagtttatataaraaacatttcagatgtaaaaccagattgaaagcataatgcacattctagcatcatgtatattatttacaattattagtgacagatgcagagcctgggaatctcggaatcttttatcccccaggtttaatcatactggaggcagtggacatatacatggtttgcataggccaatttactgaagtgtttgacatctagaaattaaacacacacacacacacacacactctctctctctctcctaaagctgtat

SEQ ID NO: 787126 - DNA, 582 bp, Homo sapiens
tatcattatcgttattactagtattttgactctttttgcagaatctttttgcacaccatgcaactcttattctagagagcatgaatccactccccaggccaagttgtgattgctttatctgaatttacctgcagacttgctaggaagtttgtatcttggactctgctgactatgctaaggagatttataggagcctgataaatagtacttatatcacaacagactctttacatttctgccatgctggaatgaaatttcccagccagagccttttctaaggccattttttatgtcaaactgcrgtcagtctggaggtggtgttgaagatggttatgaatgttacagagcgagctaggcaatgaattagcaaagaatttctgtgaaaatgagtataaagggaggggtattggctcatcagtacaagcaggaaatccccaagaagaggctgatttcagtggcaaatttaaatctaaactacaacagacaaaatgtctgttagatgcttactaccttcaataattacacaagtttagtttcccttggtcttgttgtattatcccattcatactgatgttgttatat

SEQ ID NO: 787127 - DNA, 570 bp, Homo sapiens
tagttaattgatctgagaacttgtgatggcaaacatacagattcaaagatacttacaagaaagcaagacttgtcatctacgatctttgctttcttctcttctaaagatggattaatatctagcttatgaattcaaagaaacagataacactttttaatgtgaatcaaagtggttgttttgtatacagtgttttacagtagctcttgagtagatttccacttcttttcttctatagatttgctacaaaattttagcttcgtcatccaatgagacaatgtagtttttgttgtttgttttggtagcaggagaaagcaaggaaaggggaaagagtaccrccgtctttttttgtgttctttttctgttgtttattgttcagttgttgttttgttttagagggagtctgaaactcctctattacccttgtccctgaaaggcacagaaaggtcaggatatccatggttgtagcagaacaggtacattccagaaaggagctgtatatttcattgacccattcttaattcctagtggcaaagaacgaaatgagagaaacactttgaatgtaggttctag

SEQ ID NO: 787128 - DNA, 497 bp, Homo sapiens
cagctttacaaagagccatgggattctttgagattaaaaataacaattgaatattatatatattatgggttgcaaattatggcccatgccgaatctgccctgcggcctctttctgtatggaactcaagctgagaatagtttttatattttgaaattatttaagaaaataatatkttatgatacataaaaattatatgaaatgaattttcagtgtccacaaatgacattttatttgaatacagctgcactgattcatttacatattgtttaagacttttgtgctacaacacaaaaatacttgagtagttatgactgagaccatatcgccagtaaagccttaaatattaattatctggccctttacagagatatttgctgaccttggtctctctctttctctctttccttttcatatatagctatagataggtcggtagatttatgatctattcatctatatatgtgtattatctacctatgatctagctatatctaca

SEQ ID NO: 787129 - DNA, 606 bp, Homo sapiens
tgcttttaggcaaagcactatccagctctcacccgagttcctgacaaggtgctaaaaggcctaacagtctctgttttgatatcaatgctgtcttactatctgatgtcagttataggtcaatctatattttgcctctccccgtaatcctacagctctcgtctctgctgcccaacacggtagccacgagctccatgtggctatttatatttcaatttaattaagaagtcaggttctcaattgcagwagccacacttcgagtacgtatgtggctagtggtttctgcattaggaagcataaatacagaacattttccttaaaactaaagttcctcggacagtgtttttctaggtgatgaaataaacaccatttctcttactggggtttgtcacatgtgaggaccccctgatgctgctcatatcattactctattgaccttgaaccctgagcagggtccttgctacctggccttcccactgtgcttgtggtctttcattaattctctctgtgggactcctctgtcttttaatctttcacagcaccctaggttcccatgattctctctgaaattccctttttattggccacagctgcctcccttgaagacct

SEQ ID NO: 787130 - DNA, 606 bp, Homo sapiens
tgcttttaggcaaagcactatccagctctcacccgagttcctgacaaggtgctaaaaggcctaacagtctctgttttgatatcaatgctgtcttactatctgatgtcagttataggtcaatctatattttgcctctccccgtaatcctacagctctcgtctctgctgcccaacacggtagccacgagctccatgtggctatttatatttcaatttaattaagaagtcaggttctcaattgcagtagccacacttcgagtacgtatgtggctagtggtttctgcattaggaagcataaatacagaacattttccttawaactaaagttcctcggacagtgtttttctaggtgatgaaataaacaccatttctcttactggggtttgtcacatgtgaggaccccctgatgctgctcatatcattactctattgaccttgaaccctgagcagggtccttgctacctggccttcccactgtgcttgtggtctttcattaattctctctgtgggactcctctgtcttttaatctttcacagcaccctaggttcccatgattctctctgaaattccctttttattggccacagctgcctcccttgaagacct

SEQ ID NO: 787131 - DNA, 558 bp, Homo sapiens
aatctgacatcctcaacaagacaccaagatattgttaggaaaccattcacaccccgtcctgctaattgtgtatcctcaaagaggcctctggccacttggtttgcctctttaggatacagagtgaatacgtgcagtgaggttagaggtgagaagagaggtatgaaatcacaaccattatcgagctcaggaagttttttttttttttttaraaagctgagttaataaggtagaaaatgatggggttggtgtgctgtgggcgaggaggaatggatacaactgagcatgttgggaaatcctataaaatagacacttttagggccaagtgtgccctaaaattccagtaatcccagcactttgggaggcctagacgggcagatcacctgacgtcaggagttcgagaccaacctggccaacatggtgaaactccatctctactaaaaatacacacacaaaaatattagccgggtatggtagcaggtacctgtaatcccagctacaagggagacaggattatcgcttaaacccaggagatggaggttgcagtgagccgagatcaca

SEQ ID NO: 787132 - DNA, 558 bp, Homo sapiens
aatctgacatcctcaacaagacaccaagatattgttaggaaaccattcacaccccgtcctgctaattgtgtatcctcaaagaggcctctggccacttggtttgcctctttaggatacagagtgaatacgtgcagtgaggttagaggtgagaagagaggtatgaaatcacaaccattatcgagctcaggaagttttttttttttttttagaaagctgagttaataaggtaraaaatgatggggttggtgtgctgtgggcgaggaggaatggatacaactgagcatgttgggaaatcctataaaatagacacttttagggccaagtgtgccctaaaattccagtaatcccagcactttgggaggcctagacgggcagatcacctgacgtcaggagttcgagaccaacctggccaacatggtgaaactccatctctactaaaaatacacacacaaaaatattagccgggtatggtagcaggtacctgtaatcccagctacaagggagacaggattatcgcttaaacccaggagatggaggttgcagtgagccgagatcaca

SEQ ID NO: 787133 - DNA, 607 bp, Homo sapiens
gtaaaagagaattttgtcgcctgcgggaataccagggaagttaccgtgtctgataataagctcaggagtccttaatgtagcctattttaccaattaatgacatttccttgttcatcatggataacagtcaggttgcagtttgttctgtgaactcagggttgttaaagggcaattgaattttttttttttttttgagacggagtctcgctcttgcccaggctagagtgcaatggcacgatcttggctcactgcaacctctgccttytgggttcaaacaattctcctgcctcagcctcccgagtagctgggattacaggtgcctgccactatgcccagctaattttttttttttttttttttttgtatttttagtagagatggggttttaccatattggccaggctggtcttgaactcctgacttcaggtgatctacccacctcagcctcccaaagtgctgggattacaggcgtgagccaccacgactgggcaattgaattttgaataaaccaaacacgtgtgaaaattatggttgtacataaattcctacacttaagtcagggctcacacattgactgacttattcacgatttgatgagttcaacgat

SEQ ID NO: 787134 - DNA, 564 bp, Homo sapiens
tgtctgacagggaaaaaagaggaattaacacagaaatctatgaaaatgagaaaaagccttatacgtattattcatatatgcttagactcagcatatgcattatagaaagggtactaaaaaactgaataattattcttcctagaatacaaatctagcttccataaagaaaggtaaatgaagacatccttttcactagataccatttttaattattgaatttacattttcaccatatgaatgtatatgcattctatatatgcacttacataygtatgcacgtacttatgtgcatatatctatatatgtagagatgtatacatttgttaaccacagactccctactactagaacattcaaacaaaggagatgtaatcaagtaaaactaaaagaaccataacaaggcagcactggatgacctggaaggctgagggtcactcagctcgccacccctcaccccccagctgggaatcagagagtgatggagctatccctcactccacctcctgctctcttccttctgcagtccagccacctggtcacagagtgaggctctaaactggcccg

SEQ ID NO: 787135 - DNA, 636 bp, Homo sapiens
cttacagatgtctctattagacttaattccttaagaatgtttctaagaaggtcaatgcacgttaaacaggccaaggcattacatttcctaaggatgacacgtcaagtagaagacattagcacaaatgattttatctgataataaacatgtttgcttcacagaaacatagggctctggccttgaaacaatcagggaaaagaccaaagtatcaacattattcatgaggtgactgcacactttcctagaactctggcctcaatgagtagtcagtgtatctagattggtcatcatataccaaaggcagttcctcaactttgcaatttttgagtgcacctggggaggagcagacacctggggatgacaatctccaccaaccaaactcagaagagactagtrttaaaccagtagctcttcatcaatgatcaatttacatatggggaaaaaatactgtttttctcatttgataaatgctcttcaaaatatagtgtaggagaggaaaaaaaattttttcttctacccttttaggatcttagctggggccccataagaaaagccagattaagaagagaaaaacaaacagaaatgtggtaacatgtgtatctcatgtatacatgagagaaagagagtaactcaaag

SEQ ID NO: 787136 - DNA, 636 bp, Homo sapiens
cttacagatgtctctattagacttaattccttaagaatgtttctaagaaggtcaatgcacgttaaacaggccaaggcattacatttcctaaggatgacacgtcaagtagaagacattagcacaaatgattttatctgataataaacatgtttgcttcacagaaacatagggctctggccttgaaacaatcagggaaaagaccaaagtatcaacattattcatgaggtgactgcacactttcctagaactctggcctcaatgagtagtcagtgtatctagattggtcatcatataccaaaggcagttcctcaactttgcaatttttgagtgcacctggggaggagcagacacctggggatgacaatctccaccaaccaaactcagaagagactagtattaaaccagtagctcttcatcaatgatcaatttacmtatggggaaaaaatactgtttttctcatttgataaatgctcttcaaaatatagtgtaggagaggaaaaaaaattttttcttctacccttttaggatcttagctggggccccataagaaaagccagattaagaagagaaaaacaaacagaaatgtggtaacatgtgtatctcatgtatacatgagagaaagagagtaactcaaag

SEQ ID NO: 787137 - DNA, 627 bp, Homo sapiens
gggaaactcaccagtaggcgagatcagtgaccggtgtgcacgcacagagagctgactggaggctgaggagcttcctttgtccggctgctgtggcctgctctccggggtggaggggtaggtccacgggggatgcagacctgagcctctcccgggttttggcaccaaaatgtaaggttcttgtatcygtttgaaccccgagagggagccaacagacaacacgacgcggtgtggagcaacatgctgttttaatgagcgcctgggtgcaggcaggctgaggcctaaaatggcgtcagcaccaaaatgagaacagagcaggggttttatggtctcctgtaaacaggaagtgtcccagtttgacgtgactgctatgtactacatactacagtacccagacggcctctttttcaatcttcaggggtacgtgtcttcccaccagggtaggggtcttccagctggctgtcttcctgcttcggctaccttgctggtgcacgctgctgacacaaatagccttgtgccttgggactgggcctgagaagggaggagttactcatcccttcaagctttcaggcctcagggagaatcttacagtttttatcatggacaggtggaaatctagatgtttctaat

SEQ ID NO: 787138 - DNA, 488 bp, Homo sapiens
gttttgttttgttttgagaagagtcttcctctgtcacccaagctagagtgcagtggctcaatctccgctcactgaaacctccacctcccagattcaagcaattctcctgcctcagcctcccaagtagctaggaggtgcaaccatgtccagctaatttttgtattgtttttagtagagatggggtttcaccatgttggcaggctggtcttatactcctaaccttmggtggttcacccacctcagcctatactttagtatttaaattacaaactacaactgtaattcacagaagagggaggccatatttaatttattttggaattcaattaaaatttataggcataatattttcatgtttgctaaaagacattgctttaacatattggaaaacactaactttgaaaataattaaaatgaatatactatgtatgaaaacttttaggtacaaagtcaaacttgaagcagttctatggtatttttattattag

SEQ ID NO: 787139 - DNA, 572 bp, Homo sapiens
atctataggcagaaagaaaaaacaaccatacaaatcgacaaaatgttttaatcgaataaggaaaatgtagcatttgtgaagatgtaagagggttgggggagagggtggcatgaatatgctgacttccatgtaatttcatgtccccatgaactcttctcaggggtaaagcaaatgttttcattatcagaaacatagtaaataccaacatgttagcagatgaaattacttacacactctatgaagcataattcttgtttatattttgttctacagtataaamagagaaagtctgtcaggaaagaaactaaaaatgaagaaaatatgagtcttgtctaactgagaagcctaccagtatcagggcccaacattcatcatattaaaaattccaattatgaatccctcaattcgaacctatctttttagcatactttttagataattttgtcttactttttggtttgagtggaccatgatcagctatctctaaggccaattctaatatcctgttaaattttttagggagaggttccaagatggccaaataggaacagctccagtctacagctcccagc

SEQ ID NO: 787140 - DNA, 631 bp, Homo sapiens
tgatgaaactgcttcaaataatgtgcaaaacaaccgctagcatcacaatgacaggatcaaattcacctacaacaatgttaaccttaaatgtaaatgggctaaatgccccaattaaaagatacagactggcaaattagataaagagtcaagacccatccgtatgctgtattcaggggacccatctcacctgcaaagacacacatagactcaaaataatgggatggaagaatatttaccaagcaaatggaaattwaaaaaaggcaggggttgcaatcctagtctctagtaaaacagacttgaaaccaacaaggatcaaaacagacaaagaagggcatgacataatggtaaagggatcaatgcaacaagaagagctaactgtcctaagtatatatgcacccaatacaggagcacccagattcataaagcaggtttgtagagacctacaaagagtcttaaactcccacacaatagtagtggaagactttaacaccccactgtcaatattagatcaacgagacagaaaattaacaaggatattcaggacttgaactcagctctggatgaagcggacctaatagccatctacagaactctccaccccaaatcaacagaatatgcattcttctcagca

SEQ ID NO: 787141 - DNA, 631 bp, Homo sapiens
tgatgaaactgcttcaaataatgtgcaaaacaaccgctagcatcacaatgacaggatcaaattcacctacaacaatgttaaccttaaatgtaaatgggctaaatgccccaattaaaagatacagactggcaaattagataaagagtcaagacccatccgtatgctgtattcaggggacccatctcacctgcaaagacacacatagactcaaaataatgggatggaagaatatttaccaagcaaatggaaattaaaaaaaggcaggggttgcaatcctagtctctrgtaaaacagacttgaaaccaacaaggatcaaaacagacaaagaagggcatgacataatggtaaagggatcaatgcaacaagaagagctaactgtcctaagtatatatgcacccaatacaggagcacccagattcataaagcaggtttgtagagacctacaaagagtcttaaactcccacacaatagtagtggaagactttaacaccccactgtcaatattagatcaacgagacagaaaattaacaaggatattcaggacttgaactcagctctggatgaagcggacctaatagccatctacagaactctccaccccaaatcaacagaatatgcattcttctcagca

SEQ ID NO: 787142 - DNA, 582 bp, Homo sapiens
gcaaagtttaaaggactctactctaagtcattgattcatttgaaatgaagtgggaaacttgggaagctatatttattgttactagttttgtattttgtactagttagccagagaaaaataatgcaaaatgttgtatgttgcttgatttttttctgtttcacaaatgactgaaataattctttgtaaacatttttaaaaatattttwaaaaattctaaaaaccagtaaagtctaattagaaaaaatatcaagtaaaaagcagtatttcctcttcttgagctttattaaagcagagattccttaactataaccaactttgtcaaggaaatatttattttaaataaatatattacatcctaaatacagcaaggcaacagatgtatcagagtgaattaaaaagtggcacattcttgggcttctccctggcagttatatttttggctttgccctctgtgagtgatggaataatttctagtctttacagagatttttttttaaagtcacaaaagtcagaaaggttatttcatatgtagtaaggaaattatgtgtatcatcatagagtctagccaggaaacagaaacca

SEQ ID NO: 787143 - DNA, 327 bp, Homo sapiens
aaagcttttgggctgagacaatggggttttctagatataaaatctgcaaacagagacagtttgacttcctttcttcctattctaatatcctttatttctttctcttgcctgattgccctggccagagcttccaatacwatcttgaataggagtggtaagatggggcatccttgtcttgtgccagttttcaaggggaatactaccagcttttgcccattcagtatgatattggcaatgggttttcataaatggctctcattatttttatgtgtgttccatcactacctagtttattgagactttttaatatgaagggatgttgaattt

SEQ ID NO: 787144 - DNA, 327 bp, Homo sapiens
aaagcttttgggctgagacaatggggttttctagatataaaatctgcaaacagagacagtttgacttcctttcttcctattctaatatcctttatttctttctcttgcctgattgccctggccagagcttccaatactatcttgaataggagtggtaagayggggcatccttgtcttgtgccagttttcaaggggaatactaccagcttttgcccattcagtatgatattggcaatgggttttcataaatggctctcattatttttatgtgtgttccatcactacctagtttattgagactttttaatatgaagggatgttgaattt

SEQ ID NO: 787145 - DNA, 629 bp, Homo sapiens
ttttgaaaaagtggttgcttcattgtcttttgttctagaattcctagggcgcatggattggaaactaacagtgatgtaaggagttattatacttgaacttaatggtttaaaagtgtgtagatcaaaaattttgccagtattttatacatctcaaaaattcaggctgggtgcagtggctcacacctgtaatcccagcactttgggatgtcaaggtgagtggattgcctgagctcaggagttcgcgacgagcttgggcaacatgccaaaaccctgtctccaccaaaaaataaaaaaaaattatccaggtgtggtggcacgttcctgtggtcccagctactcaggaagctgaggtggraggtttccttgagcctgggaggtagaggttgcagttagccaagattgtgccattgcactccaacctgggtgacagagtaagacctgatctcacacacacacaaaaatcaatttatgtgtgttttgattgtggacaataaatagtcagaattaaagataaagggtttatatggtgtcctctgaaatgaagctaagaaacagaacgaacagttgaacaaaaatttagaaagaccaaggaattggaacaactcttgtggaaacagattaacaatagc

SEQ ID NO: 787146 - DNA, 593 bp, Homo sapiens
aatctgccattgttattattatcttgtaaatgtgaatatttgcatatcctatgtcccaccaatttcacttttcagcaagggaaacacatatatccggagacattttaaaatgtttgtcatgggtactgctagtaataacatcaaattactaaaagtaatccagatgtctatgaataggaaaatgaataagtaaattacatcttattcacctaatgaactattatatggaaatgaaaaagcaaatgaactgagctgtatgcaacatgtatgratttaagtaaataatgttgagggaaagtaagttatagaagacaatatatggtatggatagccctttttacaaggagcaaaaataagtaaaattaagcattatgttatttaaacatatgtgcttaaattattttaaataccaagggaatgaaaaaacacaaaattcaggatattggatatgtaacaggaaaggcagagggataggaatggggagaaacaggaagatgtaaattactagcaatatgccgattcataggttttcagttcacacagttcattatattattaaataatataaggaaaaatacaaatgagccatgtat

SEQ ID NO: 787147 - DNA, 593 bp, Homo sapiens
aatctgccattgttattattatcttgtaaatgtgaatatttgcatatcctatgtcccaccaatttcacttttcagcaagggaaacacatatatccggagacattttaaaatgtttgtcatgggtactgctagtaataacatcaaattactaaaagtaatccagatgtctatgaataggaaaatgaataagtaaattacatcttattcacctaatgaactattatatggaaatgaaaaagcaaatgaactgagctgtatgcaacatgtatgaatttaagtaaataatgttgagggaaagtaagttatagaagacaatatatggtatggatagccctttttacaaggagcaaaaataagtaaaattaagcattatgttatttaaacatatgtgcttaaattattttaaataccaagggaatgaaaaaacacaaaattcagkatattggatatgtaacaggaaaggcagagggataggaatggggagaaacaggaagatgtaaattactagcaatatgccgattcataggttttcagttcacacagttcattatattattaaataatataaggaaaaatacaaatgagccatgtat

SEQ ID NO: 787148 - DNA, 591 bp, Homo sapiens
tgtatagataaataatttaaaatatttagggaaaaacacaatgagatgtcatttttcattctgatcatgagtaaaaattaaaaataaatttttggtcatatcaagtattggtgaggtttggggaaacagatactctcatacactactggtgggactgtaatctggttcagcaaaactgaagagcacttgggtagtctctattaaagttgtagaaatgtggctagatgcagtggctcatgcctgtgataccagcacttcgggaggccaaggcaggagaatcgcttgagcccgggagtttcagaccagcctgggcaacatggcaaaaacccatctctacaaaaattagccgggcatggtggcwtatgcctgtagtcccagctacttgggaggctgaggtgaaaagatggcttgagctgagaaggcagaggtggcagtgagccaagattgtgccactgcactgcagcctgggtgacagagtgagaccctgtcttaaatatatatatatatatatatatatgatagcatctgactcagcagcttaatttttcagtattttctttaaagataacactgtaacgttagtacaaatag

SEQ ID NO: 787149 - DNA, 591 bp, Homo sapiens
tgtatagataaataatttaaaatatttagggaaaaacacaatgagatgtcatttttcattctgatcatgagtaaaaattaaaaataaatttttggtcatatcaagtattggtgaggtttggggaaacagatactctcatacactactggtgggactgtaatctggttcagcaaaactgaagagcacttgggtagtctctattaaagttgtagaaatgtggctagatgcagtggctcatgcctgtgataccagcacttcgggaggccaaggcaggagaatcgcttgagcccgggagtttcagaccagcctgggcaacatggcaaaaacccatctctacaaaaattagccgggcatggtggcttrtgcctgtagtcccagctacttgggaggctgaggtgaaaagatggcttgagctgagaaggcagaggtggcagtgagccaagattgtgccactgcactgcagcctgggtgacagagtgagaccctgtcttaaatatatatatatatatatatatatgatagcatctgactcagcagcttaatttttcagtattttctttaaagataacactgtaacgttagtacaaatag

SEQ ID NO: 787150 - DNA, 554 bp, Homo sapiens
gttaactgaattaactgaaccaatagaaaacggaagtaatctttttgactttttgcttaaaatgttgctgatactttgttttgtttttcagagttaagaaaacaattcttttaagctatttacagcttttaataattgagtaaagtatacccctgtgaacaaaatttggaacctatttgtttccctctacctgatttctctagaatttggaaactatttgtgactattcttaatttatagcaatatagttatttgcataagtgcagtaagaatctgttttcttttgcaataggacacaattggaggaattggttattttaccaaggctttgactggaatgatgtgcttttctttaaggaagcaaacttgacttatggagccaataaagcccttgggaaactggcctcrtattttgtgtacacagtccctgtacagggtttctgacctgtgcttagtaaagaatgccattttctgacaggcacagaagccccaggtttatcttggatcctcaagaggagaggaaattcacacaactcatagatatttgacggcac

SEQ ID NO: 787151 - DNA, 631 bp, Homo sapiens
atttgccaaaaccaaggggttataggatccatgcaggtccaaaatccagcagggcagtcaaattttaaaactctaaaatgatctcctttgactccaggtcatgctgatgcaagaggtgggttctcatggttttgggcagctccacccctgtggctttgcagggtacagcctccatcctggctgctttcacrggctgatgttgagtgtctgcagcttttccaggcaccaggtgcaagctgtcagtggatttaccattctggggtctggaggacagtggccctcttctcacagctccactaggcagtgccccagtagggactctgtgtgggagctcccaccccacatttcccttctgcactgccctagcagaggttctccataaaggccccacccctgcagaaaacttttgcctgggcatccaggtgtttccatacatctgaaatctaggcagaggttcccaaacctcagttcttgacttctgtgcacccacaggctcaacaccacgtggaagctgtcaaggcttgggacctccaccctctgaagccacaccctgagctgtgcgttggcccctttcagccacagctggagcagctgggacacagggcaccaagtccctaagctacacacagca

SEQ ID NO: 787152 - DNA, 621 bp, Homo sapiens
aaatgggtttttcttttctattgcatagtcaggatagactctctaccaaaaaatttttttttcaatcagccaagtgtggtggtgtgtgcctgtagtcccaactataatactagggaggatgagatgggaggattgcttgagtccaggagttcaagactgcagtgagctatgattgascccctgcactaaagcctgggcaacacagcaagacactatctctaaaaataataataataaaataaatgaatggcaagagagatcaagtataaatgaatgacaaatgggcagatatagtggagatttaaaatatcaacatatgctatgaagaaagacaagtatgaaatagtaggtttggagagtgtgcagccccacattatcaaggccactcattttatgtttccgtctggatccctgcactggcaggggccaagagcagttagtttggtagtcctgggatgcagaattcagaatgacacaggctttctaggtcccatgcaactgcacgaggtgaacggcaagcggctgagtaatacttgggttcaaattaccaagcaagggggcaactaaaattcagaaatactgtacttctattcttactttattattaatgaattgctttcc

SEQ ID NO: 787153 - DNA, 633 bp, Homo sapiens
ggtgaagaaagggccctgcagttgtagtgtcctccagaggggaactctttaggccagcgaaagggccagtgggtcagtccaggtgtcctcggtagaagttgttagttgagctcatttggggttccatttgtaagaccatctatagtttgatggccttggtcctagaggaaacaaatttgacaaggaggttaaaaatacagggcccaaaggtgagtwatagcaagatggctgtcacaggacctagaaaggggagaagtcatgttgcccaactccagaggttggtataagagtttgaaaggcattgtctgatttcagaagccttttcctgtaaacgccaggtagcatctcttactatccctgactggttagtgtaaaaacaacactctttccctgagaaggtgcagagtcctcctttctcagcagtgaggaggtctaggccttggcggttttggagagtcactgctgccaaagagtctatttaggattgtagagtaaagatagatttcattatttcttgcagacttgtctgagaggcagatataggttgaagttccacataagaagaatatgccttggctgggtagacagaaatttaccctgccttttaaaggaatagggtacgctgttttttct

SEQ ID NO: 787154 - DNA, 629 bp, Homo sapiens
gtgttttatacaaagataaatctggcaatgttaggatgtcaacacggactggtgggctgggaaggaggctactagagtagcctatttatgaaaagtggcacaataatcacagtagcagtactgaaagaatggaaagaatgaatgtgaggggaattttagagaatgtatagcatggagggactgtttctaagaaatcagctacctccttgggtcactgggaggatggtggtacctttaacttgagctagaccttaaagcagcctgtcatcctttttcttgtcctttgcactttcccacattccctactgtcctagttccattcatcagcacgttcttctcccacaaaagacgatctggcttcctgcttcacaaaggaaacataagcctgggcttgaaccccctactctctttatgccccacttctatatttaacatacaatgaccycacccttgcctcacatctcagagaaaaagacatcactgtccctctctgtcaataatcctatctgtcctccagaaatttacttgcttctgttaattagctattcatgcagaggaaacattttgaatacataaaaagttacctatactggcagcacctacaaagaggattttctaaagaggtggta

SEQ ID NO: 787155 - DNA, 483 bp, Homo sapiens
ctgaataaattgcctgtcgctggtgtttggtgtaaaaatgattttgtcacctaggtagtgagcatagtaccctatatgtagtttttcaaccatcacccttctcctaccctctcccctcaagtaggccctagtatctattctttccatttttatttccatgtgtactcaatatttagctcccacttataagtgagatcattttcttttcctacatcagtttgcttaggaaaatggtctccagctgtatccgtgttgctgcaaaggacatgatttcattttttaaaatggctgcatagtattctgtggtgtacatgtaccatattttctttatccagtccaccaytgatgggcgtctaggttgattccatgtctttgctattttgaatagtgctgcagtgaacatgcaatgaacatatgagtacatatgtctttttggtagaatgatttatattcctttgtgtatatacccagtaatgggatttc

SEQ ID NO: 787156 - DNA, 425 bp, Homo sapiens
gcagatcttgtaagtttgctctgtggaaatactgtttttccagttgaggcggtctttgggctgctttccccagccttcagtgccatcttgaaatgtaatttgtgatatttctttactcattggtcccagactctatgaatattcctgataagatagctttttttccctccaatcttttttttactacagatttagagtaacacatttcatttattaaatgagacatacttgtttytcatgggtaatttgttactagaggatgctgtaaattgcactaggcaacttaaagacattgctactttttgatgacatgatagagggaaaaatactttggttgagtcatttaaaagagtgttttaaaaagtatgatgacttagtcatcatttgtcattttattcttttaagtgtttggaaagtatccgtat

SEQ ID NO: 787157 - DNA, 544 bp, Homo sapiens
tcttttgattcttattttaacgtatttttttttttagtaagatgctctggtaatcatgtttaccagattgaaataagcacacctggaggcatagctagtgtggtggatgaccaagtcaccatttcacaagattccagtaatctggaaagattaattttaggagtgattaatatgattcttcagttagtagaaattctctcgtatgacacagttggtatgtgtaggtaattttaaaaagttggttcaagtgtgaatcatttaaaaatcattatatatkttttgaacattttttacttaaaatgtataagagtaccacttgtgaatctttggatgtaagcacaggactctgaatgtaggttaataaacagtttattttgcataaaccacggttgaatccatcatctaaaaataacagtttcaggttctttagagtgagaactagccagattttaagtagtctgaatactccccctagccttttatagttgtttcactcacacctaatttttcagcagttcctttctttaaagtgttttgcttttat

SEQ ID NO: 787158 - DNA, 613 bp, Homo sapiens
ttccttcctactcacagcttttttttttaccctgctgttccttagctgcctaacttctccaaaccttcagatgggctgagatgctctcttatgctcttctggtactatttacctcatttctctttaatagtgcttgttccttggacttggtcacctgcctgagtgtcccctctggaccctgagctgcttggggtcagggagtatgtctgttccagtcttgtcagtgctttgcacaatgttggatataagtaagcattcaagatgtttgttcarttaatatactatagcttacatgtagagtctggtgactacgtgaaacctatgaaatagggaaagagaagaaaaatgtcttatggcatcagtggacaccagaattccttatatgaagggaggtacactgggggcattgccttgacatcaagctcacttaaggatagggagtcctgtgaggatggatgttcacagggtctgagaggtcagaagaagtagagcaaacaaggggatgggattgctggtcttattcctaatagggaagaggagagagaaaacaagtcagaaaagtgatgtaaggtcagggataggtgagataaagatccccttccccacggttgga

SEQ ID NO: 787159 - DNA, 502 bp, Homo sapiens
gataactcttttttactaaaaatgtaaccaaggctgggcttggtggctcatgcctgtaatcctagcactttgggaggctgaggtgggaggattgcttgaggccaagagttgaagacgaacctggccaacatagtgagaccccrtcttattaaaaaaaggaactaaaatattattatcatatcatagatgaaaaatttaacaagattttcttaatgtcatcaaatattccattagtgttcaaatttcttgtcttacaaatgttataaatgtttgtaatttatttaaaatcaagatccgcatattatgattggttgacatgccttttaagtctattttaatatatacatttcccccgtatattctatctttctctctctcatcctgcagtttccttcagtctgaagtttgccaattatatccctgtgatgtctttggacatgttcctctatattccttatttcctgtacattggagttggatgtagagggttagtcagattcag

SEQ ID NO: 787160 - DNA, 621 bp, Homo sapiens
caaatttttatcttttctgagtgcatgtaatacaaagtgacatgctttctggatgtttgtgattgttagtactcaagaggcttttccagggagtttatatctcacagacagagagcttttatggtttagtccctgattgcgccaatggatgctcaataaatgtgaatcattgattaagtaattaaaattggattttgggattttagttaaataacttctttgaaatttgctatcatattttgcttgagtctccattaaatcaaaatacctcctctgaataaaaataaaatcaatcaggttttttattgacaactacatgttgtcaataaaccaatttaattcatgttttttccctttagtaagttgttttgattttttttcactcatttcttttgtagaaaatttaaaatgatttctttattcagaggtcagcttttgggggcaacttcaagaatcatgarctgtaagttcagaaacatttccagcaatgaggatggtcttttaaggtgtgaagagtaatgaaaatagttgagaaggccaagactccaaaattattcctgttgtgatagcattaatcagttcactattggtagaaaggggccactctaattgactagtgat

SEQ ID NO: 787161 - DNA, 622 bp, Homo sapiens
atttaggatatggcttaggtacagttagtaaaacatgccaactttgcgttcatttgaaaaggaattgtggtgagagtagcaaaattggaatattcaaggttattgtgattttgagaacattcactaaaggttgggcaaaatgtaatgaagatgatcaattttcatatgtaggttttacgatagtaggmaaatattggactgcccattttaaaggtaaagaaacagatcctacgaagcctttacacatctcatgtgatagctaattagcggcaggtgctgaaatctcttgactcttctttgcagcgctcttttccatcttgccaccaccttttcttcctcctgtcctcattgccccactcctcctcctctttgtggattttggggggaaaatgccagtatattcatactaccttattttctgacaggcatctgcagtcaggtgtaaatctccgtaggaagatacaatcttccttttcaagatgtgctgaagagaaaaactgcgtctgtatcaaaatcagggaagagcaattggtctgggcattagctcccatgcagtgcctgttataatgagacaggctttccctgtgcaggcctgacatcctagaaggtgcccggagaattg

SEQ ID NO: 787162 - DNA, 622 bp, Homo sapiens
atttaggatatggcttaggtacagttagtaaaacatgccaactttgcgttcatttgaaaaggaattgtggtgagagtagcaaaattggaatattcaaggttattgtgattttgagaacattcactaaaggttgggcaaaatgtaatgaagatgatcaattttcatatgtaggttttacgatagtaggaaaatattggactgcccattttaaaggtaaagaaacagatcctacgaagcctttacacatctcatgtgatagctaattagcggcaggtgctgaaatctcttgactcttctttgcagcgctsttttccatcttgccaccaccttttcttcctcctgtcctcattgccccactcctcctcctctttgtggattttggggggaaaatgccagtatattcatactaccttattttctgacaggcatctgcagtcaggtgtaaatctccgtaggaagatacaatcttccttttcaagatgtgctgaagagaaaaactgcgtctgtatcaaaatcagggaagagcaattggtctgggcattagctcccatgcagtgcctgttataatgagacaggctttccctgtgcaggcctgacatcctagaaggtgcccggagaattg

SEQ ID NO: 787163 - DNA, 613 bp, Homo sapiens
gcaagttgcttagcctctctaggctgcagtctcttcatctgtaaaatgggaataataggaataactacctaaattattttggtaaagattaaatacattaacaaatataaaacatctagaaaagtattggcatatattaaatactacaaaaattagttgatagtgttattaccactataattacattcagccagtgagatacagtgttcctgggcctcatctgtgagctgtcaagtttgacagtatatgattcaatgattaccacagaggttcttgrgacacccaaggtgactcccatcagcacccatgtcttggaggcagacaagcagctgggctttggaagaattaaataagtatgttttgaatacattcttgtgcatggcaccggctgggtgttatggaggacatgtgcaagatgtagtgccccttccttaagaagtgtgtaatctcaccagggagatgagctctccttccacaaactcattagacaacaatgcaaacagtacagtggtcccaacttataaacaggtgatgttccaaaacttgccttgtagttggttgtttgatgcttggaaacaatttttccatagaaataaagctataaattttgaga

SEQ ID NO: 787164 - DNA, 594 bp, Homo sapiens
aaagaccccggcctttaggaactcctgtttatatgctgagtctgggtgatgaaagactaaagcttctccagtactcctaagacagcaacaattgggatgtatgttacctgtgactcaagagaagaaagtgtcccatccatccccccaaaaggaaaaaaagttccacaaccttttgatgggagttattatatatgtgagagctaagggtaactagaaatcttgaggcaaattctgagaaaattttcttcctttgctatactcctcccttcactctcactgtactttttacctaaacataagtatgctatctgtattccccatttaatctttgatgtgtaagtgttccagtctaaaaccagrtagattagtccctctgctgctcctctgtaaattgcaacttgagatgttagagcaaaacaaatgaaaccttttactgaacacgaactccatgtatttagcccattagtgcaggactgtcccagagacccagcctaccctatgttctttgacagggctgtagagagatgtcagaaacatgaagagctccctctccctaagcaaaggagtatcaaagactgagctcttcttacaaga

SEQ ID NO: 787165 - DNA, 617 bp, Homo sapiens
ctaagtattcgggtttatttgtaggttctctgttgttttccgttcgtctgtgtgccttttgttatgccattactatgccgttttggtgactacggccttatagtttagtttgaagtcagataatgtgatgcctccagatttgttctttttatttagacttgctttggatatgtgggcttttttttttttccatgtgaattttaggattgttttttctagttctgtgaagaatgttggtggtactttgatgagaattgcactgaatttgtagattgcttttggcagtatggtcattttcacaatattgattctacccatccatgagcatgggatgtgtttcyatttgtttatgttgtctatgatttctttccgcaatgtttgtagttttccttgtagaggtctttcatctccttggttaggtatattcctaagttttcattttgatggttttttttgtttgttttgtttttgcacctattgtaaaaggggttgagttctttatttgagagctactgatttgtgtacattaattttgtatccagaaacttgccgatttatttaatcagttctaggagctttctagaggagtctttagagttttctaggtgaacgatcat

SEQ ID NO: 787166 - DNA, 617 bp, Homo sapiens
ctaagtattcgggtttatttgtaggttctctgttgttttccgttcgtctgtgtgccttttgttatgccattactatgccgttttggtgactacggccttatagtttagtttgaagtcagataatgtgatgcctccagatttgttctttttatttagacttgctttggatatgtgggcttttttttttttccatgtgaattttaggattgttttttctagttctgtgaagaatgttggtggtactttgatgagaattgcactgaatttgtagattgcttttggcagtatggtcattttcacaatattgattctacccatccatgagcatgggatgtgtttccatttgtttatgttgtctatgatttctttccrcaatgtttgtagttttccttgtagaggtctttcatctccttggttaggtatattcctaagttttcattttgatggttttttttgtttgttttgtttttgcacctattgtaaaaggggttgagttctttatttgagagctactgatttgtgtacattaattttgtatccagaaacttgccgatttatttaatcagttctaggagctttctagaggagtctttagagttttctaggtgaacgatcat

SEQ ID NO: 787167 - DNA, 568 bp, Homo sapiens
aaccctgtataaggaacacctaatatactcattcagggagaagaaaaggtgtaaggctttctctgggcactctgtgtcataatataccagaagaaatctaacttttggttcatttagcatcacatcacatgaggtgcagaagttatttatttataagcttaaggatttgtcttgagagcagtgagtcaaaagactaaatttcgaggcgggcagatcacttgaggtcaggagttcaagaccagcctggccaacatggtgaaaccccatctctactaaaaatacaaaaattacccgggcatggtggtgggcacctgtaatcccagccacttgggaggctgaggcaggaaaattgtttgaacctgggaggtggaggttgcggtgagcggagatcgtgccactgtactccagcctggcaacagagygagactccctctcaaaaaaaaaaaaaaaaaaaaaaaaaagactaaattttgggtggaagaaactaaatgataggtagggagaggaactgaattaagctgatgctaaactggaaacaaaaatagtttaaaaacaaatcagctattta

SEQ ID NO: 787168 - DNA, 423 bp, Homo sapiens
tttattgctccctcattcatcagtcattttgtatctcacataactttatattgacagtttcttctgttcagagttagtcttgtaacagatattttaattatgtagaaaataacctgcttcaaaattttcacaaattgaaggttgtgtaaagggttgaagagatgatgtttcctcatcataaccttgtgccataccttgtaagcaagtactgtaacttgtatttaatgatgaaccaagagttttcaagaaagaactaaaatccatcatawcttttctactgatattttccataacatccaagggaaagaaagcatgggccaagtacttgggtctatgagagaggtttttcagctgtttacaaatgacactgctgtcaatgtagcatgtcatagcagctgtggaaaaagggaggttaggtgaagt

SEQ ID NO: 787169 - DNA, 622 bp, Homo sapiens
aaaccaccctgactcagggctcccccagcagattcacagcaatttgatgagtgaatcatgcagctttaccttatgggtttataaactctaattgataccaataacccctcctcgcaaagcaaattaaaaaccatgtgtgagaagactgaacttaactctccctcctaaaattatggagcactcctaactagtcctcaaactttatttactcgtgggcctataaaccaaccttcacccagtagtttgaaagctcagtctttctctggcttgacagagaaaggtttggggttggggaaatgtgtggaaggccctgtggctcaggagtgaattagctcattaccaccaactctaccaaggaccagggcttgggccaggcagctggttcaggaacggactgacctccaaaacatcttcttggtaggkcatgactctcagttttaaacactgtctgcatgtttctgaatggatgcagaaagggcatgaaagctgtattttgcaaactcatgcactcaagaaacatgcattaagcacctcctgtgtgccctgtttcaggtgtggggaacagacatgaacaggacacagatagtgggaaatccaggttcctaaggtccttgttttcacc

SEQ ID NO: 787170 - DNA, 582 bp, Homo sapiens
gaaccagaatcactgggtatataattaccttaaattgttttcattaatcttagatgtatgtatagataacatttatttcaatgtttagtgttagaagtgtttggggtctttatttagcgatttagtggtgttttcgtgaccagaaatatgccctaggaacttaactgctgtttttattaattcacctgtagtgaaattggttttgtgttaccttgttttgcttaaagtcacagtttccaaatacctatagacaatgttaagtgaggacttcctgtaagtagtttagattgaggagcttccacacactgacaaactcgtttagtggctactgtgttaggcaccacgaaagagacaccagatgtagcggagagcaaggaagatgaggcttgtcccctgcctggatggttttaatgagaaactgtgctcagggcaactkcatggacatcatgtgacttgtgcagtcacacagagcctcacactcagatggtccctgagcctgactttcatgctctgtgaacatcatcttgaaattcttaataatttttaaagagggagccctcatttttatctttcacagggcct

SEQ ID NO: 787171 - DNA, 564 bp, Homo sapiens
tgcagagttgctagcttgtgaaaagtcctaagtcatttttcttgtgctgcattccatattttctctttgtttttggctcttagcatttttgccatgacacatctagttatggatctctttgcatatatacttcttggagtttgttgaatttcttgaatgtgtagatccatgttttcagcacatttgagaagttttcagccattatatcttcaaatatttttttcttcytcttttcctctcttcttctgctactcccattacacatgctggtgtacctagtgaatccagcatttgtctgtggctctgcttattttcattcattcttttttttccagattatatgatctgtattgatctgtcttcaaactctgattcttgagttcaaatttagtgtcaaaacattagtaaatttttcatttgggctattacattttcacctccatgatttccatatggttctttttttatctctgtgttggtatttctctatttgatgagacattgtcaccagaccttcctgtacttctttaaacatgttttcctctagtaaattgaacaattgat

SEQ ID NO: 787172 - DNA, 564 bp, Homo sapiens
tgcagagttgctagcttgtgaaaagtcctaagtcatttttcttgtgctgcattccatattttctctttgtttttggctcttagcatttttgccatgacacatctagttatggatctctttgcatatatacttcttggagtttgttgaatttcttgaatgtgtagatccatgttttcagcacatttgagaagttttcagccattatatcttcaaatatttttttcttcttcttttcctctcttcttctgctactcccattacacatgctggtgtacytagtgaatccagcatttgtctgtggctctgcttattttcattcattcttttttttccagattatatgatctgtattgatctgtcttcaaactctgattcttgagttcaaatttagtgtcaaaacattagtaaatttttcatttgggctattacattttcacctccatgatttccatatggttctttttttatctctgtgttggtatttctctatttgatgagacattgtcaccagaccttcctgtacttctttaaacatgttttcctctagtaaattgaacaattgat

SEQ ID NO: 787173 - DNA, 564 bp, Homo sapiens
tgcagagttgctagcttgtgaaaagtcctaagtcatttttcttgtgctgcattccatattttctctttgtttttggctcttagcatttttgccatgacacatctagttatggatctctttgcatatatacttcttggagtttgttgaatttcttgaatgtgtagatccatgttttcagcacatttgagaagttttcagccattatatcttcaaatatttttttcttcttcttttcctctcttcttctgctactcccattacacatgctggtgtacctagtgaatccagcatttgtctgtggctctgcttattttcattcattcttttttttccagattatatgatctgtattgatctgtcttcaaactctgattcttkagttcaaatttagtgtcaaaacattagtaaatttttcatttgggctattacattttcacctccatgatttccatatggttctttttttatctctgtgttggtatttctctatttgatgagacattgtcaccagaccttcctgtacttctttaaacatgttttcctctagtaaattgaacaattgat

SEQ ID NO: 787174 - DNA, 659 bp, Homo sapiens
tcaaattatcgtggtttgcagatactgcattttttacaaattgaaggtgtgtggcaacactccaagagcaagtctcttggtgccatcttttccaacagcatttgctcactttgtgtctctgtatcacatttggcaattatcacaatatttcaaactatttcattactatgatatgtattatggtgatctgtgatcagtgatctttgatgttactaattgtcattgttttggagcaccacaaaccacacctatatcagacagtggacttaataaatgtgataaatggctggctccactgactggctattccctgtccctttcccttctcctcaggcctccctattctgagacaggacaatattgaaattagkccaattaataactctacaatgacctctaggtgttcaagtgaaaggaaaagtcatacctatctcactttaaagcaaaagctagaaatgattaagcttagtgaggaaggcacgtgaaaagccaagataggctgaaagctaagcctcttgcaccagttgcccaagtcatgaatgcaaaagttcttgaaggaaattaaaagtgctactccaataaacacatgaatgataagaaagacaaacaagcttattgctgatatgaagaaaattttagcagtctggataaaagatcaa

SEQ ID NO: 787175 - DNA, 549 bp, Homo sapiens
ttttaaaaagcagaactggaaacagaacaagtctggctaaagttaaaggaaaggaaacagaaagctccagccatagaacgaaagacaggctttctgtccacaagcggggaaagggctgcccatacaaacatatatgccaggcctggaaaattaagtctaatgttgccckgcatggggtcttgaaggatgtgaaagttccaacccattcttcccaccactcaactcttcctctccagtggagttgaccacaatgccactggcataatcataattccactgcaggtggctccacggtttcacagccttcaaagtgctcttatatgtagtatgtcaggcagcataatgtcctggaagggccaaagactcggatgctacaggacctcagctaaatgctggattttaccactgactatagatgactgtgggcaaatagctgactctccctggacctcagttgctaaacctataaaatgaaagtgttatccccattttacagatgattaaactgaggtctggagaagtaaggtgacttgcataaggccacacaat

SEQ ID NO: 787176 - DNA, 554 bp, Homo sapiens
gaaccctcctaggtgcctatagaagacaactcctgtaattctctttaataaaaattgtgagagaaagccaggcatggtggctcacgcctgtaatcccagcactttgggaacctgaggtgggcggatcaagaggtcaagagatcgagaccatcctggccaacatggtgaaaccccttctttactaaaaatacaaaaaattagtctggcatgatggtgcccgcctgtaatccaagttactcaggaggctgaggcagaagaattgcttgaatctgggaggcagaggttgcagtcagccgggatcgcaccattgcactccagcctggtgacagagtgagacttaatctcaaaaaaaaaaaaaaaaaaaaacaaactgtgagataagtaatmctactcctatcgcattagatatgaaacagacacagaaaggtttggtaaatttccaaagacccagtctgagtcaagtgatcaccatctacctgttcacacctgtggttaatagttgtaagcatggtgtagaagatgaggacatcttgcaaatgagctttgtaaatgtt

SEQ ID NO: 787177 - DNA, 640 bp, Homo sapiens
gtggatccaccattctggggtctggaggacagtggccctctttgcacagctccaccaggcagtgccccagtggggactgtgtgtgggggctccaaacccacatttaccttctgtactgctctggcagagcttctccctgaggacccccctctgcagcaaatttaagcctggacatccaggcatttccatataccctctgaaatctaggcagaggtccccaaactttaattcttgtcttctgtgcatttgcagacttaacaccatgtggaagctgccaaggcttggggcttgcatactctgaagcaacagcccaagctgtaccttggcccatttttgccaaagctggagtggctgggatgcagggcaccaagtacctaggctgcacagagcaggggagacctgggcctggcccatgaaaccattttttccttctaggcctctgggtctgtgatgggaggggctgccgtgaagacctctgacatgccctggagacrttttccccattgtcttggcaattaacatttggctccctgttatttatgcaggtttctgctggtggctagaatttctccccagaaaatgggtttttcttttctacagtgtcatcaggctgcaaattttccaaacttttacgctctgc

SEQ ID NO: 787178 - DNA, 592 bp, Homo sapiens
tttcaaatcagcatttataaagtacttcactctttccagtcattaatacataaatgagcagataagttcaggatatttcagatccaacaggggcatgaattgtgtgtatacctgatttaaaaaaaaacaacaaaaacaatggggacagttttgaaagtgccatccttcctaagataattgttgtagaagaaaaaagaaagtgccatccactagccaaagtgaagcatgtgctagtttttctatgttagatttagtggtaaatgtaaaaaaaaaatctatttacttcagtcaaatgcctaatcaagaatagttcaccatttaatatgctttgtaacactgaaggaacctcaaaatcacccagtgtctttggtycagaaggtcactgagcttgccaaattctttttattcactgaataagagtgtttttgaaagcaagcattacactgtgtgtgaagaggcagaagtcatacatgattgaataatttggcagaagagatttcttgtatttttcacctctatgatctttgaaacaattgctgcgcttgtatttggagagtggttgtggcctacaaattttgttaagtacatgctg

SEQ ID NO: 787179 - DNA, 506 bp, Homo sapiens
ttttgccaaatgaatgaaacctaagacctcacctcctcccttctcatccctattatttgagcttatacatattatttatactatttataaacataaacatgagcctatcagttcataatccagtgacatctctaaggataactagctgctgtatcttaagtcacttatttttattgtttttttagaaacagggtctcactctgttgtccagactggagcacagtggcacagtcataacttactgcagcctcaaactcctgggctccagagattccctgcctcagtctcctgagtcccgggactacaggtgcatgccatcatgcccagctaatttttttttattattattttttagagacagggtctcactrtgttgcccaggctgctctcttaactcctggcctcaagtggtcctcctgccttggcctcctgaagtgctgggattacaggcatgaagcaccacacccagcctacgtcatttttctttctttcttttttttcttttt

SEQ ID NO: 787180 - DNA, 633 bp, Homo sapiens
cacatgaaaatgcttaggcaaccgcctcgaaaacattggtcaaaacattctaagtgttataagggatgcttggcaaggcctcacgcttagtcttaaaaagccttctcaaaagtaatttataccaatgagccgtggcaaattcacctattctataagtaygcagtgactcaacaagccttttgatccatttatagaatggcaacaattatattttaatgagttattttcacttacttgtcagaacctgttttggtaatctaaataacttcacatcctcttaacattccttatgaggctgtctgagagaaaaacaggctcagttttcttttaagtctccaatctcagctaagtgacaaatgaagctgctatagcgaccacactcctgctggcttatggccaaactcacgttttctttttttcttttccaacatcataaatctatttttttcacagatgaaataactttctggtcccatttcttctttcatgctagtatagcacattttaaaacactttccccccaaaaaaagtctttacagtatgattcgattaataactgggtttttaggaaaactattttcaatataaaggccagaatctctagatttcttttactgcatatcaaaggtggaa

SEQ ID NO: 787181 - DNA, 610 bp, Homo sapiens
gatcttcagtttgatttgccccttggttgatctgtttttcccatcgctgaactggttcccataatcacacacctttgcttttcatttccacagatcaaggaatcaacatttaccgaaagccacccatctacaaacagcatggtaaaacccgctttcctccgcgtagcttttaaatagcaaagtcagctgaacttctccttgctgtcctctgaaaggcttttcctgctgctgcttttgagagtaaaactggggcatccagcatattatgcctttctggyctactaagatgtaaatattgtaaaattgattctcctggatggagagacttagcttgattagaaagcttctaacctgttgctgagcccatcaaaccatgtatcattctgttcctagagaaggggaagtactggtcacacagcaactcacaaacatcctagcaagtcttttttctttttgccatcaaatatagtcaccctttaaaataattttgatgagactaatttaaactggtgaaaaaccagccacctagaaaaactaatttgactgagcctacatcaacttggctgtccaggtctccagtttcttattgggcatgaagatgtgtgcacag

SEQ ID NO: 787182 - DNA, 582 bp, Homo sapiens
tatcaatgaagtcaactttagctccatcacagaaagttgtaaacagctggggacctggcagagaaaatgggctgtgtggcaaggtctcccttcacccgttggcgattgaagaatggctcaccagtacctttaagattccagaaaactccaaagcaatgcagttctcaagtcacagatatkttatcttttaagtacttttggctacacagcagctcattttccaccacttaaaattcagtacccttagttattagataaactgtcttccttgcagggacattcagtactctgtgctgcagaaataaatcctggttttgttgtagaggaaagtaaaatctatagcaggaaagtcatttttgttatctatattgagaatgagctccatcttttccttttgcctgaattacaggtaaaagaaaatgatgaaaatagaattacctaagaaaaacgtattctggttccactcacttggaagttttctatgaatagcaaattttgtctacaggtaaaactcagtactgagcatgtgtaattcattatacacaaagcacatggtattcccaggaccaagtctgtaataat

SEQ ID NO: 787183 - DNA, 582 bp, Homo sapiens
tatcaatgaagtcaactttagctccatcacagaaagttgtaaacagctggggacctggcagagaaaatgggctgtgtggcaaggtctcccttcacccgttggcgattgaagaatggctcaccagtacctttaagattccagaaaactccaaagcaatgcagttctcaagtcacagatatgttatcttttaagtacttttggctacacagcagctcattttccaccacttaaaattcagtacccttagttattagataaactgtcttccttgcagggacattcagtactctgtgctgcagaaataaatcctggttttgttgtagaggaaagtaaaatctatagcaggaaagtcatttttgttatctatattgagaatgagctccrtcttttccttttgcctgaattacaggtaaaagaaaatgatgaaaatagaattacctaagaaaaacgtattctggttccactcacttggaagttttctatgaatagcaaattttgtctacaggtaaaactcagtactgagcatgtgtaattcattatacacaaagcacatggtattcccaggaccaagtctgtaataat

SEQ ID NO: 787184 - DNA, 619 bp, Homo sapiens
aaaatgttccataaatctctgtgtttcttcagtattttactttattccagatgcaagattgaaattctacatttatatttaataatttaaaacaattataaaaagttatgggtatttcagattacattccaaaatatgtaatgatagtatttcacttgcctcaaatcacttatggaacactatgagaaatttgtccattaactcctcagatacttttttgaatgtttattttatgccaggcactgttcctggcactagggatacatcagtgagcaaaacagagccaaacgagattcttgcccctatgacgcttatattttagtgggaggaaacagacaagaagccacacataaataaatgaggaaatgacatagcatttctaaaagtgataattgagatggaaaaaaatcagaacaragtgagagaaatcaggtgtatcagggtgagagttgcaatattaaaagggtagtgaaggtcttgttgagatgttgcttaagcaaggacatgaagatgcaggaattagccatgtagctatccagggagagggactagtgagagaaaaggctctaaagtgggagcaaggttgactgtgagtgaaacagcaaggaggtatggtggc

SEQ ID NO: 787185 - DNA, 596 bp, Homo sapiens
aggatccttgtgaaagtaataagctcattatagaaactctggaattggaatctaaacaatttcagggaggagaaattgtttagataattgtggataaacatctaaatgtgttcaaagtaattgctaaaactattgagatttgttcatcttcattgtttaccttctgtcacattgcatgtatatagcctgtaaggaagaatgtttaaaaatgaggtgatgtartaaagccgaaaatgtagaaagaaagaaatagtgtaaatactaccctagctttaattagagaatggatgggagacaggaagccaggtaggagaatatccattcccaacacactttgttattctttgctcttcggttattgcattcatactgttgtgcactggtgtctactaaggccctcattaaaaggtgatgctcgaatgttggcctgcagtaccgcacacattcctacaaagaatgagcctcagacatcacattctcctaaaatacttccccaaataggcagattgaaagaggtattttctgaatgaggcctttgtgaatcaagagaggtttgattatattaaaattaattgtgaatgtttgcataagatcgt

SEQ ID NO: 787186 - DNA, 596 bp, Homo sapiens
aggatccttgtgaaagtaataagctcattatagaaactctggaattggaatctaaacaatttcagggaggagaaattgtttagataattgtggataaacatctaaatgtgttcaaagtaattgctaaaactattgagatttgttcatcttcattgtttaccttctgtcacattgcatgtatatagcctgtaaggaagaatgtttaaaaatgaggtgatgtaataaagccgaaaatgtagaaagaaagaaatagtgtaaatactaccctagctttaattagagaatggatgggagacaggaagccaggtaggagaatatccattcccaacacactttgytattctttgctcttcggttattgcattcatactgttgtgcactggtgtctactaaggccctcattaaaaggtgatgctcgaatgttggcctgcagtaccgcacacattcctacaaagaatgagcctcagacatcacattctcctaaaatacttccccaaataggcagattgaaagaggtattttctgaatgaggcctttgtgaatcaagagaggtttgattatattaaaattaattgtgaatgtttgcataagatcgt

SEQ ID NO: 787187 - DNA, 596 bp, Homo sapiens
aggatccttgtgaaagtaataagctcattatagaaactctggaattggaatctaaacaatttcagggaggagaaattgtttagataattgtggataaacatctaaatgtgttcaaagtaattgctaaaactattgagatttgttcatcttcattgtttaccttctgtcacattgcatgtatatagcctgtaaggaagaatgtttaaaaatgaggtgatgtaataaagccgaaaatgtagaaagaaagaaatagtgtaaatactaccctagctttaattagagaatggatgggagacaggaagccaggtaggagaatatccattcccaacacactttgttattctttgctcttcggtyattgcattcatactgttgtgcactggtgtctactaaggccctcattaaaaggtgatgctcgaatgttggcctgcagtaccgcacacattcctacaaagaatgagcctcagacatcacattctcctaaaatacttccccaaataggcagattgaaagaggtattttctgaatgaggcctttgtgaatcaagagaggtttgattatattaaaattaattgtgaatgtttgcataagatcgt

SEQ ID NO: 787188 - DNA, 677 bp, Homo sapiens
tagttggagatgagaaaacaaaaaatgaactcttggattctgtacattaagagtctggggacatgaggcaaaactagcaaagaaaactgagaaggaaaagccagtaagttaggagataaagggagagattatgctatcctggaagccaagtgagaaagtgtatcaaggccaaagtgctgatggtctgtgaagatgaaatagaatggacaaccgaatttacctaggtggagatcattattgtccttaataggaaaatgagtcacagcaaatacaccattggagtgtgttaaaaagagaaagggtgggtgtgcatggtggtttgttcatacctgtaatctccgcactttgggaggacaaggcaggtggatcacttgaggccaagagttcaagaccagcctggccaatatggtgaaatcctgtctctattaaaatgatagatagayagatgatagatgatagacagatagatagatagatagatagatagatagatagatagagaaagggtagagagaaaagtgaaggcaacatctttttattgatcttgcttttgcctttgcctcctgaagacttcctggcgacagaagttctagcgatccaattaaaatgtaaatcaggtgttgttactgtctactataaactcttcagggctttcccatctttttcagggtataagc

SEQ ID NO: 787189 - DNA, 604 bp, Homo sapiens
gacaatgagcaggggccagatcagacctgtgactgcagcagaaaccagcatggattcagaagctaacttgtggccataaggctcacttctccaccatgttgagatggctcaaacccctcagtccttctatagattcagacaaaaactagagaaaagcaaggatgggagtgttggaaagattgtctttccccacaaagagtaagaaaaagtatacaaaatagaagatactatttcccctttgttacacagsttaaatcaggttttttttctactcttcaatttaagttggtagaggcaacttttattacactttgaatcataataaatttttaaacatgcaaaataaattcctaattagagttgagtactaaccttcttatttgatctgaaaaatgttaatataaatgggtaaataaaatgatagaggttccaatttgcaaggaataaggtgaagaaattccactagtactttcaattagtcagctagagaatatttctgaagaaatacttgaattctggagtaaaaaccttatgtctgtaatagtaaattttaggatatttattgctatattaataaaaatatctattatacatattctttaat

SEQ ID NO: 787190 - DNA, 621 bp, Homo sapiens
tttcctttgtattcatgcacgtggtatatgtccctttattaaacacaaagaacattcaaataattaaaataatggcccgtaatcctactcctcagaaattaccaatggtaatatgttgttgaatactctcccagatcttgatacaggtatcctttctaatcaaggcactggcagacttggtgttgtgtgagggccctttgtctttctttgtttctttctttctttctttcttttatttattaatttttttgagacagtgtcgctctattgcccaggctggagtgcagtggcacaatctcagctcactgcaacctctgtctcctgggttcaagtgattctcgtgcctcggcctcttgagtagctgggattacaggtgcctgccaccatgcccggctaatttttgtatttttagtaragacggggtttcaccatgttggccaggctggtctcaaactcctgacctcaagtgatctgcccacctcggcctcccaaagtgctggggttacaggcatgagccactgtgcctgggaggggccttttctcggagatggaggcttctagctgtgtcttcacatggaggaagggctatacatgcttttttaaaaaccaaaatgaggatta

SEQ ID NO: 787191 - DNA, 618 bp, Homo sapiens
tacaaatacagattttctaaagcgattggtctagaaaaagagagatcagggtatggaattaggaacaagcctgtccaaagttgattccagctgagggaaacattaaggctgtcttggtcagtggacgcaaaaagcactaactacccttttgagaaaattgtccagaaatgggaggaaagagagtaacttaagggaaatgtgtgctggggaactrtatgctctttgtgtgttaagtttaaagaaggtagaataggtaggtagtcagagagagaaagagaagtgttaaagaaattggccaattttagctacattttacttaactttaccaaattggccaatttcacctgatagcaataggtaacattaataaggaaaatctcctaagaaggcagaaggcatgggaatcagaggatttatagaggaaacagccatgataagagatgagacagctcattaactacacccagatgtgcatgcacatgggttggtacattcattagcaggaattagaagtggtgactgaagcctggcgcagtcgctcatgcctgcaatcccagctcttacggaggcagaggcaggaggatagcttgagcccaggagttcaagacctgcctgggc

SEQ ID NO: 787192 - DNA, 618 bp, Homo sapiens
tacaaatacagattttctaaagcgattggtctagaaaaagagagatcagggtatggaattaggaacaagcctgtccaaagttgattccagctgagggaaacattaaggctgtcttggtcagtggacgcaaaaagcactaactacccttttgagaaaattgtccagaaatgggaggaaagagagtaacttaagggaaatgtgtgctggggaactatatgctctttgtgtgttaagtttaaagaaggtagaataggtaggtagtcagagagagaaagagaagtgttaaagaaattggccaattttarctacattttacttaactttaccaaattggccaatttcacctgatagcaataggtaacattaataaggaaaatctcctaagaaggcagaaggcatgggaatcagaggatttatagaggaaacagccatgataagagatgagacagctcattaactacacccagatgtgcatgcacatgggttggtacattcattagcaggaattagaagtggtgactgaagcctggcgcagtcgctcatgcctgcaatcccagctcttacggaggcagaggcaggaggatagcttgagcccaggagttcaagacctgcctgggc

SEQ ID NO: 787193 - DNA, 532 bp, Homo sapiens
agaccatgggatatctgaggaactgaggtagaaattagtaagcttgtaggttgaggctgaaggaagaaaaaaaaggcagggttaataccaacatttctggctttgaatctctaaacagatagaatttactgagatggggaaacttgggagtgggtacagatgagtttgtagggaaaaaaaaatcaagagttccattgtactatgataatttccagacatctatgcattgcacaaatggagacatcagttaggttrtaggatatatgaatctagaacctagaaaaaaggcctgaaatagaaacatacatttgggagttatcaggatacatgtgctatgcaaatatccaggaagtgatttaaagggaatgcagagcccaagaggagattgggattaaaactgggtccaataaaattttcacaaactatgcaagagcataaatgatgaagggttaagggaagaaagagaagaattccaactagggagacttagaaaggacttaaaaggtaaatcttaaaaaaaaaaaaaacagca

SEQ ID NO: 787194 - DNA, 532 bp, Homo sapiens
agaccatgggatatctgaggaactgaggtagaaattagtaagcttgtaggttgaggctgaaggaagaaaaaaaaggcagggttaataccaacatttctggctttgaatctctaaacagatagaatttactgagatggggaaacttgggagtgggtacagatgagtttgtagggaaaaaaaaatcaagagttccattgtactatgataatttccagacatctatgcattgcacaaatggagacatcagttaggttgtaggatatatgaatctagaacctagaaaaaaggcctgaaatasaaacatacatttgggagttatcaggatacatgtgctatgcaaatatccaggaagtgatttaaagggaatgcagagcccaagaggagattgggattaaaactgggtccaataaaattttcacaaactatgcaagagcataaatgatgaagggttaagggaagaaagagaagaattccaactagggagacttagaaaggacttaaaaggtaaatcttaaaaaaaaaaaaaacagca

SEQ ID NO: 787195 - DNA, 553 bp, Homo sapiens
cccaccctttggctgcctaaattaagactcccggggttcccacactctttttcccaatggcagtggagggtcttgggaaaactgtctggagggaatgccccgagtcctcctcccagtatctgttcaggcttggcacccttaggacctccccttctggaagattcagcagtgcatgtgtatgcttggagagggagggtggataaatgtggcatgaatctatttggaaggttttatacatcttgaagtctcaactttaggtgtttcaggggggtattaagcacaccagggcttaaatcatagaatatttcaaaatagccacctttttccargcacctatatacctatatgttccagcactggtcaaatgacagatgactatcgttacaaccgtccaagataggtgctatcatacctactttatggtgggagtctatgaggaacctgaagctctgagaggccaagtcattaatccagtaagtatctggtcctagattcaaacatctctatcctccttcttggtgccaggtgtcccatgtgaaggtttgggtcagag

SEQ ID NO: 787196 - DNA, 616 bp, Homo sapiens
tatcagattgttctctggctgtataaatggctggtgcctagtgctccttaatccaagacatctgtagattttcaaagaatttcactgtgaatcttcattctcaagtgtgtagctatgtctccatcgttgttatgagtcacctctctctgaataaggaaacggaggcaaattacttgcagtgagctctctgtttagatagcagctaaagtcaaatctcttcacactttcaccccttctcctgtcttcccctttctatgccctctgcttgtaactcattccaaaaatagtcactgattacctactacatgcagacactgttccagtcacaggtgagaaaatacataagacccagtctctgctcttgaggaattcactatttggtgaggatgatgcacactgagcgggtagaagccatgagggaggtaaacagggaggatatggtagtacacaggatgggaarctggttctgagggtgggttagagcaagaaaatcgtgctgttagccttgtgagggaaggaggaattagtcaagtaaggaggagagacagaatgttccagagaaagaaagtgtgctaagacaagaggcaaaataaaaagtcagtttctgaaaacaaga

SEQ ID NO: 787197 - DNA, 640 bp, Homo sapiens
ttgtgttcaaactcccgggcacgaaaacagaattttccagcacagaaaaggcacttcaaggaaaaaagaactttgatgtctgtgaacaaacacctgttgactaccctggagaacactactgatgatactttaggcttgggcttgaataaccttcttagcattgccgaagaaactgcctgataggtrttttacaattaatataaggagtgtaatcccatagtcgtccataccacagcctacatacacttgcagtcccctccctaaatttcaaatgtttgttcaaatgaaattatcagattaaagcttatgaggggcggggaggaaaatattataacctctgaagcaatcaaataaaatctattttcttatttccttcaaaacgccaaaaaatgaatcattacaaatataatatttgggtttgtcatagcatagaggttactgaataagaaaatatttttgataattctacaaagatttttgttctcccaaacctaccaagattaaagcaataaagtatcaatggatttcaggatttaaaaaaggaactttaagccttgagaaatacacatttctatttcaaatctccctacaaatgaaattcctgaggcacacaaaaaaataatttcctttctacgcttcc

SEQ ID NO: 787198 - DNA, 670 bp, Homo sapiens
ggtgggaggtgtttgggtcatgggggtggatccctcactgatgacttgctgccatcctcacggtaatgaatgagtttgcgctctattagttcccataagaacttactgttaaaaagatcatggcacctcccttctctctttcttcctctcttgccatgtgacgcctgtttccctttgcattgcatcataagtggaagcttcctgaggcctcaccagaagcagatgttggcatcatgcttcttgtatagcctgcagaaccataagcaaaataaaccgcttttctttataaagtaccagcctcaggtatttctttttttctttyttttttttttttttttttttgagacggagtctccttgtattgctcaggctggagcaatcttggctcactgcaatctccacctcctgggttcaagcaattctctgcctgggccttccaagtaactgagattacaggtgcccaccaccatgcctggctaatttttttgtatttttagtagagatggggtttcaccatcttggccaggctggtcttgaactcctgaccttgtgatccacctgcctcgacctcccaaattgctgggattacaggcatgagccactgcaccccaccaggtatttcttcaaaacaacacaagtagattcagacagcatgcccatccataacctg

SEQ ID NO: 787199 - DNA, 582 bp, Homo sapiens
caaacgtaaccagaggtatgtattttaaaggatgaataaaaacaaatgactatgttgtagaaatctatttcagcatgtatgtgcatcagagtagaaatcatttattttcctggtctctcatgagagttgatattacagtgcctacatagaataactagccattataaatgtagagtgctttaggactgtcaaagcaatcacaccgaaattaccccagtgatatctaatctccatcatgcactcaatatgtgcatggacctatactgataagatggaattaatatctcaaaggcaagaattttttttttccctgatagagtcaggtgttttgcagtgatggatgaggtcaaacagaatttgtcasaattaacacagctgtttccgcatgtggtgtttgggttgcaattctcatttgtggcttttattgttcccttctccacatttcagcgcaatggcagatgtttcctaagtgtatacccctcgtgttactttacatccccttgcaggatgatactgggccacagcctcccatggggttacagctagagaatcttgtataaaatatttttccttgatcaacgt

SEQ ID NO: 787200 - DNA, 670 bp, Homo sapiens
actgagtgcagtgagtagatggtcaatattcccactcgtttctcagggaggtgatatttcagtgctacccacaggtgaccaaggtgaggcccaggctgtgtgttgggtgcctggctgctgatctatgttagtgagaatcaygggcttcctgtcacaaggactgtgctgctgtcaatctctctaacacccaagtcatcattgtaaaggaaaaaatcacgcatcgagaaagagcacataaatagtttgagaagaccatctgtgccatcctggctgcctaggaggcttaatgcggtgtttattgaaacaaacatctgctgggcataacctttcctcgacagacaaggggcaggggagagggaaggcaaagcttaggaataactccattatctcagctctaatagaggaaaatatgtacaggaggaaaggtcaacttgttgaaagaagcagctttcaatattagttttcttctttgctcttttcctaatatttgacttttattgttgacttaaaacctttttttcccacaagaacttcgcagcatacgtttctaaatcatagctagttaataaaatttcgaccttatcaggcattgaaaatgccatttcaaaaatctagctaagtgatatgcacagtatatgcacatatttattttatttgccatattcagtga

SEQ ID NO: 787201 - DNA, 670 bp, Homo sapiens
actgagtgcagtgagtagatggtcaatattcccactcgtttctcagggaggtgatatttcagtgctacccacaggtgaccaaggtgaggcccaggctgtgtgttgggtgcctggctgctgatctatgttagtgagaatcatgggcttcctgtcacaaggactgtgctgctgtcaatctctctaacacccaagtcatcattgtaaaggaaaaaatcacgcatcgagaaagagcacataaatagtttgagaagaccatctgtgccatcctggctgcctaggaggcttaatgcggtgtttattgaaacaaacatctgctgggcataacctttcctcgacagacaaggggcaggggagagggaaggcaaagcttaggaataactccattatctcagmtctaatagaggaaaatatgtacaggaggaaaggtcaacttgttgaaagaagcagctttcaatattagttttcttctttgctcttttcctaatatttgacttttattgttgacttaaaacctttttttcccacaagaacttcgcagcatacgtttctaaatcatagctagttaataaaatttcgaccttatcaggcattgaaaatgccatttcaaaaatctagctaagtgatatgcacagtatatgcacatatttattttatttgccatattcagtga

SEQ ID NO: 787202 - DNA, 631 bp, Homo sapiens
tggtgagggctctcctgctggtttgcagagggttgagtttttgctgtgccctcacatggcagacagagatctctggtgtctcttcttcttataaggacacataccctattgcataaaggccccacccttatgacctcattcaatcttaacctttaacctctcaaagaccccatctccaaatgtcatcacatcaggggttcaacatatgaattttgcaggtttgcggggagatacaaaattcaattcataagaaagacacacatcacaagcaaggtccccatgcttgcttggacttttgcgtgattgagaagtgaatttctaacctgttacactacatttgggaacttttttacatccagagaaacttataatttaatctgtatagtaacttaggtttcattcttactgacatgacactaatgtttgttcttgccattgttttttggtgcctagcgtaaatactcactgaaagaaagcatgcagtkgttctaaccagacacaggcatctaggcaacaggtgtgagaattcccacatggccctccccacatgcggtgtgatgcattctcatcagaaggcaactggttggactgtgaatggctcactgaattgctgattgcagagcacctctgg

SEQ ID NO: 787203 - DNA, 584 bp, Homo sapiens
ggagaccccataactttccgattatgtatatgaatctctggataactcaactgaccaaagacaaattaagggtggccgatggtgcaggaatttggttagaagaggaggagaaccttgccaaatctcttaacgaagagacatatgataacctatttttataaagagtgattcacccttgggtgatacctgtaaagaaattgtagaaagaggaagaagcaagcatagcaaggcatgggaggtgcttacaaacataccctctggattcagaattcttagctcgtttattatacttgtctcatgttttctcatccgtaaaatgcataattatagaatatttctcataaatctgagsagatttaataaagcagatcaaaccaaatgcttagaacagatgccagtggctagcaaagtcttcatcaatgtcaattactatcaccaccaccatcgttatgatcatatttgtcaccaatcagcagaatgactttaagccagtaattccctatgtctgggccataatttcctatctataaaatgatgggctggaccagataaggccaagatttaaggttttcttcatgattcta

SEQ ID NO: 787204 - DNA, 564 bp, Homo sapiens
tcctcctgcctcagcctcctgagtagttaggactacaggcttgtgccactatgcctggctaatttttaaaattgttattttttctttttctgtgcctaacgtagccatggctcgtggtcccaagaagcatctaaagcaggtagcagctccaaagcattggatgctggataaattgactggtgtgtttgctcctcatccatccaccagtccccacaagttgagagagtgtctccccctcatcattttcataaggaacagacttaagtatgccctgacaggagaggaagtaaagaagatttgcatgcagcggttcattaagatcgatggcaaggtccgyactgatataacctaccctgctggattcatggatgtcatcagcattgacaagatgggagagaatttctgtctgatctgtgacaccaagggtcactttgctgtacatcgtattacacctgaggaggccaagtacaagttgtgaaaagtgagaaaaaatatttgtgcgcacaaaaggaatccctcatctggtgactcatgatgctcgtaccatctgctaccctgatcccc

SEQ ID NO: 787205 - DNA, 679 bp, Homo sapiens
atcctctcctggaggtgcctctgggactcgtatctttacttccctgggcctgccccttgcagccttccctgagacagcaaacaggagggctggatcaatcctgcactgtcggcaaaggtctggattgacttgcaagttatacaaagcctgcacatatggggccatctgtcctcacatctacagaaaagttccaattgccagattgtatcaaaatgaattgttccttcttgaggccaagcctttgtgcagagcgctatraggcaattttcctccagatttggagggtcaaagcagtggttcaggacacactccagaggagtataagctgggagtggtgaagagaactggttgtccttctgaaagacagggaatagaggtgtccctcatttccttccttctttcagtgaaaacccaggcgtgacggagaaagtgagcatcctccctccactccccatcctttatccctgagctggacataggtaccactgcagtatgtacccctgaagcaaggaaacctggagagtaggaattaaccaccctcacctatgcttcactttctccctgctgttggcacactgatttccctgggtctgtttattccatgaagcatagcctccttccatggggtgggagatttagtcagcgggaattggtcctgcccatttacattatgcctggg

SEQ ID NO: 787206 - DNA, 679 bp, Homo sapiens
atcctctcctggaggtgcctctgggactcgtatctttacttccctgggcctgccccttgcagccttccctgagacagcaaacaggagggctggatcaatcctgcactgtcggcaaaggtctggattgacttgcaagttatacaaagcctgcacatatggggccatctgtcctcacatctacagaaaagttccaattgccagattgtatcaaaatgaattgttccttcttgaggccaagcctttgtgcagagcgctataaggcamttttcctccagatttggagggtcaaagcagtggttcaggacacactccagaggagtataagctgggagtggtgaagagaactggttgtccttctgaaagacagggaatagaggtgtccctcatttccttccttctttcagtgaaaacccaggcgtgacggagaaagtgagcatcctccctccactccccatcctttatccctgagctggacataggtaccactgcagtatgtacccctgaagcaaggaaacctggagagtaggaattaaccaccctcacctatgcttcactttctccctgctgttggcacactgatttccctgggtctgtttattccatgaagcatagcctccttccatggggtgggagatttagtcagcgggaattggtcctgcccatttacattatgcctggg

SEQ ID NO: 787207 - DNA, 657 bp, Homo sapiens
atgggggagattctgggggaagaatcccttgcttagtgcaagtgggccccctaatccttatatctttcccctagttcagaccaggttgaattccttggacaagggagaaaaggttccattggcatggcaggtgagaagcaccctgtccattggccctgtggggttgtggctactgtcacagctttctcccrcaaccacttgtggatgttgggatcagcctttgtctaccgtgggcaaacctaagtgcccgagctgggagaagaaaggataaggagaggtgcactgagccatgagtgcctgtggctgtagagatggaggcatacatggcacttctaggaacagttggtctgatttgcacctttgacagctgagtcaaatgcttactttacttagtgacattgctgtagcctgtagtgaaactcttaacgctataaagacacaagagccatttcaaaccatgtgagagagagaaaagagacaaagtctgggggttttgactggccagttagggcagagtttttgaaggaaaacacagcctcttacccacggagagagagatggcagggttttggaagagaggcaggcccaacagctttgcattcattcacactcaccttccaggatcccggacaagcccccagttgaaataggaaaggt

SEQ ID NO: 787208 - DNA, 623 bp, Homo sapiens
agacagaaagtcaacaaagaaacaatggacttaaactacaccctaaaacaaatggacttaacaaatatttacagaacattctacccaacaactgcagaacatacattctttttatcatcacttggaacattctccaagatagaccatatgataggccacaaaacaagcctcaactgggcatggtggctcatgcctgtagtcccagcactttgggaggctgaggcaggtggatcacgaggtcagcagatcgagaccatcctggctaacatggtgaaaccctgtctctactaaaaatacaaaaaattggctgggtgtgatggcaggcacctgtagttccagctacttgggaggctgaagcaggagaatggcgtgaacccgggaggtggagcttgcagtgagccgagatcgcaccattgcmctccagcctgggctacagagcaagaccctgtctcaaaaaaaaaaaaaaaaaaaaaaaaaaaaacaagcctcaatcaatttaagaaaattgaaattaatcaagcactctctcagaccacagtggaataaaattggaaattaactccaaaaggaatctccaaaactatacaaataaattgaagttaaataacatgctcttgagtgat

SEQ ID NO: 787209 - DNA, 750 bp, Homo sapiens
gcccattcctgcctggcaccacagggatccatcgggaggggggccagaggagcagggggtaaaaccccacagagggcaggaaatctctagctgaactttgtaacaatttaaatgtggcgagaagcctcctggccagaagttggaggagtgttcgaatcmcacttgcagacttcacaggcaggggaagagctaacgcccttttctttcacagccccagtagcctagggcaagtcttcaagcctgtctccccctctgcctggtaacagacctcggggctgttgcagaggggcatggtgggagtgagaccagccctgtggtttgcatgggagctggtttgaggcctgtgactgtcggcttttcactactgcatgactcagcagaggcagccataatcctcctaggtacacaactccagtgacctgggaatctcagccccatcacccacagcagctgcagcaagacccacacaaggagagtctgagctcagacacgcttagccctgccctcacctgatggtccttccctacccaccttgatagtggaagacaatggacacatagtcttcggagttctagagccccacccagcactgatccctctccacactacttcagctgatgctttttggaaagtaccacctcctgacaggaggccaatcagcacaaaaatagagcattaaaccaccaaagctaaggaccctcatggaatccattgcaccctccaccacctccaccggaacaagcactggta

SEQ ID NO: 787210 - DNA, 750 bp, Homo sapiens
gcccattcctgcctggcaccacagggatccatcgggaggggggccagaggagcagggggtaaaaccccacagagggcaggaaatctctagctgaactttgtaacaatttaaatgtggcgagaagcctcctggccagaagttggaggagtgttcgaatccmacttgcagacttcacaggcaggggaagagctaacgcccttttctttcacagccccagtagcctagggcaagtcttcaagcctgtctccccctctgcctggtaacagacctcggggctgttgcagaggggcatggtgggagtgagaccagccctgtggtttgcatgggagctggtttgaggcctgtgactgtcggcttttcactactgcatgactcagcagaggcagccataatcctcctaggtacacaactccagtgacctgggaatctcagccccatcacccacagcagctgcagcaagacccacacaaggagagtctgagctcagacacgcttagccctgccctcacctgatggtccttccctacccaccttgatagtggaagacaatggacacatagtcttcggagttctagagccccacccagcactgatccctctccacactacttcagctgatgctttttggaaagtaccacctcctgacaggaggccaatcagcacaaaaatagagcattaaaccaccaaagctaaggaccctcatggaatccattgcaccctccaccacctccaccggaacaagcactggta

SEQ ID NO: 787211 - DNA, 666 bp, Homo sapiens
ccattcctgcctggcaccacagggatccatcgggaggggggccagaggagcagggggtaaaaccccacagagggcaggaaatctctagctgaactttgtaacaatttaaatgtggcgagaagcctcctggccagaagttggaggagtgttcgaatcccacttgcagacttcacaggcaggggaagarctaacgcccttttctttcacagccccagtagcctagggcaagtcttcaagcctgtctccccctctgcctggtaacagacctcggggctgttgcagaggggcatggtgggagtgagaccagccctgtggtttgcatgggagctggtttgaggcctgtgactgtcggcttttcactactgcatgactcagcagaggcagccataatcctcctaggtacacaactccagtgacctgggaatctcagccccatcacccacagcagctgcagcaagacccacacaaggagagtctgagctcagacacgcttagccctgccctcacctgatggtccttccctacccaccttgatagtggaagacaatggacacatagtcttcggagttctagagccccacccagcactgatccctctccacactacttcagctgatgctttttggaaagtaccacctcctgacaggaggccaatcagcacaaaaa

SEQ ID NO: 787212 - DNA, 703 bp, Homo sapiens
taactatcatactttttttgaaacaaaaaatcctaaaataaactacgtttcaccaatgatgataaacatcaggttggtttttaatgtagaggtacaaaacgtaagaaataaatatttaaatggaaaacaaaaagtcttggaataatgctctgagtccacagcttgcaaactgcaatgaggcaccccagagagctacagcaaattcacaagagcattgtggaatattttacatttttagggaaagacagtgacaggagttggacaccataaaaattactagttgaagcgagttcacagttttaatacagaattcctttagacgacattatgtctttgtaaagctgggtctggggcagttattttgattaaaaccacatattgtgcaaaaaaatcaaggtgtaacaggacatgtagttgtggtgtccaatctgattccaargtttgagaagttgtatgctctttaacacatgctaagttgtttggacataaacacttagttatttggatctatctgcttaataaatggaattgttaggtatttcttttggcttggaggtgctgtgtatgaggcaacatgaaccaagcacatttgctagcctctggcctaagtccttttcattcatcctttctgatcctatctctaaaacctacacacagatttatgtctagcacttagtggaaatcaaccagagtatgaagaact

SEQ ID NO: 787213 - DNA, 587 bp, Homo sapiens
caaaaatgcatttaatacacctaacctacctaacctcacagcttagcatagcctaccttaagtgtgcttaagacacttacattagcttacatttgggaaaaaaaatcatctaatataaaccctaatttatacttcctgttgaccaggtctgaaaaaaaaaggacacacacaaaagagagcataaatcctattttataacaaagtgttgaatgtctcatatagtttactgaatatagtactgaaagggaaagaacgattgtatgggcackgaaagcacagttctactgaatgtatattactttcacaccatcacaaactgaaaaatctccacacaataataatgggagactttaacaccccactgtcaacattagacagatcaacgagacagaaagttaacaaggatgtccaggaattgaattcagctctgcaccaagtggacctaatagacatctacataactctccaccccaaatcaacagaatatacattcttctcatcaccacaccacacctattccaaaattggccacatagttggaagtaaagcactcctcagcaaatgtaaaagaacagaaattataacaa

SEQ ID NO: 787214 - DNA, 595 bp, Homo sapiens
actgatatgtttatcactacgctattcagaatagcaaagacatggaatcaatccaggtgttcctcaatggtaggtaagatagataaaacttggtacatataaactgtgaaatactattcagccataaaaatagtgaaatcatgttatgtgcaagaacatggatggagctggaagctataacgctaagcaaagtgatgtatgaacagaaaaccaaaaacycccatgtcctcacttataaatgggaactaagctttgagcacacatgaacataaatgtaggaacaattaacactgtggaccatctggggaaaacaaaggcttcatttatgggtgttgaaaactcagaataaaattcttctctttctggctggcatgcaagttttgaggagagagggagagttggtgaggccacagcctgacatccagcttcccactttctcatagttaattaaaatataagaccttaaatactatacagaagtagtagtagaaagtggagggaggagtcgtttaaaaaattaccaattggatgctatggccttaagagggtgacaggatccataatacaaatctctgcataattcaatattcctaag

SEQ ID NO: 787215 - DNA, 586 bp, Homo sapiens
tgaggatccagattcagctgcacaaataggtttgttataaaacgtttaatgctgtcagtttggggcatcagagcctatcacgaaaattagcatgagcccgaatcccatggtggttgcagagctcaactagggtcttgaggcacctttggcctgagtgtaaccaggattaggatttcttttgaagaagggacagggcagcttggaaaccataggagattctagcagctggccaatytgatgctctgcagtttagttctggatcagaaataaggtgtttggggccgggcgtggtggcttacgcctgtaatcccagcactttgggaatctgaggcgagtggatcacttgaggtcaggagttcgagaccagctggccaacatggtgaaacgctgtctctactaaaaacaaaaattagctgggcatggtggcgggcgcctgtaatcccagctacttggaaggctgaggcaggagaatcacttgaacctgggagatggaggttgcagtgagccgagattgcgccactacattccagcctgagtaacagagtgagactctgtctcaaaaaaagaaaaaaaaaaaaagaaaaag

SEQ ID NO: 787216 - DNA, 622 bp, Homo sapiens
cagttcctgaggacatgacaaggaaatggtaacaggagtaagcagctgtcctgggctcctagctggagttcaaagtctagactgccacttgtcggggaggttatagaagggatttgatctccaaggtcctcaactgatactrtgacattgaatctgggattagggagcccccacagtatgtactggagttgccagtcctctgcgtcagagaagtgataatacatctcaattttccagtgcttagcacaagcatggcttagtaaatattgaatgaatgaatcacaggtgataggagtgatggtaggaggttggcaccatccctaatgggctgtcctagagttccatctactttcttagagaagggctctcactccgtcacccaggctggtgcacagtggcaccatcatagctcactgcagccttgaactcctggtctcaagcagtcctcctgcctcagccttttaagtagctgggattagaggctcgaaccaccgttaccagctacattccatctacttcaagctttccctaatgtggtgggagtagaaggtgttagtagcagatgggtggcgtttgtgttctacttgaggaaataatgtactgggcggtagggctgactaaa

SEQ ID NO: 787217 - DNA, 620 bp, Homo sapiens
ttatccactgtcttggattacttgtgtaagtttaccctagccctggttactgagatgaaaccatttctctcctggcgctggggacataaggggataaggtgccccaatcctcttattcccatacccggggggccccttcccagagccctaactcctcccattgtcccccaagtccacactcacatcagtggccttcttctcggcctgctccagtttctcctgggcctccttcacggattcagaatacttttccacctcatcctctgtccccttcagcttcttctggagggcctgctgctcctcctccagctgggacagaggggacttggtcagccaggctgggagggggcccaggcccagaatggagacgcggtgtgtgtaggggcgctactaagatttggaggctactgggayggaagcggaataacataaaagggacagtacagtcaagggtactggtgggacccgttgagggtacagagaaaacttcaggccccaaggagcaggaccaaccgcgctctgcaaaggcagagtggaaaccaggggcctggggcttccccaggctattgtaggggagagaagcggctctggcgaaggccctgagggtactgcgaaggccc

SEQ ID NO: 787218 - DNA, 631 bp, Homo sapiens
aatagactttcaatactacaaagaaacccaagaaattcccattaattttaaatgaccaatctgaaattgagaagcctgaaatgcaaaatactttgggaaaaaaaaaagtgattttattactcctagataaatcttttaacttttaaaattacctgttttcaaggggtttcaagcaaagttatttggtttttatggttaggtaagacccatctggaattaactgacatctgtgtacatgtagatatatgataattcttcaaaactaccccataaatggttcaacaagccctagaaaaacttcttgttactaatttactaaataaacaactgcacaccaagggaaggtaaattttagcacagacctgcctgaattattgcaaatccaaatatatgttatatattgcaagttattaaaatgattaggtggggggcactaattagccttctctcacaactaactttctttcataatttccaatagtcctgmagtgatgttagctaagtctgcatggcggtagccccttattgctcagatgaggctggagcagcatgaattacttactgtcactaagggtccaagcagtgagatcttcactccattccccctgggccttggtgttgactctagctc

SEQ ID NO: 787219 - DNA, 625 bp, Homo sapiens
aaacaccactgagaagtccagaagtaattttacacatgttatctagaacgtgtggacccaggaccagcagcatcacttgggaagctactagaaatgcaaattcttgaaccccggccccatcctcacctcaaaaccattgaatccgaaactctggggaygaggcccagaaacatcttttaacaaactctctgagtgattctgatggacacttaggtttgagaaccactgatttagaaaagggaggtaaatataagaaatagcttaaggagatgaaagtggctacctataggaagcaggactgggaggtggagggtggagcaggagaatgctgttctttagataaaagcttcttattctatttgatgtcatgactctgaccatgaattactttgaaaaattggaaattatttttgaaaataaataaactgggacttctaaaatatgcctgtggcaagagcctggtctgggcccttaagatggaaacaggaagccagtgataaaatgcaggagctgaagctcagcacagttgctgctgtgtaaatcccagctcctaggggaggccctgccttcctgaaggctcatctgcttccttctctgtccctacagagtgctgcagacctcctcc

SEQ ID NO: 787220 - DNA, 589 bp, Homo sapiens
cactctagcctgggtgacagagcaagactccatctcaaaaaaagaaaagaaaagaaaattgagtgatccttctttgtttagaaaagttataaacaggaatgacaaatgctggctcattttataaatactgtgtcatttctcctatttaatatttaagtgattaaattcagcttgactgattttattgtttattgagcacatactacgtgttaggtgttgtagatacattattatgttagtcttcacagcaactccatgaagttggtattatsttcattttacagttgagaaaactgaggcttagagagaaaagctgcccacgcttgtaactagcttttctgtcacttccagtgattacgaattccaaacccttctctagttctgaccatcacctagataaagaagatgtactatgagcacacatctttattaaaaaccctttcaggagacagaaaagcaattcaggagcacagcccattttaacgtaatttgtttaattattcccaaaataacaggcctcgaagcattaaaagagtcattgacaactgtatacattttcatagtctaaggtcacacactgacaattata

SEQ ID NO: 787221 - DNA, 432 bp, Homo sapiens
ttcaggatccttcaccaaatcgttgctctgcttatagtttctcctaaccatccttttccccttgctttccagaaagaaatgacgagcaggatgtgtcactaatgctccacctcaccctttggaagaaaggaaagctgtttcctcctggtgccctgagcgggcaggaggtggaccaccctggctgaaatgacacacctactcccaggaacagcagaggtggaggcaagcagtgactcctgagagacattccccactcactttgtgtgctctyaaccttctgagtgctgctagcccagacctgtggacgaggcagaccacaacgtgaaagaaggaccagccccttgaccgttctggctggggaattgtccacgaggaagcctctgcacttccacacatggcacagttctgcctgtgacctgccgcctaagcttt

SEQ ID NO: 787222 - DNA, 586 bp, Homo sapiens
taaagggaaaaaaatgtgtgcctcttatctaatcttggcactactggcattttagaccaagtaattctttgttgatctgtgcactgtaggacgtttagcagcttccctgcctctgcctactagaagccagtagcaaccttctcctgagttgtgacaaccacaaatttggcaagagattgccaaatgctgaacacctttattgagtgcttctttattccagctactgtgctaagagatttccatgtcctaatcttaatcagtcctcaygacatccttgtgaagtcagtaattatcttttgctttgcaaacgagggtgatgagctgctgataaatcacgaagctgggatttgtacccgtgttttcctgacttcagagcctgtaagcttcaccattctgaaaattttgaaatacagaggtggtcttttgaagaccaaggcaaaatggttgaagtagtaaaagcacaggatttgggaccaggtggacctgacttggaatctcaactccatgctgatgagcttatcactgtctccatgctgacccccacttctgccattgttaaattgggagtaactccagccatgcagac

SEQ ID NO: 787223 - DNA, 634 bp, Homo sapiens
gtgaataatacacataaaagctttgtatgttgctaggcacatgatagaccctaaaattgaaaccatgattttcatttcaaggtacgggatctttagtttattagagtcttagaggcactctgggaaagttggatggggttgagagaacgtgtctctgtggaaaaaaatgggttatgtactattactgacttttcaacatttctgttgaaactttttgaaaacttttctgaatcacagtagcttaagtatcaatgttgaaactttgctttggggtgcattcccctctgtatttcctaaggttggaagaaatcaaaccaagggtgggcgattgactatctttatcgtagattacctcttggttaaaagaccctaaagcattaactcctgagattaactctaaagcattaacttccaaagctctttggaaggccatcagcaacacctgcagygcaaagctgttgtcaagcctgtaattatgagtagcaccaagggtaccaaatggtgacgatattctagatctggtttcactctcttagcacagacactcatatacaggatgtagagaaagcaagtaaaaccctaagattaaaatagaaatggaaagtaatcattttttaacaaagaccactctgaa

SEQ ID NO: 787224 - DNA, 445 bp, Homo sapiens
gtttagacccaacttatgccacaatgaaacccttaaggacatcaaagaatatataagcaaaaagacccattcaaaggacaacaacttcaaagattaaaggaacatcagcccatacagatgagaaagaactagtgcaagaattatggcaattstaaaagccagtgtcttcttacctccagatgactgcactggctccccatcaatggttcttaaccaaagtggaatggctaaatgacagatatataattcagaatctggataacaaggaagctcaatgagataggggagaaggttgaaaccgaatccaagtaaaacaatccaacagttgaaacatgacatagccacttgaagaaagaaccaaactgaatttctgaaaattaaaaattcattaaaggaatttcataatgcaattggaagcattaataacagaatagagcaagctgag

SEQ ID NO: 787225 - DNA, 643 bp, Homo sapiens
tataaaacctaagaactgttcttcaaactttcttcatctttctccatggaggcattctcttacatatcttagccagaattggaacatatgcgctttctcaagtcaatcactgataagcagaatagaatcaccaactttggttcagactaatcaagattcttccctactgggctggggctaggctggtacctagaaaaacaaagcaaactgaaaaagcctggataaccaaatttagggctttgttggcaaggaaggacactgatgggtaggcaattgacattgtctgcctcaccaatctttatctattttttgccaatcttaaaggcaaaagtgagatcatayatttttatttgtttctttgcttttttattcagctgggcattttctcccatgttgcttggccatttctggttcttcttttatgagttggcagctcatgtccatggcttatttgtcaattggtatactcgtttttcttattggtttgcaagagcccttattatttttctagtgggattattttttctttcttcgttcctttactctgaataaggtaatcctgggttctctatttttctcacacctaccttccaaatttaccttcttggacatgtctcaaaaactttctttaaaaacacacaca

SEQ ID NO: 787226 - DNA, 557 bp, Homo sapiens
gaactggaggccattatcctaagcaaactaatgcaaaaacagaaaaccaaataccgcatgttctcacttataagtgggagttaaacaattgagtacacatggacacaaagaagggaacaatagacatcagggcctacttgacatccaaaaaaatatccattagtcactatgctcattacctgggtgacgaaataatctgtcactaaactcccatgacacacaagttacctatgtaacaaaccgcacatgtacccctgctaacctaaaataaaagttggaaacaaaagcagatagacaaacaaacaatgcccctcccaactcctttcaaaaccttttgctctttctgcagctcaaaaagtgagcacctattagaagtacctcttaacayttattaaatactgagctttctgcagataagcagtgacttaggaagtaatgaagccaaagccagatctattttaatatttattctagcctgaaataaatgtttatgtccttgaaacagataagaatttggtgggataataattacaaccagcgtgatttaataaactgtt

SEQ ID NO: 787227 - DNA, 587 bp, Homo sapiens
ctggtttgagccatcaggagctctttcaggatggcccctgcaatggactacattgtttgcattcccctaatgtttatatgtctaggccctatcccccaatgtgatggtattaggtggtggagcctttgagaggtaatcaggtcatgaaggtggagtcctcatgaataggattaatgcccttttaaaagggaccccagagacctatctcaccttctttcctccctgtgaggamacagtgagaagagaatcatcagtaaacaaagaagtggcccttactagacaccaaatcttttggaaccttgatcctggactttcagcctccaaaactgtgagaagtaaatgtttgttgtttaagctacccagtctatagtattctgttacaacaggctttattgactaagacagtctctatgacttgataacatgcccctatccttttgttccttactctctagaactataagatgctccagtgctgcattttccttttccattcttagagtcagccatatatccaagcatagtgggagaatttcatatatctctctcaataattggaaaagaaaaaagataaaagtcagtaagaa

SEQ ID NO: 787228 - DNA, 608 bp, Homo sapiens
catagggaaactcagaatactattaaagtagttttatgacctgctatgtatatggcttgacttggagtgctggtaatggatgtggagaatagaagcatataagacgtaatttgtagataaaacattcaggccatactaacactttggaagcaggaggattgggagaggaaagaataaaggatctttcccaagtttctggataatgcagctggggagaaagaaagtgccatttgctaacatgaggaagactatgaatggaatgggattcacaagattgatgttacatctggggtgtccataaaatatccaaataaagatgtcaaatggaaacayagacatataaaattggaaatctaaagaaatggatattagttgaacgtcatcaacatgtagatggtatttaaatctgtagaaacacaggagatctaccgtataaagcctttagagggcaaaaagaaaatcctattatgaaacattgaagaactcaaacagaggtcagtttagaggagggaaaatcaaccatagaggcttagaagaatgggatacatggatgggaagaacactagaaaagagagaggttacaagaacaagaaagatgttatgtggag

SEQ ID NO: 787229 - DNA, 593 bp, Homo sapiens
tttactgtactcattttttgtgatgatgtgagatgataaaacgactgtgtgatgctatgaagttaggtgaatgatgtaggcattgtgacacagtgttagactactactgaccctgtaatgatacatcagaaggaggagcatctgctttgggtgagtctggttgatggagccatgatagggtagatggttggatgtctggagcagacagtattgacaacaaatgagcaggtagcttatacagtgtggacatactggacaaagggatgattaacatcccgggcaggacagcccaggatggcacaagatttcatcacactaatcagaacagtgtgcaatttaaaacatatgaattgtttatttytggaattttccatttaatattttcagacacataagggaactacctattggagaagtcattggaacactgctatgtggctcacaatattaaatctggactcagacaggagaaacttagtgaaatgataaacaaaagattatattattgacttctaaataaatcaataactgatttgaaaattattaaattggatgaatgatttatataactaagtaagcaattgtataattat

SEQ ID NO: 787230 - DNA, 595 bp, Homo sapiens
ccattgggaagcatctgtgtatgaaatctatttgtttgtttcttcgtttgtttattgagacagagtctccctccgtcttccaggctacagtgcagtgtcaccatcttggctcactgcaacctgcaccttctggatccaagtgattctcctgcgtcagcctctcragtagctgggattacaggcaactgccaccatgcccggctaattctttttgtatattttttgtagaggatgtttcaccatcttcgccaagcttctctgaaactcccaacctcaagtgatccgaccgtctcagcatcctaaagtactgggataactggcgtgagccactgtgcccagccagaatttaaaataaataatacataatgctgagtgtatgattttgggtgacagagaagatctcactaatcagatatttgtgacattaatgaaaaacacggattgaacccctgaaagattggcggaaggattttccacacacagctgtcagccgtgaaggcagaaagctgaaaacaatctgatgtggaaggaagaggctctgcctcaaatgctgggaatgagatggggagaatgacaagacgactgtggagagacg

SEQ ID NO: 787231 - DNA, 674 bp, Homo sapiens
attggtctgttcatgatggatccacctccatgacccaaacacctctgaagaggcccaacctcccacaatgggggtgaaatttcaatgtgaggtttgaaagggtcaaacatctcaactaaagtagttgtatcctcagcacgttctatggttactatgagagctataattgagaaagcaggggaaagctaggtctcccgccatttgggtgcttgtcctaaagagacgttgtatgtggttacctgccaatcaagaaatgcgagacaattcataaagaggaactgctatgattagcttcttattggtgtctcctcttcttccaggtaaccccagacacctrcatgttctgattgggacctcagtggtcaaaatccctttcaccatcctcctcttctttctccttcatcgctggtgctccgacaaaaaaagtaagtctcacgaagcagaggccagagagctcagggccatgtggggaagcaggatgggagcacgcggatgtgtgttcctcaccagcaggatggtccctggcccaagacaggagccacagaggcaggactttctagagagagcaccagattcccttcccctgccttcagctcacagaccattgcctgattctgaactgtatcctcacgtcccctgcagccactcacatccaggagaaggttccatgacag

SEQ ID NO: 787232 - DNA, 674 bp, Homo sapiens
attggtctgttcatgatggatccacctccatgacccaaacacctctgaagaggcccaacctcccacaatgggggtgaaatttcaatgtgaggtttgaaagggtcaaacatctcaactaaagtagttgtatcctcagcacgttctatggttactatgagagctataattgagaaagcaggggaaagctaggtctcccgccatttgggtgcttgtcctaaagagacgttgtatgtggttacctgccaatcaagaaatgcgagacaattcataaagaggaactgctatgattagcttcttattggtgtctcctcttcttccaggtaaccccagacacctacatgttctgattgggacctcagtggtcaaaatccctttcaccatcctcctcttctttctccttcatcgctggtgctccracaaaaaaagtaagtctcacgaagcagaggccagagagctcagggccatgtggggaagcaggatgggagcacgcggatgtgtgttcctcaccagcaggatggtccctggcccaagacaggagccacagaggcaggactttctagagagagcaccagattcccttcccctgccttcagctcacagaccattgcctgattctgaactgtatcctcacgtcccctgcagccactcacatccaggagaaggttccatgacag

SEQ ID NO: 787233 - DNA, 590 bp, Homo sapiens
agtctcactctctcacccaggctggagtgcagtggcgtgatctcaactcactgcaacctccgcctcccaggttcaagcgattgtcttccctcagcctccccagtagcctcccctaggattacaggcacgtgccaccatgcacagataaatttttttgtgtgtgtatttttagtagagayggggtttcagaatgttggaccagctggtcttgaactcctgaccttgtgatctacccagctcagcctcccaaagtgctgggattacgggcgtgagccacggtgcccagcttcactatgccatttcatgcaaggggcttgagcatctgcagattttggtatctgaatggggatcctggaaccaatcacccaggtatagtgaaggaccatggtatataatttttatttgtcaatcttaaaaataaagcataaaaaatttacaacaacaagataaaaaataagaagtgtttttatagtgtgaggataagtttagatttattttttcctacgtgtaaccctatggtcctgtgttatttgttgagaaaatattctattccaccttaaactacatggcagcctttgtcaactataaag

SEQ ID NO: 787234 - DNA, 535 bp, Homo sapiens
agtggagatatgggcctaggaaggagatatgggcctgggtgtggagatatgggactggagaggtgatatgggcctggagtggagatatgggcttagggtggagttctgggcctggggcggagatatgggactggattggagataggggcctagggtggagatctgagcctggattggcgatatgggcctagggtggaaatatcagcctggagtggagatatgggcttggggtggggatatgggcctggaaactgggtctctgcacagccgacagccctgttcttgggtgcaggtaggcactgagggtgagtttaacttcagcccaggaagggcctggctgccaagactcacagcccagtgggggcagcaagggagggctggttcgcctgcagatggatsgtccatcatgatctttctttccagggttcttcttgctgcagggggcctggccacatgagggtgagtccttctccaaaccttcgggtgtcatctccccacataagaggattttcctgaaacaggagggaagtcctgt

SEQ ID NO: 787235 - DNA, 569 bp, Homo sapiens
aaacagaccattttacattctaatgggatcatttttcttcagcctgaagaacatattttaatatttctcacagagcatgtctgttgaagacagattccctcagcttttgtttaagaatgcattttttaccttaatttttgaaggatattattacacatagaattttaggttgaccatttcctattagctctctaagaataccacatcagtgtcttgtcacttccataatttttttggggagaggaacctcagcagtaattcttgttgttctcctgaagataatgtgtctttttctccmccctcactgcttttattgtgtgtttatatttaattttccacaacttgattatggcgtatctagatctggttttctctgtgtttgtcctgcttgagagtcactgagagttttgaatctataggttgctttcttttatacaattttgagaaatttcagccaatattttttcaaatattgcattgccacttttttcctctttcttctccttctgagactcaaattacacatatgctgaaggttttgactgtttctaatagttcttatggtttta

SEQ ID NO: 787236 - DNA, 624 bp, Homo sapiens
ccatgtggaaagaaactgcaagtagcctgtaggaactgtgagtggcctttaggcactgcgggcagcctccagcagctgacagcaatctccaaataacagccagaaagaaactggggccctcagtcctacaaccataagaaaatggatttcatcaacagaacaatggaaaactaatacatcatacaaaggtacattcacataaagaattaataatacctgagtgggtgagttagacatcaaatgggtacacagctgtgttttcaacaatttttcttaagagctaaatgamcctcgttaggtggattttcctctctacatcttggttactgcatccttaagtggggttaatactacctcacagagttgctggaggatttggatgacatagtatgtataaatcatgtatgttttcccccacaacctaggtttattttctgttttgggggggttttcaaagcagctatgcccccaaaggtcagtaatgatcgtatttgcaagtaatatcttcattaactaagcttatgctgaatagtccccgactcgatttgtcttagacatcagaggtataaaaatcgtggaaagcaccagcactattcccacccccacccaaaatccaaactaaaa

SEQ ID NO: 787237 - DNA, 569 bp, Homo sapiens
ccacctcactcctacaaaatatcctagctacgacttagggccataggttcatcacatcaattttgcatatgaatcaatgtcctatttacttttcctctatggtgtttaaatgacatctgattcctcactgtaaccttgagcttctagtacatgctacaggatagttctataactgaggaagctttttaagtgggaatgttagccacttgggcacttaatcayctttttatggattacaggatgcattttaggatattgtttatttatgagggagtccttataagctccctaagtacaaagacattctaactaaaaatatgagactttattcttaattctctcgtcctaattaaactgaatagtccgtcttcctaatgagactgaatagtccgcctcactgatttcaaatctaccatgtttgtgaatccaaacacaattccaaagggccaccttttgctctttctcagttgaaattacaccactctggctaggcgtggtggctcacgcctgtaatgtcagcactttgggaggccgaaacgggtggatcacctgaggttgggagtttgaga

SEQ ID NO: 787238 - DNA, 590 bp, Homo sapiens
cttgtcacagaatcctgcctacaagtaacggaacaatgagagctgtggccatgtaggtaagacacttgtggcatctgctatagggtgagttatggaaaactgacttttgacataatttttattgttttttgcataggaatgacatattttaaaatcaggaaaaaaaactgagataaaaacaccataatattakgttttctagagaaaagaaaaagcttacaactaagcccccaaatgtgcggggaggccaggggtctcttctcaaaggggcccttccacctaggaaatgtctgccacagagccagcagccctggagatcagctcacccgacatgccgggggacagcaccatgaagaaagagacagctaagacaaagcacagttctgacatttttattcactgatcataaatatagtctcatgagcattaaggtgatcatgaatgatgtactagcacctggaacatgaccatcatggagcactcactgattccccatcactggccaaagaagtcggggcatcttcctttcaccaagtgttcaactttggagggaccctccttctggtgcagcaattttattcttggcttgt

SEQ ID NO: 787239 - DNA, 629 bp, Homo sapiens
cctttggtggaaatagaaaattccaactatattgtcactaagctgtttgataaataagcaatcaagcctcgattaatgtgcatttcccacatcacttatgcctaacctgtctgcagcttacttgtgaaaactctaacacatggtcccagaggaaaaaccattttctctgtttgtgagagctcattgcctcttatgtccaatattgttttctaagccactcacacagcagctgggtaggcaaaaagagtaaagaattatcagatataaaaaacaaacmagacaaagaaaaaacaaactactctcaaatatgaaaggtctactttaaatcacagcccacagctatcttcaaacctcttgaagattctcttctcgtacccagtacttacaactcaagagtagcattagtatgagttagtcaagcagaaaggcaagtaggaaatttgcatctttactttaaggttaaagtcaaacctgctctttcacaacagtgtttttcaaccttttctacattatcatctctcttaggagcccttttagacatttttttctcctaattgctccctccaataaaactgtaatactacagatatatcatatatttgtgtatgtactgtatgtatagctacata

SEQ ID NO: 787240 - DNA, 583 bp, Homo sapiens
aaaaagcctcatccgcccggagcttttctccctcttttttgcctgggggttccacggctgaggcaccaagacaaacaccacccaagaatcgacctatcccagtcagtgccgtgatggtgccaaaccgagaggagagcccgagaagggggtgggtgatttcccggctgctccccatccccggcgccttgtgcctttttctccctccctctcccgctgcgcttcagccgagggctgctggagcgaatgggggatgtagaggaaggagtccgtaggtttccgtgccctcccaatcttctccgcctttcccgacagccgcgcgtccccgcctcagcccaaggccagtggcccggcytcgaggaaggcgcgggggccgcgagagacgactttccacagcatcgccaaggaaaccggcgtcgccggtgcccccgcgggcctccctcggcagtccgggggctgcttcccgccgttgcgcgccctcctccaccacccactcgctgcctccgccggccggagcccccgccttactaaccccctcaacttcgcgggcggcgggcaggtgggggcgcgcctccaggccgcaaga

SEQ ID NO: 787241 - DNA, 616 bp, Homo sapiens
aacaagttgctgttttttaagaaataagaaaaatgtctatttgccactgactctctcctgtctgtgttccggctgctgggaagccaggagttgctggtgtagtgttattataacagtcagtgagtcccctcgccgagctattaatcaattgctcctcgctcagttagacggaaagtgttgctctaagtatttatgggcaggtcttcaatacccgtgacgtcgctgcccatatatggactgaggaacagggctgggccaggcggcttttgccgtcacatggctgatttgcatacacgggctcggccgcgcggactccgccgggctcgcgacttccagctcgcaggcggcggggatcsctggggtcccgggcgcgcggccctagctgcagcctgggtccggggcgcagggatcgcgggggagagggcgcgccatggacccagtcacagccacagcaggagagcgagctgctccaggctgcggctcagcctcccggggcggggaggaattccggttctctgggactttccaaaaaaggcgaagatccggtgccggcggctccgcctccctagcccttgtttgggagccattccggaaaattaaacttcggaaagaaacc

SEQ ID NO: 787242 - DNA, 610 bp, Homo sapiens
aaccctgatcactgaaccctctacagctaatctcaccactgaacggccagctttgctctgcatacactgtgagatcccaggccccaccaggaacaagccatggaggaacagccaacctgctcatttcagtttgttgcctcagcctgcatctccacaggactcctggatgaaataggaactgcgaacacacttgagctgcagccgctgaattyggggcatctggaggaagcccatttcagggcaagacagcctcttgcattaggccaagagaccagagaaatcaggaacttgggaggcacggggacttagcattctaccccacccactgccttttatgcagactctgactcaattagaagcccagggaggtatagcaacaaaaatctgaggataggtagatgttaggaaagaaagaaaacctgtctctggtcctggctttcaaattcccatttggagtaaattttcagaatggaaattgattatttaacttcaatgaattttttaaaaaaagaatggactttttttggttctgtctcagtgattttaattaattttcagaggtctacagcaataactgttacctagaatgcttttatggataaaatgtgat

SEQ ID NO: 787243 - DNA, 610 bp, Homo sapiens
aaccctgatcactgaaccctctacagctaatctcaccactgaacggccagctttgctctgcatacactgtgagatcccaggccccaccaggaacaagccatggaggaacagccaacctgctcatttcagtttgttgcctcagcctgcatctccacaggactcctggatgaaataggaactgcgaacacacttgagctgcagccgctgaatttggggcatctggaggaagcccatttcagggcaagacagcctcttgcattaggccaagaraccagagaaatcaggaacttgggaggcacggggacttagcattctaccccacccactgccttttatgcagactctgactcaattagaagcccagggaggtatagcaacaaaaatctgaggataggtagatgttaggaaagaaagaaaacctgtctctggtcctggctttcaaattcccatttggagtaaattttcagaatggaaattgattatttaacttcaatgaattttttaaaaaaagaatggactttttttggttctgtctcagtgattttaattaattttcagaggtctacagcaataactgttacctagaatgcttttatggataaaatgtgat

SEQ ID NO: 787244 - DNA, 610 bp, Homo sapiens
aaccctgatcactgaaccctctacagctaatctcaccactgaacggccagctttgctctgcatacactgtgagatcccaggccccaccaggaacaagccatggaggaacagccaacctgctcatttcagtttgttgcctcagcctgcatctccacaggactcctggatgaaataggaactgcgaacacacttgagctgcagccgctgaatttggggcatctggaggaagcccatttcagggcaagacagcctcttgcattaggccaagagaccagagaaatcaggaacttgggaggcacggggacttagcattctaccccacccactgccttttatgcagactctgactcaattagaagcccagggaggtayagcaacaaaaatctgaggataggtagatgttaggaaagaaagaaaacctgtctctggtcctggctttcaaattcccatttggagtaaattttcagaatggaaattgattatttaacttcaatgaattttttaaaaaaagaatggactttttttggttctgtctcagtgattttaattaattttcagaggtctacagcaataactgttacctagaatgcttttatggataaaatgtgat

SEQ ID NO: 787245 - DNA, 582 bp, Homo sapiens
tactatcacaagaacagcatgggggaatccacccccatgatccaatcacttcccaccctggtccctcccatgacacgtggggactatgggaactacaattcaagatgagatttgggtggggacatagccaaaacatatcaataaatacatagaaaaataaatagaagatccagacccccccaaccaatacctcgcagaatccacacatttatggtctccccagcaatgaaaaaacaaagtatcattttagtggggaaagtacaatcattttaataaatatgcaggatctatgctatatctctttggaacaatgagaattgacccttacctcccacatttaatttgagatgaatcatagaatccartgttcagggaaaaacaatgcagattctacaagaaaataccttcagaaatgtagagtaggccagagtttttcaatctcatcactattgatacctgagaccagataattgtttgttatgggagttatcctatgcactgtgggatgtttagcagcaaccctctattgactagatgccaccagcatccagtagctaaaattaaaaaggctgacaataatac

SEQ ID NO: 787246 - DNA, 603 bp, Homo sapiens
ggatcctttacacctgtatgcctttactctccaaattgattcattctctagttcctctatctcattactaagttcaaataatcatcttcctacaaatcactcagtttagatgccttgaaggcttctttgaatacttgctcctgttcacacccgacagtcagtcatcaagccctgtggaacttgtccctggtcaacatccgttcttctccattcctactgccgttcaccacacgcaggccctcattgtcccctcctgggatctatatcctctcctcagcacctttttcttctctattgataccatagacaacttctcatctcatattctctaaactcaactttcaggatatcatactcttattccatagatcagaactttcaatgactttctccttctttacagctcttcrtaacaactctgaagatagattcagtccttctttttggaattgcctcttatttctttttctttttatgcccatcataaacctcccattggcaaaattaccatgaacattttcttgtgaattcattgccttggttcattggttcatggacgggcaccaccatgagccaattagaatctttccctgagaatctaga

SEQ ID NO: 787247 - DNA, 480 bp, Homo sapiens
tgacaggatatatccagagctgataatcaaattaatcagtctattggcacatatgaaaaaataactgggtgtcaacgtgattagatttaaaggtactgcaaaatgttttctctggccacaaagccctaccgtcatgcccttttagaagaaacaaattgctaaggtcttttattgcaacctaaccatttcacattacagtataggaagggtgggccctctgttatgaagtttcatagatgacggatttaatttctgattrtgataggtatttatggatacttatatggaacctagaaaccattttttccagagattaccagaatagaattggatatgtaaattatatgctgaagtaaatgggaacagatataggttcatgacacacaggaaaacaaagctgcattagtttttaggcttaaaagtgggacacttcttaacttagaaatggcttggtttaatttcttccagtgcgctctgtag

SEQ ID NO: 787248 - DNA, 595 bp, Homo sapiens
gttttatatccaattgtgtgtttggttttagagtatgtgtcatgtagtgataagaagaatttatattctgtcatttttgggtagagggatctgtagatgtctattaagtccatttggtcaagtgttgaattcaggtcctgaatatatatttgttaattttctgccttgataatctaatactctcagtgggatgttgaagtctcccatttttattgtgtgattatcaaagtctctttgtaggtctctaagaatttgtgttatgaatctgtatgctctagtgttgggtgcatatatattaaggatagttagatcttcttgttgaattaaaccgtttatcattatgtagtgcccttctttgtcttttttgatctttgttgttttaatgtctgcttcttctgaaattaacacagaaactcctgctttttwctgttttcaattttcttggtagaattttctccataattttacttttagcatatttgtgtcattgcatgtaagatgtgtctcttgaagacagcttaccattgctgggtcttgcctctttatccagctgtcactctgtgccttttaattggggcatttagctcatttacat

SEQ ID NO: 787249 - DNA, 450 bp, Homo sapiens
ggcccctattctaaatgaacttgtccactggactaggggctctggccaagggaaataagataagggctcactttttgttatgaagcaggaaactggaaatgagattcaaagtcaggtgagtgctaagggtgatttgatgatgatttagggcagaaacagagacaaaacaagcagagtgcctacagaacaacatgtcagaagattccactctcaggggttgaccctgtgccatccctgcactcgtaaaatcctgagagtgaacaccaccaattgccctaggtgyctcaccctagtctcatgcctacttatttacttatgaattcaacaggtagacattaaactcccgttatatattaggcgatgttagacaatgaggagagatactcttggccttgatctcttggagaacttaaagtctaaagaggaagataaacagaaaaaagccagcaa

SEQ ID NO: 787250 - DNA, 483 bp, Homo sapiens
gtatttggtgatcagtgctcagttttctcagttcaatctattcaggcatctagggaccatacatgaaaatttcaaccacttaattaatgtaccaatacactaacagataattaggaaaaggggaggatgtggattgactgggagagagaaattaaccrtgccttccaaaatattttgcagaagaaaactgtgatggtagattggaattttaagattagaaaagtctctaatatcctataacataattagttaggatggataaatcaaaaccaaaaccaaaagcaaaaagaacatgaagaaaaatcaaagcaatctgacaggtttaagcgtctatttacttatctccaccttgaagaataaataccagggttttgtgtctaaagttccacttaaaggaaattatgaaggatggcccttcaggagggtttgggacagataaatctggggggaaaaggtgggtcgaagaactttgaaatcaaggtg

SEQ ID NO: 787251 - DNA, 641 bp, Homo sapiens
aagggagagagacttttcaaggcatatccttttgtgcttttcacattatatgcaagtgcatatattacctattcaaataacgtgaaaagtgaaagaaaaaaacaaattttaaaagagcccctgcttgaaacactcagtttgccagaatctgcttttcttttgctaaggtggtcaaagttctgtaargaggacacatttttcttttgcagatgattttgctaaaaaaaaaaaaaattcagagaaagcatctaatgactttgaaagaacaccagaataaacataatggattttacattctgatagttacacaaactcctcaccagtttagagttacaccttctaccattaggaagtacataaagtcagcctacatgcaggagacaaagattttcattctgccatgaaagtaaagaatttcattaaatatctctgatgatagcagctgcctggcttacttgggagcagaggtgaaggtaaatgtttccttaattattttgtgatgtttgaattttgtgctaaccacagaattaccagtttttatttattttttttaatttgagcatttaagacagtgtgattacatggaactacaaggtgaccatctcacactcctataatcactcccagcagcacctttgagt

SEQ ID NO: 787252 - DNA, 570 bp, Homo sapiens
ctattaaccagacaggaaagtgctagtcttcgtttgctttgtactgctgtaacagaatacctgagactgggtaatttataaggaacagaaatgtactggctcacagatatggtggctaagacgtccaatatcaaggtgctggcatctggcaaggaccttcttgttgcatcatcccatggttgacaggcaaagagagggtgagagagcaagaggggccaaacttattcttttataacaaacccaccccctcgataatgacattaatcctttcataagggagagtcttcatggccawatcacctcttaaatgttccacctcttgcggatcacctgaggtcaggagtttgagaccagcctggccaatatggcgaaaccccacctgtactaaaaatacaaaaattagctgggcgtggtggtgggtgcctatagtcccagctactcaggaggctgagacaggagaatcacttgaacctgggaggtggaggttgcagtgagccgagattgtgctattgtactccagcctgggcaacatgagtgaaactctgtctcagaaaaaaaaaaaaggtccca

SEQ ID NO: 787253 - DNA, 516 bp, Homo sapiens
aaattgtaaaaaggagctaaacagaaattctatagctgaaagacacaataactgaaatgaaaatttactagaggagctcaaacacagaagaatcagtgaacttgaaaataagacaattgaaattttcaaatctgaggagcataaagaaaaataaataaagaaaagtggataggccaagtgaggtggctcatgcctgtaatctcagcactttgggaggtcaaggcgggtggatcacttgaggtcaggagttcgaaaacagcctggccaacacagcaaaaccttatctctgcyaaaaatacaaaaattagctggacatggtgatgagtgcctgtaatcccaactactcagaaggctgaggcaggaaaattgcttgaacctgggaggcagaggttgcagtgagccaagattgtgtcactgcactctagcctgggcaacagagtgaggctctgtctcaaaaaaagaaaaaaagaaaagtggacagagaccaaggaacttgtggaataccattaagtagac

SEQ ID NO: 787254 - DNA, 593 bp, Homo sapiens
aatgcagccaagctctttgctaaggtataacatgtatgacatttgctccatttcccaataagatcctcatttccatctgagaccttggcagcctggacttcactgttcctatcactattagcattttgatcacaatcatttgagcagtctctaggaaattcccaactctctctcatcttcctgtcttcttctaagccctccaaactcttccaacctctccccattacccaattccaaagtggcttccacattgttaggtatctttatagcaatgccttactcatcagtatcaattttctatattaggcaattcttgcactgctataaaaaaatacctggcactgagtaatttataagaaaagaggttttattggctcacagttctgaagctattcaggaataawagcagcatctgctcctggggaggcctcaggaggcttccattcatggtagaaggcaaaggggaagcaagcatatcacatggcaagaccaggagcatgagagagtgagttagaaggtgccacacacttttcaatgaccagatctcatgtgaactgagtgagagctcacttatcaccaaagggatggcccaa

SEQ ID NO: 787255 - DNA, 619 bp, Homo sapiens
attctagttatctattaccaagttttatttaaaacccatggaaaaatggaaggaaagaattttttgggagtaataatattacaggggactttataaaaagtatttccaataaaaatttttaataataaaaattagtaatgtgacaaatactattttaaacctaaaaccaatgtcttttaaatacatattttatattttggggaaattatctaagcatattgacttattttgtaatgtgataccaatttacaatgttaatgagggttgcaagtaaaatgatgaataacaactttatacaggtaaagtggctatttctgtcatataacattaaataaagttttaaagaatcttgatcattgytattacataaaaatatacagtggaccacaactttcagctttctgtctttatagacctgtcttttcaagatacttcagataacagcaatcatataatacatagtctcttgaactcgtcatccttaaatggtttaccattcatctgtgttgtaggatgtattagtattttgttgtttaatattgctgaatagtattttatttatctgttcacctgttgatggacatttacattgttacaatttgagattattacaaataat

SEQ ID NO: 787256 - DNA, 604 bp, Homo sapiens
atattataaactaaacaatatcacaggggggttgtacatccctgcaatattgggagtaatatcctcttttcctttgaatattagagaacatataacagagggggtgtacacattcttcgatatttggcttaagatcatccttttcccccctaaatattatgaacagtatcacggggggagtacacccctgtgatattgggagtaatatcatcctctcctcacttggatattaggaacaataacacaggaggggtgtcacccccgcgatattgggactaatattctcttctcccttcttcaatattaggaataatattacaaagagrgtgtacgcctcctgagatattgggagttatgtccttttctcctttagtgaatattagaaataatatcacaggggcgggcatacactccctgctaaattgggagtaatatcatcctctcctcccctgaataataaagacaatataacattggggttgtacatgccctgcgatattgggagtaatatcatcctctcctttcttgaattttaggaataatatcacacagggagtgtacaccttctgctttataaaaaatcgtaggggtgtgaacactctct

SEQ ID NO: 787257 - DNA, 650 bp, Homo sapiens
tctcctggattcaagtgatccttccacctgagcctcttgagtatctgggatacaggtgcgtgtcaccatgcccagctaattttttttttttttagcttttgtagtgatagggtctcactgagttgtacaggcttgtctcgaactcctgagctcaagcaatcttccctccttggcctcccaaagtgctgggattacaggtgtgaaccaccacacccaacctggtcaattgattttgacaaagatgccaagaacaaacaatgggaaaaggactgtctctttaataaatggtgatagggaaactrgatattcacatgcagaagaatgaaattggactcttatctcaccccatattcaaaaatcagctcaaaatacatgaaagacataaatgtaagacatgagacagtaaagctactagaaggaaacgtagggagacatctccatgatattgttctgggtaatgatttcttggataggactccaagagcacaggcaacaaaaacaaaagcagacaaatggaattgcatcaacccaaaaagcacagcataaataaaacaaaacaaaagaaacaaacaaaaaaccaaaaacacactccaacacaaaacaaaacaaaaaacaatacagtgaagaaacaacccacaaattgggagaag

SEQ ID NO: 787258 - DNA, 639 bp, Homo sapiens
ctatagattgcagctctgtatcttttatggtttaaaggtgaatactattaaaatttgaactgtagttttttgtgcttatgcccatgtttaccatatttgcatgttgagaagttactctgtaaaaatttttcttgttaacatttttctgatttacttagatttagtgatttttctttttcagaaaaatgcaatcaatactttgtatggaatagaattggaatccgagggctttagggaatcatagaaagaaatataatacatgtaataaatacatataatattacatataataaagaaatataatacatttataaaaagtgacccttagaagatggttcaaccactgaatggaaggttcctgggtccctaaatgactatgcaaaccgcataagcatcatatacctcctgcagcatgctattgactaaatagaaagatggagcaatttatagggctcacttcatgcattttgtgtctctcaargatcatatgatggcactgattattgtccgatgcctgaaaagagttgtatgtatttttctaattttatggtagtttgtaggagggctattctggtactaattatttcatcatagccaaaaacaaaaatttctcagttcattcagtcttgaaacatcaaa

SEQ ID NO: 787259 - DNA, 577 bp, Homo sapiens
aaaaattagtaaggatttcacaggagaaaatccttgtgacttaacaaataacaattatgtacaataacctgagtatatcccctaattatctcaggttagaaaaaggtatggtccttaaaataaccagtacctaaatcacttacagattttccttgtttagacatacagttttaggtcatcactttaaattacagccagtcaatagaatgatcaagcatgctgtgatttatattcagtgaaaccaactgaccaattcttgcccaaattctcaaatactttacaagtcttcaaatgagatcgtattctatttgaattgaatgctaaataattctccttcatacaagtcctctatttctaaccatacattgatagggtactaaggaaacaagatgagatttytaaaattaatttgtaaatatgactgtttaaatcgatgtttaccagaaactgctttttaaaaaagtaaatctttgatagtagcatgttttgttttttacatctttcctgtaaaagattcagaaaaattctgttacatcaagactctctacctaaacttcataggacattaaaggtgagt

SEQ ID NO: 787260 - DNA, 531 bp, Homo sapiens
gacagctcagtaaaggaaagacaagaagattctcggaaatccatgccatctgacaactcagataagcctgccaacctgatccctgggagagagtctggcaaagatggtggcaggaccagttctagaaaccagagaacaaagcatgttactagaatagaatctcaggctcaygcctgtaatcagcactttgggaggccaaggttggtaggtctcttgagcctgggagtcccagatcagcctgagcaacatggtaaaaccctgtctcaactaaaactacaaaaaaaaattagccaggcatggtggcatacgcctgcagtccccgctgcttaggaggctgaggtgggaggatggcttgagcctgggaagtcgaagctgtggtgagctgagattgcaccactgcactccagcctgggcaatgggagtgagaccctgtctcaaaaaacaaaaaagaatagagcctcaggaaagggctaaggtaaaatacagttaatagacacagaacaggatccgggaaacaaagcaaaatcctat

SEQ ID NO: 787261 - DNA, 657 bp, Homo sapiens
tcagtttgtgaaaagattgttactttttttgtttaaaactttttcatgaatttccattgttttgaagatgaaatttaaacccttgacattatttccagggtcctgtatggtctgacatctgcatacctctctaacctcattatgagctactcttcttgctcctttctctgtaagccctagccatatttatcttctctcagttcctggaatgctttaatttccaccccccgccttcagagcctttatgtttgctattttcccctgccttggctgccagcaccttccttaccctcacctaattaactgcttacccttgggttagatcccactttaggcaacatttcttcagagaagcttttcctgtttgccagtttctctaactcctttcctcatcctctagactggttcaattccccagctactatggcacttggtactttaatacttacctttgtaacatttaacawtttttggtcattgtctattttccatttagactgaacctttcataagagagcttagatattaggaagaaggagtagctgatagtaccaatttttaagcaaattggttgtagctggggctattggttttataatttaaaagttaatgttttatcttctcttctgacagaaagtgaaatatttatttccattg

SEQ ID NO: 787262 - DNA, 595 bp, Homo sapiens
aacatctgctcctgagtgatctatgggtaaacagtgaaatcaaggcagaatcaaaatatttgttgaaacgagtgaaaatagataccaaaacctctgggatacagcaaaagcaggctgaaagggaagtttatagtgttaaatgtctacataaaaaagwcatttcagattaacactaatgttacacctcaaggaactggaaaaacaagaacaaacaaaacccaaagctagcagaaaagagatcagaactgaatgaaattgagaccaaacatgcacgcgtgcgcgcgcgcgcacacacacacacacacacacacacgatcaatgaaatgaaaagttgattcttggcaaagacaaacaaaattggtaggcaaacaaaagaagagagaggattcaaataagaacaatcagaaactataaagatctgattttatctttaaaatcaggtaaatttaaacttaggggtgcagtggctcaagcatgtaatcccagcactttgggaggctgaggcaggcggatcgcttgaacccaggagtttgagaccagcctgggcaacatagcaaaacaccatctctacaaaaaaaaaaaaaaaaaattagct

SEQ ID NO: 787263 - DNA, 473 bp, Homo sapiens
tggtaatggctaagattgctcctaatggaccaactttccacagatagcaatcataaattctggacaaagtgtaaaaaagcactgaaggcaatggagaacaaccacttagaagaagaaaatgacactgagtgagtttcctgttttttacagcttctagcctgagagaaggtcccatccatggggcagccaaaactggaagagaaatccactgttttactggcttgaaaaatcagragataaaattgtagtcactactgcagatgtaaagtgagtaggaaatctcaggaagaagataccagatagaagaagacccatactcttattataaagtctgtcaaaattttatctgatacctgaactacacatgtgaaagacaggctccaaacagcacagttaaagataaagaaatttaactgagatttcagctgaccaacgtatgggggacagagtttgggatttcagttcagccaagt

SEQ ID NO: 787264 - DNA, 559 bp, Homo sapiens
ataacatcttcactatatggaatagttccctcactgtgtgcttaccaacactcaattgaatacctctgcacacctctggacttccctctgggtgccactctcctctcccatactctggcctgcaaactctagctgtcttgatcttcttggactctcagttccacctcctgaactgcgtctgggttttgcggcctggaaatgctctcaaggcagtaagctggggcaatcatagggctcacctcatttatttttccgcctctcaaagawcactgtccttcacttccagatgtccaatgtcttcaaatctgttgtttcatatattttgcccattgttaaaattgtttcaggcaggaaagtaaatctggtccctgtttattccatcttctttggaagtggaatctctatttttaatttttaatgtcaaatctgttctcaaagttacaaaattcaagtaaaaacaggacaaaaacataactagtaattagtataatgttggtcactattcacttatttgttcattaacccattttatccctcaaatatttacggcattctatat

SEQ ID NO: 787265 - DNA, 430 bp, Homo sapiens
atacggatactttccaaacacttaaaagaataaaatgacaaatgatgactaagtcatcatactttttaaaacactcttttaaatgactcaaccaaagtatttttccctctatcatgtcatcaaaaagtagcaatgtctttaagttgcctagtgcaatttacagcatcctctagtaacaaattacccatgaraaacaagtatgtctcatttaataaatgaaatgtgttactctaaatctgtagtaaaaaaaagattggagggaaaaaaagctatcttatcaggaatattcatagagtctgggaccaatgagtaaagaaatatcacaaattacatttcaagatggcactgaaggctggggaaagcagcccaaagaccgcctcaactggaaaaacagtatttccacagagcaaacttacaagatctgctgttg

SEQ ID NO: 787266 - DNA, 612 bp, Homo sapiens
gaattaaattttttgccaaaactgagtcttttacgtaacatgtagacaatgttatatttttcctgataggtgttaaggagtttgctttactgcattgtgtttctttgtgggatatgcttcaaccaaatgcaatgaaactggcctactttacatttaagagccgatctagttagctgctttcatgaaaaagtaggcaaggggctatttgaaaaattattaaaccagttgtacaagatttaaattaataaaaaccactattataacttgagcattaatattcacatttagcatatcaagttcagcaaatcaaattcattgaaactgaaaaatrttactgtacctagcaaatttaggatctcaacatgcagttccggaattgtttttccctaaaaggtttttgaagaaaaaaaaatcaaatgtttcaaataatgtttatcaagaatactgaaaatttagataattcagcttaatttttatttttcaatggataacacgaaatttatgcagatagactttactaagcttggctttcatcacattacttattatcaattaaacctcaaaacttttaattaaatcaaattgttatcttttaaaattgacaagctccat

SEQ ID NO: 787267 - DNA, 612 bp, Homo sapiens
gaattaaattttttgccaaaactgagtcttttacgtaacatgtagacaatgttatatttttcctgataggtgttaaggagtttgctttactgcattgtgtttctttgtgggatatgcttcaaccaaatgcaatgaaactggcctactttacatttaagagccgatctagttagctgctttcatgaaaaagtaggcaaggggctatttgaaaaattattaaaccagttgtacaagatttaaattaataaaaaccactattataacttgagcattaatattcacatttagcatatcaagttcagcaaatcaaattcattgaaactgaaaaatgttactgtacctarcaaatttaggatctcaacatgcagttccggaattgtttttccctaaaaggtttttgaagaaaaaaaaatcaaatgtttcaaataatgtttatcaagaatactgaaaatttagataattcagcttaatttttatttttcaatggataacacgaaatttatgcagatagactttactaagcttggctttcatcacattacttattatcaattaaacctcaaaacttttaattaaatcaaattgttatcttttaaaattgacaagctccat

SEQ ID NO: 787268 - DNA, 608 bp, Homo sapiens
aagcagctatcaactaaccaagcaaggccactcactggacaccatactccataccccacagttcaccaatgtatagtcaatcactaatcaatcttatttgtctaaccaatgggaattcctgacaaacagctgtatcagcccactccctgtccctcttattgctttggaaaacctgcttctgtcaaaggcctaacagagctcatatccaaggtgacctgggtctgagtcttccaggtggctgtcctctcaacttggctcaagtaaacttttttttaactgttattttaggtttggggtacatgtgaagggaaacttgcatcacggggtccttgtcgtacagattttttcatcacgcaggtactaagcccagtacccaatagttatcctttctgctcctctccctcctcccaccctcccccatyaagtagaccccagtgtcttgtttccaacctatgctgttcatgatttcttatcatttagctcgcacttacaagtgagaacatgtggtatttggttttctgttcctgtgtcagtttgctaaggataatcgcctccagctccatccatgttccagcaaaagacatgatcttgttcttctttatgactgc

SEQ ID NO: 787269 - DNA, 610 bp, Homo sapiens
gggcctagggtaccgctgctcccggagctctggagcactgatcaggagtgtcgcatgtgtccggttgctttcgaatgcaggaggcgacaagtactagtggctcactcagagacccttggcactttcttcagggaagctatattcatattataaataaacttaaaaaaacattcatatgtatagttagaattgatttgtagggtttttgaactgatgtaacttgggcaaaactgaagttcttatttttgttgttgctaagagacaataaagataaaaataaaataaagattaaagataaaagatttggtatacaaggagtataaatatgaaatgagagggcattttaaaaatgaattaataattttgaaatatatrttaatacttgctgacttccaaagtatcatctgtgataatttatctcattgtattccatttcgttgtaccaaacatcctaattgtttggaaaaaaaaaaaagtatcagaaaattataacagacttttgataggccctactagcttaggtttttaccatttagttggaaatgttgagtaagatctatatttttttgtttttaatatttagaattagttgctctttatcattatatta

SEQ ID NO: 787270 - DNA, 552 bp, Homo sapiens
ttctctgatacctatctaagtcttctctaaatgtgtccttatacaactcactgtgtaagaaagaaaattggaaaatataattggtaaaccatagaacattttggaaacctgtcttcaactttccctaatgtgataaagagagatgaatgttgaatattccactgattattgaattctgcaattctgcattcatcatacagaatttagttttgaagcttttaattcccatttctttctcttctagttgacaaygaggctggcagtccaaccttttctcattagcctgtctgctttaacttggcacttgtgtctttggtttcccatttgaggtctaatgtcatgtcctgggtacaggttaaggctagcttaccattctacctttgagccaaatggtaaagtggaagttggaatacatgcttgagcttattggtaataatatactgtaaagcttgctattagtcatgataataaagtaaacatgatattagtgatgtagataatttagacatctgtaacattttattctgcaaaatgtaaaatgatgatgataga

SEQ ID NO: 787271 - DNA, 609 bp, Homo sapiens
ttaaaaattacatttacaataatttttccttcaataacttttagaaaaaaagatgctattttgttctagtaatatgatagctatcaaatttgtgttagtgttgtggagaaagagtgtaagtaaattacaactgtcatagtttttcttgagaaatataccttgatttcaaacatttattaagaaaaattttattttatttaaagtatatttgaacattttatacaaacctagatgaagaagtrgttctaactttatcttctattttgtaagttttcaccatgtttttcctaacgtttattttttatagggtaaggacaaatacaatgaaaaataagagactaaattctcactgttgaaaataagggaagagatttctttcttctccattttctcagagactttactttagaaaacttatatttgtaaatactttatccactcttcgaaatgtccaaaaatccttttgaagactaagtaggcctattgtcagctttatgacctaggactgtctttctcaggcacttgggagctaactttggtgggcatttcactctaagttgcagaactgccttgtcataaagatatgagaagtttgttttcatctggttt

SEQ ID NO: 787272 - DNA, 645 bp, Homo sapiens
gataatcatatattcatagtaattccagtaatgataatagtgccaaatagacttttattaagtaactagccttcacggaggtccttttcttttctttttaagattcatggatttcagtaattttatgaactacatatttcatcagtaaatgggaaaattttctgttgaataaatcctggatataattgcatataactaaaatatttcaaaatataactttcactacaaaagttgacaggatgattaaacatctctcttaaatttccatgactttctaatgatgttcctttttatatcaatcatccacttaactataaccatggcttaaaaatagtctcaaatgatcaaccacattcatgataagaaatgggcatgtatggtggaggaaattttttttttcaaatcaaggctggcatacagayattttcttctcttgactcttcaaaataatattctctgggttctgatataacttataatcaatgtttccatggataatggaaaatgtgattatttacttcatatttatttttcataacacttttaagaaaaagccatgttagcaacatacggattttgttgccagagtgaaccccagcaagttatatacacagagcttccccttgtagcttttggaattgattg

SEQ ID NO: 787273 - DNA, 613 bp, Homo sapiens
cagtttgttaagtatacagttgttcatcatagtctcagatgtatcagtctgtcttatcagttgtaacacctcctacttcatttctgattttatatgggtcttctctctctcttttttgttagcttatcaaatggtttatccatttttttcatttttttcaaacaccaacatttaatttcattgatcttttattttgtgttttgcctggattttatttagctctactctgatttttattatttccttmcttctactaattttggctttggtttgttcttgcttttctagttcctttaggtgcatcattaaattgtgtatttgaaatctttctacttttttgatgtaggtgtttattgctataaacttccctcttagtactgcttttgcaatatcccgtaggttttttgtatgctgtgtttttatttcagttcgcttcaagaaaattttttatttacttcttaatttttttccttgacctaatggatattcaacagcatgttgttaaatttccatgtacttgtacagtttgcaaagttcttgttattgatttctagctttattccattgcagtttgagaagatatttaatatgatttcaatttttaaatatttgt

SEQ ID NO: 787274 - DNA, 613 bp, Homo sapiens
cagtttgttaagtatacagttgttcatcatagtctcagatgtatcagtctgtcttatcagttgtaacacctcctacttcatttctgattttatatgggtcttctctctctcttttttgttagcttatcaaatggtttatccatttttttcatttttttcaaacaccaacatttaatttcattgatcttttattttgtgttttgcctggattttatttagctctactctgatttttattatttccttacttctactaattttggctttggtttgttcttgcttttctagttcctttaggtgcatcattaaattgtgtatttgaaatctttctacttttttgatgtaggtgtttattgctataaacttccctcttagtactgcttttgcaatatcccgtaggttttttgtatgctgtgtttttatttcagttcgyttcaagaaaattttttatttacttcttaatttttttccttgacctaatggatattcaacagcatgttgttaaatttccatgtacttgtacagtttgcaaagttcttgttattgatttctagctttattccattgcagtttgagaagatatttaatatgatttcaatttttaaatatttgt

SEQ ID NO: 787275 - DNA, 645 bp, Homo sapiens
gtctcatctgagagaaggcaagtccttgccacctatgaggatgtaaaattaaaaacaagttagttgcttcctagatacaatgggggtatgggcattgggtaaattcttctattccaaatgggagaaattgaccaaaacaaaggagctacaggccccatgaaaatccaaaatccagtggggcagtcattaaaattcaaagctccgaaatgatctcctttgactccacttcayattcgggggcatgctgatgcaagggttgggctcccatggccttgtgcaatttcttcacaggctggtattgagtgcctgtggcttttccagatgcacagtgcaagctgtcagtggatctaccattctggggtctggaggatggtggccctctcctcactgttccactaggcagtgcctcaatgggaactgtatatgggtgctccaaccccacattccttttctgcactgccctgacagaggttatccatgatcatatcagcagtagacttctgcctggacatccaggcatttccacacatcctctgaaatctaggctgaagtttcccaacctcaattcttgagttctgtgcacccacaggcccaacactatgtggaaaccaccaagacttggggctttcaccctctgcagcaatg

SEQ ID NO: 787276 - DNA, 624 bp, Homo sapiens
atctgatttttctggtacactagagcacggaaagccctctgtccttgtgataaggcagaacatccaattgagctgattaacacaagctgcctgcagaaggcaaaacaaagagcacactgtaaccgcatgccgactggggcttcgggagctgtaaacacaaccctagacgctgccttggggccagaacccaaacgttccccacaacatgcccgactgcatgctccccctaggrgtttgagcagaggggcactgaagaagcgagtcacacccctgttgcacacccttccaggggaaaaaaagagcttttcccatctcaataaaactagtacatacaattctcatacctatatctcattccacttccacctttaacatctctcattctaatacttagttgctctttgaactccatcatgaagtcttattcaactaaaccatcaagtttatcatatcctccactgtttgattttcatttcacaacacaggatgacttgggtatttatctaaaatgcagattcatggtctttgccccagtaaatttttatccgagagattttgagtaggggttgtgatctatatttttaaaaacctccccgggtgagacagaaacatattcaaagacag

SEQ ID NO: 787277 - DNA, 562 bp, Homo sapiens
tctttatcatccacctttgatgtctaagtccttgacctgtctttagcaaaattccatttaagatacttgatgtctccgcttagtaattttccatccactgacctccacaccctgttccttggttagaaatctgcaattgggccgggcgcgcaggggctcacgcctgtaatcccaayattttggaggccaaggcgggcggatcacctgaggtcgggagttcgagacagcctgaccaacatggagaaaccccatctctactaaaaatacaaaattagccaggtgtggtggcacatgcctgtaatcccagctactcgggaggctgaggcaggagaatcgcttgaacctggaaggtggaggctgtggtgagccaagattgtgccattgcactccagcctgggtgacaagagcaaaactctgactcaaaaaaaaaaaaatctgcaattggacaattgtatattgtccttgttgtgttcagaaaggaatccaatcactcccttattgcaatatctctattgcaatactcttgaataaacatttccttaccatttaaaaaaagtttcag

SEQ ID NO: 787278 - DNA, 547 bp, Homo sapiens
gccacttaaatcctctgctactagatttattcaacagttcacttttagcctttaggttgcagttgtttaaaatttggcaaacatctcaagagaaataatggctctgaatctcagtatcactcttaaactttgctttgtaatcttgacccctcaaaatcttgaggtcttggtgatgctcaaatagaatttaatttgcaatagttttatatatattttcttgttattcacagaaaggtctgatacgagctagaacaccacaataaaaaacaggaattctagttaccttttaaaatgattagttttaatcagagttttagaagtaaygacttcatataatgatttctttcaaagtaacttaataacattctacgtggaggcttagtaatagctcttatcacataataaccagaagaccctgattcactatatatatatatacacgtatatgtatatgtagccagagctttacaataatttaaaaaggaagtgataaaagttgtatttcatatcactatttgaatctttatttttaattcagataaaataa

SEQ ID NO: 787279 - DNA, 538 bp, Homo sapiens
aataagatttcgacttaaaaaaaaaaaagaaaaaaaactataaaaatgtctgtgttgtggtctaatgactaaaaacaatagtcattagtagtcgagaatgaaaaccagttaaacccataagactgagttcatgatgagatgatcaagaagaaataactggatttaagaacgagaggagggactaggctcagtggctcatgcctgtaatcccagcattttacgaggctgaagcaggatgattacttgaggtcaggggtktgagaccagcttgggcaagacagcaagatcccctgcctctacaaaatattaaccaggtgtggcggcacgcacctgtagtcccagctactcaggaggctgaggcaggaggatcacttgagcccaggaatttgaggctgcagtgagctctgatggtgccactgcactccagcctgggggacagagcgagactccatctcaaaataaaacaaaaacaagaaagagataagatgatgaagaaggaaaagaagacagatgacaaaaaaaaatgctacaggtataa

SEQ ID NO: 787280 - DNA, 624 bp, Homo sapiens
aaaaaacaaaaacaagatgattaactttgcatttattcataaactgcaacatcggattaacacaaaacttggaatggccagaagatttttcacaatttaaaaaaaaaaaaaaacctttcaaaattgtctgtcatgatggacttagtaatagtcaaggccatttactgattagacctggtagaagcaaggcaggggaaaaaatggtaattttggtccctgtgccatatgacttaagtgtcatttcagttaaaaccactgagaatctgtgtgcagtggctcacccctggaatcccaraactttgggaggctgaggtgggtgggtcacttgaggtcaggagttcgagaccagcctggccaacatagtgaaaccccatctctacaaaaaatataaagaacgagctgggtgtggtggtgcatgcctgtaatctcagctactcaggaggctgaggcacgagaattgcctgaacccaggaggtagaagttgcagtgagccgagatcgtgccactgcacaccagcctggacaagagagtgagactgcctcaaaaaaacaaacaaaaaaaccccccaaaaacaaaaaaacccaaaatgcacaaagaataaggatagaaatccttaacaatcat

SEQ ID NO: 787281 - DNA, 599 bp, Homo sapiens
attatgtacacctagggcagaacacttccactgccacactcttggttttaaagcctttttgtttccaaagggaatgctttatgtattacatggaaaacatcttggtaaagcagaaaacttttctgatttggtttccaatcaggaaataactcttcaaccaaagatcctagcccaccctttcatcagagtgcagtagaagtgactggtgcaaaataaataaatgytagaaagaagacagtaaagcttacatagataacctcagggtcaacccaaactattccagagtaataagaaaaacattatctaaaacatattctagagagcaaattgcattagttatctactgctgcataacaaattactctcaaacttagttgctgaaaataataaatatttattatctcatacagtttttggcattcatgagtttaagaacaccttaggtgagagattctggctcagaacctctcttatgagattgccgttaacctgttgatgcagcagtcatgtgaatgtttggttggagctggaggctctatttcaaggcttactgatgtggttgtttataggaggcttcagttcttctccttatggtcctc

SEQ ID NO: 787282 - DNA, 614 bp, Homo sapiens
aaggtgtgacatttgctgctttgataaaatctccagatgatggtacttacacaggtgcaataaggtccaagttgttaaccttatctcacttgcaaatctgcaatttcctttttcctcaccttctttttgagatgtgactaaagaagtgatggcaaggatgtgaaggattaggcaagagacatcctgggttgggagactgcattctatagtaaaaatcctttgtcctttatttcccaggttgaccatcagggtaatactactagctcattgctcagcttttcactttgctttgattggaagtcatcagtgacttagaaaaaaaagctttaaaaatgcaaaattattacttttcatcttagtaatagaagcagtagctttcttaatggtaatccactttttttccccctttggttttctttttagcaaagattggtcactgttgacttatctstcatttacttataataggtatcatgtatccccttgactcaccccaatttaagacactctctgataaaacctgtagtgctttgcaccttcaagttaattacccaagtatccctttctaccagatctcctaccctaagctcatcctatacagtatttctggaaca

SEQ ID NO: 787283 - DNA, 623 bp, Homo sapiens
gagatccccaagtttttgtttttgttttgtattgtattgttttttaaaaaggactaggagcagaaagaggagtggtaggagtggtaagtaagagctgaggctcaggatgacttgaaggcattgtgaaaattaatagccataagagaaaatggaagactagaccttgaacctggacaaagatacgtttgaatctgagatgtttgcataaagttagacmctaagaaggttatattcgtggtgaaagggtggtccaggaaaaaaatccacctgccagcaaagagagatgtcataaaacctggctatgtccatgactactacaaatggaaaatgaaagtagaactaaaactcagaattcttcttgaggatttgtaactatcgacattgcttctgtggctttgtggttcaaacccttagcacagaaataaaaatgatttcttttttggaactaccctctggcaactgacagaagcaacagtaaatgctgtgtggaggaaacatgcttagataaaataactctcaatacgtatttgtgtatgtagaaaagttatcttttaagagcaagaataaaatagcatgatttcagattaacaaaaactgggtaagtttataatcaacaagttctt

SEQ ID NO: 787284 - DNA, 623 bp, Homo sapiens
gagatccccaagtttttgtttttgttttgtattgtattgttttttaaaaaggactaggagcagaaagaggagtggtaggagtggtaagtaagagctgaggctcaggatgacttgaaggcattgtgaaaattaatagccataagagaaaatggaagactagaccttgaacctggacaaagatacgtttgaatctgagatgtttgcataaagttagacactaagaaggttatattcgtggtgaaagggtggtccaggaaaaaaatccacctgccagcaaagagagatgtcataaaacctggctatgtccatgactactacaaatggaaaatgaaagtagaactaaaactcagaattcttcytgaggatttgtaactatcgacattgcttctgtggctttgtggttcaaacccttagcacagaaataaaaatgatttcttttttggaactaccctctggcaactgacagaagcaacagtaaatgctgtgtggaggaaacatgcttagataaaataactctcaatacgtatttgtgtatgtagaaaagttatcttttaagagcaagaataaaatagcatgatttcagattaacaaaaactgggtaagtttataatcaacaagttctt

SEQ ID NO: 787285 - DNA, 548 bp, Homo sapiens
acaccactaaaaccttgatctcacctttctagcttcctgaactgtgagaaaatagatttctattggtcaagccactcagtctgtggcactttgttacagccccagcaaataaatatagtaatatgcttttgttttttttcatttcagtttcaattgttcattgcttacaaatacaaacaacttgtttttgtgtttactttgtatccttgccaccctgttatattcactattagtcctaggagtttattcttaaagattcytggggattttctacataaacaatcatgtcatctgcaaatagagacagttttttttttcttccaattgacatgtcttttatttcttatttttgcaattacaacagttaggacttccagtataatggagaataagagggataagagtggacatccatttttcaccattaagtataattttagctgcggagattttcgtaaatatcattctcaacttgagaatgttcatcttgttcgttgagagcttctatcatgaatggatgttatgtttgtcaaattcctttttttttt

SEQ ID NO: 787286 - DNA, 661 bp, Homo sapiens
gtctcacaaaacttaacatccttagatttaaatgagaaggtgatgcatctatgagacaagaacaaagtactgtcaaaataatgaataaggtaataagaaaaaaactcatcaatttttaaaaggatagctcatttttttgaaatcaatagaaagcttggaaaataaagtagatgaaagctcccagaaagcagaacaaataaacagcaattttttaaaagagtgataagatgagagtcttggagaaataatctaaaagattcaagatccaaataatagttattccagagatgtagagaaaagaaagagaaggaaattatcaaataaataactaaagaaaaattccatgttgaagaacatgtcttgaggtcaaaacagtccaccaagtgacccccactctgagactcattgaagtaaagagaagatcctaaacactaccccacagaaagagaaatgtcacttacaaaggattggaaatgagatttccattgcrctagtcacagcaacctgtgctagaagacaatgaaacaattgagttttaaccagaaatctacaaacagacaaattacaaataattgtgaggggaagaaaaaagacatttccagacacattcctaaactaaaaaataattgcctctcatgtgatctttcttaggaaaccatta

SEQ ID NO: 787287 - DNA, 620 bp, Homo sapiens
atttcattaattccctctctaatccttattatttcctctttctacttgctttgagcttcgtttgctcttctttctccattgtcttaaggtagaatgtttggttgttgatatgggatctttcttcttttttagcgtaggcatttaaacttccctgtaagcactgctttcaccgcatcccctaagttttggtatgttgtgtctttgttttcattcatctcaaaatattttcttattttcctctgcttttatcttagacctgttkgttatttagtagtgcgctgttaaatttacacatgttcgtgaatttcccaaatctttctgttactaacttttaattttattctcttgtgatcagaggacatatattgtatgatttcaatccttttaaatttattaaggcttgttgtatagcctgacatacagtctattctggtgaatgttccttgtgcacttgagaagaatgtttattctgttattgggtacagtgttctattgatgtctattaggtctgctttgtgtatactgttgttcaagtcttgtatttccttgttgatcttatgcctcattattctatccaatatttaaagtggaatatttaagtatctgaatattaatgttga

SEQ ID NO: 787288 - DNA, 620 bp, Homo sapiens
atttcattaattccctctctaatccttattatttcctctttctacttgctttgagcttcgtttgctcttctttctccattgtcttaaggtagaatgtttggttgttgatatgggatctttcttcttttttagcgtaggcatttaaacttccctgtaagcactgctttcaccgcatcccctaagttttggtatgttgtgtctttgttttcattcatctcaaaatattttcttattttcctctgcttttatcttagacctgttggttatttagtagtgcgctgttaaatttacacatgttcgtgaatttcccaaatctttctgttactaacttttaattttattctcttgtgatcagaggacrtatattgtatgatttcaatccttttaaatttattaaggcttgttgtatagcctgacatacagtctattctggtgaatgttccttgtgcacttgagaagaatgtttattctgttattgggtacagtgttctattgatgtctattaggtctgctttgtgtatactgttgttcaagtcttgtatttccttgttgatcttatgcctcattattctatccaatatttaaagtggaatatttaagtatctgaatattaatgttga

SEQ ID NO: 787289 - DNA, 649 bp, Homo sapiens; identical to SEQ ID NO: 784602

SEQ ID NO: 787290 - DNA, 580 bp, Homo sapiens
gccattgtcaatcaactgtagcatcccttgtaaactcagggccaccctctgagtgctctcaaatcagcatttccagtttctggttttctcaacacctccccttgctcaagatttccatcctgatgaaggaggtcaagtcataggtccctgaacccctgcttccacttgccttactcttttccctccacaggggcctttctccagagacatgagacagtttccctttcatgcctgctcaggatttcctctgtctcatggtgtgctccttctggggtgaaagtcatggtatctgtggcagacatggagatgcaacctcagatctccaagaaaagatctgttacccagcttcgaggaggaaactcccctaggtctggcactgcttttgagccatgatactcttcttcggtggccctcaaacaatgagcaaaatattggwacaaggcagggccatctcctcccaacatgggaccactctatgggcggtctttgtggcagagctcctggttggtctctgggggctttctcggagcaatgctgtgctctaagagtccatctttttaatcctcccttctccccatct

SEQ ID NO: 787291 - DNA, 643 bp, Homo sapiens
ctgccagtgccacaagaacatatcctggctaatccactgatccagtaaaggaggaaagatgtggggaagaggtagacccaaatggctgctcagagccaaacacattggagtccagctactttggacattttgggaatatgtgatccttgttttaggccaatgggttgtgggatgatttgttacacagtataactgtggcagtgattgattgccaccatagagccaggtgtccttgtcaagcctgtcaaactgcctggaagcataactgccccattcccagctggactacctgctgaagtctgcattaaccaacatagtgaatagcttcattctaactactctgsgcaaccttgaacttcttgccactcaatatttatcaaaggcttgattaaaagaaacaatatttacaaaggacggtctgaaagttatgccatccagccattgcctgagtcctgtaaaatgtctcgctgcattaatctcaggtggcagagagctggtgtcctaggactgaattgtttttgctctctcagaacagcttctaccaggttgtgttttggcatgaccctatcaatgtatcacagaggaaattataggggaaaccttcatgatgcttgtgtttgtatctgctgtaaggacattgttg

SEQ ID NO: 787292 - DNA, 586 bp, Homo sapiens
accagcatggccatgttagcaggttcctgtgaacggagtgtctacaaggtttctactccttaaaaaaagttcaccagtgattcatgaacgtggtagataagctagaaattgcagggatctgaaaagcaagataggtcacttctcctccgttcayaggctaatgaaggcatctttagagccttactttgtgcactgcatgagaagctggaatcttaataataaacatgtgccagatgatcaaggattctcggccatcaaccaaatgcatgcctgtttttggaggcagcaattttgatagccctcttcatatttccagagacttgggagcagcaaagagggctcctagagaaaggtgttaagtgagcttaatagctccttactgcagagtaggttagcatatgcccttcaaaagttaatgaccctactcatgtgtcatcagcacacgatgtctgactccctgactctctttaggtgctcagcatactcagagcttgagcaaagaagacaccgaggagtgctttagcagatacataaaggcacaacacatttttctgttactcggacatacttttttgtattttaatat

SEQ ID NO: 787293 - DNA, 504 bp, Homo sapiens
gaaggtgcaattctcatccagaacttctttcaaaagaatcacaccacctaggcctcatgcaatggtgttccaggataaataagtcacttggggagaaaacaatagaatcatgagggatgggaccctcaaaattgtttgctccgtctcacatggtaaaaataagcttttccttgtaaaagggggtaaaatgtagggcatacagaatgctggaaggaggagggaacctccacacttctcagagccctgagatgatcgttccccgcagtttgtcatcaaactattagtgactgccgattgtgtctggcattgaatcttyggcgcgctcacagtatagagaccaaggacggtggactctctttcataatggcagtgtaaaccactttgcattaagtaggaataataacctttttttaaagaatgtgtcaaaataattacatttcttgttgctttcctttcttccacatcacatgagcaagcacatcagcctcacttgaacagatgaaa

SEQ ID NO: 787294 - DNA, 586 bp, Homo sapiens
tgactccaggtgtggccctggtggtctctggcttggggcatggatggctgtaagcctgagctgccattctgggggctctgctgggagggctagctctcaggagatgagtcttgagtatggtggggacagtgggagcgggagcttaaaaagtcagacagaaaagcactcgggctgcctgaggtgagtggggaggtgtgctgtcgtggattaktcatatctgccctgagagagggaagggccctcactgagcccaacctccaaatgcaccccctacagtgagagttcaaaaattattgatgaaatgaaagagctcccactggatatatgaattcatgctgtaccaaggatagtatttactgggtataacagagctgacttgtggcctctggcccagctcctcctccctccaaagagtatcctttcattggcctgcattcatgggctcactgatatttttaaaacttcaaacaacctctttttggggccatcaccaaaccatgatatgtaatttccccagatatctcactggacaataaaaccaaatcacccatctatgaactttgtccatttgttcctggagaactaa

SEQ ID NO: 787295 - DNA, 612 bp, Homo sapiens
gatgatggatacagaaccccaactgtcctatgcacacatcatccatgctcacttggaggctggtgttatttctcatgctcaggtgttgcttgtggaagtcaggcatattatttaaacattttatttgctttaatatacagtgtaaccagggtcataatttcacatgtcttggaaaatacttttcagtgcaaggaagccgtctgcattcccagcatggaaactaattttcccagtaccatgcggcaagtcaggatgagcatctggatcactggtcagcctcatgccttcttccacttctgtgcaaagaattcaggcagccattgtggyaatcctgataactgagattaaatcattctagttaatagagagacttgccaggacaacatcaccaagtgctggaattgggggagggtctgaagagaaaaaagatgaaggaattaagtgggggtcaagcccatataatggcagcactttcaggtgcaggtgggtttgagctggaggcctagaggagatgctgcctttgatgccattgtctgtctagacaaagagtcattgtgttcagatgttttgtgttttcaatttctaacccagtaggatctgattaataactgg

SEQ ID NO: 787296 - DNA, 618 bp, Homo sapiens
aaggtttgagttataaattagaaggaagatgttatgcaccatcagttttacaaaatgataaaacatcttagtagaaagactggcttatccttctgccctatttatacacaattctgctataaattcaatgtcttatgatgaggcagataacgattcattaattgaagatgaaaacataggaagaaattattagagttgtgtcacatattaattaataaaatattatataaataaggctggktgtggtggctcatgcctgtaatcccagtactttgggaggctgaggcgggcggatcacgaggtcaggagattgagaccatcctggccaacaacatgaaaccccctctctactaaaaatacaattagccacttatggtggcacatgcctgtaatcccaggtacttgggaggctgaggcaggggaattgcttgaacccaggaggcggaggttgcagtgagccgagatcatgccactgcactccagcctgggcaacagtgagactccatctcaaaaaaaaaaaaagaaaaaagaaaatattacatgagtaagtcaaaataacatggatcaagaaagtgcaaatctgccctttcacctgcaggatggacagatggactgatg

SEQ ID NO: 787297 - DNA, 618 bp, Homo sapiens
aaggtttgagttataaattagaaggaagatgttatgcaccatcagttttacaaaatgataaaacatcttagtagaaagactggcttatccttctgccctatttatacacaattctgctataaattcaatgtcttatgatgaggcagataacgattcattaattgaagatgaaaacataggaagaaattattagagttgtgtcacatattaattaataaaatattatataaataaggctgggtgtggtrgctcatgcctgtaatcccagtactttgggaggctgaggcgggcggatcacgaggtcaggagattgagaccatcctggccaacaacatgaaaccccctctctactaaaaatacaattagccacttatggtggcacatgcctgtaatcccaggtacttgggaggctgaggcaggggaattgcttgaacccaggaggcggaggttgcagtgagccgagatcatgccactgcactccagcctgggcaacagtgagactccatctcaaaaaaaaaaaaagaaaaaagaaaatattacatgagtaagtcaaaataacatggatcaagaaagtgcaaatctgccctttcacctgcaggatggacagatggactgatg

SEQ ID NO: 787298 - DNA, 561 bp, Homo sapiens
agctagagagatgcatgtgtgcatgtgtgtgtgggtcggggggaggtgaacttagacagggtggtcaggaggctgtccgaggaggtggcatttcaactgagaccgggaggatgagaaggagtgagtcaagggcagagtgggaagcagagcattcctggcagaggaaacgatgcaaagtcaccaaggcagaaatgagggaacagaaacgcagytggggttgggagagatgtggccagagagggggagaacaagatcactccggcctcctgggttggggtaagcagctgagtttccttccaagtgtgatgggagggagagaaacagcagggaggcttttatcctcaacagcagtatgagttgatttgtgtgttaacaagaccactctggctgctgggacatggatgataagggccagagaggaggcagggcatgcagtgagcaggccacaacagaggtctagggaatggagatggccacttgaacaacagtaggagctgtggagacaaagagaaaaaggtggtttagggatgattctggagatggaattagcaagatttgcta

SEQ ID NO: 787299 - DNA, 618 bp, Homo sapiens
ctagagagatgcatgtgtgcatgtgtgtgtgggtcggggggaggtgaacttagacagggtggtcaggaggctgtccgaggaggtggcatttcaactgagaccgggaggatgagaaggagtgagtcaagggcagagtgggaagcagagcattcctggcagaggaaacgatgcaaagtcaccaaggcagaaatgagggaacagaaacgcagttggggttgggagagatgtggccagagagggggagaacaagatcactccggcctcctgggttggggtaagcagctgagtttccttccaagtgtgatgggagggagagaaacagcagggaggcttttatcctcaacagcagtatgagttgatttgtgtgttaacaagaccactctggctgctgggacatggatgataagggccagaraggaggcagggcatgcagtgagcaggccacaacagaggtctagggaatggagatggccacttgaacaacagtaggagctgtggagacaaagagaaaaaggtggtttagggatgattctggagatggaattagcaagatttgctaagtgagtccacgtgacaggtgtggcagagagaagagaggaagtaagcacagctcttcta

SEQ ID NO: 787300 - DNA, 561 bp, Homo sapiens
agctagagagatgcatgtgtgcatgtgtgtgtgggtcggggggaggtgaacttagacagggtggtcaggaggctgtccgaggaggtggcatttcaactgagaccgggaggatgagaaggagtgagtcaagggcagagtgggaagcagagcattcctggcagaggaaacgatgcaaagtcaccaaggcagaaatgagggaacagaaacgcagttggggttgggagagatgtggccagagagggggagaacaagatcactccggcctcctgggttggggtaagcagctgagtttccttccaagtgtgatgggagggagagaaacagcagggaggcttttatcctcaacagcagtatgagttgatttgtgtgttaacaagaccactctggctgctgggacatggatgataagggccagagaggaggcagggcatgcagtgagcaggccacarcagaggtctagggaatggagatggccacttgaacaacagtaggagctgtggagacaaagagaaaaaggtggtttagggatgattctggagatggaattagcaagatttgcta

SEQ ID NO: 787301 - DNA, 621 bp, Homo sapiens
agatagatacacatacgagacatacatcacccagtgaggaaaatggaagagtatttgcgggggctcaggctgaacagaggagttagtgacaccgcaaggaagggtgagagcatgtgccacaagctagaaccagtgcagctgggccaaggagagagggtgggaggggagggaagatagtcatgcttgggatcaactgtttagggcttttcctacgttcagttttttgttgtaatatttactgagcatttactgttgtgtcatgtccaagctaggcaggagggtgggatctgcagaataamgcatcccctccccagagatgtccatgttctactccctggaatctgtaaatatattagctcgcatggcaaaggggaaaattaagattgcaaattaaattaaggctgctaatcagctgactttatataaggagatttttcttggattacctgggtgggcctggtgtaaccacagggtctctacgagtggaagaaggagccagagttagagtcagagagggagaagacactaggagaaaggtccaagtgtgagaagaatccagcctgcacttgctgactctgaccatggaggaaggggccatgagccaaggaatgtgggcagctc

SEQ ID NO: 787302 - DNA, 619 bp, Homo sapiens
aggaatttcatcttcttgcccccaaacctaaaacccttacttgcatctgagccgattctccttgttcctttcagttacactggaagaagagcccctccttccttcaagccaagtcatccccttgggctctcaccacttcagtttataccttgcctgtagtccagtctctccakcatcaattccatcagcacaaagacataatttaattccttctaccttaaaaaaaaaaaaaaaaaaaaaacagctctccctctcttagggtgagatgaagtggttggcaacaggccaatgctactttcagaggcgtttgaatcagagtgactccattttgaataggggttgagtaaaataaggctgagacctactgggctgcattcccatgagcttaggcattctaagtcacaggatgagacaggaggtcagcacaagatacacgtcacaaagaccttgctgataaaacagattgtgataagaaaagccagtcaaaacccaccaaaaccaagatggcgacaaaagtgatctctggttgtcctcactgctgattattcactaattataaaattaacatgataaaagacactcccaccagcaccgtgacagtttacaaatgacatggaca

SEQ ID NO: 787303 - DNA, 619 bp, Homo sapiens
aggaatttcatcttcttgcccccaaacctaaaacccttacttgcatctgagccgattctccttgttcctttcagttacactggaagaagagcccctccttccttcaagccaagtcatccccttgggctctcaccacttcagtttataccttgcctgtagtccagtctctccagcatcaattccatcagcacaaagacataatttaattccttctaccttaaaaaaamaaaaaaaaaaaaaacagctctccctctcttagggtgagatgaagtggttggcaacaggccaatgctactttcagaggcgtttgaatcagagtgactccattttgaataggggttgagtaaaataaggctgagacctactgggctgcattcccatgagcttaggcattctaagtcacaggatgagacaggaggtcagcacaagatacacgtcacaaagaccttgctgataaaacagattgtgataagaaaagccagtcaaaacccaccaaaaccaagatggcgacaaaagtgatctctggttgtcctcactgctgattattcactaattataaaattaacatgataaaagacactcccaccagcaccgtgacagtttacaaatgacatggaca

SEQ ID NO: 787304 - DNA, 619 bp, Homo sapiens
aggaatttcatcttcttgcccccaaacctaaaacccttacttgcatctgagccgattctccttgttcctttcagttacactggaagaagagcccctccttccttcaagccaagtcatccccttgggctctcaccacttcagtttataccttgcctgtagtccagtctctccagcatcaattccatcagcacaaagacataatttaattccttctaccttaaaaaaaaaaaaaaaaamaaaacagctctccctctcttagggtgagatgaagtggttggcaacaggccaatgctactttcagaggcgtttgaatcagagtgactccattttgaataggggttgagtaaaataaggctgagacctactgggctgcattcccatgagcttaggcattctaagtcacaggatgagacaggaggtcagcacaagatacacgtcacaaagaccttgctgataaaacagattgtgataagaaaagccagtcaaaacccaccaaaaccaagatggcgacaaaagtgatctctggttgtcctcactgctgattattcactaattataaaattaacatgataaaagacactcccaccagcaccgtgacagtttacaaatgacatggaca

SEQ ID NO: 787305 - DNA, 645 bp, Homo sapiens
taaacggaaaataggagcaaaaatacgaatatgtactgataacattttatttttctgtcttttatccacgtctggtgtctggtttctgagcttactttcttaagttttcaaacagcagcgacaggaatttaacccttacattccttgaccactgagtttcatcagattgctattttggttaataaacgcgttgcatatatattgaatataacatacctcttttattgattagaaaagtaaagattagtaagtattaacatttggactgggcagggtggtaaaagcacgttccccaaatggggattagttcagccaggktattaagactcttcccctcttccctatacagctttatttaccaagagcaactaacgggctgtccgatgcttgcttttgccagccgaaactatgtttgtacaccagatccaaggtcatttctagtaataggaacggagctcttgcaaaactggccttttgttggttcttatgccaaggagacctgaactttacaaagtgcctaaaccggaggaaaacattctttcctagttttgagtactgggttcccaggagtgtgatacagacacatcttgagactgtgacccaaggaacaaaggtgactatgaggcagcattgtgttctggcctt

SEQ ID NO: 787306 - DNA, 542 bp, Homo sapiens
gttactggtggaaggtgtccaggttcttggcgtcttgaacaaataattggacaaaacgcacaaagtgaggaaagcaaaagcacagatttattgaaaatgatagtacactccacagtgtgggagcaggccggagcataggggctcatgagccctggttacagaattttctggggtttcaatactctctagacgttttccactggttacttggtatatgttctatgtatatgaagacaatgaagataagttacaaagtcatttactcagaatgtgcccagaatatgtaaatggagaggatgttatttggtgtgtgcggtctatgtaaatgcagaggacgaatrtgaagttacaaagtgtaaatggagcggatgtcacttggcgtgtgtggtctatgtaaatggagaggatgtcactgtgtgtgcggtttatgtaaatggagaggatgaatgtgaagttacaaagtgtaaacggtgtaaatggagaggatgaagtgaggttacaaagccatttatattccatttgattttgttctaggaagtcag

SEQ ID NO: 787307 - DNA, 538 bp, Homo sapiens
aaaactccacaaaaggtagccagcatatgtctacttgggaattgagaacatgaggcccgaggaccaggcctgagtcctcagtgggttttcaagatagaatttaaggccccttctccatgagactaaaggccacagccttccttctgtgccatatgtctgccaagcatggaaaacagatgggaacgcgatgaatacgagcagtgcattgccctccacggccttccctccccaagtgaagtgtgtctttgtctattctggatctaagccttasgaaggacatagcacgctctcacatgcaaaacaacagagagaatgttgagttcaacatgagaaatcaaggtgggctcttggaactggttacacaaggttgcatctgaaaaggaaatcagtgtgttacgctttccagagcaacacttcccggcccgtggttcctgcagcaccctcagctgttagaagctcacatgcaggacacaggtgcatccacggctgtttgcagagtacaacttgcccctgctctccctatcaaaaaaggacgtca

SEQ ID NO: 787308 - DNA, 680 bp, Homo sapiens
ctgttgtaaaaagtaatcaagggatccaagagtgctaaactggtgtaatagctaaggggtttgggattgccgaaacctgctgtggacaatgccgtcccttcttggcaagttccagtggtagatggaaatagagccctgtataattcttgtgagaattctagaaagctaggctggagcaggacccctgtcctaaaggccaaagagacctcttcctgccccccgcagaccagcactgggggtctgaccagaggagcacaagagcctgcaatcctgaatccccattatcctgagaaagaaagccacagccagctcttgtcccataggaaagagctggtcttctttaggacttcaagcacatgggagaaggaagcaggscttgtgctttcagtcttgtttccactgtgacataaagcaaggagagggtgtcaggaggggccatgcatctgtgggcaccgtttcaacacatggccagcttgtgctctctatttgagagccagctggacccagaatctgacccatcagatcagaatccctctctgtagagagggagcaaggagatgatggtgatgatgacagggaacacgtacatagcacttaacatagccagatagtagtttaaatgccttgtataaagtatcttactgaatcttcttaataaccctttgatataggcattatat

SEQ ID NO: 787309 - DNA, 502 bp, Homo sapiens
ctgcagagctttaaatatagaccagcatgaattcaactcttgcataaatttaaaccacataggtgctagaataccccttttttaatccagaagggagagttatctaagagtgatgggtaagtacatggcaaaccaatttactgcctcagctgctgtaatgtggaataayttgcatcccatctcactcatctctcttctgtctccaccatgcccattagcacgtgagtttgctcccttcctctcgccctccacactaaggcagattattttggatgaaaacattcatttaaatttactctactttcccttcaccctatgaattaatgtaaggaaatgaaatcagacttcacaggtaccatacattagcaacacagatgaccctgcgtgaagggagatcacacagttacttccatcagaagtaaaactgagcctcgaaaacttcacagaaatacactcagagccactcaaaagggatcctgaaaggcaatgggggaaacaagaa

SEQ ID NO: 787310 - DNA, 502 bp, Homo sapiens
ctgcagagctttaaatatagaccagcatgaattcaactcttgcataaatttaaaccacataggtgctagaataccccttttttaatccagaagggagagttatctaagagtgatgggtaagtacatggcaaaccaatttactgcctcagctgctgtaatgtggaataacttgcatcccatctcactcatctctcttctgtctccaccatgcccattagcacgtgagtttgctcccttcctctcgccctccacactaaggcagattattttggatgaaaacattcatttaaatttactctactttcccttcaccctatgaattaatgtaagraaatgaaatcagacttcacaggtaccatacattagcaacacagatgaccctgcgtgaagggagatcacacagttacttccatcagaagtaaaactgagcctcgaaaacttcacagaaatacactcagagccactcaaaagggatcctgaaaggcaatgggggaaacaagaa

SEQ ID NO: 787311 - DNA, 570 bp, Homo sapiens
cacactgctcatgctccaagcaccattcctcacatgtacattgttggttttttgtttttgtttttttgatatggagtctttctctgtcactcaggctggagtgcagtggtgcaatcttggctcactgcaacctctgcctcgcaggttcaagtaattctcttcctcagcctcctgagtagctgggattacaggtgcccgccaccacacctggctaatttttatatttttagtagagacgaggtttcaccatcttggcaagactggtcttgaactcctgacctcgtgatccacccgcctcagcctcccaaagtgctgagattacaggcgtgagcccccacgcccagccatatatacattgttgatgcagacacttctcagtgaatttaagatttgggagaagaactttaaayggagagaattaaaaatttaagcaattggaccaggcatggtggctcatgcctgtaatcgcagcactttgggaggccacgatagatggatttcttgagcccaggatttcaagaacagcctgggtaacaaagtgaaagaaattgtttttcttcaaaaaaaatt

SEQ ID NO: 787312 - DNA, 658 bp, Homo sapiens
ttgttaggaggaatgatggacgacatgccctatttgacagtcatgtctctttgtatcaaaagtatggcagatcaatgagttgtaaatcagcttgacaatatcttccatgtcaaggccctaaagtagatatattctgtgtttaaagcaaaccatgtattttagaagaaaatgagctcattgtaaggttggcatatcctactgtagaaactcagaggactactgtgagacaaagctagatggtatttttgtttgtatattggtgggcttatttaaaaaatatatttttttaaagttgagtatgttacaacaagaaacgaatggtaagtccctcaatggcctcaaagtttatggccattaataggattttagcctggagagtttttagggcagrctttactagttgcccagtataatcatagaaaaagcacagcattctgaaaggagtcactttgctgattatgaacccaactcgttttgctgcagttgtgaagaaatttgatatatatatcttaacgttgtcagcagttatttgaaatttgcaaggatatcattgaaatttataattacccaagtttccaaggatctggcatttgtatttttaagaatctaaaacttaaagtataataataataataataataataataataatctcaaa

SEQ ID NO: 787313 - DNA, 579 bp, Homo sapiens
tagattgtttcaaatttgaactactgtatcaattgggctattagtatccacaatatgcaattttgtgcacttgtttaataactcttagcataaatatttacaagggaaatttctgggtcaaaggtttgggactttttttaggggtggagaggtggttgtttttgttttgagacggcatcccactgtctcgcccaagctggagtgcagtggccyagtctcggctcactgcaacctctgcctctcgggttcaagggattctcatgccccagcctcccgagtaggtgggattacgggtgtgtgccatcacacccagctaatttttgtatttttattagagacagggtttcaccatgttaggtaggctagtctcaaactcctggtgtcatgtgatctgcctgccttggcctcccaaagtgctgggagtacaggtgtgagccactgtacctggtcaaagggttttaagtttacaaattttgacacatcgtgcccacttaacctccagaaatgtaccaattcacaattccaccaaaatttatgaaaaggtgctcatttccccaccccattctctttactgaatgt

SEQ ID NO: 787314 - DNA, 582 bp, Homo sapiens
cttctcatatattccatatttctttttaacatgtttacactttcctctactttctggaacatatggaatacagttataattactgtttgtctattagtgggtaatctgtgccacttctgcatctgttttaattgactgatttccacccccacttcctcatttagatttacattttcctgctttaartgcctagtaattttttaattagatgccagacattgtaaatttgacccagttggattttctcatatttctataaatactgatccttttaaggtttgctcttaagcttttatagactgggccattgcatgctgtagggctaattttgctccagttctaaggcaatatcatgagtcttctacttgttgctttgtgaacaaaaactatttcttgtcctttatgagctcttgacattattcccttttattctttcccctggttgttatcttcctctggtcttgtgatagtttccacatacacttgcacttaccaatacagagctggagactcaaggacattctctgcagatttccagaattctctctctgttctgctctttttctctggtacgctgtcctg

SEQ ID NO: 787315 - DNA, 582 bp, Homo sapiens
cttctcatatattccatatttctttttaacatgtttacactttcctctactttctggaacatatggaatacagttataattactgtttgtctattagtgggtaatctgtgccacttctgcatctgttttaattgactgatttccacccccacttcctcatttagatttacattttcctgctttaagtgcctagtaattttttaattagatgccagacwttgtaaatttgacccagttggattttctcatatttctataaatactgatccttttaaggtttgctcttaagcttttatagactgggccattgcatgctgtagggctaattttgctccagttctaaggcaatatcatgagtcttctacttgttgctttgtgaacaaaaactatttcttgtcctttatgagctcttgacattattcccttttattctttcccctggttgttatcttcctctggtcttgtgatagtttccacatacacttgcacttaccaatacagagctggagactcaaggacattctctgcagatttccagaattctctctctgttctgctctttttctctggtacgctgtcctg

SEQ ID NO: 787316 - DNA, 564 bp, Homo sapiens
aacccatccccaagaaggggagactggagaaaagtcctgagatcttgtctcaaatccagacagcactgcagagtgacctgcattgggtccagatggcaaagagacccaaatggcaccacagatgacctatactaggtccagataactagaaagtgcagatggctaagatggaggatttcccagtacactctggttaatttatccaacccttgaattctgttgacctccaagatgccacttccctttcactaactgagtgttacagcagctgatgccacaaagggaagggaaggaaaaatccttcagacaagggtggtctccctagctgctgggarttccttaaggtcccagctgcagggtcagctagccatgagcagctggcatttgcaagtggctcctgcgttggcctggtagcctgagtgggtgagccttggcctgctcccacagccaattgctccacttgttggaaaccaggcgtacaggctgagcccctcaaaacacacagttcctcacacagggcaccacatttgtaactgactcaagtccggctcttcacaacacaga

SEQ ID NO: 787317 - DNA, 564 bp, Homo sapiens
aacccatccccaagaaggggagactggagaaaagtcctgagatcttgtctcaaatccagacagcactgcagagtgacctgcattgggtccagatggcaaagagacccaaatggcaccacagatgacctatactaggtccagataactagaaagtgcagatggctaagatggaggatttcccagtacactctggttaatttatccaacccttgaattctgttgacctccaagatgccacttccctttcactaactgagtgttacagcagctgatgccacaaagggaagggaaggaaaaatccttcagacaagggtggtctccctagctgctgggagttccttaaggtcccagctgcagggtcagctagccatgagcagctggcrtttgcaagtggctcctgcgttggcctggtagcctgagtgggtgagccttggcctgctcccacagccaattgctccacttgttggaaaccaggcgtacaggctgagcccctcaaaacacacagttcctcacacagggcaccacatttgtaactgactcaagtccggctcttcacaacacaga

SEQ ID NO: 787318 - DNA, 625 bp, Homo sapiens
ttgatagtattaattcacttaatgttggtggtattttcatcaccattctacaggaaatgggggcagggaaaggcaagataactggcctaggattacacaacactcaaacagatattacctcatcttgttaactattaaatktattgcattcagattttacttggtgtggggtacagtggctcatgcctgtaattccagagctttaggaagctaaggcaggaagatcacttgagcccaggagttcaaggttgcagtgagctgggatggtgccactgcagcctgggcaaaagagagagaccctgtctcaaaacaaaataaaagccacacaaaaaatttttgctgatgtacagtttagatacttgttactgatattctttatcctgagatagttttacttcctgaatccatggattcttgttttctaataacttctgaaatattatctgtcattatctcttcaaatattacctctccttgattctctaccaaagattctgattataagtatattaaacattttcattctatcttatctcttaacttctcattcacttttctgttcctttgtttttttgtgctgtttctatgtgatttcttcagatcgatcttccagttcactaatttc

SEQ ID NO: 787319 - DNA, 509 bp, Homo sapiens
cacttgtcttgatgtagaaaaagtcactcccaggaaaggagcctgagatacgctctcagtaaatgttctctgtggtgtcatatgtacagtttactctcattttttttttttaagacagactctcgctttgtcgcccaggctggagtgcagtggcacgatctcggctcactgcaacctccgcctcctgggttcaagtrattctcctgcctcagcctcccaagtagctgggattacaggagcgtgccaccacacccagctaatttttgtattttcagtaaagacagggtttcaccatgttggccaggatgttctcaatctcttgacctcatgatccacctgcctcagcctcccaaagtgctgggattacaggtgtgagcccccatgctaggtctactctcattatattcttaactgaccaagaaaaaagatcaaaagttaggattcctgagtctcatcttaattctgttatttattcactgagtggtcttgggcaagtcatttcatttttc

SEQ ID NO: 787320 - DNA, 514 bp, Homo sapiens
agtttgtatctaaatctgaatgtgaaaaggttcacacgcctccctctgagacctatttttgttttccttctaggttgtgcttgttccctttatttgaattctacttataaaaatgtgtcaaggacttttaggttttttagttatcacatgactaaacactttcaaaatcactaatcaaccttctagaggtatggagattgtttttaaaattataattactaaggtatgcaaaagtttttggcaatttaataattttgtgttgcgaatcrtcaacagtcttgacaagatctgtccttagcctccaggtgcacttggctgctgagtgtaacactctgtaattgtccgaagatgcctagaaacatggttttctcattgttaaggccaaaaggaagagggtcctctttaagtaacattgcttattttaatatgtattgttaaaagatggtctttattcatttatttagggcattatatgattatttgttttgtcttattttctgagctaaaataatgc

SEQ ID NO: 787321 - DNA, 448 bp, Homo sapiens
cagactcccaaagtgctaggattacagatgtgagccattgtgcctgacccccacgttctttttttttttttttttttttttttttgagatggagtcttgctctgtcacccaggctggagtgcagtggtgcgatctcggctgactgcaagctctgcctcccgggttcacgccattctcctgcctcagcctcccgagtagctgggactacaggcgccccccaccgcgcccagctaattttttgtrtttttttagtagagatggggtttcactgtgttagccaggatggtctcaatctgttgacctcgtgatccgcctgcctcggcctcccaaagtgctgggattacaggcgtgagccaccgtgcccggcccccacggtcttaatcattaaaaaagttaactgtaatggctaatgagaatttaccaacataaaacatatttcttcagttat

SEQ ID NO: 787322 - DNA, 664 bp, Homo sapiens
gtcggtgaaggatcccaagatggctgggcaaaaacttgctctaaaaatcattgactgggtaacttcttgggagagcatatcccgaaaccaaaaggccattgctaattccctgacatcctggaatgagattcttacctccagactggctattttacctgagaataaaccatctattgactggacttactacaaggccagtgtggccaaggcaggcttggtggatgactttgagaagaagtttaatgccctgaagtttcctgtaccagaggataaatacactgcccaagtggatgctgaagaaaaagaagatgtgaaaacttgtgctgagtggatgtctctctcaaaggccaggattggacaatatgagaaacagctggagaagatgaggaacttaattccatttgatcagacgaccactgaggacctgaatgaagctttcccagaaaccaaatgagacaagagaaagtatccctaytggcctcaccaaccaatcgagaatttataaagttgagtccaggaggaagttctggcccttatattacacattctggacattaaaaataaaaatacttatgtagaaaaaatccaataagatgcatttatataccttggttggagtttaaagcttgctagatatcttccccctcccccgactgccttcatg

SEQ ID NO: 787323 - DNA, 522 bp, Homo sapiens
ccgcagaaacacaaaaatcctcccaattattttagtaaaatcttcatttattcattatttcagaggctgagcaaatggtttgtgtaaacatatcctttggtaacacgcgcatgtttattttagccatctgaagacttcttctatgtttacataagccatcagacacatacaaccactcacttgtggctttgcgttttcttgaaaggggtgaagggagagaagagagaatgaaacaataaattcagtttctcttttgcataaagcactccctctaatgttttaaaatagcttatgtttrtattattcttggattgtccttcagctttctttttcattcaattatattgatctttcatatctgacagtacaggctatattctgactatcactttaagaaagccagccagtcagggagtaactgctgtatatgtttatgtccacataactcacatatgcaacaaggtaatttgtccacatgagacaaagcacaaacacaacagtacctaccttaagcagttcatc

SEQ ID NO: 787324 - DNA, 532 bp, Homo sapiens
taacaaccgtcacagtatttattctatagcctcacaaactcacaaatcgggaatccatactttaggatttttcccagctgcatgttccaagcttatgttctgtccacagatcaggagaaaactgtacatttacttttaacttctcagactcaattcactctccgcytatcaaataaactgtttgctcccctgtgccaaagagaagtacaagttacatcctcaattctgtaggaaattgctttgtgttcttttatgtgatggtcagtcaagagtggccacaagaggagacaggagaggctcaggaaagaagaaactttattatattcacagatcctagagagaggaggcacagcacaccgtgtagtgctatgtgggaaagacaccagggtgagcaggaggcagaagacaggagtgaggggaaagtttagacaagagcctttaactgagattttcaagggaaagacaaggcaatgcagcataaagagtttcacattggctagtttgaatagttttggtgggctctaagctataa

SEQ ID NO: 787325 - DNA, 607 bp, Homo sapiens
gattttatgtctttactattgtgaacagtgcttcagtgaatataagtgtacatgcatctttttggcagaatgatttattttcctttggatatatacccagcaatgggattgctgggtcaaatgggaattctgttttaagttctttgagaaatttggagttgttcttaacttctcttttcctctgacatcttatgcgcaacccctcagggaatcttgtcatatttattattcaacacagcattcaaagtcatactttgtgaggccaggagtggtggctcaygcctgtaaccccagcactttgggaggcggaggcaggtggatcacctaaggtcagaagttcgagaccagcttggccaacatgccaaaaccccatctctactaaaaatacaaaaagtagccagacgtggttgcacacacctgtaatcccagctacgtggaggatgaggcaggagaattccttgaacccgagaggcagaggatgcagtgagctgagatcatgccactatactccagcctagacaacagagtgagactctgtctcaaaaaagaaaagtctttactttttgaaacatgtatcagatcattgtctttattgtgctcaaaacct

SEQ ID NO: 787326 - DNA, 592 bp, Homo sapiens
gggatcaagaaacatctaaacagacaggccttgctgagttgtcccacccaatctattagcattagattatatactttttgtataatcgtatttctatgtggtggttcatataacctaaataaaatatacttcatataacctaaataaaaatatacttcatataacctaaataaaaacagatcgttttctctgtacctttgattcttccttctgaaggctcccatgctatgtaaaactatcaaatacacttgctmtgcctttatcttgttaacctgtcttttgataaaggggtttcagccatgacccttatgatagagaggaaagggaacttccctttttcactcctagagaaacagaaggtccagggcagaaaggtgaggaaaaacgccttaagtacaggaaaagagaatgaaagctgggactgaggaatgcatcataaaagatcacatttatactatgatgtaaagtgggtaagaaatcagcttctttatcttacaggaaaagtaaaccacagacctatatcactcatgaacatagatataaacttagtaacacaattttaagaagtgtataaaaatatataaaacaatat

SEQ ID NO: 787327 - DNA, 619 bp, Homo sapiens
aacacaaagaaagaaagaatttactgagctgtgaaagtgacggacacacagaaagttctaaacaaaatgaaacaaaacaaaagtggatttatctcagcctctaacaagaagtaaagtttaaaaggcattgggttatgagaggaccatctagaygatagaatcaacatcatcagaagaatagtgacaagaaatgttgagatgtatttagaaaaaaaaattgaccatttgaactaaaataaaaacgtgtctttctctttcttttttaaatagacatagaaaaaaagcaggaagaacatcaggctaaaatatacagaaaatttaaggtcagcttaaatatgtaaaatgtctatatgtttcattgaaacttttggcagtgacatacagaaaggaaagggagagtgaaagctactgccaaagtttggaattgatgccataaggggaaaaattttagtagggaggttggcagagaagaggaaaaggtaacagccactgtaaaggatgagatattaacaagctgaatgaagggatgaggaagaaatcgatgatgacactatgggcttgagcctggggaactagaaaatatgcagagcactaacttaaaatacaaatgaggggaata

SEQ ID NO: 787328 - DNA, 619 bp, Homo sapiens
aacacaaagaaagaaagaatttactgagctgtgaaagtgacggacacacagaaagttctaaacaaaatgaaacaaaacaaaagtggatttatctcagcctctaacaagaagtaaagtttaaaaggcattgggttatgagaggaccatctagatgatagaatcaacatsatcagaagaatagtgacaagaaatgttgagatgtatttagaaaaaaaaattgaccatttgaactaaaataaaaacgtgtctttctctttcttttttaaatagacatagaaaaaaagcaggaagaacatcaggctaaaatatacagaaaatttaaggtcagcttaaatatgtaaaatgtctatatgtttcattgaaacttttggcagtgacatacagaaaggaaagggagagtgaaagctactgccaaagtttggaattgatgccataaggggaaaaattttagtagggaggttggcagagaagaggaaaaggtaacagccactgtaaaggatgagatattaacaagctgaatgaagggatgaggaagaaatcgatgatgacactatgggcttgagcctggggaactagaaaatatgcagagcactaacttaaaatacaaatgaggggaata

SEQ ID NO: 787329 - DNA, 619 bp, Homo sapiens
aacacaaagaaagaaagaatttactgagctgtgaaagtgacggacacacagaaagttctaaacaaaatgaaacaaaacaaaagtggatttatctcagcctctaacaagaagtaaagtttaaaaggcattgggttatgagaggaccatctagatgatagaatcaacatcatcagaagaatagtgacaagaaatgttgagatgtatttagaaaaaaaaattgaccatttgaactaaaataaaaacgtgtctttctctttcttttttaaatagacatagaaaaaaagcaggaagaacatcaggctaaaatatacagaaaatttaaggtcagcttaaatatgtaaaatgtctatatgtttcattgaaacttttggcagtgacatacagaaaggaaagggagagtgaaagctactgccaragtttggaattgatgccataaggggaaaaattttagtagggaggttggcagagaagaggaaaaggtaacagccactgtaaaggatgagatattaacaagctgaatgaagggatgaggaagaaatcgatgatgacactatgggcttgagcctggggaactagaaaatatgcagagcactaacttaaaatacaaatgaggggaata

SEQ ID NO: 787330 - DNA, 601 bp, Homo sapiens
tgtactatatttaaaggaattgccttcaagggaaaattcatatgaaaaaagtgagaataattcaaccctacagtctgaatataatacatcatggtaggcatagttacctcagggttaaaatatacataaaacaaacaaacatagtgcagtggactgaatgtttgcatacccccagaatttacatgtcagcatcctaacctgtaaagtgatagtgttyagaagtggggctcttaggaagtgattaggccacatgggcacctccactatgaataggactagtgtttttataaatgaaaagcattttcacttgcccttctgctaagtgaggttacagtgaagaagatggtcctctatgaacaaagaagatggccctcatcggaacctgaccatgctggcacgctgatctcagattttcaggccccagaactctgagaaataaatttctgttctttataagccccctagtttatgctgttttgttataggcaccttaatgaactaagatgcacaggagtagaaataaaactgtgtcgtgttgccaaacagtcaagagtttgaagttgaaagactgccactctgcacccccaccccaccactccct

SEQ ID NO: 787331 - DNA, 613 bp, Homo sapiens
agcttatgatattttagagaatgttgtcttatgtgccggactctgagcataacttcttacacagatgctatgtaatatttagcatgattataatgttagctacattaaatctcatatgaggaaaccaaggattaattatataattagccaagggtcacatctattaaactgtctgactcaagagcccaagagttaaccaatatgcagtattgtgattcagcacagacatggtacatataattgataatagccaacttttctatgttgctgtcagaggtcaacattttatataaatatttaattgcaagtatgagctgaagacttgctttagactttgcctgggatttaaagcaaaaagcacacacgcaacttctrttgagctaaaccgtaggtatgtcaacaacttagggtatcctgccaaattttatctgtactcatcatttggctgcgaaaatctttatcctgcttttgtatataaaaagcatctgctttcagtggattttatttagattaattttagttacttagactagtgttcctcaaccctggctacacattgtctaggaagttttcaaaataatcggtgcatgagacctctccgcatagaatttct

SEQ ID NO: 787332 - DNA, 521 bp, Homo sapiens
ccggcctgtttgttgttgttgttgttgttgttgtttttgagacagagtctcagtctgtcaccaggctggagtgcagtggcacgatctgggctcactgcagtctctgcctccctgggttcaagcgattctcctgcctcagcctcccacctagttttttaagtaacaatgttagtttggtttacgcttctgttttaataaaagtgtattgtgtayatatgcatttgtatatatgccatatacccatatctagtgtatatatgtgtatttatacatatatacactagatagaaaatagaaactacacataccgtttgcaccttattttttttaagttcatatatcctggagatcacttcctagtatgtttctcatttcttttttataggagcacaatattctattatgtacctgtattatgttatcttaagggtttctgttatggacgtttgattgtttttagacctgttacaaatagtgcagctataaatagccttgtgtatcttttcatcaggattttattt

SEQ ID NO: 787333 - DNA, 590 bp, Homo sapiens
ctgagctctttttggaaagcatgcatcaggttgctggtgttactgattggactgccaccatcttcaggactgcctcaggaattggtgaaggctcgagtctgtagatgggaatcatcatctgtagaaagttgggaaagacattgagcagaggaaataagacagtgacagwcaacatgtagagcttgctagaaagggaaaataattcatataagggcaacatagttgaagcaaaagggaaaagactgataattacttatacacaccattatggccatacctactataaaatataaaaatacttccttactagttggcacatagcagctctactaagtcctcaaagtgtcctcctttccttaccctgccacctcttagtccctcctgagatggtctagcatagaaggcctcttggaccctgcttcagccactgtccattctggttgctaatgctcatgcatcatcagttattccatattttgctatgttcctgagaggcttaacctacattgtggctatatgtgtgcctgtctgagtcattcgattgcatgcaaatgaacaaattcacaaatatttttgcataagcaacccaa

SEQ ID NO: 787334 - DNA, 614 bp, Homo sapiens
tcagcctcccgagtagctgggattacaggcgcccgccactacgcctggctaatttttgaatttttagtagagacagagtttcaccatgttggctaggctggtctcaaactcctgacctcaagagatctgcctgcctcggmctcccaaagtgctgggattacaggcatgagcctccatgcccagccagaaaataaaatttttaataaggttttatgcaaaaagggcccacaaaggcaaaagtgcctagggtccacagaagtcataatgaagccctgaagggtgtctggggcagctttcgattgggtggccactgtgggtctctcctatgataggacatgaaaacttcacgtactaccactccactaaagctcaggcagggggagggtccacatgcccacagtaaggatcctgatgttgacgtgggtgatatcttgttgaggtcaaaggatacagccttgaatttttaacccaaaggcaacttttcctaagctgtctctttgcccttcacggctgtcaggcccagccatgcccagcctgacagccacccttcaggcactgacctgggagcagaagctctctagaacccgtttccatcacttctgagacattgttag

SEQ ID NO: 787335 - DNA, 602 bp, Homo sapiens
atgaagccctgaagggtgtctggggcagctttcgattgggtggccactgtgggtctctcctatgataggacatgaaaacttcacgtactaccactccactaaagctcaggcagggggagggtccacatgcccacagtaaggatcctgatgttgacgtgggtgatatcttgttgaggtcaaaggatacagccttgaatttttaacccaaaggcaacttttcctaagctgtctctttgcccttcacggctgtcaggcccagccatgcccagcctgacagccacccttcaggcactgacctgggagcagaagctctctagaacccgtttccatcacttctgagacattgttagtggtactcattactcctttgagggaggtctgaggggtgttgtcacctgtgcctcttgtgtccagctaagaacmgggcgccgcgagaggtctgggagggcctgagcccaggggaactgccattcctgagtcagcatgcccagggctgctaatgaaatccagatgttagacagaaaacaatcatcgcccccacccatctggcagctcgggtttcttggagattgcaaaagaagaaaaatagagccgagagagaa

SEQ ID NO: 787336 - DNA, 639 bp, Homo sapiens
ttttcacccattgactcctctaatcttctcatggcccttgtgctggacactcttcttatccccattgcacagaggaggaaactgaggcacagagaggctaagtgacttgccgagggtcacacagcttggacatgttccccagcagtcttgcttcagaggctgtgctgtcataaatatgtgcaaaaaaaggaagaaatgaacaagactcaggatgtggaggaggaaagaaaggcagggagctaatgttgactgagcatcctccatgtaccagcacatcactgatgtcttcagagacgtcaagggattcgcccagagtcacacaggagccaagggcatggctgggatttgagccctgggtgatttctaatmccctcctccccaccttatcccaccagctcaggcctcagagagccagcacagttcatcaagggccccctggacacccccagcagccttggaccacatagctgagttggaggcaagacaaggaattactcagtgaggccactcattaccaacgcgtttggttctaaccagccataggtgaggagtttagaggaaggagcagagccaagtgggcgaccttgaataagcccattgcccttgccacacctcaatttccccttctgtgcagtggac

SEQ ID NO: 787337 - DNA, 459 bp, Homo sapiens
aaagggcatttgtaccagatattctccaccttcacccaggaaggcaaaaggttgaaaccgcagttggaatattccaggttagaaataagaagcaacgtcccaactgatcaggagcaagccagccaaggacactgaagactccatccccttaaatgtgtggccagtgtgtgtgaggtcaagaggcagagctggaacggattcccagaggccctctgcccaccgtcctgccctgagaccattttgacytcaaggggccaagggactcacctaaggtcacatagcaaggagccctgggttctgattccctgtgcctggggcccctcttcattgcaggccttcctggaggctggggagtgaccttgatgaccttagcaacctcccttgaagcagcctggaggttttgagcatgtcaatgggaggacgggaggggctggctttgtgagcctagcaactcagtgt

SEQ ID NO: 787338 - DNA, 676 bp, Homo sapiens
aagggccagcaaggccacacagaggatcctgggctggggtcgtgagtccgtggtcagccctgcgccccctctgtggactagttgccccacccctgtggcctctgtttctacatcagtggaaagtctttctcgaactcctgagaccggggctcttsctctctgggaaggtagactggagcccagggccacctcagcggccgggctgcaggaaagcacgcagactgggcagaccgggcaggacaggggccagcaggcagcccatctgttctttatttcctccccctgctcctcttggctccagccagagcctctcagctggacgcacggtggggtcggccttgtgctccatgggagggcggagcgtgagtgggctgccaggcacatgctgagttatgggcctcctgggaggccagtgaccctgcccagcagtcagtccaacctctcattctggagatgggaaaactgaggcccagagatggggagggatgcccccagcatgccaggacccatgagaacagcggccccttcccgtttctcaccatcccggcttggtgggtctcttctttgtgcaatcctggcatgttgtgtagcaatttagaaagtgagcccacgttaggtggcttgggctcggatctggactaccccatttcctggcagcgtagcttgggcaagccat

SEQ ID NO: 787339 - DNA, 486 bp, Homo sapiens
cagcctcactctggaagtcagaggatccttccctcccccgagctcagtcagatttactgagtgtgtccttgagtgagtccccttgcctctctggtccccaaagggcctgtctgtgctacaaggagtggtttctgagctccagtgagctttgcccaggctcctggcagatgtgatcccccagaggggtacgtggcaggggcctgggtcaggagagcctggtcaggcctggcttccttcccagccgggcgggtggtggcccctgcagtgctgtcagcagttaccgtctgtttcatgctgaagtttatgagaagaggccgtgcctttctgggaggaggcaggggggtgtgtggtgagtagagaagcctttgttccgttagaaattccttctccccttggccctgccctcatttgtaagcataaacaacrtcgggactgaacccttccaggaaatggctccttgctgctaagagctgcccacagtccttc

SEQ ID NO: 787340 - DNA, 568 bp, Homo sapiens
tcagaaaggatttttgcttttgttttctgcttttatttttgaagggtattttccctggccgtagaattgtgaatagatgggttattttttctcccactcagtactttaaagtctcaatccatgatgtgttcatttccctttcacatggcatgcctgaatcgaaacatcttatgtacctcataagtatacacctactaagtacccacaaaaattaaaaataaaaattaacttgtcaattcattgtttttaacttgcataatttctaatgagaagtctgctatcatttttatctttgttcctctgtaattcacggttttggtgtgtgtgtgttgtgggagattgccttagagattttcttgttttctttggttttcatagtttgatgctaagccwctctggtgtgtgtgtgtgcgtgtgtgtgtgtgtggtctttcctgcttgaggttctcagaatttcttgtatctgtggtttgatatgtctcaataattctgaaaaaatgttaccacttatttctttaaatacttattcttctgcattcatttcttttctcattctggggctaaaatg

SEQ ID NO: 787341 - DNA, 576 bp, Homo sapiens
cttgacactccccttgcaaaccatcccagcactgcaccccaggcagccactcctagccttggcctttggcatgagatggaggcctccttattccccatctggtccagttccttcacttacagatggcagcagtgaggccttggggtagaaggatcctccaaagtcacacagagtgcctgcctcctggtcccctcagctctgcctctgcagcccactgcctgcccagtgccatcaggatgagcagtmccggccaagcataatgacagagagaggcagatttcagggaagccctgactgtgtggagctaaggacacagtggagattctctggcactctgaggtctctgtggcaggcctggtcaggctctccaggtggtcagagggcccagtggtgccccagcacggtggtgcccaagccaaccctgtgactgacatgtacgattcactcctttgagtctttggatgccaactcagccccctgacctggaggcagccggccaaggcctctagggaagagccccccactgcagacatgacccgagtaactttctgctgatgaacaaatctgcaccccact

SEQ ID NO: 787342 - DNA, 619 bp, Homo sapiens
aaataaacactcatctcaaagaactgtgactgaaaacacttggttatataggggacagcgttaatataaaaatcgtaagtattaatataaatataaaaagttgaatttgtgctacttatacggcctgagctagaggaactcagcccctgcaaacctcacccaggcctcctctgccagagctgggactctaactccagccatgtggccacacaaccagcagcaggctctagaacacatcggtaaaaccctatcaattattacaagttggaattcttccatccttcttggtaaatagccactcccctgagacccccacagtgcccccacccctgaccttcttctgatctggcaaaaaattggtcaatgcttgtgacagggagaccctctaggaccttttccgagattctaactagtcagcaaacaggtcacaccaytgaaattttgaatatcatgtacaatatgctttcttgttgtttcttttttctctttccctgcattcctttggattgtttgaattttctttaataggagggtggtactagaattacagatgtatcaataaataccagcctactagtaccttttttcctgggttctgtctcccactggggtaccacat

SEQ ID NO: 787343 - DNA, 653 bp, Homo sapiens
gctcacttcgtcaatgaaatgcattttttaacattctttatgctaatgaactgtaccatggatgcacatttaaatagcaatatttgaagcccctgccatggatactccagaaggtggatcgtttaacaaatgctctcagagcactccctaggtgatggcatggttccaagcactttgaactttacacatcctaacccatgtcattgtcacaacaatcccataaggtatgtacaatttttatcttyatgtcacaggtgaggaaactgaggcatggagaagatgaccatggctgaggtctgttctcccctctctatccacagagccaaactggatactgggaacacaataaataaatacctgttggtaataggtaataatcaccaaaatggagattggttccactgaatggcctgagattggactgtgtggtagaggatgggtagcagctgagagctagcctgtcatgactgatggaacccatttcacacttatcatgcttcccacgtgcctacctccaattctcttgcatccttcatgggtaggagttggccttggccagggcctggttgcctaagtgtctgcagagttgcctatttgggctttcgccaacagagacagaagtatattatgcatcttaggattctgtattaccc

SEQ ID NO: 787344 - DNA, 614 bp, Homo sapiens
gcgtttattcgaaaatgtaagcaacctttattattttactatcctgaaggatgtaataaacccatgcttttgttcaacctaataactggtagattacccaatcaagtagttaactcaggttagctacaggaaaaaaaaaacaaaaaacaaaaaacacaacaacaaaaaaacgccattagcctggcacaatgtgcattcartaacctgtaatcaactactaagtaaattacagaagcagaaaacagagctgcatgtttgttacaaaaaaaaaaaaaaaggagaaagcttataacaacttccacttcttaagccatattgactcacattaatttaggatgcctgaggctatgagtatggtaccctgaggtgtaagtgaaggtgatcttctcttctcacgtctatgaacaatattttcccaactttgtttttaaagtgagaattagggtatagatagatgctttgtaatttttccatccaaaagcttgaataaatggttaattgctgacttaaattgcaataaagaagtgtcctaatttcaaacaaggatgctcactttcagaatctcataatcttttcaaaattctattttattcataaataggataaaaatcttt

SEQ ID NO: 787345 - DNA, 574 bp, Homo sapiens
ttctggtttatccttcttgtgtttcttttgcacaaatgagcagacatgtactttttaatatccctttcttacacacacaaaggcattctatagatacttctttgcacttttcttttttcacttaacagtatgtcttggaaatcatttcatataaataaggatttcttttcttcctttttcttgaacagctgcacagtactacttcatggtatggacatamcccccacatgtattcacctactctcctacacatcagcatctatgttgtttccaccattttgcaattagaaacagtgctgcagtgagtaaccctctgcatatgagttttcatattgttgcggtggtatctttagggtagattcctagaagtgagatttccagggcaaaagctaggtacatatgtaattttgttaggtattgtcaaattcacctacaaaaaggcggtaccagtttgtattctcccagcaaagcatgaaagagtctgtttccccacagccttgccaacagagtatgctgtcatattttaaaattgatgccagtcttataggtgagaaattatacaagtgttgtttta

SEQ ID NO: 787346 - DNA, 574 bp, Homo sapiens
ttctggtttatccttcttgtgtttcttttgcacaaatgagcagacatgtactttttaatatccctttcttacacacacaaaggcattctatagatacttctttgcacttttcttttttcacttaacagtatgtcttggaaatcatttcatataaataaggatttcttttcttcctttttcttgaacagctgcacagtactacttcatggtatggacataacccccacatgtattcacctactctcctacacatcagcatctatgttgtttccaccattttgcaattagaaacagtgctgcagtgagtaaccctctgcatatgagttttcatattgttgsggtggtatctttagggtagattcctagaagtgagatttccagggcaaaagctaggtacatatgtaattttgttaggtattgtcaaattcacctacaaaaaggcggtaccagtttgtattctcccagcaaagcatgaaagagtctgtttccccacagccttgccaacagagtatgctgtcatattttaaaattgatgccagtcttataggtgagaaattatacaagtgttgtttta

SEQ ID NO: 787347 - DNA, 637 bp, Homo sapiens
taaatatttattgagcagctgctctatgccaggcattgtacttggccctggtgacacagtagtgaatgagagtgacaagtccctgtgccacgatgctcatagtctcaggaaatgtcacagagagtccaggcagctgctaagagcactgcatgtattttatggtatttataataccgcttccctgtgttaggaagataaaatgagaattgggtaaagtatcaagaatgtcctgggactgttagatgcccagcaagtggtagttaatactaccaatagctatagtaataggggtgactgactgwtcccattacttttataaagaatcagggccatggccaggcacagtggctcacgcctgtaatcccagcattttgggaggccaaggcaggtggatcacttgaggccaggagtttgagacccgcctggccaacatggtgaaaccccgtctccactaaaaatacaaaaattagctgggcatggtggtgcgcacctgtaatctaagctacttgggagactgagggaggagaattgcttgaacttgggaggtgtaggttgcagtgagctgaggtcaagccactgcactccagcctgggtgacaagagcaaaactccatctcaaaagaaaagaaaaaaagaat

SEQ ID NO: 787348 - DNA, 538 bp, Homo sapiens
ttttgtttgtttgtttttggtttttttttttttttttttttttttttgagatacagtcttgctctgtcacccaggctggagtgcagtggcgcgatcttggctcactgcaacatccacttcctcggttcaagcaattctcctgcctcagcctcccaagtagctaggattacaggcacgtgccaccaygcccagctaatttttgtatttttagtagagatggagtttcaccatgttgaccaggctgttcttgaactcctgacttcaggtgatctgcctgcctcggcctcccaaagtgctggggttacaggcatgagccactttacccggctgtaaataatgtatttttagagatataaacatattctataaagaaaataataggaatgataaatacaaaatttaggacattggttacctctgaggagatagcgaaaggaaaagaatccaaaggaaagaatagcaaggactacagggtaaagtttttgctctttttttggtaagttcttattaaactggctggtaagtagaggtgtttgtg

SEQ ID NO: 787349 - DNA, 538 bp, Homo sapiens
ttttgtttgtttgtttttggtttttttttttttttttttttttttttgagatacagtcttgctctgtcacccaggctggagtgcagtggcgcgatcttggctcactgcaacatccacttcctcggttcaagcaattctcctgcctcagcctcccaagtagctaggattacaggcacgtgccaccacgcccagctaatttttgtatttttagtagagatggagtttcaccatgttgaccaggctgttcttgaactcctgacttcaggtgatctgcctgcctcggcctcccaaagtgctggggttacaggcatgagccactttacccggcygtaaataatgtatttttagagatataaacatattctataaagaaaataataggaatgataaatacaaaatttaggacattggttacctctgaggagatagcgaaaggaaaagaatccaaaggaaagaatagcaaggactacagggtaaagtttttgctctttttttggtaagttcttattaaactggctggtaagtagaggtgtttgtg

SEQ ID NO: 787350 - DNA, 574 bp, Homo sapiens
ttactatctaaagcaatctgcagattccatcaaaatatcaatgacattcttcacagaaatagaaaaaaaatcctaaaatttgtatagaaccacaaaaaacaaagcaatcctgagcacaaagttggaggtttcacactaccagactgtaaaatatactacaaagctgtartaaccaaaacagcatggtactggcataaaaacagacacatagaccaatggaacagaatagagaacccagaaattaattcacatatctacaatctacaatcaactaatctttgacacagatgccaagaacactcattgggagaaaggatggtctcttcaatatatggtcttgggaaaactgcatctccatatgcagaagaataaaactagacttcatctctcaccctatacaaaaatctactcaaaatggatcaaatacataaatggaagacctgaaaatataaaactactagaagaaaacataggtgaactgcttcagaatattggtctgggaaaattttataagccctcaaaagtacaggcaataaaagcaaaaataaatacatgagattatatataactaaaa

SEQ ID NO: 787351 - DNA, 574 bp, Homo sapiens
ttactatctaaagcaatctgcagattccatcaaaatatcaatgacattcttcacagaaatagaaaaaaaatcctaaaatttgtatagaaccacaaaaaacaaagcaatcctgagcacaaagttggaggtttcacactaccagactgtaaaatatactacaaagctgtaataaccaaaacagcatggtactggcataaaaacagacacatagaccaatggaacagaatagagaacccagaaattaattcacatatctacaatctacaatcaactaatctttgacacagatgccaagaacactcattgggagaaaggatggtctcttcaatatatggtcttgggaaaactgcwtctccatatgcagaagaataaaactagacttcatctctcaccctatacaaaaatctactcaaaatggatcaaatacataaatggaagacctgaaaatataaaactactagaagaaaacataggtgaactgcttcagaatattggtctgggaaaattttataagccctcaaaagtacaggcaataaaagcaaaaataaatacatgagattatatataactaaaa

SEQ ID NO: 787352 - DNA, 636 bp, Homo sapiens
gtaaaatctgccttcctaaaatctacgctgttcgtcatgcccagtcttctctcactggttgtcattaagtctacagttatgcagtcacagacaataggctgagtcaggaagacatggattgtaattctgcattttactcataacttggccatgaacaagttacattacttccctgagcccagatttcatcatttgaaaagtgaagctaatattctactagctgcctcataaaattactgggagaattaagaaatacaatgtatataaagtggctgccacattaagtacttgataaatattttcccttactcatcaccygaaaaaaactctctctggtcagaattaagttccagctagtggatctcttattctgttagctgaagttatcactaaagccagtcaagaacatgtcaaatgttcttggtttataagaggtttagaatgtttccaacagctgaaaatatccatcactaccgtagctcaccattatggagttttgtgatctgataatacaaacttaccatctattctgtcatttggcaatgtgaccaatagtaaaattacacaatacaattgtttcttttcttttatctctttaacaatagattttctgataggcatatttgtaattgccca

SEQ ID NO: 787353 - DNA, 609 bp, Homo sapiens
ccattctgaaactattaagtcagaaacttattttttggttataatattaatttaggttcactgtggggaaaaaaacacagaaaagtacatagaaatagataaaaatcttaatgaagttttaaaaatgcttttgattatacattacctgcgctcttttgcattctgcccccaattaaatgttgtcataagcatttttcatgtaattaaaactcttaataaaactcwtagatgactgcatttattttcattttatacatggtactgagaaataaaaataaaatcctaagcctcccagttgaccgaatagacaccctgttgtccaaggggactcccagagaaaccttaaaaattgaattcctggccatgatggaatgggagatttgacacatcttagtatgccccttccttatgagcctttaaccagcattccttcctaaggagtaagcagaagccaactccagaaaacaagaaacgaatgagtcataacttcatcgtttcagccaatcatctgaggccatggccggactccccatctttgcagtttcgatgtggcagctcaccagtttcacatgcatcccttcctaaaaactgaccaccatctctaggcag

SEQ ID NO: 787354 - DNA, 594 bp, Homo sapiens
gtagttgtgctagagtgatgcataccttttgttacagcattccttagaactgtggcttcctgccctggttagcgatggagtactaataacctcaagcaaaactggcataaaggtttattttgattgctagctctgaacaattgggggtggatgcctggagcactttgggaagcattcagaggttatgaatgatctcaataagaaatagggccaggtgcgatggctaacgcctgtaatccccgcactttggggggccaaggtgggtggatcatttgaggtcaggagttcgaaaccagcctgggacccaacgtggcgaaaccccatctctactaaaaatacaaaaattagctgggcatggtggcgtgtgcctgtaatcccagctactcgagaggttgaggcacgagaattgctygaacccaggaggcggaggttgcagtgagccaaaattgcacgactgtacttcagcctaagtgacagagtgaaactatgtctcaaaaataaaataaataaaataaaataaaataaataacagcatctgccgtgacacatgatggagaatgtggcttatgtgggaaatatttgttatccctgtcc

SEQ ID NO: 787355 - DNA, 698 bp, Homo sapiens
atgcattatgctgaattggatgccctgttttattatagcaggattgaggaagtcagtaaaactacagctaagagtcaatatttttctcccctgtgttaccatgattttcgcgttctactgaccccactccccttaagatatttaatactgagatgataacatttgctttcatatgccttaataattgtttactgaaagcataaaatacttcaagtagccttctgaggggagatgggagaagtgattccatctggggacaaaccctgggtctgacagcagctcttcctcacaggtgagaccctcccttccagcccttcggctggttggatgtgagctggcaaacctrattcataaaagctgaactactctttgtctcacttctaatttgtgaaaagaggccatttgaatatttatttttttccttgtattgctaaaggaccattttaatgacaagattctgaatcaactaccaaacagttaccattctcctccacaagaagtcactcaaacttttgttctgtgtttagaactgtgagtgtaggctctcttcttcagtctcttacgtagttaataataacattgttcatccgaagcccactccaagcacaaacatcatttagcctttgagttgctccctttgatggagaagaggaataatatttacctaataaagatcctcataatctctgccatcatcc

SEQ ID NO: 787356 - DNA, 427 bp, Homo sapiens
agaatgtgatgctaagactcaagagaaggaagagatgatgcagaccttaaataaaatgaaagagaaacttgaaaaggagactactgagcataagcaagtcaagcagcaggtggcggacctcacagcacagctccatgagctcagcagggtgaggtcttccgctcagctcacgggcagctgccaaggcctcactgaccckagagcccctcacccttaagtagagaacttcatactgggggaataaaatctgaaatggctcatgattcatcacaattaggagactcactccctctgctatcatgtaggcagcagaggctgtttgggggtgcatttttaaatactgtacaaatctaagagcaaaggaaattgcattagcttcttaaagtgaaaactgacttcatgaaaaccagactgtctgtgatggtgc

SEQ ID NO: 787357 - DNA, 571 bp, Homo sapiens
ccttaggggcaatcatgccacctcctggtgctccaatgggcctagcactgaagaagaaaagcattcctcagcccacaaatgccctgaaatccttcaactggtctaaactgcccgaggtgagccatttgttccagttttccctttaatggatagcattagcagctcattgtgttatcactgaaagggaaaacagccctggctgttaaatgatttcattttctaatgtggaccaagagttctcactagctcagatatttaagtgataaagcttctgaaataaatgacacattgtttgaaacccgtcactttgagtgtctggtagactgaaaaatttgggatagaagcactttttaaataaccatscctgttctttttatgtataactgtaaactatagcacttattacattgatgtttctagaacaaactggaaggaacagtatggaccgaaattgatgatacaaaagtcttcaaaattctagatcttgaagacctggaaagaaccttctctgcctatcaaagacagcaggtaacagcatatgccctccagacaccaaaaaggtagaaaaatc

SEQ ID NO: 787358 - DNA, 605 bp, Homo sapiens
aagcctcttctgttctgtctggtctggtagttctccaccttggatatgcatcagaatgttcgcagtggatttttaaaaagagatatttagggatgctgactcagtagatgtggagttggggcccattctacaggattcttaaagatccccaggtaggcggggtgcggtggctcgctcctgtagtcccagcactttgggaggccaaggcgggcggatcacgaggtcaggagatcgagaccatcctggctaacatgatgaaatcctgtctccactaaaaatacaaaaaatcagccaggcgtggtggtgggtgcctgtagtcccagctactcgggagtctgaggcaggagaatggtrtgaacctgggaggcagagcttgcagtgagcggaggttgtgacactgcactccagcctgggcgacagagtgagactccgtctcaaaaaaaaaaaaaaaaaaaaaaaatcctcaggtgattctgacattcaacaaaaggggaaaataggtgagaagagtgaaagatcttgggttcgggaaatgtagttatagttgcagatgtgggctgggtctggctgcctagctggttaagtgcacagctttgtttttaaaa

SEQ ID NO: 787359 - DNA, 601 bp, Homo sapiens
tatcaactggaaatctttccaaggcaatatatacagttgtaacttaaaacataccctctatcatcattaaaaacatgtttttgtggtgaaaatttggattcaaaagggtaaaaatgaaaatgaatagttctccaaccctctgtttttattttgaggattactgctattagtaatttctttcatatatttataaatacatacattctttaaatcatrtactcctatagcattttcaacattttcccatatctacatatacaaatgccttggttcttttaaatgagtgtataatattctattagtgtgtgtgtgtgtgtgtgtgtgtgtgtgtgtgtgtgtgtgtgtgtaatttaaccatttcctttccttgctggtgaattcattttctcttttcagtttgaaaatttctggcccatctagctcaagtcctggctttgttgtaaatttgaattagttaatacagtgaacatttatggagtgccttctctcttcctgggattgtgcagggcactaggcccacaaaatacttgatgcacagccgcttcccctcacttcagttaccacagcctaacaggaagacacactcataaagagcttagaa

SEQ ID NO: 787360 - DNA, 369 bp, Homo sapiens
ctttattgagaaataattcatatataattcacctatgtaaagtgtgcaattcagtggcttttagtatattaatagaattgtgcaaccattaccaaaatcacttttagcaatcaccctagcatgtgacctctaaatccataaaccatcactcctcattcatgcctaaccccaacatcccctaacaaacaataatcttctttgtgtctctgasaatttggctactctggatagctcacataaatggaattatacaatatgtggtcctctgtgactggcttctttgacttcacagagtgttttcaaggttcacccttagagcatgtaccagtacttcattcctttttcttgcctaataatattccattatgt

SEQ ID NO: 787361 - DNA, 603 bp, Homo sapiens
aaattaatctattcatgagggatcctcccccatgacccaaacacttcccattaggccccacctccaatattggggatcagatttcaacatgagatttggaggggaacacacatccaaaccatagcaattctgaatatgttttcctttgagctcagtagttgaggtgaggtgcctctttgttacaacatgcacctcctctggctactttaattttgaaatagaaaaggacaaagagaattaccaggagcccccctgcaatagacttctgcataccccaagaataagggtttcctacagaatatttcacagcaacagtggtattggaactggggtgtctttctcacagtttctgtttctgtgaccctcagcttttttaatgggtgaaacatgcaaaatgtscaactgcttttcctgtgtgagattttacgtaaaaaatccaggtttaaaacaagtctggttattatttttgaagtgtattatagtcagtctcacctcttacagcacacatatttggaatccatttcatagttttagaggagagctttcatttctaatacactacatcactgaatttatggctagttggaaataatatgcagtttg

SEQ ID NO: 787362 - DNA, 595 bp, Homo sapiens
ctgatgcaaagatgaatagaacaaattgagttcgcgtcttttgggaacgagttcacaatgagagtcagacgtaccaataacatatagcaatgtgataaattccacaaagtacagaggagctactcatccccagaaaggcaggataggctacctggagggaatagctgatgccttgtaaaagcttatrtgaataggattgcctcttagacatggtgggcccttggaaaaggggaacagcatgtgcaaactttcagaagttggcaacttgtgatcagaggtaatagttttaagtgctatcattttttctaagaaaaagggcatgagttactgttattgtttttattttctctcctcctctcccctttccctctgttccctgtttcctattagcccttcagaatgcaaatataacctgtcaccttcccctcaccagacatttcctgcaggatgagttcttcttactgtctgtcccaagacagatttctctgcaagagttgacagtcgacttgcaaaccaaaacatacctgctatggaacgttcacctctagggaataacgttagatcttccaccctcggggggttgcctcaggacttt

SEQ ID NO: 787363 - DNA, 643 bp, Homo sapiens
ccaggaacaatcccagactgaactattgctttaatttttgacagaattcacaaaatcttacctattttacagacagaatataattgtcccaggagagaaaagggtaaaaacacattttccagaatttttagtttgatactgcactctgaaccattcacagagatcgggaacacaggaataagcagagttcagatttgcacrtttgagtcatggtatgagtacccgagacgatgtgagatgtagaagttttgagctcagcagaatgagctaaactacagtaggagattgttgagaccacagggcgaaccactgaagtaggtcacatagaccagatgtgtaagaatagaaaacctaattgaccctgtaccatttattgaaaatactatctttttctcatgtgctttagtggcaactttctcataaattaggtgactatatatgtgtgagtccattttttggatcttctgttccctgggttaatttttctcttcttgcaccaatactccactgtcttaattccttcagttttataataaggcttgatatctgatgtgtaacctcaaaattgttcttgagactttcttggctattaatggcccttcacattcccatgtaaattttaaaatcagtttgtttccacaaa

SEQ ID NO: 787364 - DNA, 511 bp, Homo sapiens
tccagcaaccttgcaaatttacatgttaattcgaatagtttttctgcatggccttttggaatttctgtgaatataatctataaatactagttttattttttccttttcaattctattttttatttctctttttcttgctttattgtgctggctgggacgtccagtacaatgttgaaattgttcagatttccatcagatttttaaatctcaggtaaagatttaatatttcatcattaagaatgatgattgctctaaatatttttgtagataactcttcagtagataraggaaattcttctctatttctagtattctaagagttttttaacattaggaatgggcatggatttatcaaatgtttttttttaattttgggacaatcatataatttttctcctttataatgttatgtgtctgccatattaaatgacttttaaatgttaaactaacctcatatccctggaacaagttcaacttgtgctttattattctttttatataaggctggatt

SEQ ID NO: 787365 - DNA, 623 bp, Homo sapiens
tggactctgtactcgattttttagctcctcagcactgtgagactgccaaaccctctgctttgcttttgagcctctaaacagtttctttctacttgttttctcaactcctcgtcccatataaacacagcttaatatctggtaaatacctcaagtggaaatgttggagttcaaggaggccaggacttgaagagccagagtcctagaggaaagggactacacagaagtgacccaggcttctatgagatcacttttatgagctcatttccatgcagccccctttttttctgggactttagctcttctcacgcactagctgccttgaattttgattttctccccagctggtgatactgygtaaagctctaggccgctaccaattgctgcttggtgtctgtgcctcgtactagaaattatcaaatgccctgaaaggaaaaggcagcagcaaacacaaggctcaccttaatgcatttcctttctccctgaggtcttgacccatctagtgttgccttgcttggttgctctaagagaacttcaaacaagtgtgttttttagttaattcagtattttttttagtgggaatgttagtttgatacatcatgaccagaagcttaagtctttgaagt

SEQ ID NO: 787366 - DNA, 613 bp, Homo sapiens
gaggttaaagtaacttttttttttttaaactctcacttaaaacttacatatttttaaaaattacctcctcttctcattagccatctggccatgcaaactggctttcacactcctttctttctttctttcctttgcttttttctttattattcagtagaggtgctggtttatacatagtgattgtcaggacagagttttcaggcagctctatgactattgggaccagtcgccaaagtccttcatttaaatgaccaatttcacattcagtctggacttcaatggggatgaagattttagaacccgaagacacatgggtaatgctggaagtctttttctctttccctatgaatggaaaattcattcattcatttagcaaacatctggtgtcttttacgtgccagtcacwgtgctgggtttgaagaatacacagataaaaatatgctcggtcccttcacatagcttctattctaaacacaaggagagtttgttagtagattatttctacagtgtcatgtatagatgtatagactaccttctgtactggattggtttaaattagatgatttccatgatgggactagaggattttaagaatattttccaacgctttcta

SEQ ID NO: 787367 - DNA, 472 bp, Homo sapiens
aataaaatacaattgccaagtcaattattttttccaggaagacaatttttagtgcagttcttaaaaaggataaccttattctagcctctttttgttgtcagtgacagaaactccattcaaactgaattagatggcgaattccaaagtagcttcagtatagctgtgagcaaacgaygtcatttgcacccgagtctctccatcttgatctggcattggcctcagtcagggctcctgtgttggggtgaaggtggatacttaagttcaggctgacttcctccagcagagcaacacccagcaggtatagagcccttctttactgatagcacaagcaagaagtcctggaagtgatgggctgtcccaagggacctcatgcccctctctgaggtcactgtgaaaggaggatgtatccctcttgttttctaggtttaggatgcatactggccagtaaaggcagggtatgggggtgcccccc

SEQ ID NO: 787368 - DNA, 464 bp, Homo sapiens
caactgctggtttaatcttgttttgatactggattggggtatttaaaatgttaggttaagtaaatacagtaaatgattttctaaaaacaaaattgtagcaattatgtaccatgttactatctttgcatttagcatgcgatcccaaaggacctttgtagcaacaagtgccagatataagcataaatgatgacaccaatgctatacaaaagttaaattatttgacaatcaaatgaagtgtgtacactaaaaagtggatcataactggatgtcgtgagtatgtcatgcatatacattgttctagatagaayttcaatgttagctcataataaaagccaataatgagggaagcagcaataatgaaaatgtggtcctcagctggctctgggttatctgcacatacttccagtatgggtccttgaaatttcataggagttcagatggcaagagacacctgtggtcacacc

SEQ ID NO: 787369 - DNA, 538 bp, Homo sapiens
gggctcccaagtttctaggctaaagctagaaaatgatcaagttctagttttgcagtagcaccacggtgactcaaagtaataactcaatgccagtgcacagatggccttggaatatatgcttggattttttttttcttgaattctttttacctctctaatgaggattcactgaggctgataatcaaatgaagtttgcattccacaagcrcatatcggtaaggtctgggtgcacagtgggtctgccctggacacagtcatggtggcttttgtcatttctccctgttttacacatttggagaccaaaaggtaggaagcagtaataacttggaaactcattctagagaccaggtagatttgctcaatatctatttgttgatcatggtttgatttatcagttgaaaatattctccataggtgtaactcacaaagaatctgtattttgaacttgtacactctgacttggaggcagcgtgcctcagtgggcacatactggctctgacattgggtggcctgggtgtgtgtcctgactagccggcat

SEQ ID NO: 787370 - DNA, 530 bp, Homo sapiens
attttaggcttttctcatttaatgtgtgtggatgttttgtcaaaaattaggcgaccacgttttctgcattcagatatgatatcaaactataagctaataataaaacttaagcccctcaaccatatcaatggacccctcttcttggtcaattgcattccaaagtcaacctgaaaaaccagttcaggccatgatgagtagggagagtcagacatgcctcagtgtgccctcctcccytttggaattcagtacatctgaccagcattaacatcaacacagagactgatagaacagactctttaagtctggtaacaaacatttactatttattattactgatgtctactatctggaggcttcatctgcatgataaaaccttggtccccataatggcttatcataacccagacactcttttctattgattccaggtctttagaaaatatctccttcaaccaattgccaagcagaaaatatttgaatccacctatgacctgaaagcccctgcttccagttgtcccacctttccagac

SEQ ID NO: 787371 - DNA, 530 bp, Homo sapiens
attttaggcttttctcatttaatgtgtgtggatgttttgtcaaaaattaggcgaccacgttttctgcattcagatatgatatcaaactataagctaataataaaacttaagcccctcaaccatatcaatggacccctcttcttggtcaattgcattccaaagtcaacctgaaaaaccagttcaggccatgatgagtagggagagtcagacatgcctcagtgtgccctcctcccctttggaattcagtacatctgaccagcattaacatcaacacagagactgatagaacagactctttaagtctggtaacaaacatttactatttattatkactgatgtctactatctggaggcttcatctgcatgataaaaccttggtccccataatggcttatcataacccagacactcttttctattgattccaggtctttagaaaatatctccttcaaccaattgccaagcagaaaatatttgaatccacctatgacctgaaagcccctgcttccagttgtcccacctttccagac

SEQ ID NO: 787372 - DNA, 519 bp, Homo sapiens
agtccattcttgtcctgttataaaaaaaagtctgaaccctggtaatttataaagaaaagaggtttagttggctaaagtttctgcaggctgtataggaagcatgatgctggcatttgtttggcttctggagaggcctttacagtcatcacagaaagtgaagggcaagcaagtatgtcttatgtgtctggagcagtagcaagggagaagagagtggggaggaactacgcactttcaaatgaccagatctcatgagaacagaatcaagggagaaatctgcctccacgatttaattaccttcccctaggcaccacctccaatatttggaaatacaatycgacatgagatttgtgcaggaacacagatccaaaccatatccgtgtcacttagtgatttcggcaattatttgttttttaattaaccagttgagtaccttgggacataaataaaatgccattgctctgaacttcaatgcatatgctatctatcaagaatcagtataaaatgacaaacacagatttt

SEQ ID NO: 787373 - DNA, 583 bp, Homo sapiens
atttttaatggggttatttcttttttgtttgttaatttgttagtttcttatagattccggctactagaccatcagcagacacatagtttgcaaatattttctcccatttggtaggttgtctgtttactgtgttgatagtttattttgtaatatagaggctcttaatttaattaggtcccacttgtcaatttatgtttctgatgcaattgcttttgccatctttattatgaatctttgccaggtcctatgaacaagatattgcctaacttatattccaatgattttatagttttaggttttacatttaagtctttgattcatctggagttgatttttgtatatgacacaaggaatkagtccagttttaatcttctgcttatggctagccagttattacatcaccacttattaaatagggagtgttttccctgttgcttttttttttgccaaattttttgaagatcagatggttgtagatacgctgctttatttctaggctctctattctgttcaattagtctgtgtgcctatttttcaacaagtaccatgctgttctggttactgtagccttgtattatagttt

SEQ ID NO: 787374 - DNA, 473 bp, Homo sapiens
ggacttgaagaacataatcatggtgaattttgtgcttttttctttttttatcttccatatatcctggatggaacataacagagatctgaaacccagaactgccaagaggttagctctggggaataaggtcgggggaaggggggcgtrtagtggagggtaatgagaatctcagctgggacttaatgagcaaacccatacctgatggagcaagctgcctgaactgcctattgctgagtcaccaccagagatccaggggccaacccatcccctgcatcacaccagtatgcagccgtgggtgtgatgcaggggatgggtctacagccacagtggcagcagtagaactttagtgcaatgaaaattagtagtgacaaagaggagcattacacaatgataaatagattagccaacaaaaaaggcatgatgatccgaaatgtgtaagcacaaaacaagatagcctaaaattaaatgaaatt

SEQ ID NO: 787375 - DNA, 620 bp, Homo sapiens
tcaacccacttaaaatggcttttatccaaaagataggcaataattgatgctggcaaggatgtgtataaaagagaacacttgtacattgttggtgggcatgtaaattagtacaatctctatagaaaacattttagcaacctagtatggaggttcctcaaaaactaaaaatagaactacgatattatgcagcaatcccmctgctagatatatactcaaaagaaagaaaatcagtatattgaagagatacctgcattcccatgtttattgcagcactatttataatagccaagatttggagtgtgttcaacagataaatggataaaaagaatgtggtacatttatacaatagaatattattcggtcataacgaaagaatgacatcctgttatttgcaacaacatggatgtaactggaagatattgtgttaaatgaaataagccaggcacagaaatacaaatatatgttcactcatatgtgggagctaaaagttaaaacaattgaattcatggagatagtagaatgatggtttccagaggctgagaaggttagcagaaattgggggatataggtggggatggttagtgagtgtaaaaatatagttacatataatgaataagacc

SEQ ID NO: 787376 - DNA, 609 bp, Homo sapiens
gctgtccacatgaatagcaaacacttctgggcatagacagggtcatatgaaattcctgacaaatggccaattaacctacacctttttctgctcttcaaggatgacatcagaacttgagaatgacacaaagtcctaactgattttttaaaaagggcatattttttgccataatttggtacaaaccatcgttaataataaccacaacacactgcagtcatgtccatatttataaggtctctttctgkctgaaaattcacatggttttaagaatatgtttttttctttttttttttcaaaatgcatagttagaatgtattagctaaaatgtctccaataataccaaactactatgaaacttcttcatgattctttccagggaagagcgtaggttgtataacatcacaattttactgtaagtagttacatttggcctccaacacaaccaaattgaggcagtactgcattacaatctatatgcattctaaatgcctggtatttaccaaaggaggcaggcctttactttgaatgttgcaataaaaaatacagtgcctcatttttaagagtgatgtaaatattcatccaattaacaacatttattaatgtccactt

SEQ ID NO: 787377 - DNA, 616 bp, Homo sapiens
gctattttccagatcttttaggtgtgtttcattcttttttattctttttcttttgtctcctctgtgtctttttaaatatactgtcttgaagctcactaattctttcttctgcttgatcaattctgctgttaagagactctgatgcatttcttcagtatgtcagttgcatttttcagctccagaatttgtttgattttttttttttagttatttcactctctctgttaaatttatctgataggattctgaattccttctgtgtattcttgaatttgtttgagtttcctcaaaatagcttttttttttttttttttttttttttttttttgagacagrgtttcactgtcattgctcaggttgaagtgcaatggtacaatctcggctcactgcaaactccacctcctaggctcaagtgatcctcctgcctcagccttccaagtagctgggactacaggcacatgccattgcacccagctaatttttgtaaagacgaggttttgccatgttgcccaggctggttttgaactccttagctcaactgatccacctgtcccttggcctcccaaactgctgggattacaggcataagccactgtgcctggctaaaaatagctat

SEQ ID NO: 787378 - DNA, 545 bp, Homo sapiens
aactgcagatgtggtagaaacagcaaggaacagaattagaagtagagcctgaagttgggactgaattgctgtaatctcatgacaaaacttgaacaggtgaggatttgcttcctacggatgagcaaagaagtggcttcttgagatggaatctactcctggtgaagatgctgtgaacactgttgaaatgaccacaaaggatttagaatagtacataaccttagttgataaagtagwggcaaagtttgagaggacaaagtccaattttgaaagaagttttactgtgggtaaaatgctatcaaacagcatcacatgctacagagagatctttggtgaaagaaagagtcaatgtggcagactttattgtcttattttaagaaattgctacagccacctcaaccttcagtaactaccacccaaatcagtcagcaaccatcaacatcgaggcaagaccctccatcagcataaagattaagacttactaaaggcccagatgatcattagcatttcttagcaataaagtatactttcattaaggtatgtatatt

SEQ ID NO: 787379 - DNA, 627 bp, Homo sapiens
ggggctctgggggcggggtggggacggcctggtgtgtgggtgagggtgtgggggcgggacttggtatggatgggcggggcttgacgcgcgggggcggggtctggtgtgggtgggcggcagcggacgcctgggaccgggcaggcgcctggcgcttccttccggaccagctgctccgcgcckctctgctgtcatcaggcgggcgaggaaaagccccgcgttcgccggtcggcgcggagccgagcagaaaattgttgattcagagaaaatgagagcatcacgactaaacaatggcggaaagcggcgacgacgccgacagggcgtcctagcatcccctccctcccgctcgcggggacacggggagcgaagagggagctgagctgagggcccgcgcggagaagggggcgagcgctgccagctctgggctggaggctgggggtaccgaccccagggctgcaccctgaagccctgaacttaacgtccctctcgggtccccagaggccccggatcccgctaccctgggtccagctttgaatgtttccggacttagggcactggggttgggccatgctttctgactgcaggggcgcatgaaaccctgactcctcaccgtggccagtaagaccccga

SEQ ID NO: 787380 - DNA, 607 bp, Homo sapiens
ccaggatagctccttctttctggagtctgggtctacccaaaatgcaaaggaaggaatagagaagcagagatgctgggagaagcagagacactgagaagagcagcagaaagtgatgagagctaccacttactatgtattctttgtgttcctgggcctttarttggtacatctcatttaatcctcacagaaactttataaggtaggttttttttgtttgttttttgtttttttttttgagtcagagtctcactctgtctcccaggctggaatgcagtggtgtgatcttggctcagctcactgcaacctctgcctcccaggttcaagtgaccctcccacctcagcctcccaagtagctgggattacaagtgtgcaccatcacacccagctaatttttttatttgtagtacagacggggtttcaccatattggccaggctgatctcgaactcctgacttcaagtgatcctcccgtcttggcctcccaaagtgcagggattacaggaatgagccactgtgcctggccaaggtagctcttattattgcatgtgttttacagataaggaaacaagcttggagaatgtgccaagagtcatatagccagtaaggac

SEQ ID NO: 787381 - DNA, 566 bp, Homo sapiens
ggacgaatgagaataaatgggtggtggaaggaagaataaatggaagggaggtgggagggaaggagggagggagggaggaagaaaggaagggagagagggagggagagaggataggaaaagaggacacatattgagtaccctgcaaagcatcatcttctaccccatgattcctcatgagttagcttttatgayttccaaaacaattagacaagatgctattaatgctattatcatcctcagtttactgaaaaggaagcagaaactcaaacaggaagacccggggcctcctcaggctgatcctggaggcacatcttgagtctgactgaaggacagtcaagacggtacagggagctgggccaaggcccagcatccattcccatacgacaaggagaatttgctaagggtctgtttcccaaactggttctgcatggaacaccagtgccatgcaatgctttccacaacaaaagaggtctgtgatcaactgagtttggagagtgctgcatactctaatcccacttggagattctctaaagcctcaatataccaaaggctttgagaagtcctgg

SEQ ID NO: 787382 - DNA, 566 bp, Homo sapiens
ggacgaatgagaataaatgggtggtggaaggaagaataaatggaagggaggtgggagggaaggagggagggagggaggaagaaaggaagggagagagggagggagagaggataggaaaagaggacacatattgagtaccctgcaaagcatcatcttctaccccatgattcctcatgagttagcttttatgacttccaaaacaattagacaagatgctattaatgctattatcatcctcagtttactgaaaaggaagcagaaactcaaacaggaagacccggggcctcctcaggctgatcctggaggcacatcttgagtctgactgaaggacagtcaagacggtacagggagctgggccaaggcccwgcatccattcccatacgacaaggagaatttgctaagggtctgtttcccaaactggttctgcatggaacaccagtgccatgcaatgctttccacaacaaaagaggtctgtgatcaactgagtttggagagtgctgcatactctaatcccacttggagattctctaaagcctcaatataccaaaggctttgagaagtcctgg

SEQ ID NO: 787383 - DNA, 597 bp, Homo sapiens
ttcagttccctggaaacaatgagaacatccagtcgtttccaaagagaaagaaaatgtttgcatacaaaagaacaaagatcaatttcaaacttctccttggcaacatcgaaaactagaaaacaaatggaaagtgctttcaagtctaaagaaaaatggtttccaaactagaattcagccaaaccctcaatcaagaactggggtagaatatagacatttaaagttattcaaggcctcaaaaatgtaccttccataacctcccttatattccagaagctattgtggaatctgcttcaaaacaagggagtaaaccaagaaagagaaatcacgtgagacargagacaggagctgcaacatacaagtgaagtaagagaaccctgaggtgattgaaaagccggatcccaagaggacagctgtgctacaggcatatggggtgctggccaggttggagtgggtctgctttgggagagacttcttcaggaaagggaaactgataccatattttgtgtgaatgaaacaattgaggggtgtttagacaattggaggagagtttggggttcagttattaaaaagtatttgaggctgggagcagtggctcac

SEQ ID NO: 787384 - DNA, 573 bp, Homo sapiens
atggtggtgtgtgcctgtggtcccacctactcaagaggctgagctgggagggtcacttgagcctgggacgtcaagactgtagtgagctgtgatctcaccactgcactccagcctgggcaacagcttgtctcaaaaaaaaaaaaaaaaaaaatcaaaaaattagctgggcatggtggtgcatgcatgcctatggtcccagctacacaggaagctggggtgggaggatcgcttgagcccaggaggttgaggctatagtgagctatgatcacaccacaccactccaaccctgggagacaaagtgagattctgtctccaaaaaaaaaaaaaaaaggaatttgaaacaaacaaaaaggcaacttcttatacaataaaaagttgtacaggaaagraattgtaatcatagtttattacatgccccagctctaattagtacacatatcatacaatgtaaatcttgagtactaagctaactaaaatgatcatgtaactatactgggaaactgaaggggcggggatgtagactggagaagaattaggaaatggactaaaacctcaccttcctgagtgggagtc

SEQ ID NO: 787385 - DNA, 573 bp, Homo sapiens
atggtggtgtgtgcctgtggtcccacctactcaagaggctgagctgggagggtcacttgagcctgggacgtcaagactgtagtgagctgtgatctcaccactgcactccagcctgggcaacagcttgtctcaaaaaaaaaaaaaaaaaaaatcaaaaaattagctgggcatggtggtgcatgcatgcctatggtcccagctacacaggaagctggggtgggaggatcgcttgagcccaggaggttgaggctatagtgagctatgatcacaccacaccactccaaccctgggagacaaagtgagattctgtctccaaaaaaaaaaaaaaaaggaatttgaaacaaacaaaaaggcaacttcttatacaataaaaagttgtacaggaaagaaattgtaatcatagtttatyacatgccccagctctaattagtacacatatcatacaatgtaaatcttgagtactaagctaactaaaatgatcatgtaactatactgggaaactgaaggggcggggatgtagactggagaagaattaggaaatggactaaaacctcaccttcctgagtgggagtc

SEQ ID NO: 787386 - DNA, 494 bp, Homo sapiens
tgggcgggagggcgaagaccaccggcagcagcgcgagcggcgtgaacagcagcaccagcagccgccgcgcgctccacaccttcttggccgctgctgccagcgccgccatcagcgcgatcgcctggcggtacgggccggcccgggactgccccgcctggccccggcgccggcttaaagcctgggggagggtcggggaggggactgcgctggggaacccgccctctccctgctcctcctggaggaaaagggtggtgcctgcgcccctgggaccgggtgaaaraggcccgggaacgttggagaaagttaggcactagaattagcaaacgggaccccagccgcagggcagtgtggccttgcctcttggcttcccagcaatgtggcctggggcagctggcttatcctctcctcgcctctgtttactcgcctgtgagatggctgaggatgacaaggcgaggattaaggcgcgtactcctattacccgggttcaaatcctg

SEQ ID NO: 787387 - DNA, 466 bp, Homo sapiens
gtaaatgtgagaaaatctgtggctattgctctaattataaactcccactatatgctgagcaccactctggacacctcctgtatcttcccctaattctcgtaacagaatgagagggtgtgagtcctcctcacttcacaaatgagactcagcctcagaaattcaaggtytccagcccaggctcccctcttcagagccagacacaaatccaggttttctcaactctaaagcccatgttctctccaacatttaacttctctgagcctcagtttcatcatctgcaaaataggagaactaaaacatattttcagcattaaataaaaaactaagaatttatagtacaggcacaatgtattaactcactgtggccagaaaataactgggaaagaatataatattatggctgtgttataaatgaagaaaccaaggccagaaatagaaaatgacttgcccagcaagtatgtggaat

SEQ ID NO: 787388 - DNA, 593 bp, Homo sapiens
catttcactatgttggccaggctggtctcaaactcctgaactcatgatctgcccgcctcggcctcccaaagtcctgggattacaggcatgagccaccgtgctcggcctagagcagtttcaaacacaggcaaaagtagaatcaagagtctgatgaggctaggcctggtggcacccatctgtaattccagcactttgggaggctaaggcaggatgatggcttcaatccagaagttcgagaccagcctgggcaacacggcgagaccctgtttctacaaacaattctaaaatgagctgggtgaggtagaacacgactgccgtccggctactcaagaggctraggtgggaggattggttgagccccaggaattcaaggctgcagtgagctatgattgcaccactgcactccagcctggacgacagagcgagaccctgtctcaaaaaaaaaaagaggctgatggaccccccaggacccacttccaagacagcagttataagtcacaggccgctgggcagccacttcatttatatcccggttttcccttctgctatttctttctctttttaaaaagtgttttgtagagatggaatctcac

SEQ ID NO: 787389 - DNA, 527 bp, Homo sapiens
cgtgtccggccaggatcctgcctcttaaaaaaaaatgtatatgtatattttcaaatcacggtctcactcttgtcacccaggctggagagcagtggcacaatcatggcatatctgtatttatttatttatttatttatttatttatttagagaaagagtcttgctctgttgcccaggctggagtgcggtggcgtgatctcggctgactgcaacctccacctcccaggttcaagtgattctcatgcctcagcctcccgagtagctggaatcacagacatgtgccaccactcctggctaattttkgtacttttagtagagatgggatttcgctatgttggccaggatgctctcaaactcctgacctcaagccacctcggcttcccaaagggctgggattataggcgtgagccaccatgcccggcctacagaaatatttaaaaaaaaaaattagccaggcatggtggtggtgtgcacctgttgtcccagctgctaaagaggctgaggtgggaggatcacttgaacccagga

SEQ ID NO: 787390 - DNA, 518 bp, Homo sapiens
caggccttgctgggtttccccactctgttattgtgagatcataccctttttatccaatcacatttctacacagtggtcaatcgtacccatccagtaaagtctccataaaaggaccaaaaaggcagagttgggagagcttccagagagctgacctggtggaggttcctggagggggggcaggcctagggagagcggaggagctccatcctcttcctgcatcctttgccctgtgcgtctcttatctgcccrctcatctgtagcctttcttatgccctttattaagaaacccgtaaacctaggtaaacggtttccctgagttttgtgagcatgctagcaaattcatcagacccaaggcaggggtcatgataaccatgatttatagcccgtgggtcggaagcacaagtcacaacctgcacttgcgactggcatctgaagttggggtagtcttgtgggactcagccctcaacccgtggaacctgatgctgtctccaggtgtataatgtcagaattatagagga

SEQ ID NO: 787391 - DNA, 582 bp, Homo sapiens
agacacctggtgtcaccaaggcctgtgagctgagccccacaaggggtctggacagtcctccagggccagggccctgggagcttgctggagtcaggtgggcaggaaggttctgataggttagctgagcagcctcattaaagattgaggtggggaagcccacttgatggctggaaggcgtatcagttacccactgcaccagccaggcgacagaggagaagaggtaagtggcccagtacgagaggtgcccccggcctgtgccgcggagccctgcccgtgatggtcagcagggagtgggccttccactgcttttgcttctgccactgggactgcaccgtgctttgcagagtgagctgtaggtgrtgggagcccctctctctcctccctgctcctcatgggcctctcctttcactcccacctgctccgggggtgggggtgggagtgctggatcttggggcgagtatctgccactgaccaattacagggtttgcaatgacatccttgcggaagcggcagggtggaagcagcagctgggtactgggaggcctgagcttctgttccagcagcaccgttcactggaggcac

SEQ ID NO: 787392 - DNA, 582 bp, Homo sapiens
agacacctggtgtcaccaaggcctgtgagctgagccccacaaggggtctggacagtcctccagggccagggccctgggagcttgctggagtcaggtgggcaggaaggttctgataggttagctgagcagcctcattaaagattgaggtggggaagcccacttgatggctggaaggcgtatcagttacccactgcaccagccaggcgacagaggagaagaggtaagtggcccagtacgagaggtgcccccggcctgtgccgcggagccctgcccgtgatggtcagcagggagtgggccttccactgcttttgcttctgccactgggactgcaccgtgctttgcagagtgagctgtaggtgatgggagcccctctctctcctccctgctcctcatgggcctctcctttcactcccacctgctccgggggtsggggtgggagtgctggatcttggggcgagtatctgccactgaccaattacagggtttgcaatgacatccttgcggaagcggcagggtggaagcagcagctgggtactgggaggcctgagcttctgttccagcagcaccgttcactggaggcac

SEQ ID NO: 787393 - DNA, 563 bp, Homo sapiens
tggcaattggtagaagtgtttatgttgtgagaatcctagaaaatcaaaggagggagttactgaagtgagagtggtcagcaaaagtgtgtcaagtaattcaagttgcccagatcttggtattctaatttaaaaagaaaagaagaagaactccagagatttcaaggcaaaagtgacaattagtggtagcaacacctttgggaatttactgcctaaaatctcctcttttgaagcccgtgtctctctctgcataataaaagtgtactctgcagctcctcccctgaccaccatgggcaggccctcagaagcttattytgaatcagatcacagggttgtacacgatctgaatgtagccgtcagctacggactacaggacttctgcaggaaaaaaaaaaaaaactgtgtcaaataggcggattcaaggtaaagaaatggctgtcttccttcccttgtcccaaaaaagtattttcttttcttttccagttttgatcattaggttaatctactggaaaattaatatgtgttctatatttcaagtatagaaaaatgaccttttttagttgttc

SEQ ID NO: 787394 - DNA, 616 bp, Homo sapiens
aatttatcctgttatgtttgttttgttgtgtcttgcctgtttagcccctttagaatgtgaactctaggagaacaggttcctgtctactccctgctgttcacacagggtgtagaccagtgtgggcacatagttgatgctcaataaatatagatggaggcatatgggcttctattagctttatcttcatagattttaaaaaattaatagactttattttttagaggagttttaggtttacagaaaaatctggcagcaagtacagtttccatgtactctttcttccctgccctcacagtccstgttgtgaaccttcgcattgatgtggcacatttttgcactggtgaaccagtactcttcaataatttttaactaaagtccatagttcactttcgggttgcctctctgggtcgtaggttctatagattttgccaaatgcatagtgtcagcctctaccatgatagtctcttacaggttagtttcactgcctttcagagtccccgtgcttcgtctgtttctctctcctccccagctctagcaccactgatgtttttactgtctccatagtcttacgttttccagaatgtcatatagttggaatcatacagtaggtagcctt

SEQ ID NO: 787395 - DNA, 507 bp, Homo sapiens
tgttctccaaggccccaccagagtagctagatacagagtgtggattggtgcactcacaaaccctgagctagacacagggtgctgattggtgtgtttacaaaccttgagctagagacagagtgccgattggtgtatttagaatccctgagctagacataaaggttctccaaggccccaccagagcagctagatacagagtgtggattggtgcattcacaaaccctgagctaaacacagggtgctgattggtgtgtttacaaaccttgagctagagacagagtrccgattggtgtatttacaatccctgagctagacataaaggttctccacgtccccaccagactcaggagcccagctggcttcactcaatggatcccgcacccgggctgcaggtggagctgcctgccagtcccacgccatgcgctcgcactcttcagcccttgggtggtggatgggactgggccccatggagcagggagcagctctcctcagggaggctcgggctgc

SEQ ID NO: 787396 - DNA, 625 bp, Homo sapiens
attttaaaggaagccatctactatttcaccatttcatatgctttttttttggtagaaattacctatgtgtagttagtaaataaactctcctgtatttctagtttatttaaaatacaagtcatattgaaacaatgaatggagctgarctttataaaagttttctgcatttattgagaggccatatgtattatgattaacagcatgagttatggatgtaaactgcttgtttcaaattttggctttgtctgttactaactgtatgaccttgagcaagttacttaatccctaggtgctccaattttcttatatgttgtattaaaatacaaattgatgtgaatattaggaaaattaatttagataatatatgcatataataatatatgatatgtttaatatataattgtgcataatttaattctaacaataattctgtgagatctatggcactggggtggagggatattcaggctcagattgaactgcagcccattcagtatgatgcgggctgtaggtttgtcatatatggcttttgttattttgagatatgtttcttcaatgtctgcatttttatggttgtttttatcctgaatggaggttagattctatcaaatacattttctgcatt

SEQ ID NO: 787397 - DNA, 625 bp, Homo sapiens
attttaaaggaagccatctactatttcaccatttcatatgctttttttttggtagaaattacctatgtgtagttagtaaataaactctcctgtatttctagtttatttaaaatacaagtcatattgaaacaatgaatggagctgaactttataaaagttttctgcatttattgagaggccatatgtattatgattaacagcatgagttatggatgyaaactgcttgtttcaaattttggctttgtctgttactaactgtatgaccttgagcaagttacttaatccctaggtgctccaattttcttatatgttgtattaaaatacaaattgatgtgaatattaggaaaattaatttagataatatatgcatataataatatatgatatgtttaatatataattgtgcataatttaattctaacaataattctgtgagatctatggcactggggtggagggatattcaggctcagattgaactgcagcccattcagtatgatgcgggctgtaggtttgtcatatatggcttttgttattttgagatatgtttcttcaatgtctgcatttttatggttgtttttatcctgaatggaggttagattctatcaaatacattttctgcatt

SEQ ID NO: 787398 - DNA, 627 bp, Homo sapiens
aaccagacaatgtgttgtatctcatgatatctgattaaaataatgtgaacacttctatttaacaataatagtttcaattgattccttcaatattggttacattttactctataatttttaaaaaaaaatgtattctggctccaccatttgtacataaactgaaaatgtgaagatcattcaaagcagcatggaagaggaaataattgaggttaatacgggagtcctgcaaataagttttctcctcattaagtagaaagatctacaacaggttaaatggacatatcatgaatacccttttggaaaaatctatcctaaaaaaataaatactacctgtattagcctgttctcacactgctaataaagacatacccaagactgagtaatttataaaagaaagagttttaatggactcacaggtcagcatggctggagaggcctcacaatcatggcagraggtgaagggagagcaaaggcccatcttacatggtggcaggcaagagagcatgttcaagggaactgccctttatgaaaccatcagatcttgtgaggcttattcactatcatgagaacagcacaggaaagcctgcccccaggattcaattacctcccaccaggtgtctcccatga

SEQ ID NO: 787399 - DNA, 466 bp, Homo sapiens
cagtcagtaagctaggaactgggatcccaacaatgaaaaagactgacttgtcctgtgaggtggagggggtctcactaaaatctgcagtatgatgatgactgctatggtcacggacaaagtcctgcagagaaagctataggagtttactttagagttatatatcaagacttatttgggatttttttctagaagagaaaggaagaaaaagaagaatttaagaaaagaaaggtcacggggttgtttatggtggcaaaaaaggaatttgcttatttttggtacatgtgtcatcragaaatctctctctctgtcatgtttcaatgtatcagtccatctgtgcacacctaggctgtttgtgaggggccagtgcaccaattttagaattgtaacttactctacagacaggagagaaccatgagctggagtttcatgcagaatgggaaaaaattatatgatcatatctatattt

SEQ ID NO: 787400 - DNA, 606 bp, Homo sapiens
tccagatctgtttctgtacaaggatccaagaactcactcttggagtctgggtagagacctcttttccagtaacatggtgacaattaaattatattgcttatatttgtctgtgaattgttatctttgaagaatttatgactgtgactagcatggaagaaacattctattaatattagctattgtcgcaggacattttttrctcttgtcttggtgaaaacatgagtgagtatgcatgtatgtgactttggctgtaggaaaggcactgttctcagttctttccatagagcaatttattaaatgttcagcaaacatctctgagtaaggtactattattatttcccctttaatgatgagaaaagtgagatacagaaaaatccagtaatgagactgaagagcagaagtcacaaagctattatttttactcagtgagataaatagaatgtagtgccaatgcaaaggagacaaagtatcaggaggaaggagatgactccgtatcaggtaatgaagacaggtcaaggaagatgaaggttcggcagatggctcatgtggatgcgagaggaattcccatagaaatgggaagcaagcagacagcaactggggttaaaa

SEQ ID NO: 787401 - DNA, 588 bp, Homo sapiens
aagtaatgatgatgtaatgaaggcaaactgatggctgctccacaaacttcccccagggctaagcatacttgccttatgtagtaacaaagttggatcatatttaattctcaaataatagaaatattctttgattgcacaatagtagatagagccagctacttgccataactaagttaaggtgtggtgtttttactagttaggttttttttttttttttttttttggttgcttcagtgagagggcgaggtagtgaaraaattatgacgaatctctatgcttgaaagctgtggcaagtatgataggctagaattatcaaatgttttctacacatgtagctaagcagattcagctgaactcttcaggttaagaaccactgtgatcctcagatacacaaatctgttcttacggcattgaaggaatctggctttaaaatacagatgcagtttagtgcagtttttgtgttagacaattgccatctcttaactcacacgtactttaggactgctgctcaaaacataactgaaatatactaaaatcttgaagtctttgataacactttacagagatcttaataaatgcatactcaag

SEQ ID NO: 787402 - DNA, 664 bp, Homo sapiens
ataaaatgcttaatcaaacctgctgggtgatgaccctggaactttaattcttacagacttcacactattggttgtcctggaaggcgacctacaatcatgagcagcgaggtaatgagctgggaatccagctgtaaggctcaaggtggagtttcctaatgtgcacagacacaagcttgtacatttcaaactagctcctcctgagcacagacctagaggggcagaacttagcgctttggtgctcaacatggggtcctccaaccggcagcagagcatcaagtagaccccatgtctacttgatcagaacatgygctttaagaagaaccccagaaggtcatgtgcaccctaacactgagccctggagggaatgacctttggcccggtgccagcgggcccctccccaactggcagtcacaaatgcaacaggttagtaattcataaaaccaacaggaaggttatcagttagaattcatgtggaaaaaataagtctggatggacatatgctgacctgttaagcatggtgattttgtctcagtaagctgacagcagactacctctgaccaggctggccttgtccaaacaactgggtacccaccaggactgtctgtcttactggcaggcacaaaacacaagctcaagactgcgaacatggtctcaatgcacacca

SEQ ID NO: 787403 - DNA, 643 bp, Homo sapiens
gctgactccataccaactcttgagtagtttgtattttctggagtttatataaatggaataatgtactttgctcactctttttgtctgcctgcttttactcagcatagttattttgagatttattcatattgctgcatgtattaatacttaattcatttttatggttgagcagtgtgaatactcctttgtatgtgtttgaatatactacaatttatttatccatgcagttgttaatggacatttaagtagtttctaatttatggtgattacacataaagttgccatatatatttatgtacatattttatgcttttgtttctctaggtaaataactagaagttcaatgcctggatcatgtagcaggtttgtatttgactatgtttarcttatattccctccaccaattaaggagggttccagctattctacatcctcaccaatacttggcttggtcatcatctgtaatttgagatatcttaattagatcaagtgatgtcttattccctaatgacatataatgttgcatatctttttctgtgcttatttgccattcatatgattgtctttgttcaaatgtctgtaaaaacttaccatttttaatggtggtttgctttcttacacttggactttaagagttctctat

SEQ ID NO: 787404 - DNA, 631 bp, Homo sapiens
ccaatcttattttaaaactctgagagtgaagcaatagcacctagctagtttcatcaccttattacaggctgtgaacaagctctgtccatgcttttaaaaatgtgttcccctctgtgtggccagactccctgggatgttttaaaggygtgtgtgcatgtgtgtgtgtgtgtgtgtgtgtgtgttgaggtggacagtatcaaaccctaggtttgaattgagaagttatttccctcctttcagttatcaccgcagctactgccagcgtcaagtttcagcattcatcactgagcaggggcatcgccagctagctctggccttcttttcccatgggaaagcaaatgaaatgcatggtgaaagttctgggcgtgggaacgaagtaggtgcatctgaaatctgagttagagcttctttctcttgaggtccaactttttgttctcaggtttttccccggctagtgggggttaatccacaaggcccttggctccttccgtgagaggtgcagccactatcagtgcaaggagaggacgcggggaagtggctcttagggcgtccctttgccatcttaggatggctgtataggcacagatttccctgtcagtttgtaactctggggtgaacagagcagagctca

SEQ ID NO: 787405 - DNA, 578 bp, Homo sapiens
gtggtttagaggaaacactctaacctgtggtcacaagcattacctttggccaattcacccaaagccaaagcatttaaacttctattatacaattatattcttggttccatagaaggagacagtggtaaacagcccatagaagccactttytaaatactatcctttcccccccaggcttattaagatatgattgaaaaatagaaaattggccagatggggtggctcacgcctgtaatcctagcactttgggaggccgaggcgggcagatcacaaggtcaggagttcgagaccagcctggtcaacatggtgaaaccccatctttactaaaaatacaaaaattagctgggcatggtggtgcacacctgtaatcccagctactcaggaggcccaggctggagaatcgcttgaacccaggaggcagaggttacagtgagctgagcttgtgccagtgcactccagcctgggcaacagagtgagactccgtctcaaaaaaaaaaaaaaaaaaaaagaaaagaaaattaaagtgtaaaacatggtgttttgatgtaagtatatcttatgtaataattgccacaaac

SEQ ID NO: 787406 - DNA, 582 bp, Homo sapiens
tgtgagcatgttctgtctcactggactcaggcaagttgggaaccagtgcacagtgaacctacttcacaataacataaaatagtaacttgaaaataaatattgtccaaaatctaacataaacagagaggaagaaagggtaggtgacaggaaataaaatgagcctattgtgtcgtctagttcaaagatattcaataragttcttaatcttgggatgttgtattcttggaattggtagacatatatattcaatgatgttcttgaagcttttaaaggtgaatgatgccaaattacaaattagctatataaaaaactatttcaaaggaagaaaatttatataatataaaaaataaagaaataaaaaatgaagaatgaatcagaacacattatttgtgaaaacaaatgtaaatgggataaactctccctattcaaagaagtaggcagatttttgtcactgaaaatagttttattactcatctttaatataaagaaaatagaaaatacaaagcagaaacatcattatacacaaagaatcattatacacaaagaatcattgtaaatgttctgatgatcatctttccaaaa

SEQ ID NO: 787407 - DNA, 609 bp, Homo sapiens
aagcgttggaaaatattcttaaaatcctctagtcccatcatggaaatcatctaatttaaaccaatccagtacagaaggtagtctatacatctatacatgacactgtagaaataatctactaacaaactctccttgtgtttagaatagaagctatgtgaagggaccgagcatatttttatctgtgtattcttcaaacccagcacwgtgactggcacgtaaaagacaccagatgtttgctaaatgaatgaatgaattttccattcatagggaaagagaaaaagacttccagcattacccatgtgtcttcgggttctaaaatcttcatccccattgaagtccagactgaatgtgaaattggtcatttaaatgaaggactttggcgactggtcccaatagtcatagagctgcctgaaaactctgtcctgacaatcactatgtataaaccagcacctctactgaataataaagaaaaaagcaaaggaaagaaagaaagaaaggagtgtgaaagccagtttgcatggccagatggctaatgagaagaggaggtaatttttaaaaatatgtaagttttaagtgagagtttaaaaaaaaaaaagttactttaacctc

SEQ ID NO: 787408 - DNA, 639 bp, Homo sapiens
gcatacaggtctctgaggcaaatggtgagaagacacacaagccaatggcagggggctggggcagaaatgtgtgcagggcttggctgctagagagaagtgggggcaaatgggcaagaagtgtccctaaggagctgattgacgggatctgtgctggacagataggctgggcagggctgccactgaggggctgcaccaggagaggcacaacccgagaatcagccggcatttctgcagggccagagctggggctgggggaacacagtgggagacaggtcagggtgtggtgtaggatccctgagagtgagagaggagctggagttgagagtctgtgggcagctggccaaggattakgaactgtatcccatattgacagggagcccatggaggctctgtgcagattggagttgtaggaaaatgaccggcatgcacgtgtgctggaggtgggaagctgctctattaggcctttaaagatgatgcgttccctcatgctgcagccgtgactgtgcgatggcgaggaggagaaagccagcataaggagtccagccgctgtgcagcgcggagagggagggagggtccgaggcgagtctgattcccgcatatctggtggaggatggtacccagcacaggggcggggccaga

SEQ ID NO: 787409 - DNA, 639 bp, Homo sapiens
gcatacaggtctctgaggcaaatggtgagaagacacacaagccaatggcagggggctggggcagaaatgtgtgcagggcttggctgctagagagaagtgggggcaaatgggcaagaagtgtccctaaggagctgattgacgggatctgtgctggacagataggctgggcagggctgccactgaggggctgcaccaggagaggcacaacccgagaatcagccggcatttctgcagggccagagctggggctgggggaacacagtgggagacaggtcagggtgtggtgtaggatccctgagagtgagagaggagctggagttgagagtctgtgggcagctggccaaggattaggaactgtatcccatattgacagggagcccayggaggctctgtgcagattggagttgtaggaaaatgaccggcatgcacgtgtgctggaggtgggaagctgctctattaggcctttaaagatgatgcgttccctcatgctgcagccgtgactgtgcgatggcgaggaggagaaagccagcataaggagtccagccgctgtgcagcgcggagagggagggagggtccgaggcgagtctgattcccgcatatctggtggaggatggtacccagcacaggggcggggccaga

SEQ ID NO: 787410 - DNA, 615 bp, Homo sapiens
agggagcccatggaggctctgtgcagattggagttgtaggaaaatgaccggcatgcacgtgtgctggaggtgggaagctgctctattaggcctttaaagatgatgmgttccctcatgctgcagccgtgactgtgcgatggcgaggaggagaaagccagcataaggagtccagccgctgtgcagcgcggagagggagggagggtccgaggcgagtctgattcccgcatatctggtggaggatggtacccagcacaggggcggggccagagctcgaggaaagggatgagcttggttttcaaggtgttgatcttcaaggctttcggctgtgtaggtggcagtgtccagtggcagttccaaccatgagcctggggctgcggcaggaggtctgcactggacgagagtgcccgtgtcatcctcttcaggtagaagtcatgcctgaaggccaggagtttggatttggaaaaaccagtggggccaccaacccctcctccctggtggggccacaccaggcctcctcacccctacaaccctgtccctagttgggctcttgtaggtcggggatggcctgagtgttgtttaaaagttgacgttttggttgaagaagtaaacagctga

SEQ ID NO: 787411 - DNA, 630 bp, Homo sapiens
tacttcaaagacttaagcttctggtcatgatgtatcaaactaacattcccactaaaaaaaatactgaattaactaaaaaacacacttgtttgaagttctcttagagcaaccaagcaaggcaacactagatgggtcaagacctcagggagaaaggaaatgcattaaggtgagccttgtgtttgctgctgccttttcctttcagggcatttgataatttctagtacgaggcacagacaccaagcagcaattggtagcggcctagagctttacrcagtatcaccagctggggagaaaatcaaaattcaaggcagctagtgcgtgagaagagctaaagtcccagaaaaaaagggggctgcatggaaatgagctcataaaagtgatctcatagaagcctgggtcacttctgtgtagtccctttcctctaggactctggctcttcaagtcctggcctccttgaactccaacatttccacttgaggtatttaccagatattaagctgtgtttatatgggacgaggagttgagaaaacaagtagaaagaaactgtttagaggctcaaaagcaaagcagagggtttggcagtctcacagtgctgaggagctaaaaaatcgagtacagagtccaccaagg

SEQ ID NO: 787412 - DNA, 516 bp, Homo sapiens
ctttgaatccagccttatataaaaagaataataaagcacaagttgaacttgttccagggatatgaggttagtttaacatttaaaagtcatttaatatggcagacacataacattataaaggagaaaaattatatgattgtcccaaaattaaaaaaaaacatttgataaatccatgcccattcctaatgttaaaaaactcttagaatactagaaatagagaagaatttcctytatctactgaagagttatctacaaaaatatttagagcaatcatcattcttaatgatgaaatattaaatctttacctgagatttaaaaatctgatggaaatctgaacaatttcaacattgtactggacgtcccagccagcacaataaagcaagaaaaagagaaataaaaaatagaattgaaaaggaaaaaataaaactagtatttatagattatattcacagaaattccaaaaggccatgcagaaaaactattcgaattaacatgtaaatttgcaaggttgctgga

SEQ ID NO: 787413 - DNA, 638 bp, Homo sapiens
tttgtggaaacaaactgattttaaaatttacatgggaatgtgaagggccattaatagccaagaaagtctcaagaacaattttgaggttacacatcagatatcaagccttattataaaactgaaggaattaagacagtggagtattggtgcaagaagagaaaaattaacccagggaacagaagatccaaaaaatggactcacacatatatagtcacctaatttatgagaaagttgccactaaagcacatgagaaaaagatagtattttcaataaatggtacagggtcaattaggttttctattcttacacatctggtctatgtgacctacttcagtggttcgccctgtggtctcaacaatctcctactgtagtttagctcattctgctgagctcaaaacttctacatctcacatcgtctcgggtactcataccatgactcaaaygtgcaaatctgaactctgcttattcctgtgttcccgatctctgtgaatggttcagagtgcagtatcaaactaaaaattctggaaaatgtgtttttacccttttctctcctgggacaattatattctgtctgtaaaataggtaagattttgtgaattctgtcaaaaattaaagcaatagttcagtctgggattgtt

SEQ ID NO: 787414 - DNA, 347 bp, Homo sapiens
catataaaactttgataatcataaaaaattaattttaggaagaaaacataccaactttgttgaaattaatctgggcatatgacccaggtcctgcttttaaaaatcatatgatccattatgatgaacaagacttcacaaaactacctatcaaacagsctacactgagaatgacactaccaggaataggagagtcatgacagtggcatagccttgctgaggatttgagaattcttatcaaaattcctgggaatagattggatctgtaggtcaggtatcaaagaaagaagcgggttccttaaaccaatgcagaacatagtttctcctgattggggtgggtggttggggga

SEQ ID NO: 787415 - DNA, 622 bp, Homo sapiens
atgagaacatctagagttgaacccatttctggctctttggctttgcaagccacgcataactgtaggatgaagagtcacctctgagcggccatgttgggtaatgaacagcagggctgagaacctgaaggcatgggtcaagtcttggctttgccatataacatttgctctgcaatgtcacacaaatcacgtaacttctctgggttaggagtcctgtccacctgcctaaaaatccagtgctctttctaccatacctctgtttttagactttttttctaccttaattgatattttactgttttgtttttgtttttgtttaatgatcagtacatagacctaatgattcatttctatatagttcttttattttttttcccaaacctccaggtagtatttatcccagattccaaactttcctgtggcytaaaagctatttagtctattggaaacattcagcaagctctttacaaaaatgactgcagtgtcttcaacgcgtttgagttgcactcatagtttgccccagtcacgtgcgagtttaacgtacaactctacatcacgtaatgggacatctttaacaacaaaaccttcccgtgcccaaggtcatgcacaggagaagaagggagtg

SEQ ID NO: 787416 - DNA, 658 bp, Homo sapiens
actgatacatcagcttaatttattttgcatatataaatgcacagtgactatgactctaaatgaggacaaaaacaaagaacaaggcaataatgtttgcttcaaccacttgtattttgcatagtagtggaagacttagccagacaaatcaggtgaggaaaaaaggcatgaaaattgaaaaggaaraaatacgtattctctctttgcagatgatataattacatatgttgaaaaactgaaagatctaaaaacagctaatagaactaatgaacaatttccattaaatgacaggatacaaattcaacatgcaaacattggtttccaatgaacataaaaaatgaaattatggaaaaaactccatcttcaatagcatcaaaaacaataaagtattttgtcatatatttagaaaaatattgctgaatgatattaaagaaaacataaatgttgggaataggcctcccaaaatctggccataagctggccccaaaactggccataaacaaaatatttgcagcactgtgacatgttcatgatggccataatgcccacactggaagtttgtgggtttactggaatgagggcaaggaataccttgcccatccagggcggaaaaccgcttaaaggtgttcttaaaccacaaacaatagcatgaacaatctgt

SEQ ID NO: 787417 - DNA, 658 bp, Homo sapiens
actgatacatcagcttaatttattttgcatatataaatgcacagtgactatgactctaaatgaggacaaaaacaaagaacaaggcaataatgtttgcttcaaccacttgtattttgcatagtagtggaagacttagccagacaaatcaggtgaggaaaaaaggcatgaaaattgaaaaggaagaaatacgtattctctctttgcagatgatataattacatatgttgaaaaactgaaagatctaaaaacagctaatagaactaatgaacaatttccattaaatgacaggatacaaattcaacatgcaaacattggtttccaatgaacataaaaaatgaaattatggaaaaaactccatcttcaatagcatcaaaaacaataaagtattttgtcatatatttaraaaaatattgctgaatgatattaaagaaaacataaatgttgggaataggcctcccaaaatctggccataagctggccccaaaactggccataaacaaaatatttgcagcactgtgacatgttcatgatggccataatgcccacactggaagtttgtgggtttactggaatgagggcaaggaataccttgcccatccagggcggaaaaccgcttaaaggtgttcttaaaccacaaacaatagcatgaacaatctgt

SEQ ID NO: 787418 - DNA, 505 bp, Homo sapiens
ctgacacttagggaaaatagaaaaggatccacgttgaattatcaggggtgggttcccctgatatcatggaatacagaactattaataacaaaagctttaaggactcaagaagtacagggtggctatcctggttctccatgagascatgctgaattaacattagacttatatcctcttgaataccagttgtttctttaaattaggtacatagcattcataacagttgggttatcataggtaatttgacttagaccatggagttcattcaaattgtatatctaaacaatttcagtatcagctgatttagcacataaatatggcaacgtattttctagatatttaattaatttttgttcctacttgggttagcagttttataacacagtcagtcttttcattaaaattccaggaattcttacccatttcaaatgatatgattctgaagttattagaaacctgtattcaagagtgctttttagggtactttccatcctttcataaacct

SEQ ID NO: 787419 - DNA, 502 bp, Homo sapiens
cttgccacactatagccctgggggccaagttgcatcataaagaaaaatcatctttttcgttttgttttgttttgttttgaggaatcacaggcaaagccctgtcagttttgcaagttaccacccaaggggttgcaaggggtaacccaatgaacatttttcattctggccagagcaaaatacacgtgacaaaacatagaccttagccactctgcttagcactcagtattgaacttgcaaggctcaracttgccccgggttgggccccgtcatctttaatccatttttagccatgagggaccttactcacgggagggcctctaacccaatcccatcctttactctggtaaaatatacctcattacgtatccaaagtcagccaattggtgctgcggtctatttcctttggattaggacagtaattaagctgaaagattagcagacttaattttggggatccctcattttcaaatgcacttcagtgtgttgtgttttatttagaaca

SEQ ID NO: 787420 - DNA, 617 bp, Homo sapiens
ccaaaccagtgactgttgaccctgccagctggaaggttcttgtgaatccctgtatgagctatgttcaggaatggcctcctattggtgtgcatatctgtgggagaacctgaagagcacaccacagggcaattccttctcacagtctcccaactgctcccaaagtcatatccagggcctggtagggtcaaggacctctctcatggcctggatttcctggcttctcagtgaaaatgggtatcaaggacatactgtctccccatagcatgcactggggattcactcatagttttctaytggaccccaccatgtaggcttctgcttgccttatttttcccagtatctgaagttttctttcattttctgttgaactgacaagctccttcttgtacaaaagttcacagtgtgaacccctacaaactattttgctatttccaagtgggtatagcaagctggcaaagcctgtcttctgccatcttggaaaaaaacctgaagaatttcttgtaatatttaattcaagaaaggtctaatagcaacaaattctctcagtttttgttatctgagaaagtctttatttctccttcacttttgaaagataattccacaggttccagaattct

SEQ ID NO: 787421 - DNA, 514 bp, Homo sapiens
gaacagccatttgacccagcaatctcattactgggtatgtacccagaggagtataaatggttctaccataaagacacatgcacacttatgttcattgcagcactctcacaatagcaaagacatggaatcaacctaaatgcccatcaatggtgagttggataaagaaaatrtggtatgtatacaccatgaagtactatgtaaccattaaaaaaaatgagatcatgtacttttagcaatacagatggacctgaaggccattatcctaagtgaattaacacaggaacagaaaaccaagcactgcatgttcttacttataagtgtgtgcgaattattgaatacacatggatggacacaaagaaggaaagaagagacaccatggtctaatttaggatgaatagtgggtaaaggatgaggattgaaaaactacatatcaggtactatgcttattacctaggtaacaaaataatctacagcaaacccccatgacatacattttacccatgtaacaaacctg

SEQ ID NO: 787422 - DNA, 589 bp, Homo sapiens
ggtcagatggaagattctattctaatttaagagctttgaaaatgaaaaaataaaatctgagcagtttataatttccctattttgcttttttccctcctctttctttcagatgcagttcgaacattaagcaatgccgaggactatctcgatgaygaagactcagattaattcctttctggagctttgagatctaaaacttctgttgcttttgccattccaaaactttgtctttgccagaaaagtgttggtaactataaagaaaattatatatgaacacggcagtgttgcactgtgtttgagtagaacgtgtaaatgaattgttcccacctttggtttgccagtaagtgactggattcttggcacatttatgttcaccaaagtagaacaagaagatattatttctatttatcaagcaaaaggaattttaagatttttttttttctttaaaaacaaattaggattttttttttttttttttttttagttaaaatgctttacctcaatggttgagatattttgaatggatttttcaagggggggaaatgcttattataataataaaccaaaatacttaacagaaaattgtcag

SEQ ID NO: 787423 - DNA, 624 bp, Homo sapiens
ttcaaaaccgttgattactggattactggaacacacattagcgcaatatccaaagaactataagccaacagctgtacttgaatgtcttacccttagccttccactgctacaaattttagacttttgtttacatctttaaataataataactaatatgtaaakgccatgtgtcctatgccagattactgtgataaatgtaaagtgtaggataaaaaatttaatcttcaaagcaactttataaagcaagtttgtcattatctctgttttatagacaaggtgactaagtctcaagacttagcttcttgaaatcacacagccagatttgattctgttctaaatgatggacaccaaagttctgcattttattattacattatacccttttccaaatacacagagaaatactgaaatttcttttctcagggagacaatgttctaatctgaaaaccaggatttttattgctaaagaagaaggggcagatggaaattgggagggcttctctgccacatccaataaattagcacaatcattttttcctgtagtgctggaacagaccactgtttcttcagttgagtgccagataaagtaactgacttgcaattaggcatcacattctctcaaga

SEQ ID NO: 787424 - DNA, 624 bp, Homo sapiens
ttcaaaaccgttgattactggattactggaacacacattagcgcaatatccaaagaactataagccaacagctgtacttgaatgtcttacccttagccttccactgctacaaattttagacttttgtttacatctttaaataataataactaatatgtaaaggccatgtgtcctatgccagattactgtgataaatgtaaagtgtaggwtaaaaaatttaatcttcaaagcaactttataaagcaagtttgtcattatctctgttttatagacaaggtgactaagtctcaagacttagcttcttgaaatcacacagccagatttgattctgttctaaatgatggacaccaaagttctgcattttattattacattatacccttttccaaatacacagagaaatactgaaatttcttttctcagggagacaatgttctaatctgaaaaccaggatttttattgctaaagaagaaggggcagatggaaattgggagggcttctctgccacatccaataaattagcacaatcattttttcctgtagtgctggaacagaccactgtttcttcagttgagtgccagataaagtaactgacttgcaattaggcatcacattctctcaaga

SEQ ID NO: 787425 - DNA, 595 bp, Homo sapiens
tttgtatagcaagagtgttcataatatccttttatctctttaatgtctgtaggatctacagtgatattaccttttttgcttttggtatttgtaatctgttccttctctattttttttttaatcagacttatttaatctggggattgctcagattcttgaagttttatgtcttaaaccaaatttgagaagttttttttttaaaccattacttctttgaatacttttttagtcccacactttctcctgagactccaatgatatgaatattagatctttcattattgttccacatttttattcatttcttttcagtctattctctgttgttcagattgagtwatttgtattgttctgtctttaagttcactaattattttctctgtcatagttactctgctaatgagccaatccagtgatttttcaaattttggttaatgtattttttccactctaaaatttccatctggttcttttttcaaatcttctatttctttactgaggcagtctagtttttcacttgtttcaagcctgtttgcaatattatgtttacagccttttaataatgctgctttcaattctttgtcagataatttca

SEQ ID NO: 787426 - DNA, 595 bp, Homo sapiens
caggaaatgattaaccactggatctactgcctctgctgaagtttgtcttgtctatctttaaataagtttcatgaagttgttttacttttggaaatcttattaatttgtaaataattgtttgcagtgatttagcattttagttgggtaagaaaatatatattttgctgaccaaaactgaaagactagattgcccacagagtatgtttatagagaaaataaacaatttcttaygctttatgttaaaaatctggtttatatatcaacaatgactcaaactactgttgagctaaaacctcaaggaaaaaggcaaaggcaagtaggggcttttttcacttaatacaagggctcccttataattctcatcgtcattctaggatttattatttttactcttgggattcctctattaattctgttctttatgcaaaacctttgcatagagttctaagtctttgacttagatctagctagttttgtctttgtattctttgttctagtccctggatccacatgaaggatattataatttgctcttaaaataataagaatgctctccactatggagctagggatatgattcctgtaaatggtcact

SEQ ID NO: 787427 - DNA, 354 bp, Homo sapiens
tcggcctcccaaagtgctgggattacaggggtaaagaaaataacatttatatatttaaagaaattctgataaatggctttttttttttttaattaagaaaaggtcttgttctgtcgcccaggctggagtgcatggctcactgcagtctcaacctcctgggctcaagtgaccctcccgcctcagcttcctgagtagctgagactacaggcatgtgckgccaagcccaactatttaaacattttttttgtacagatggggtcccacagtgttgcccaggctggtctgatggggtctccatagtgggacctcctgggctgaaacagtcttcccacttgggcctcccaaagtgttggg

SEQ ID NO: 787428 - DNA, 662 bp, Homo sapiens
tcttaatgcttacaattgatccacaaaaggtttttgagtattcagtctatataaacgcatgtggatttataagttgtatgtatattattctatggtgttatatcataaaacatgttcaaataggaatagaaaagaataagaaagataaaaatgtaaataatttctgaagtagtcttcccgtatcccaccttggaggccactgttctgcattattttcttgtcctagataaccatcttctagaactagaagataacattcttctagtgctgcaactgagcttttatttattattattatattattttgaggcagagtcttgctctgttgcccaggctggagtgtagtggcgtgatctcagctcactgcaacctccaactcctgggttcaggctattctcctgcctcagcctcctgagtagcaaggactacaggtgcacgccatcatgcccggcaaatttttatctttartagagatggggtttcaccatgttggccagactggtctcgaacacctgacctcaagtgatccacttgtcttggcctcccaaagcttttaaatagctatcaaatagatagtccctctattttgatatctgttctaaatctatttattttattaaaagaggaccccccctttttttgttttttttttgttttttgtt

SEQ ID NO: 787429 - DNA, 549 bp, Homo sapiens
aaaataactggagttttctctactgcagaatcacaaaacataattgaaagacagcagtggccatgcattcggtagttaaggggctatgaacaaagccaccctccacgttgtggagatgaatgcactagcaataaaacatgtagtgccagctctcaaccaaaagctcmaacaagataatagtcaaactttacctggtgtccatgacatttaattggatctgagtgtgaattaatctaataaaagtcttgcattctcattataatttaaataagcacaaaaattgggtatattagactatgacagtacacttctgcctaaataacatattgccatacatctttgtaattactacaaacaaccaccaaggagaagtgagccaaataaatttactaagcaacagtaattagcttgtgagattttggttaagttattacctctgtaagcctcaatttgctcaactctaatcatgacatgatgatgatgatgatgatgatggtgatgatgatgatgacactttcctcataacatcgttgtaaggcttaaatgaaa

SEQ ID NO: 787430 - DNA, 616 bp, Homo sapiens
gggcatcaactgatgaaggtcacaagggaaaagtaagagtcagcttttaaagacagaaatgagtgagaaaaatcatcttcctccactttcgctgggtacttgcatatacaggcaaagagagacagaccaaagctggtgtttaattgtacgcattcgtggatgaagacggaagaagtcgagaatgacagaaaagatttcattaaagtttgcaagacaagagattagggaaaagtttacatgtgttattcaggtggggcaagcttccctaacgggacatttgctccaatttgggtggcaggtgaagacgtaaagagagagtctaatatagaagttttccataggtaaaagcaaatagggagtgttccagatgatgacggctttcagcgtgggtcatcaatggagaaaggacagtacgatgtgtggcaaggagaggwggaagcaggaaaaaataatatactggaggaagaacctataatccgtaagtcttcaatgagcaatattcattcagaggaatatagctttcatactgtaacatacctattgctgctgcaacaaatcaccacagttagtggctaaaaacaagacaaacttattattttgtcattctggaggtcag

SEQ ID NO: 787431 - DNA, 616 bp, Homo sapiens
gggcatcaactgatgaaggtcacaagggaaaagtaagagtcagcttttaaagacagaaatgagtgagaaaaatcatcttcctccactttcgctgggtacttgcatatacaggcaaagagagacagaccaaagctggtgtttaattgtacgcattcgtggatgaagacggaagaagtcgagaatgacagaaaagatttcattaaagtttgcaagacaagagattagggaaaagtttacatgtgttattcaggtggggcaagcttccctaacgggacatttgctccaatttgggtggcaggtgaagacgtaaagagagagtctaatatagaagttttccataggtaaaagcaaatagggagtgttccagatgatgacggctttcagcgtgggtcatcaatggagaaaggacagtacgatgtgtggcaaggagaggaggaagcaggaaaaaataatatactggaggaagaacctataatccgtaagtcwtcaatgagcaatattcattcagaggaatatagctttcatactgtaacatacctattgctgctgcaacaaatcaccacagttagtggctaaaaacaagacaaacttattattttgtcattctggaggtcag

SEQ ID NO: 787432 - DNA, 625 bp, Homo sapiens
ttggagcctgtgcttccctccctcctcccataccacctcttcttatctgagaccctagaattccctgccccgtggctctgagttcccttccaggccctggcagttctcttctccaactctaccattcagaggcatgaagagacagccaaaaaggggcagctgtttgcaaaaggtagacaaaacttgaagactgggmtgaggtgtccacaaatctgagcacaaagctgttcataatataagatggggagtgatgaagcagtctagggccagaggctggcgacacgggctggctatgtctatgtcaatattttctggtatggaactcaggggagacagaatttcaaatccaaactcagccttccaagttgttatcaagacatatttgtcaaggtaggtggatagaacagattttatttatagtctgattcataacttttaaaatatttagacacatggtatcctgggccctgtaaattgcagggttgggccaggcagcatatcctttatgcaagtaaaactattggggaaatagaacgaaccttgctcctaatttaacactggctccccttgaaaacacctatattatttaataggaaagcatagcattaatttattctatcagagg

SEQ ID NO: 787433 - DNA, 467 bp, Homo sapiens
acatgttcaattattattgctcttcttcagtttctaggttttgaagatttttttccttccaaaaaaattaactgagtatatcaattttgatgaatccaagacatttttcttttgatgttaaattgttacaggttaaatttttctctattactgaaatattatcttttctatattgatattcgcaattgaacacttaaagactctactggtttctctttatttgaaaatggctaaagaggtggcttagayataatattaagtataattaaattatgattaaaagaattgatatatttaatagattattaaaaggtttgtaacaaaatcattttatgaagcaatcaaaatttcaaagattcagtgaatatattaatggactatgtatgttttaaagagataaagcagaaagattctaaacagccataacatttgaataaaaggacatttttctgctcaatttgtctggt

SEQ ID NO: 787434 - DNA, 577 bp, Homo sapiens
tggcaaagtcgacacggttgaggtcactaagcatctggttgatttgggaagtgttctgaagcactgcacgagctgcctgggccaggtgattaagcgacgtgtatcttcgcagagtctgggcaaaggcacttacagcggcaacctgtaacgcaatccaattaagttgggattctgtttcctccagtaaaagaaaccactgcaattttcaaatcttctttcccttcacaaattttaaatgcttgcctctgacacttatttaaaattcatttggtgagagagttyacttgtaaattacagcatttaaatctctaaaccaagtattattttccttctgagtaggttgaggtcaagactaaaacaaactcccacattcttcgacatctgagcgtagcattaattaaactagtcttgcaagtgactactcatccacagtaagaaatgactttgagtagggaagcaagaaaaatgttggttttcatttcttttttttactgttctttggacagtcaagtagaaactaggcaaattttaaaagtagggatgtgcagtttgccctttcaaataaaaagagatctgg

SEQ ID NO: 787435 - DNA, 670 bp, Homo sapiens
ttcttaagatactcctaaaatagctcattctgtatccttgacatatctgttaaaacctgaaatagggataggtcccatgacagaagattttacggtggtcataaaataatgagaagcatcttcagttatcagtgatgactatgactattttataagaaaaaatctgcttactgagattgctatatagtaggagacagaatactttccttgttcaacaagtaatccagttaatagtattttacttcctctgtgcccaaggctccatagtaatgtagaggaaaattagagacatttagtagacaagtgcctgaagcacccacaacataaaagtaacctttgtaggttctctataatggggtaggtatcaacatatgctactataagaaacacagttatatttygggccgaggtccccaggaatattaatattacggatgggcttaaattccttggtttttctttctgtgctcaaatgagtctgacatgattctctatgcttctgttaaaaccaggttttataaataatttcacttactcaagttatttgcaaacaatataaattttcccattccaataataaagacaactaaatgtgtttttaagagatttgtttaactgttcaaaactggagagacgagattggaacgggctaaattttggttaggaaaaa

SEQ ID NO: 787436 - DNA, 670 bp, Homo sapiens
ttcttaagatactcctaaaatagctcattctgtatccttgacatatctgttaaaacctgaaatagggataggtcccatgacagaagattttacggtggtcataaaataatgagaagcatcttcagttatcagtgatgactatgactattttataagaaaaaatctgcttactgagattgctatatagtaggagacagaatactttccttgttcaacaagtaatccagttaatagtattttacttcctctgtgcccaaggctccatagtaatgtagaggaaaattagagacatttagtagacaagtgcctgaagcacccacaacataaaagtaacctttgtaggttctctataatggggtaggtatcaacatatgctactataagaaacacagttatattttgggccgaggtccccaggaatattaatattacggatgggcttaaattccttggtttttctttctgtgctcaaatgagtctgacatgattctctatgcttctgttaaaaccaggttttawaaataatttcacttactcaagttatttgcaaacaatataaattttcccattccaataataaagacaactaaatgtgtttttaagagatttgtttaactgttcaaaactggagagacgagattggaacgggctaaattttggttaggaaaaa

SEQ ID NO: 787437 - DNA, 577 bp, Homo sapiens
gatgagaatctccaccaaagcctggtacatcccatggtcacagttacacatccatttcaggatagactcatgtttgcacagagttatcagctttgctttcggaagtcgactttctatttcactcagattgctggtgtgaataaatgtagcaaatgaatagatggcaaatgaggataaaaaagaaaatggactttaaaaatagtttaagtttaccaaatattactgaggttagaactataccaccattgcactggtgccatacagctggctatatataccgagagagayagacagatatataaaacactcccccagagctgtctatgcacatttgtattttctgacggtatgaaaggcagatatgatagtaattccatgaggatgaaataactaccacagtcccccaaatcagtacaaatgggagctatatacacacactgaaacctcaagagagcagttcatggtttatttctaggatggccaaaacatcaatctattcaattaatgtcatcaggtaaggttcacaactggtatacatatctctaatttattagttgtgacatctactcagccatga

SEQ ID NO: 787438 - DNA, 590 bp, Homo sapiens
attctgttatgttaattttatattcagtgactttactgaattatttttcttatttaaggacgttttaccattgtttctctaagtttttccaggtacatgatcatatcacttgcaaatagagataattttacttcttcgattccaattctttccctctaattgcctttgctattacttccaggacaaggttaaattaaatagatggtaggcatactttcctgttcctgctcttagttgaagtgttttctcattaagttttcccattaagaaagatatgggctttaagaataagttatatatataagaatactttatwtatatatatatatatatatatatatatatatatagttggatttcatccaagaattttgagcatccaaagaaatttgagcaacatatgagatattcatatgtttttttctcctttgctctgttaacatagtgtattatttgactgcatttcctaatagtgaaccaagcttacattcctgaaataaatgtcacttaatcatgtttcatcagttttttgttacaatattgggttctgtttgctcatgctttattaagtatttttacatcaatattca

SEQ ID NO: 787439 - DNA, 552 bp, Homo sapiens
caacaaagcatctcacatcagtttgcaatacagtatttacaaacaacatggaatctgcaatgccattagccggacttggttaggctaaaaatgcgtacgattcagattcactttcctcttctccattccaattaatggattttcatttatcttttatttttstgacacctaagatccaagacataagtgttctctcaaggtggtacagagtctatctctatgtcttttaaaatataaattctaaacccaagactgtaaatatcaaggcttgtgaaatatgtttagatgattacttaaagccagaaaacatatctagtttaaaaaaatcaatatccatagagtatactatccatcatcccctaagatgcaacaaatctagtgaggctccagcttcctttctttctccattccttatttccttacttcctccctcctcctctctccctccttctattcctttcttccttccttcctcatttatttcttcttctctttcacccctttgtttcgttctataaaacctcattgtaatttctggtgtttgaaacagca

SEQ ID NO: 787440 - DNA, 568 bp, Homo sapiens
ttaaagaacattttccttaatacatacaatgaagtgtctgagaatatgaatatacgtttaacgggctacaattaaaatgacagaggtgtaatatgttaacataagtgcttagcattctatttacaattcatactccaaatttaactttaggatgatcacctgatgtataaaatacttatataccaagaatgcatctaaaattaatatgacaattattgagggaagagttccaaataatcaaatatcatcttctgagtaatcaatttgctagcttatttaggaacttttgaagtattggtttctctgcttgtaaaatggccaacagtcctagatcagatataagatgtttttactttttttcagttaattggcttctagtgatccaatcccgagcygttgaaggaattataaattggttcaaggtttcaaagtagagtttggcaacatgtcccaaagcttaaaattttgcaatttattggcccccaaattcagctttcagaaatgcatgtggagaagaatcattaagagttatttgtaatagcagagacaaccttaaatcacataatca

SEQ ID NO: 787441 - DNA, 598 bp, Homo sapiens
gtttgatgctctggtgttactctcttgaaattctcagtaacatgaataaggggcaccgcatttgacattttccctgggctgagaccatgatgcagcccggcctgactgcgcaacaccatgcacactggaattcgtgggccatcggagggattttcgagggtaatgaccaggggtagggcgcggcagaagcgcagggtgaggttgcggacggcctcactcacaacctttccgggtcttcgcattargtactgtgatgacgggttccgatagtgaccccttggggcctggagacggcccggctccccaaaggtgcggagcagggcaagcagggttgggaggacgtggcccgtgggagagctgcgctcgccggaacagtgggcgcgcaagggccccgaggcgctgtgacacgggacgtcgggcgcgcgggcctgggacgggaactgcgggtgcgcgcggcccggggcggggctcgccgcccggctcctcctccacgcgcggcctggcggcggcggccactctaaccagcgcaaaatgtccctggaacaggaggaggaaacgcaacctgggcggctcctaggacgcagagacacagtccccg

SEQ ID NO: 787442 - DNA, 598 bp, Homo sapiens
gtttgatgctctggtgttactctcttgaaattctcagtaacatgaataaggggcaccgcatttgacattttccctgggctgagaccatgatgcagcccggcctgactgcgcaacaccatgcacactggaattcgtgggccatcggagggattttcgagggtaatgaccaggggtagggcgcggcagaagcgcagggtgaggttgcggacggcctcactcacaacctttccgggtcttcgcattaggtactgtgatgasgggttccgatagtgaccccttggggcctggagacggcccggctccccaaaggtgcggagcagggcaagcagggttgggaggacgtggcccgtgggagagctgcgctcgccggaacagtgggcgcgcaagggccccgaggcgctgtgacacgggacgtcgggcgcgcgggcctgggacgggaactgcgggtgcgcgcggcccggggcggggctcgccgcccggctcctcctccacgcgcggcctggcggcggcggccactctaaccagcgcaaaatgtccctggaacaggaggaggaaacgcaacctgggcggctcctaggacgcagagacacagtccccg

SEQ ID NO: 787443 - DNA, 648 bp, Homo sapiens
caccaaaatcattgcgtacatttaaatttttcttggtgggacgcggcggctcatgcctgtaatcccagtgctttggtgggccgaggtgggcagatcacgaggtcaggagttcgagaccagcctggccaacatggtgaaactccgtctctactaaaaacacaaaaaattagccgggcatgatggcaggtgccgtaatcccagctacttggcaggctgaggcaggagaatagcttgacccgggaggcagaggttgcagtgagccgaggtggtgccactgcactccagcctgggcaacaaagcaagattctgtctaaaaaaaaaaaaaatttctttctcttttttactccaagatgttacacaaaactattttattytagaactgtatttatcagaagacatatttattgcatatttaagcagaaagaaagtaaaaatgagattgtctcgcacagtggttttcagatgcagtgctccatattttactttttgcaataaagaattagaatgtggtgggggctatttggtggctgctcatcacagaagagacatcaaaaggcaaattccaaagtgaatatctagcactgcttgaggaaattagcaaatatgctgaaaagtaatatataagaagccactcagggcttggtaaag

SEQ ID NO: 787444 - DNA, 608 bp, Homo sapiens
agatatctattcaagtcttttacctactttcaattgggttatgcaagttttctgttgttcttcctttgtcatattttgtaagtcctaaaattaaaaattaatttaatgtgcattgtccctgctcagcaataaattacttttgcagtttttagataycattgctgataaatgtcttctatctaaaagtacataaaagaatgtcatatttgtaaatagctctttcatcatgattcttttattttagctcaaaaagttaaaccattgtttttctttggtctatggtgggggtacagggatagtggagtagttttctattctattgcagatacacaaatcccagataattatttttcgacagttttggaagtaacattttcttagaatgttttccgtacttctacctatggtagagatgcaaaaggaagggcttataatggattgatgggagctagcaaataggcttgagagtatcaaagaggtgagcttggtggaggagacactcatttctctgcacacatcagttcctcattcttcctggtcagaggtgtccaggaagactgtaattcccagctcccacataaccatgggatccagttctcatcaggaga

SEQ ID NO: 787445 - DNA, 438 bp, Homo sapiens
atgtatttagttaaactatgaatgctgcattaaaatgaataccttctcatcttcctggaatatgcgtgggcgtcttgcagggattacgagtggactttgagcgttgcacttctcccacaccttctcctgtgtcctaggcatggccaggcgcagaggcccagggaggagcaccaggtgttctggagcttttattttggggatttgtatgtgtattttttcakaggtctcctgaaatttctcaatcctatgccccagaaaatatccagattggcactaggtgttactctttggcttgagactctcttattaaatcttgctgtcatgtgtgtgattttattatttttttaaaggatatgaaatatgcatccttagtaagcaataaaggggagccgcacatggattggagccatgatgtgctccacctgctggaaacatttc

SEQ ID NO: 787446 - DNA, 631 bp, Homo sapiens
caaagaattttaaaaagagattgattagatagataaatatagatagaatatatatatatatatatatatatatatatatatatatatatagtgtgtgtgtgtgtgagtgtgtgttctcacaagaaaataaaataatactttcccaggggaaaggtgttttgagacttgtggtcaaattctgtgttttcctaattacctgtgcaagactgggtgagagtcttagtttcctcttggggaggagatgaagggcttgggcagctttctaagtagactcrgtggtaacgttctgcaagtccctaagccaggtgaatatctggaggaggatgtgagttcctcctccacctccctcacattgtcaggtaggggtggctgagctccagaaggattcacctctggacattgcccccatccatcgcttcctcctaaggccacccctgtaaccagtgcgaggctgccgagacaaggttcattccatcgctgggccaggccagagttaccgactgctcagttattgacacctccttatttctgtccatccatgagatggattgttgtagatttggtgaaaagtgttcagtgaagaaagtaaatcaaattgctttagtttacatatgagataatgcacgtaaaa

SEQ ID NO: 787447 - DNA, 600 bp, Homo sapiens
cccagctattggggaggctgaggcaggagaatggcgtgaactccggaggcggagcttgcagtgagtggagattgcgccactgcactccagcctggacgacagagcgaggctccgtctcaaaaaaaaaaaaggggggtgtattttgaaatatttatacttctgaaaggaagagtgttctaattcaggagacttgactatgagtttagaatcagatcaacgcagcccactctgggaggtgccacccagagaaatcactcccrttattacacttgcctccaaggacagccagaccaatgggctatgtccccaccccaagttctcattattttccctgccaatgaacaacctatttaacagcaaatacactatgaggattttttgggttggtgtccattgacttagccctgacaacacactgacaccaagcttcatgacacaacccttttattcccaggaattgtaagtggttccatctgcaaattcttcagaagagttcttgtgtattgatattacctcctgtggtcttgtgtcacctctattgtgtgaagtgctgatggcggcttgtcaagtgactatacttcttcacctcttcttctattc

SEQ ID NO: 787448 - DNA, 551 bp, Homo sapiens
agctgtcctgtcttaaggaagttacataagttacctctgtcctaggatcctgacctatacaatgtgagtaatactacctctctctcaaggggtctcatgattgtgtgtctgtttacgtgtacgactttaaatttaatccctgttttagctgcaaggaaacgaattttaggttcttcaaaaggttatgaaaaaaagttgtgaaaatttatttaggctgattttagtgtaacattgttttttataaaataattttataaaagagtccatcaagatattatatagaaaatgcacactaaggtaatatatatacacttcataaaaatagaatacatcttggcaattgcttagagtctattaccaccatgtacagtgtattgacgtgtaatatttatgttaatttgaacacatgagatttttaaaaaaccaaayctgtcccactggtatctttaaaaattgctttcattgacaggaaaataaacaaaattctggaacgtaaaagttatgaagctaactggatgaaagtttatattaaaatttttaaagttccatgc

SEQ ID NO: 787449 - DNA, 602 bp, Homo sapiens
aataaatgttgtcttgttatgcagattaaaaatcaggtaataaagttgtctcagagcagccctcttcctgatacagatacttttactgatgtagatttcctttatagatgtaaatttcttgtataaaaggatgggttttcagagctacttctgtgtctgcagtgtctcygactaagcagctcaaaacatgctcaaaaggcatattttgtggtggagtattctggtgtcctatagtcatattttgggatgtcctcagtctccacaccagacttgggagtcttagaactggtatttattgagcatgtactatatgcctggaaacatgtgattgtgtttggagatagggcctttaaagaggtaattaaagtaaaattaggtcatgtgggtaagccctgatttaatatgactggtgtccttgtaagaagaggagattaggacacagaaaacacacactgaagtttggccatgtaaggccgcggaatgtggtcatttacaagccaaaagagaagcttcccaagaaactaaacctgacaacaccttgatcttgggcttccagacttcagaagtgtgagaaaataaacttctgttgtttaagccactca

SEQ ID NO: 787450 - DNA, 547 bp, Homo sapiens
cactgcgcatgctcacttcccaagtgtagagagggctctgcacatacgggaagaatctcgggaaagaggtgaacctataaaaggccaagaatcatggttgaacgggacatttgaccttctctcttaaaccttcatgtgcccgcttgggtctcttccaactgcaccttcctttctttcctgttctaaggcctttttaaataaacttccactcatgctctgaaacttgcctcagtcttgttttctgcttcatgtccctcagtcaaattctttcttttgagtagacaagggctaaagttgcttgcagacrtatacagatttcctactggtaacttggggtaacttagatctctgccactactaacagtattaaatctttatttcatatcagtcataattttaagcattttacatgaattaacttatttaatactcataatttccctgtgaaagaggtctataaggaaaatggctgttcttcagtcaggagtaggccaaggtagacatccagtacagtatgacacagcaggtttggagcccaggagcacaa

SEQ ID NO: 787451 - DNA, 618 bp, Homo sapiens
ggggagctgagatgggaggattgctggagcccagaaggtctagactgcagtgaggcacgactgcaccactgcactccagcctggacagagtgagaccctgtctctaaataaaatattaggacatctcagagtacttaagttgcaaatgtgcayggagagaggagatatagtatgtattgataatatttcctaacatctgtaattatatcctggaaaacctatgggctggaacaccacactggtctagaaaaatctctcttatacacttgggagaacttaaatctgtctcaccttctctgataacatcatgtgcctggcacatagtatagtttgctagtccataaatgttggctgaatcaatcaattagcctaaagaaataagactgaccactgacagtctaactgaaaactgactcaagaatgacaatagacatcatggcataccctaggtttttggtaattttgttcagcagttctggcttctgctttttaaccacgtccatgacagcgttatacacgtcacatatcttcacacctaataacaagacacaaaggagatattaaagtatcttttaggaaaaaaactcagtaacattttaaaatcaaaatttatgtccc

SEQ ID NO: 787452 - DNA, 464 bp, Homo sapiens
tctcctgcctcagcctcccgagtagttggcattacaggcacctgccaccatgcccggctaatttttgtgtttttagtagagacgagctttcaccatgttggtcaggctggtctcgaactcctgacctcgtgatttgcctgccycagcctcccaaagtgctgggattacaggcgtgagccaccgcacctggccgcctttaacttcttgacgcaagttcgttagaagccagtccgccaagtagcactggaatactgtgcattaaacttctttcaggaagacacaagggcctgcatttttaaagccccttctctgcatcactcctggggaatgaagcccctggcagtgcctgcatgcccatataaaagagcccactttttcctgtggtctagagagactcgcatgtgtctaattctcctcactccaaaagttagtgaattaagagtcaaaccatggggaaccttaga

SEQ ID NO: 787453 - DNA, 646 bp, Homo sapiens
gaaaattatactctggttatgttgttaacatttggagaaatctggagaaaaacacaatgcaatgctttacactacttgtgcaactgttttgtaagtctgaaatttttctaaaataaattgttttttaaaaattttcttactagagctatttaaatttgtccaggctgggcacagtggcttacgcttgtaatctcakcactttgggaggctgaggtgggctgatcatttgaggtcaggagtttgagaccagcccgtccaacatggtgaaaactcatctctactgaaaatacacaaattagctgggcctggtgaagtacgcctgtagtcccagctactcaggaggctgaggcaggagaattgcttgaactagggaggcagaggttgcagtgagccaagattgtgccactacactccaacctgggcgacagagtgagactccatctaaaaaaaaaaaaaattcatccaactctgaaagatgagagcctcaagaaagctaagactaatcctacatattcttggtgacaatacaaaaaaataaaagaggctacattttgagggaaatgggaagtctattagaaatggtaggtttaagagcaaagtaattggaatctctaggaatagtgaccttaaggaagtccttgaaaat

SEQ ID NO: 787454 - DNA, 574 bp, Homo sapiens
cacaccacaccaaggatcaggaagatccagagctggaacctcgctggagtttgcaaatccagctataaagctgtctgggctgggtcggaccctcacccctggctggctctggctctagcctcaaacacactgagcctggataaacaaacaggggattacgctgacccagactacgaggagactgcatttttgccttctgaaaaagtcgcaatttgccaagaaaaaccatctctgattcagacaaggaaaatctcgaaataaatcagagctgcacacagacccggcatagctgaggaagtctgcctgcttcctggaggaggagggctgactcaaggtaagcccaacctcctgctttccagcctggcaagccagtgaccagcaycagccatctgggtgccagcctgaagattcagatacacagatcctcctccaggcctggccttgggcaagtcccttctcctcactgggcctcagatgtgaagcttcctggacttcattcaaagcaccttttctctttggcaggaatcgcactgcatcgtgcccagcatccctcctttccctacttgcccagttc

SEQ ID NO: 787455 - DNA, 605 bp, Homo sapiens
ctgccctgctgaaaaacttggcccagaatagggaagaactcaacattcaattttatagtgagtcagtggaaatgaaaaccagtgcagtctgtgagcctcatgtcctaacagcctcccctgggaaggtccaggcctactgcgtgagacataaggggttggtcaggccctccccaggcactctgtctctccaccagcctgcaagatcttgcccatgatgtaatgaccaaggcagaagtctgcggygctgggggctgtggagtctagctcactctgaccatggcctccctgggctgtgagtcacagccgaggcgatgctcaggaggcatctggccagccctgcagcgggaagtctgtgcgagagaaggttcgcggcccaggtgctctgagaagctctcaggacacccaggaggaccatgggctttgggcgaccaactatgggtcctcacccacaaggaatggagtgagggaccaggcagtttttgcaccctaagaaatccaggactaaggagcacagagcagggttccccatcttacagttactgtgaactagtttaaacaatgagaagaatttcacctccagccaccaggcctttcactgtgctgtg

SEQ ID NO: 787456 - DNA, 593 bp, Homo sapiens
agcatccaacattcattaatggtgtgtccactatgtgactagaaactgtctttggaatcatccctaaaggccctttggaaagacaccaaagatcactggcctgctgcaagcccctcagcagattttgttcatatagaaacctgaaaaacaatgtttgccatttttgaaaagaargtgaagaaagaggaaaagaacagcatgactatttttaaaactattgttaaatgaacaaccgatgtgttaccatccgaagtgtaacccgctgaagaccgccagcacacacactgtcttgtgttctcaaggtatttacacaacacttactaacaaagcttctcccaggccatcacactgtatgtttatttaaatgttttctaaatgtgtcattcattgattaagaagctgtacctctacgtgttttgttttgttttcttttaatgcaagctacacatgtctgtccacgtgaaattctagaagcaagtaaagttcaccacaatggcccatgtgcactataggcaaacgctgggcagggctcaggcacacaggctccgtgagcattgtcagcgaggtgtttgggccaactgtctaagaacccc

SEQ ID NO: 787457 - DNA, 685 bp, Homo sapiens
ttaatcccaagggatccaggaaataaccaaacctgttgtgagaataggaaatgcaatttttaaagaatctggaattttaccagtcctggagatcttccatctcatcacagctgagacttaaattgctagaattttggttcatttgtcattgacccttaaagtcctatgtgccgtgaacaagatgaattaggatgggggattggggcagtgttctggctggaaatataaattttagagaatttattttgaagagattctcatgcagaatctaggtgctatagaggacgtacacctactttgagagtatgcttgcatgagtggaaaccaatcataaacaacattcaacttcatgagcagatatgaaagcattttcagcatatctagcaatactataactctttgtgcaagcagagtggcctacacaagacagtttcaatatattttaaaagaacgtcttacatttcatcagtcctttgaacacagaaaaaaatgttaaggccacttaagaggcaaaacatcttacagagttcattkatattcaaagtcacctacaggctacatcttgggttcaggaaggggcggtgtacatagtaaggacataagccttctgggagccttaaacaaacaaaaaaaatgtaggtaactcctacatttttcttttgtggaaaaaacacagttactccag

SEQ ID NO: 787458 - DNA, 574 bp, Homo sapiens
caactgaaaacattctgtttatttctcccatcatccagatgaaaatcttggactgcccatcgggcccagccatcagcaaagaaggtctgcactcaaggagggcaaaaaggttttttggggaagctttgcccttttgcaggtcaaggacctccacagatttcccagatgtagtcagagaagcccatgaggcataaagccacttgcagggaaggaatcttcytgcagggtagggtcactgagggtgaagagatacagctgctctgccacggggaggtcctaaatggaaatctttatgaagtgagaaaagacaagatgccctgctgccaggaatcacctgtgacatccagcatgctcaaaggctgggaagccaagccaaagcgaacagcaccctctaaccatcatctccgggcacctgggctcctggcttctgacccagcaaataagagcacctcttctaccaaacacaagtccaaggcctaggtccaaggtctacatcagttctgcttccaggcaagccctggagcaacaccaggccccacactgggcactggggagagaacaaggtttctatatg

SEQ ID NO: 787459 - DNA, 659 bp, Homo sapiens
gagctgctttggaagcttctcatggcatggttttgagggagtcctcctcttccaggtctatcctatcccttcttccaactcctcgcccctcctttttccagcagcaggcatgatggtcttaaaatgtaaactgtaccgctcctcaaaaaatgttaatagcctccccacattcagcagcctcaaaatcattcatcatccgctgtgctcttttaacatctgggctgcttccatctcctagaggtcccaatgtctctgcctcaggcacttggcacactttgtttgctccatctagaatgctcttccctcgcctccccaacccttcacccagctgtatcctacttcaaggcttaaatgccacttccttcaagaggccttccctgtctaaattgagttcccaggtaatcaactctcacagctccctccaaagtttgttttagtrtgtaccatcgatttaaacatttatccatttgtgtgtgattgtttaatgggcatcttgctgagaactccataaccttcaagagggcagatgataccttccatacaacttataccacgcgcattttcaccccagaacccagaattatttgtggctcccaggagttactgaacaaatacctgtcgaataaaagaaattactattttgaaataaaattaatttg

SEQ ID NO: 787460 - DNA, 607 bp, Homo sapiens
ctgcctcagcctcccaagtagctgggattacaggcacccaccatcacgcctggctaatttttgtatttttagtagagacagggtttcaccatgttagccaggctggtctcaaactcctgacctcaggtgatccacccgcckcggcctcccaaagtgctgggattacaggcatgagccaccgcatccgacctaaaaggacttctaaggaaaggaatggctgatgcgcagttttgggtttctgctatacagcctgccctgcaccaccctgtgtaacacccctccatgccctgcctaagtcttcagtagaatgctgctgagaggccagcaaatacgaccatgaaacctcaacacaggctgtggggtcaatatgcctgggcttaatgtccgctccaccacgcacttactggataatctaggaaaaacgttatgtaacttctctgcctcagtttcctcatctgcaaagtggggataatgacagcaattaccttatgtgggtgctatatacacatggtattattatgagggttttgtgtgaaggaggggtgatttcacatctgggtcaactcagtgcagaacaactctaggcacagcagcagacaccaaggca

SEQ ID NO: 787461 - DNA, 607 bp, Homo sapiens
ctgcctcagcctcccaagtagctgggattacaggcacccaccatcacgcctggctaatttttgtatttttagtagagacagggtttcaccatgttagccaggctggtctcaaactcctgacctcaggtgatccacccgcctcggcctcccaaagtgctgggattacaggcatgagccaccgcatccgacctaaaaggacttctaaggaaaggaatggctgatgygcagttttgggtttctgctatacagcctgccctgcaccaccctgtgtaacacccctccatgccctgcctaagtcttcagtagaatgctgctgagaggccagcaaatacgaccatgaaacctcaacacaggctgtggggtcaatatgcctgggcttaatgtccgctccaccacgcacttactggataatctaggaaaaacgttatgtaacttctctgcctcagtttcctcatctgcaaagtggggataatgacagcaattaccttatgtgggtgctatatacacatggtattattatgagggttttgtgtgaaggaggggtgatttcacatctgggtcaactcagtgcagaacaactctaggcacagcagcagacaccaaggca

SEQ ID NO: 787462 - DNA, 613 bp, Homo sapiens
acagtgcaatcacattagaactcaggattaagaagctcactcaaaaccacacaactacatggaaactgaacaacttgctcctgaatgactactgggcaaataataaaatgaaggcagaaataaagatgttctttgaaaccaatgagaacaaagacacactgtaccacaatctctgggacatatttaaagcagtgtgtagagggaaatttatagcactaaatgcccacaagagaaagcaggaaagatctgaaatcgacaccctaacatcacaattaaaagaactagagaagcaagagcaaacacattcaaaagctagcagaaggcaagaaaaactaagatcagagcagaactgaaagagatagagacacacaaaaaaaaaaacttcaaaaaatcaatgaatcyaggaggtggttttttgaaaagatcaacaaaattgatagaccactaggaagactaataaaaaagaaaagagagaagaatcaaatagactcaataaaaaatgataaagcgtatgtcaccactgatcccacagaaatacaaactaccatcagagaatactatgaacacctctacacaaataaactagaaaatctagaagaaatggataaattcc

SEQ ID NO: 787463 - DNA, 614 bp, Homo sapiens
caaaacactgacttgatattactttctgctattactgcatttcttccacaccaccacaccagtcttcctggattccattcaatcactgatgagactgccaacacagctcaaaaatgttttgccattggatcatttccaggactgttgtggtactttccttggaaataggtttgtttctctstctaatatttctcacacatttcagatatcataattcacaatactttacctccaagtcatttcaaacattcctttttctgggaccagcaaaaaaaaatgtaactaatttctccatcattttctataggataggctggctgccttttttgctgtcctttcttcctaaatgctattttactttattttgataactttgtagcttcttacttttataattttattgcttctttatagttcattgaatgaataaatattgatatctataatggagaaactgaagtagattgcttcaatggcttcattgaagaagagagcctctaataaaaatgataaatttttaatcccaggattagcttcagtctaacaagtaatgttccaaggagttttctctactttgtcaccttttgacaatagctgctgattgttaaagaaag

SEQ ID NO: 787464 - DNA, 592 bp, Homo sapiens
agaaattaaaccatggagtggcaaataatagaattctacatgagcatttaaacccaactatattttccacctcttttaaagaaatgtgaactctctgaaacttctgtttgaatgaagataatcttctgcaagggaaagtgacttggggctgttragcagagatctattcgatacagaattcattgttgtaaagaggttgttgctgcagagttctgaaatctggtccaaggttggtcaccagaagtaccttcacagagcaacatggatagccttcgaaatgggtgctgtagtccctgcttatccacagtttcagttatccgtggtcagccagggtctgaaaatatgtacaacaaattattttgagagagaaagaccaccttcacacaacttttattccactatactattataattgttctgctttattattgattgttgttaatctcttactttgcctaatttataaattaaactctatcataggtatgtatatgtgaaaggaaaataaaaacttgggaccccaatttactatgccaaaaggaaaaagttaagctgaaaactgagtcatgcaaacaattgcctttccttttgt

SEQ ID NO: 787465 - DNA, 637 bp, Homo sapiens
caaactgaaattacaaataaaacatgcagctttaattttaaatatatgtatttatataagtaatattaaaggcagcatagcctcagctactccaccagagtgcttttgccagtggctaccaccatagcactttctccagagacttccacccactcccaccagagtgtgtttgcctgcgactctgcaacctccctaccaccgtgcttgtcatctgcaaggcccctgttgcccctgccagagcaattttttcacacagtgcctctgccacccctgatagaccactgttgccagtggtctggcaggaccttggcccctccatcccagctggggctaaayctcgagagacaagaacacaaagccatgggcctggtcccagccacccagggttagagcatacagcctaggagtgcagagctaagccttggccctctgaaagcatccagaaacaaaagtattcaactatacccaacttgtaccacagtcaaatatttaaggggaataaagaacataaaaacaaaaagccctatccaaagaacagtaacttcaaaggataaaggaacatcaacccacacaaatgagaaagaaccagtgcaagaactctgacaactctaaaatccaaagtgtcttcttaccttca

SEQ ID NO: 787466 - DNA, 612 bp, Homo sapiens
ttccttctaaggtatcatcttcattcacactgtctgggccctttattttcttaattagtctgaggagtagagaaaattggaatataaatttagtaagtagctttatatgttaaaaagacatggaacactagataataatattattaagaatttctactcatcagaaaaatactaagaataaaaaggaagcacatggagtagaaaaaggtattaataacacatatatgcaaaaaattctatcctgaatatgtaaaaactcycatgaatcaacaggaaaggacacacaaagccagcaaaaattgggtaaaaatttctgaacaagggtggagccaagatggccaaataggaacagctccagtctacagctcccagtgtgagcgacgcggaagatgggtgatttctgcatttccaactgaggtactgggttcatctcactggagagtgtcagacagtgggtgcaggacaatgggtgcagcccaccaagcatgagccaaagcagggtgaggcatcgcctcacccaggaagcacaagtggtcagggaattccctttcctagtcaaagaaaggggtgacagacagcacctggaaaattgagtcactcccaccctaatac

SEQ ID NO: 787467 - DNA, 612 bp, Homo sapiens
ttccttctaaggtatcatcttcattcacactgtctgggccctttattttcttaattagtctgaggagtagagaaaattggaatataaatttagtaagtagctttatatgttaaaaagacatggaacactagataataatattattaagaatttctactcatcagaaaaatactaagaataaaaaggaagcacatggagtagaaaaaggtattaataacacatatatgcaaaaaattctatcctgaatatgtaaaaactctcatgaatcaacaggaaaggacacacaaagccagcaaaaattgggtaaaaatttctgaacaagggtggagccaagatggccaaataggaacagctccagtctacagctcccagtgtgagcgacgcggaagatgggtgatttctgcatttccaactgaggtactgggttcatctcactggrgagtgtcagacagtgggtgcaggacaatgggtgcagcccaccaagcatgagccaaagcagggtgaggcatcgcctcacccaggaagcacaagtggtcagggaattccctttcctagtcaaagaaaggggtgacagacagcacctggaaaattgagtcactcccaccctaatac

SEQ ID NO: 787468 - DNA, 612 bp, Homo sapiens
ttccttctaaggtatcatcttcattcacactgtctgggccctttattttcttaattagtctgaggagtagagaaaattggaatataaatttagtaagtagctttatatgttaaaaagacatggaacactagataataatattattaagaatttctactcatcagaaaaatactaagaataaaaaggaagcacatggagtagaaaaaggtattaataacacatatatgcaaaaaattctatcctgaatatgtaaaaactctcatgaatcaacaggaaaggacacacaaagccagcaaaaattgggtaaaaatttctgaacaagggtggagccaagatggccaaataggaacagctccagtctacagctcccagtgtgagcgacgcggaagatgggtgatttctgcatttccaactgaggtactgggttcatctcactggagagtgtcagacagtgggtgcaggacartgggtgcagcccaccaagcatgagccaaagcagggtgaggcatcgcctcacccaggaagcacaagtggtcagggaattccctttcctagtcaaagaaaggggtgacagacagcacctggaaaattgagtcactcccaccctaatac

SEQ ID NO: 787469 - DNA, 551 bp, Homo sapiens
tcatcactgaatctattcaagtacataatatatccctgtcaactttccaggtttatttttaggatattttcttagattgttttgaggatatatgtcatagcacattttaaattaatcaagtaccacataaatataagggcatattttaattttattctttcattcatttgagtgctgttctgggcacyggagacacagcagtgaaccagacacacaggccactgaccacagaaagattgcacactaatgtgggcaatggacaatagatataaagcatttataatatgatgtcattagtgatcatttaagccaggcagggagacatacaattgtgaagttgggaatggaaggcatttactttagaggggatgggcaagatgggtctttcaaggaagacaacaactgagcagagattaaagaaaataagggagtgagtgatgggaaattccggggtggggaaagctttctagatgagggaaccacagggcaaatgcccctgaagaacaatgtgaacctacttaaaagacatcatgggggcaaatcagggccca

SEQ ID NO: 787470 - DNA, 620 bp, Homo sapiens
aggaaatggtggaagcagaattgaaactgaggactgctgaacacagagccctttgcattttcatactggtttctactatagagtctgtggattatgtttctcatatgattctactctataattagattccaaatagtcatgagacagaggagcacwctgaccagtccttttgtcatttaacatgcaattcctgaatgactctaatcattatctaccaaaaggtaatctctcattctaacctcgaattttctactgaatcaacagtcttcaagttttttctataatgttcttctactagtacaaaaatcttcatcacatagtcctaatatgtgtatatttatttatgtataattttacgtgactatattgcatacattataacattaattcaaaatagaataatatgaactgaatactatttttaatataatattgaatacaatatggttgaatattctgtctttttgaaattttgatttaatgtcttgttatagaataggttctaggtcagattctaagttcaatttattttgatagctatatgaagtatctttcatttggttatggccatcattaaaagaaaatgttcatctagtaaatacccattttctctgatgcca

SEQ ID NO: 787471 - DNA, 583 bp, Homo sapiens
ccagcctgggcaacaagagtgaaactccatctcaaaaacaaaacaaaaaaacaaaacaaaaaagatgtgattacccatctgcaaagaaaacaggagaaaagaaagaaaaaagaaagaagaaggtgttccctctacttttctattattctgaatggggcatctcccattgtccttagggttccagaattaaccggttttaccatgtacctttggtgtcatctgttcacaattatccacttgggaacagaggagatactggagtgaacagtgggccccctgtttatccttggggttctggaatgaacccgtcttactgtgtacctgtaaccttgcctttatctctgttctgatggtaatcggttagcctgggaccaaccttcatctctgccctatgggtctcttgcacctgyagccttggcccggcctatatccttgtcttcgtgaccttgtaatgactgttgcgtaaagccttccagaaaaaggtatatatattttcttagattctcatttcccatgttctttaagtagatgagaagccttatagctaactgctacaagggggctggactttcctccccacttg

SEQ ID NO: 787472 - DNA, 569 bp, Homo sapiens
acaaacagacaacaacaacaaaaaaaattgtgttacaaaggacactatcaagaaggtggtggggtgcttccgagagcactttgttcccagatgtctcagcagactttcctgatcagttactaaatgtgtgatcctctaaagaccctaagacattgtagccatatgagaacacacagatgggggttacttggagaagccgactggccacccagaggaccagaaggcaacagcttttttaatgtcgtcaccatgccccagagcccagtactcaatttgtcrgtacggtgctgcatctgcggctccatttttctgcatttccaagctgacaatttcaagccggtatgctttctttagataaataatattgtgttctaagcaacagtcaagccctgctcttcttgctttttgtacatctacagttttatagggtcaacaaaaatctattaggtatgtcctatgccaggcactgtgccaggcactttgggcccgagagagactctatccagggacatttgcaaatatttatgtttaagtctgtcttccagctacctggaagcttcagacaagat

SEQ ID NO: 787473 - DNA, 615 bp, Homo sapiens
ctcaaaccaatttctagtcactcgtcatctaaagattgttcctgaggggtaaagcaccttgatatgaaggcggaaacgatgacacagtggctgcgaagggttccttctctaccccacctcatcctctaccccactcggttcctcagtccacgttttggttcatccctctggatggagtgaaaaggatttgacaccaaattcgcaataaggcatgagtagtgtgggtgcaaccgctttaggtcatacttaaaatttgaagagaatctcagatagggtgagaaatctctaaaatggacacccaagccctgtgacctctcatctccaagcctcagggtgaaatgagctagtttaagtgaaacctttcttaattattccartgaaaccatcttccccatcctggtcatctaaccaattatcccatttcattttcttcataatctttattactacctgaaagcatcttgttaatttatctatttgattattgtttgtctactctctcaataatgtttatgaggacagggactttgtccgtttgttcactcctgtatctttcagtgcctagaacagtgtctggaacacaataggtgcttgatgaatatttgtggtgtgaat

SEQ ID NO: 787474 - DNA, 615 bp, Homo sapiens
tacccactctgccccatccctatcatctatttagaaacaggatcatgcctggaccccatgctgctcttagcttctagtttgatccttaatacagctgatgatgtcctcaagtgctttctagctgtgaaagccatatttccacttccagcaaagaatgatccagagcaaggagaaaagcaaaaataaagctttagtgagaaatarttttgaaagtactagcttaacataaacttttgatattgcctggcttttaattttccagaacctgtttgtccctcatgaacacaaacgatcagtaggtaccctcactatttccttgaactcattcctttgaccaaaaaaaaaaaaaaaaaaaaaaaaacggagagaagggtaggttcactaatcatttgagttctaccaaacatcacataattgttttgcatatcagtattttgtcctttcctgctaaaggtctttccttgggtttgcaaatagaagtttgagaagagtcctggtactgactgagctttcttggtaatgtcacgaaatttccaaccacaaagtcaatcttcatttgagtcagagcaattagaggaagactaatggctgtggacaaactactgaaatatttta

SEQ ID NO: 787475 - DNA, 343 bp, Homo sapiens
aaaagacataatcgaagtgacctgtctttttaaaagcataaagatgaatcagaaaatattatcttgctttcagtttgtaacctgaaagttgtttggggaaataccctaacctaataactccctgatcaactttatacattttggacaacctctgctaagcagstacctttccagattttcagagcaactttgaaacttgagtttggtgaagcattgttcgtttaaatatgcagctgatcaaagatagtattttgacttcctttccaaatctgcctataagaagagattagcatcagttcacagacacaggaactctctaggccctttaattcctaactagtgt

SEQ ID NO: 787476 - DNA, 674 bp, Homo sapiens
actgatgcattgactcatttgttcttcatccagcaagctctcagaaggctcgctgtacacctggcctgtgctggacactggggagtagctgaggaagccatgctctgtgtgctcaagaaggtggcccaggtagggtggatagggaagcaatttcagctcaatgaatgttactactgaagagtattcggggaaaagagagtcaaggaaagctcctggacagagcacttcctaaattaaatttcagagagccagtaggttttggcctggaaggatgatacagaaggggaatccacatggagggaacagtgtatgggaaggcatgaggaccagagagaggacagcacagtcaagagcaggagcaagctcagcacagctgyggtgttgtgtggggtgtggagacataggaggggaaacctgagacgtcagtaagagccagaccatcagtctttcctggccagctgagaagcttggaaatagtgcaacctaggcttggccacagtagagcaggcctgtattgctttctgacagacagagacttcacaagtggaggggaaggggacagcacgtacccaccaggggccacaggatgagccttttggaaagtccttctggttctcctttcctgtgtctcacaggctggagtgcagtggtgcaatcatagctcactggagcct

SEQ ID NO: 787477 - DNA, 520 bp, Homo sapiens
cattgtggttttgatttgcatttcactgatcattagtgatgttaagcattttgttcatatgtttgttggccatttgtataacctcttttgagaattgtctattcatgtccttagcccactttttgatgggatcgtttgtttttttcttgctaatttgtttgagtttgttgtagatcccagatattagtcctttgtcagatgaatagattgtgaagattttctcccactctgtgggttgtctgtttacactgctgactgttccctttgccatgcaaaagtgctttagtttaatgaagtcccagctatttacctttgtttttattscatttgctttggagttcttggtcatgaaatccttaccgaagccaatgtctagaagggtttttccaatgttgtcttccagaattttcatagttttaggtctttaagtccttgatccatcttgagttgatttttgtataaggtgagagatgaggatccagtttcgttctccaacatgtggcttgccaatcccagtacc

SEQ ID NO: 787478 - DNA, 624 bp, Homo sapiens
gcctctcagatagggctgccttcagctccggtggcaaattagcaatgaattccaacatgataattatagtttctgtatctttgttgatgaaggatggtacaatttctgttaagtttaaaaaaaaagtgtatgtgaaggcgtattcaygtcaaagagcattcagaaaaactgtgaatgtttgcatacacaaagaaaagaaagcattgcctcaatataaattaaacattgaaacacaaaagcatcctaatatctaaacacttagctttcttacagttggacaccttaaagtaccataattttaccaaggctctgctttaccccattggtcctctctcgtctctcttcattatcccctcagtgcttttatcatagtacttttgactctccctgacattactctgtcatctttctgaagtcatgtaagtcattggaaacagtttggccacacatagtggtcattttcttggattcttcttacttaactcgttttcttccattgctaagctatgatttctgatattacgagttgtagtaacaacgcttgaaaaagatattattttaagctactcaatgtttcgtggtgggaatttactcctggaggataaagttaaagaggcagcattt

SEQ ID NO: 787479 - DNA, 624 bp, Homo sapiens
gcctctcagatagggctgccttcagctccggtggcaaattagcaatgaattccaacatgataattatagtttctgtatctttgttgatgaaggatggtacaatttctgttaagtttaaaaaaaaagtgtatgtgaaggcgtattcacgtcaaagagcattcagaaaaactgtgaatgtttgcatacacaaagaaaagaaagcaytgcctcaatataaattaaacattgaaacacaaaagcatcctaatatctaaacacttagctttcttacagttggacaccttaaagtaccataattttaccaaggctctgctttaccccattggtcctctctcgtctctcttcattatcccctcagtgcttttatcatagtacttttgactctccctgacattactctgtcatctttctgaagtcatgtaagtcattggaaacagtttggccacacatagtggtcattttcttggattcttcttacttaactcgttttcttccattgctaagctatgatttctgatattacgagttgtagtaacaacgcttgaaaaagatattattttaagctactcaatgtttcgtggtgggaatttactcctggaggataaagttaaagaggcagcattt

SEQ ID NO: 787480 - DNA, 622 bp, Homo sapiens
acactgagtgcattttatactcaaaatgtatcagatttatggatctgagaattcacagccttagtcatgactgacaaatacaaagaaataaagtgatgtatgaagtggtttagactttcttctaagtatttgtagataatttgttttacacattaaaattttctgaatcagttagcatactattacacaactgtcccctaaaaatcaataaaaatactattgcataaaagctatcagattaagattggatataaatgtaataaaattgtgctattataagtaaaatttagaagttagataaaggamtgaaaacatataattagtaaagcttactttacaaatgaggactacgaggtaagagacagttaaaggactaccccaggtcacacagatagtggtggggttagaggttgaactcaaggcttctaatgtcacagcttatttttatctataaatcataaacaaaaaatagaaaattttcattctaataaagcaaaaaaaggattttggcttatattcttactttctaaaactgtgtctggaagaatcactttaaaggccatgtaaggaatattcaactctttgcagtgtttagtccaacaagagtcttccacataattgt

SEQ ID NO: 787481 - DNA, 589 bp, Homo sapiens
agtgctggccatgtatgcagtagcatcagtacttgtagtagcagcaacagtgatcctaataggggtatgggtggcatcactaagtttcttggttaatgcagccacagaaaacataccagagtatagaggagcagatgctgggtacccaagacaacctagtgatacaacacaaagctttactggcagctgcaggcctcatggagcagactgggacagttagaagcatgcttttttttttttttttttttttttttttttgagayggagtctcgctcagtcgtctgggctggagtacagtggcgcgatattggctcactgcaacctctgcctcccaggttcaaacgattctccagcctcagcctcccaagtagctgggattacaggcatgagccaccacacctggctaatttttgtatttttagtagagacagggtttcaccatgttggccaggctggtctcgaacttctgacctcaggtgatccacctgcctcggcctcccaaagtgctgggattacaggcgtgagccactgcgcccagccatagaagaatgcttttattgttattatgttgacctcatttgcaactcta

SEQ ID NO: 787482 - DNA, 478 bp, Homo sapiens
acagcctactaatgggaactaatttacattttcagatttttttaaggggtcttatatagagacctgagttacctgatacaagtttttcgctaatgtattccagtgatggcttagcactcttcatggatttatagacaagaktatttgcttgaagtcagtcaattacaaagtagggaagctgaaatttaaacttttattattattattattattattattattattattattattattctgagacagggtctcactctgtcacctaggtttgagtgcagtggcacaatcatagctcactgcagtctcaacctcctgggctccagtgatccttctgcctcagcctcctgagtagctgggactacagggatgtgccaccatgcccagctaatttttttagtttttgtagagacggggtcttgctaggttgcccaggttggtctcaaaggcctaggctcaagtgatccgcccacctcagcct

SEQ ID NO: 787483 - DNA, 605 bp, Homo sapiens
tgtcttgcaggaatttggtagtttgaggactccattaggggaccttgaacagattgcacaggctctgcttgcagtagagaggccagacacaaggtataaattttggagttgcttgtgttggagcattagttgaccattgtgttaaaggarttcaggacttggtaaagtcaataatctagaaaccagtgagaaaatggtgaccctggtgaaagatctgagtgaaatgtttgaagagggatgatatctacgttctgtagaacagagataagagaacaaaaagagaagatagtcactggacacatgatgtccgcttaccagatttcaacgacactccaagaccttactccatatacttcaaccaggaggagtgcagacagccggggcaaagggctgcacagagacaatgaggctcataggagtctgatctccgtgtggcatttcgtttaaaagctacatgtaatctagttgtagcaagaagaattgtacttgaagaaatacgtttcaaaaggcatctgtcatgattgggatgccgagttaaagtcaaggatttaaggcgccaaaacggcatttctataaaattagcccaaaaagcagagggagaatgg

SEQ ID NO: 787484 - DNA, 550 bp, Homo sapiens
ttttgtaccaataccatgctgttttggctactgtagccttacagtatagtttgaagtcaggtaatgtgatggctccagctttgttctgtttgcttaggattgctttgactatgtggccttttttttcattccatataaatcttagaatatatttttttctaaatctgtgaaaaatgagatttgttttgcgggtttttttgtttttttgttgttgtgtgtttgttcgtttgagacagggtctcactctgttgcccaggttggagtgcagtggcttggtaataactcwttgcagcctcatccttctggattgaagcaaccctcccgcctcagcctcctaagtagcgagaattacaagcatgtgctaccatgcccagctagtttttgtattttttgtagggacagggcctccctatgttgcttgagctggtctcaaactcctgggctcaagcggccctcctgcctcagcctctcaaaatgttgggattacaggtgtgagcttccgtgtcctgggttttctaagtataggatcatatcatcagtgaagagagat

SEQ ID NO: 787485 - DNA, 545 bp, Homo sapiens
ttttgtaccaataccatgctgttttggctactgtagccttacagtatagtttgaagtcaggtaatgtgatggctccagctttgttctgtttgcttaggattgctttgactatgtggccttttttttcattccatataaatcttagaatatatttttttctaaatctgtgaaaaatgagatttgttttgcgggtttttttgtttttttgttgttgtgtgtttgttcgtttgagacagggtctcactctgttgcccaggttggagtgcagtggcttggtaataactctttgcagcctcatccttctggattgaagcaaccctcccgcctcagcctcctaagtagcgagaattacaagcatgtgctaccatgcccagctagtttttgtattttttgtagrgacagggcctccctatgttgcttgagctggtctcaaactcctgggctcaagcggccctcctgcctcagcctctcaaaatgttgggattacaggtgtgagcttccgtgtcctgggttttctaagtataggatcatatcatcagtgaaga

SEQ ID NO: 787486 - DNA, 576 bp, Homo sapiens
gaagggatccagtttcagctttctatatatggctagccagttttcccagcaccatttgttaaatagagaatcctttccccatttcttgtttttgtcaggtttgtcaaagatcagatggttgtagatgtgtggtattatttgtgagggctctgttctgytccattgatctatatctctgttttggtaccagtaccatgctgttttggttattgtagccttatagtatagtttgaagtctggtagcgtgatgcctccagctttattctttggcttaggattgtcttggctatgcgggctcatttttggttccatatgaactttaaagtagttttttccaattctgtgaagaaagtcattggtagcttgatggggatggtactgaatctataaattaccttaggcagtatggccattttcacgatattgattcttcctatccatgagcatggaatgttcttccatttgtttgggtcctcttttatttcattgagcagtggtttgtagttctccttgaagagttccttcacatcccttgtaagttggattcctaggtattttattctctttgaagcaatc

SEQ ID NO: 787487 - DNA, 650 bp, Homo sapiens
cacgtttgggggctggggggaggggctgtaatctcttgtgggcaggatcccagaggtccttggtaaatgtgggctgccccactgtcccttcactcacctcctaggagccattcggtgtgggcactagcccttgtatctggcaacactgcacagggttcccagcttcctgtctcttcagcctcagtgtccgcattgcctctctattgactctcagtatttactctccaaagatctrttcaaaatctattggttcacttggtatttttatctctcttggtgggagcagcctttctcctggctgcatctcgtctgctatcttgtttccctgtactgcgattttttgaagacttctgacttgatcatgatttattattcttttattataatgttacatttaatttgctaatatttaaagtttttgaatctgtttctaattaagagttacctatagcttgtttgtgtgtgtgtgagtgtgtgcaaatatctttttatttttggtatcagggcagtgctaacatcatacatgtatttgtgaaaatgttcatcttgtcacatgcctctaattggtgtttcacaaactggctgattataaccatactttttgcactttttaacaatataaattccctgtcattctcttgaatattcca

SEQ ID NO: 787488 - DNA, 584 bp, Homo sapiens
aggagctgattccttttaaggcaggcaaaaagctgcttcccattcacccttccttctttctctattcacccaacctccacaactccccaaatccagtaggataaaaaaagggagggatctttttccctcccttgaagcatgtgtaaagcttaactgcatcctgggaagtgtagttccagcacttaggtggatccaagaagtaagatttatggcagaagtattctacatgctgggattgtagcttttcatgcacagggtgttgagtcagcrtctcaaagaatcagacaatgacggttaggagcaataccccacccgtgcagagctgcattagaatttagagttaggttagaagctgcgcaaacacctgttctgcagctgcaggtgtgagatcatcatacaaatggagggccggcattgatgaagccaaccccataccatgtatgactgctgcctcaaagtctcaagaaagctcaccttatttaaatatttatattgaagaagtaagttataggaaagactacttggaatcagtgaaaaaattgttgaagaccccaggatgtctatttcaggaaccaggagaaagt

SEQ ID NO: 787489 - DNA, 494 bp, Homo sapiens
ttaattagactgcacagaacaaggttcagttatggattcttgattgcttggtaaaatgatggctcttcaaacctaattacatttgggtgagctaaagcacagttctgaaggactcaatatgttcactcccagccttcatcagctgtacaatttgctttcctgttagttttactttagatcttgaaattaaaagcattttgttatatcaggatggtgtgtctatgacttcagtgcaagtagaggaggagtgttctaccctggaataacacaaattagaggtgcctgtatgtatgtgtatggtgtgtgtgtgtgtgtgtgtgtgtgtgtrtatgtattaaacttcatgctttttaaagcctccttctaaaatgccatctttcagatgtgcctatctgtgtcttattttggtagtttttcttttctttccccattcaaccgtctcttgggaattagaaaaggattcctaagatcaaaatccccaattttctggaaaa

SEQ ID NO: 787490 - DNA, 601 bp, Homo sapiens
atatagaaaaatagtattccctgacataatacaggacagctatgaaatatatcatttaaatagatagatagatttatatttaaattataaaatgatcatgcatgtgctatctaaaaataacctttcttaccacctgttgatgcccacactttaggagacactgacttagatatttcccagcccccactttcagttccattcctttgatctgcagcatgaaggctgggaaaagagaaaaccaaaggaaaatagacttgctgcctccaagtgtttgaagagctcccaagaagaaggaagaagggagcattcaataaatgcctgccatgtgccaagtaccatgatagatggttaaaatatattatttggcccaaactccacaatggcccaggtgatggggatcctgatcttcgtctaagagaccagaaagccaagattytgagagattctaacatgctctgctacttaagtgatggagcagagtcaaacccaatatctccatccattcatctggactgtgtggcccatcagggtgaaagagatttattctttgtgctttagaaagcaggactaggaccaaatgttgcataagcatatttcactt

SEQ ID NO: 787491 - DNA, 613 bp, Homo sapiens
ctggtaatttttccaaatcaaaagtttaagagaattaataacatgtagtaatttgatccaactttattctcttggaccagtcaagaccaattaaggagccaccatccatgccatgcctctgtttatcctaatgagaagtgcrtggattgataatgaaggctggcagcttaatgtagctcaaaacataatttgtaaactctaatgaccagaatgttagccataagaatggtataaatggaactgcttctcagaatatattctgttttggtgtttctggatcactttgcttcattcactcaaggaaaaatattgccttgtacataatgcactaggtaatcatacagttgcatcttctactgaaaatgtttctctcagaatcatctgtttatgtacatatttgggttttgcatatgtaaagtcatgggatatttgagtagaaagggcttacaggctctctcatcaaattgtcttattttacagttaagattctgaggcccagagagaaaggacttaaccaaggccatttgacgacttactactagacctgggatgggactcaggcccacacatttgttccacactgagtagtttttagggcacttgaccttttatt

SEQ ID NO: 787492 - DNA, 639 bp, Homo sapiens
tcatacagttgcatcttctactgaaaatgtttctctcagaatcatctgtttatgtacatatttgggttttgcatatgtaaagtcatgggatatttgagtagaaagggcttacaggctctctcatcaaattgtcttattttacagttaagattctgaggcccagagagaaaggacttraccaaggccatttgacgacttactactagacctgggatgggactcaggcccacacatttgttccacactgagtagtttttagggcacttgaccttttatttttttggagtaccttatgttgcacaataacatttttctctgtcaggtttccagaatcttctggcctagtgccattttgtattttgcaccaagtggagagataacgtcgttggcgaagcatcctttcctctcctttgacttcttgcctttatttctgaatatccttcttgcagtgggttgaatagtggccctccaaaaaacatacttatgtcctaatccctgaaacctgtgaacatgacattatttggaaaaagagtcttcgcagaggtaattattgtaatccccaatgttggaggtaggacctggtaggaggtgattggaccacgagggtggatttctcatgaatagtttagcaccatgtcc

SEQ ID NO: 787493 - DNA, 586 bp, Homo sapiens
atttctcaaaattatttgaagaatgaaacatgttcccttataatgttaattaaaatgcaacaggtgtgtgtgtgtgtatccattcatcattatgttacatatgcaaagaaaaagacagtatgtactgtaatatctagggctatattaaactttttgtgtctgtattttctaaaagagaatgatttaattatcagaattatrttttaaatagatgcaagtttaaattttatttgtaatacattctgagagttggtaagtgtttttattctaaaatattcacattgttcccagtagaatcgatatagaatttatgagagcttaaattaattactatatgcaaatgtttgcaataagcctacttgcataatactttctctatttttcaccatgccttcaaccctactgtatgtattacatagcaaaagatggaaaaatgagtgtttcaccttgtttgaaaagtttcacaaaattaaatttggaagaaagtctttgtatattttttaagtatcttcagatcttccttctataataaaaattataaagattagtttaactttgtacattatgtctcttttcacaaaaagtg

SEQ ID NO: 787494 - DNA, 586 bp, Homo sapiens
atttctcaaaattatttgaagaatgaaacatgttcccttataatgttaattaaaatgcaacaggtgtgtgtgtgtgtatccattcatcattatgttacatatgcaaagaaaaagacagtatgtactgtaatatctagggctatattaaactttttgtgtctgtattttctaaaagagaatgatttaattatcagaattatgttttaaatagatgcaagtttaaattttatttgtaatacattctgagagttggtaagtgtttttattctaaaatattcacattgttcccagtagaatcgatatagaatttatgagagyttaaattaattactatatgcaaatgtttgcaataagcctacttgcataatactttctctatttttcaccatgccttcaaccctactgtatgtattacatagcaaaagatggaaaaatgagtgtttcaccttgtttgaaaagtttcacaaaattaaatttggaagaaagtctttgtatattttttaagtatcttcagatcttccttctataataaaaattataaagattagtttaactttgtacattatgtctcttttcacaaaaagtg

SEQ ID NO: 787495 - DNA, 602 bp, Homo sapiens
cccatttataaacatagtaattaataaattaatgcacgtggccaattatttctcaaggtgagaaataaagtcttaaaatatagacttttgtaattccttcttatcttgaaagactaataaaagacttcagatataataaayttaatcaaaatctacttgcagttataatgacaaattttacttaataaacacagctgctttgtactaagaatagcctcctcctgtcaatctctggtaattctgcatcagctcatactgtattacaaaacagcatgaattttttataagttcactgaaagggtttgaaagatggtattctacttactatccacttgttgcttggctttaaattgctatgtaaggatttaaagaaaagtacaaaacataaatcttaaatattttatttaaatcaggtactctatattagaacttggtcattctcaaccatgacctctaataccttacatagttataaatacattttgttgaattttaaaaacatgctcatatctgataaaattacttaaatacctagtgatgttgtcttattagaattaattaattgttattatttcaccttataaacatttcttatttatttt

SEQ ID NO: 787496 - DNA, 592 bp, Homo sapiens
gtacaaaaatgaactcaagatggattaaagacttaaatctaacccctaacaccataaattctaaataaaaacctaggaaacactattctggatactggcctaggcaaataatttatgatgaagaccccaaaagcaaatgcaagaaaaataaataaatgagacctacttaaactaaaaaagtttctgtacagcaaaagaaataatcgtcagggtaaagagagaatctacagaatgaaaaaaaaaattgtcaactctgcacctgacaaaagactaatatccagcatccacaaggaaacaaattagcaagcaaaaatcaaataaccccatgaaaaagtgggcaaagaacatgaatagacatttcttaatagaagatatataaatggccaacaaacwtatgaaaaaaaagcactcaatgtcactaatcatcagggaattacaaattaaaactgcaatgagatatcaccttactgtagccagcatggccattattaaaaagtcaaaaaacaatagatgttggcacggatgtggtgcaaagggaacacaaacacactgccggtgagaatgtaaattaatacaacctctctggaaaaca

SEQ ID NO: 787497 - DNA, 604 bp, Homo sapiens
ttatatgcctttctaggagaggatccatttttattgaatgttgcatccttatcaatgaagcataatagatagtcaattagtaatattaatgtgagccctatagaaagggttctagcaacatataaaagtatagtttgcaagaggtacatakgaataacaatgtttgcattgtacaaaaacttcaacggccagatagatggatacatagcaaaatagggaaaaatagaaaattccccattacaaccctaactagtatattaaggatattagccatagttcttgaagcaaaatttgaccaagtttgaccagcactgtacaggtaagagttttttaatcgtgtgagggaccactaaagctgttaatggaggcaggtcatctgctgtagggttcattaagcctcaccaagactccaatataatagtcctacaggtcatatgacgctttttctctaagtgtaggctaacaaataaactttcttatttcaagtcaacctataacatacctcaatatcaacagaagaattggggcagggtggggatgacagagagcaacacatttctgctagtagaaaaagtttctcatttacaatttcacaaattgttct

SEQ ID NO: 787498 - DNA, 574 bp, Homo sapiens
tgatggcaaggatagagagaaactggatcatgcgtacagtggctagcggaaatataaaatggcatgttcacagcagttttatttttcatagcccaaaattggaagttaacccagaggtccttcaacaggtggatgattaaactgtgatatatccagccgggcgcggtggctcacgtctgtattcccagcactctgggaggctgaggtgggtggatcatctgaggttgggagtttgagaccagcctgaccaacatggagaaaccctgtctctactaaaaatacaaaattagccgggcgtggtggtgcatgcctgtaatcccagctactcgggagtctgaggcaggagaatcacttgaactygggaggcagagattgcagtgagccgagatcttgccattgcactccagcctgggtaacaagagtgaaactccacctcaaaaaaaaaaaaatgtgatatatccataccatggaccactacttaataacaaaaaggaatgaactgttgacacatatacaacccggatgaaacaccagggaattgtactgagtgaaaaaagctaaccccaagaggtta

SEQ ID NO: 787499 - DNA, 553 bp, Homo sapiens
actccaaaattttatcttccttaaggctttgaaaggccatcttccctaagactcaaacctgagttttaccaggatttattccttttagcattcaatgtattgtcctgtgttgttcagagtacagatcactggtaaggagaaatacatccacagaaacaatcacgaaacacatattacacacatgctcatgcaaaaatatacatacacacaacctgccacagtatgctaatgcatcaaaggcctttctactctgaatttaaaacacagtttttttaagttgcaaaagwtagtcaaataatctgggcactgccaggagctaggattgatgcttacgaaggccccacatgctgcagtgacggttccaaatgccccattcccaccgttcacagttaggtaaaacattcaacgtgcaaagactctcagagagatgctgattcagtcccatggagcttctcaacagacaaaactttccactgttgttgtcaaccttgggagtaatgttcaggatgaggtggggggtcctggaatcatacaagaacatgccctaatccca

SEQ ID NO: 787500 - DNA, 674 bp, Homo sapiens
cagcttcctctcccccagctcctttgctcggtggatcattaagcacatgaagcaggcaagcagcctccccaggcatctcagaaaggaagcagtgaagtgtgggcctcgggggcttagtggctttgagggggacaccaaaccagtcttacagrgtcacccaggacatgtcacgtgtccaggacagctgtcggctaacagctgtaggacttcagaggcacttgtgctgccctccaatgtggggaatgaggaaaagcttcatggaacgaggacattgtctggggcactcttggggggcctcattctggcttcccctatgacagtgtttctcagccccggcactgtaaacattttggggcagatacgtgcctgttggggtgctgtcccgtgcactgtggatccccagtagcagccctggcatctacctactacatgccagtagcactccctccccagcggtgacaaccaaaaatctttccagacattgccaagtgtccgcaatgaagccaaatcaccccccagttccctgttgagaactactgggctatgaatacaaagcatgacccatctgaaaggcaatagcaggcccaccaacgagggtaggattctcatgaccctctttgacaatataaagaaggctctttgcaaactgtagaagactttcttcaggggcatct

SEQ ID NO: 787501 - DNA, 613 bp, Homo sapiens
attttggtttttaaaaaagcatgtatagcccttcctccatgtgaagacacagctagaagcctccatctccgagaaaaggcccctcccaggcacagtggctcatgcctgtaaccccagcactttgggaggctgaggtgggcagatcacttgaggtcaggagtttgagaccagcctggccaacatggtgaaaccccgtctytactaaaaatacaaaaattagccgggcatggtggcaggcacctgtaatcccagctactcaagaggccgaggcacgagaatcacttgaacccaggagacagaggttgcagtgagctgagattgtgccactgcactccagcctgggcaatagagcgacactgtctcaaaaaaattaataaataaaagaaagaaagaaagaaagaaacaaagaaagacaaagggccctcacacaacaccaagtctgccagtgccttgattagaaaggatacctgtatcaagatctgggagagtattcaacaacatattaccattggtaatttctgaggagtaggattacgggccattattttaattatttgaatgttctttgtgtttaataaagggacatataccacgtgcatgaatacaaaggaaa

SEQ ID NO: 787502 - DNA, 597 bp, Homo sapiens
attataattagcatataatgggcagtgaggatgtccagaggtcactttcatggccatcttggttttggtgggatgtggctggcttctttaccacatgctgttttatcagcaaggtctttgtgacctgtgtcttgtgccaacctcctctctcatcctgtgactaagaatcctactgagaatgtagtccaggaggcctcagccttattttactcagcccccattcaagatggagtttctctggttcaaatgcctctgacagttgcctgctacctggccctggaatgactaagggagaggawtattgcccgatagattgtaagagtcagacagaagaggtggtgaacagtatgggctctggattggttcatttgcatatgaaaggcatactccccagctaggtgagtccctggctctctctaagaatcagctaggctgagtaggggcactccatctccattcagctaggcctcagatgccagagtatcaagaacacagaaaataagacaatatattaatgcggggagacctgaccctctcacactggatgtgacctgtgtgggatggtaaatccaggcattttcctgcctccacagaacc

SEQ ID NO: 787503 - DNA, 556 bp, Homo sapiens
ctaagaatcagctaggctgagtaggggcactccatctccattcagctaggcctcagatgccagagtatcaagaacacagaaaataagacaatatattaatgcggggagacctgaccctctcacactggatgtgacctgtgtgggatggtaaatccaggcattttcctscctccacagaaccagagggatgggaacaaagctggagctgtgaatgctcttcctttccatggtgtttaagattttatctttttttgctttttttgacagagtcttgctctgtcacccaggctggagtgcagaggtgtgatcatggctcactgtagccttgacctcctgggctcaggtgatcctcccaccttagcctcctgaataactgggactacaagtgtgctactgatacagaacagctgggctcccacctaaactgcaccctcaagcctcaaacctcggccctaagtgaaaacagctgaccccgcttttccatccaaatgattgcctttttggcctgccatgcccctatcctgtgcccataaaaaccagaccagctggcagaaga

SEQ ID NO: 787504 - DNA, 575 bp, Homo sapiens
ggatccgcccccatgacccaaacacctctcaccaggccccacctccaacactggggattacatttacttacttacttttattcatttactttttgagatggagtctagctctgttgcgcaggctaaagtgcagtggcacaatcttggctcactgcaasctctgcctcccgggctcaagcaattctcctgcctcaacctcccaagtagctgagactacaggcgtgtgccactgttaggcctctgagcccaagccaagccgtggcatcccccgtgacttgcatgtatacgcccagatggcctgaagtaactgaagaatcacaaaagaagtgaaaataccctgccctgccttaactgatgacattccaccacaaaaataagtgaaaatggccggtccttgccttaggtgatgacattaccttgtgaaagtccttttcctggctcatcctggctcaaaaactcccctactgagcattttgcgacccccactcctgcccgccagagagcaaaccccctttgactgtaattttcctttacctacccaaatcttataaaacggccccacccctgtctccctt

SEQ ID NO: 787505 - DNA, 571 bp, Homo sapiens
ttcaagaaatgagcacagtccttagagcccagcaactttccccatgtccagtaaatgtagcttctccattagaagctgtcagaatggagccttctggctcatcttgattttgatttgtgcaagaatgaatggttgtgctaagacagctttcctagctgatagtgagcaaaacttttttctcataatctataaaaaaattaaattagaacttttttctcataatctgtaaaaaaatattacatctggctcgtcttgattttgatttgtgcaagaatgaatggttgtgctaagacagctttcctagctgatagygagcaaaccttttttctcataatctataaaaaaatattaaattagaagcacagagtttatttcatgacttttatcttcctgcaattttcttgtgggcataaatgatttgtttttatcctgcctgccccaatcccttttccaagagactaaaagagtatctagtgcaaagtagatactcaaatattttttaataaacagtgatcccagccgcccagtgcatgttgccaaatgccaaccccataaatgatcaaacgcatca

SEQ ID NO: 787506 - DNA, 659 bp, Homo sapiens
cctgggctcctaagaattttaacatttgagttttcttccaacaaagaggtggaggaaaatataactttatataaacatgtataaaccctgcttcccactttaattaagccataaattcctgcggcagctagggatgtgaagaggcaagtgagaagaggaaatgtgcataagactctcagcagcttggaagtaaacagggaggactgaagtgaccctgttgctccgaaggtggctgttcattagcctccttctgtccttagacccagctggagcattgcatgcactggctcccaggttgcaggggatgtcagcagctccagctcatccgattgaaggaggccatgtggctttccctggactttctgcttgaacagtgaatccctgtagggcctggatccattgccctcttctcctcccaccccacccaagcactcttcttcatgagtttgctttctcctatctttttttcctccacttttccttcamaaattgttgattaagcacctgctatgggccagacatttttctagaggaacacctcaatgagcagacaggttcttgttctcatagatcttccattttagagagaaagctgaatgataaacaaataatacagcaggtggtgaggggtgctataaagaaggatgagcagggtaagt

SEQ ID NO: 787507 - DNA, 389 bp, Homo sapiens
ggaggagagaggcctttagtttgtatcaaaaccagaagaactgtttatcttctatcaggtgacaacccttcattcctttacttaacacattgattagcatctgctatgtggccatgtgctaggcagggccactttctgagtcctgcgaagtcagttgcatagtgtcctgcacttgaaagtgccccgcattcggtttaacrctctgctgtcacattaataacgatatctttacacttctgtttcgtcagcgaagtcctgtaggacaagggggcatgcacaggagcagaggagccacacgtgatgtgtgtggctgccgttccctgccgccccattcacataatcttctccatgcccctggggagccatgctgtgggaagtgcaggaaactc

SEQ ID NO: 787508 - DNA, 389 bp, Homo sapiens
ggaggagagaggcctttagtttgtatcaaaaccagaagaactgtttatcttctatcaggtgacaacccttcattcctttacttaacacattgattagcatctgctatgtggccatgtgctaggcagggccactttctgagtcctgcgaagtcagttgcatagtgtcctgcacttgaaagtgccccgcattcggtttaacactctgctgtcacattaataaygatatctttacacttctgtttcgtcagcgaagtcctgtaggacaagggggcatgcacaggagcagaggagccacacgtgatgtgtgtggctgccgttccctgccgccccattcacataatcttctccatgcccctggggagccatgctgtgggaagtgcaggaaactc

SEQ ID NO: 787509 - DNA, 389 bp, Homo sapiens
ggaggagagaggcctttagtttgtatcaaaaccagaagaactgtttatcttctatcaggtgacaacccttcattcctttacttaacacattgattagcatctgctatgtggccatgtgctaggcagggccactttctgagtcctgcgaagtcagttgcatagtgtcctgcacttgaaagtgccccgcattcggtttaacactctgctgtcacattaataacgatatcttyacacttctgtttcgtcagcgaagtcctgtaggacaagggggcatgcacaggagcagaggagccacacgtgatgtgtgtggctgccgttccctgccgccccattcacataatcttctccatgcccctggggagccatgctgtgggaagtgcaggaaactc

SEQ ID NO: 787510 - DNA, 389 bp, Homo sapiens
ggaggagagaggcctttagtttgtatcaaaaccagaagaactgtttatcttctatcaggtgacaacccttcattcctttacttaacacattgattagcatctgctatgtggccatgtgctaggcagggccactttctgagtcctgcgaagtcagttgcatagtgtcctgcacttgaaagtgccccgcattcggtttaacactctgctgtcacattaataacgatatctttacacttctgtttygtcagcgaagtcctgtaggacaagggggcatgcacaggagcagaggagccacacgtgatgtgtgtggctgccgttccctgccgccccattcacataatcttctccatgcccctggggagccatgctgtgggaagtgcaggaaactc

SEQ ID NO: 787511 - DNA, 583 bp, Homo sapiens
tctggatgtctaaatctctagcaagacttgggaagttttcctcaactattttctcagataggttttacgaactctagtttttcttctccctcaggaatacctctgactcctagatttgaacattttacataatcccatgctacttgaagtctttgttcattttaacaaattctttttttctttatatttgtttgactgggttaattcaaaagacctgccttcagactctgagattctttcttctgcttgktctagtctattgttaaaactttcaactgtattttgtatttccttcaatgaatttttcatttctagaagttctggggttttaaatatatctatctatctcattgatatatttttccttcatgttctaagttgttcttttgatttctttgtgttggtttccaactttctcttggatctcattgagctttttgaaaatcaacattttgaattctttatctgatattacaagaattttattttgattaggacctactactagagagttagtgtggtcctttggggtgttgtaacactttttcatactttcagaattatgtctttggttcctaatcat

SEQ ID NO: 787512 - DNA, 622 bp, Homo sapiens
tacttaatttataaagagcttctacaaattggcacaaaataaccaacaacccagtaaaagtggatggagactgtagacattcattttatacaagagaaattcaatagatatcttccattgttacagtaagcaccccctcttctcattatttctgtcttaatagccttcttatttctatagtagcatttatttcaacttgttattttgtctctttgctttacttgttttattcttcattttctctctaagattgtgaatttattggagaaaaggattatgtctttttcttccacagttgtgccaagcacagtgctgtcaaatacgaggcatctgataatgttcgattctattccaggttgttctcttcctccaccagaaaaataccttctaaatagtgttccttatcacttctatcaaacatattcagcttttttatactaaactgtatagatgggcagacatttacatwattaagaagacatcatataaatttaccaagtaactgggctatatacaatgtgaactgtgtaattaggctttaaatagtcaacttcaagtacagggcatgattagctagcagggacttaaaaattataaaaaagtgtcagaagtagtgtgtttg

SEQ ID NO: 787513 - DNA, 633 bp, Homo sapiens
attcaagacaaacagttccattgagacatctacctacttttgagcagggttgaaagaacaacagaattgaatcactctaagcgaagaagcagagtgtgtgaggtctaggcagaagcaagataagaggagttccggaggagaaaagtgtgtgactcattgggcaggcatcacatctcttattcctgacaccctctcaccctagggttgggtgagtcattcccaatgaggagatatacaagcaactcccagaagaagcctccatggaatgactcctcaggtcccagatgtcctccagagcaacagaacctatgagtggctaaggtcaacagaaagcaacaatggaccccaataatctgcaagtgatgttgagggttccttaagaagggcagatagaaaaaggcagaaacaagactatcttcaaccaagttgcrtagaaaagtctataacttctgatattcttcagacatttgagctgagtacctggaggtgaaagtcaaatagagggaatcatttgaaagcatgagctccagaaccgcacagactgggctcaaattccagcccatcccttacctcctctgtgctctgggcaagttccttgatcttcatgtagaaggaatcttaattccttcatct

SEQ ID NO: 787514 - DNA, 523 bp, Homo sapiens
agatagatgaaataatgataaattctgatgtatgctatatagaggaaaagcaaaagactgagacagagaagaataatgggaatatgtggggaccactttagaaaatggttaggataggtttctctgaggaagtaatatttaagtgacccctgaatgatgagctaggataagccatgggcaggttggtggagtgtccaaaggagagaggacagcatgtacagtgaccccaagtcaagaaagagtgagaaaagaaagtatggcagtgtggctagatggtggtgagcaagcccaaggcaagcaaaacacaagggagatcagaaaagtaggcagggcccatgcatggatggcrtgatgtaccctaagatatgtagattttattctctgtgcaaataaatcttttgaagggcttatccaggactctcatttggttttaggaagacccctcctgcagctctaggtaatggtttagagaaaagggcaggactggagttgtagtgtgttattgtccaagagtggagatggg

SEQ ID NO: 787515 - DNA, 566 bp, Homo sapiens
gacattttataattagttcagagaatcaataaatgatttatagttttcacaaatgaacttgaggacaatgtaaccgtgatggtacttgggcattctcagttgcgggactatgaggagcaagaaaggacgaagcttgttgagagatttgaagtctaggttacatataagtatgttaaaattaaataatgacaaagatagatctagaccatattgtggaagtcttggaaaccatgatgagtttttatttaatccaktaagcaacatggagccattaaaatcttttaagcagaaaatcttagattaatattaaactgcacttcagaaaatgtattttgacagcaatatgtaagatagatagaagtaaaaagaggtcatgtgggacagtggtgtagaaatgctgacttcattataatctaagaaggagaactgacttagtatattatctttctccagaaggaaaacagagactaacagatggtagaaattttaggaagcagattttaataataccaacagttgcagtaaacactgtagtagtaataagttttttaaaacctttaattgta

SEQ ID NO: 787516 - DNA, 599 bp, Homo sapiens
cccaaacgtccctcctctaggaagccctctttgtcaccccagtcttaccactcagtctgggttcaaagtccttcctctgggttcatgcacttgcctctgacctatatttatcatactgcattgcatttgtcccatggttggtccgtttcttgcctaccaggtggtgagctccttgaaagcagagatgcaattgtacacctctgttttcctagtgcctagcacagagcctgacacatagtagaagttcaataaatgttcgttgaatgaatgaacgatgaaggattgaatagggtgtatgtgttttgtaccatatgtaatgccacaggagttcagaagaaaggcagagcccagggctgaatagaccagggaagattttcttaagggaatggcgtatgagctgttctggtgagatagccaatgaaatcactcatgggtatcatgaagaatgagaaaggggcagrgctaggaccctcatctctctctctctctctctctctctctcctttttttttttagacggagttttgctcttttgcccaggctagagcgaagtgacacgatctcacctcactgcaacctccacaccccagggttcaagc

SEQ ID NO: 787517 - DNA, 627 bp, Homo sapiens
ggtcttaggaccacctctctgcaatgtctagagagtggtatgagccctttgaggagcttcctaggaaataaccaaacactgaacatttattgagcattaaccttctgccaggcactgtgtgaagtgctttatctccaccctgttaccccatcctcacaactgctcctcgaggtaggcacaattgtgcccatcctgaaaatgagggagccaaggatacgtggccataacttgcctgattacagttagtgagtagggaccaggatggaaacgtgtgtttatctgacttctgagccaggatcttaaccaacacgctgcagctgtgctgtcccatacagtgtcactggtcacacgtagctgtgtacacttagatttaaattaattaaagcaaagtcaaatttaaaattcagctcttcaaccatgctgccmacatttcaagagctcagtagtcgtgtgtggctagtggttaccatcttgggcagcaaagctatagaacattttcaacatcacagaaagttctattggacaatgctgtgccagaggaatggatcattattgactttcattcgtcatcacaaatgggatgatgagaaacttttttcttgccctagcctcttttcctgttttcca

SEQ ID NO: 787518 - DNA, 621 bp, Homo sapiens
gccactctcaatcccccctgcttctaatccatgtctaagctgcttctgttcaactgctttactttacatgcatttctctttttcttgcagagggaaagtaacacggcatatcgtggtcttttagagaactacttcaagatatattgaagtcaaatgtcagaaaaataggttttttaaccacataccattaatgtaaattagtccaatagactcctgagtactgtgttacacagtacaaaacccaaagcagatgcataataaaatacctatgtaagaatgttgctcaaatttctagctccctttaccaatctagctctaaactcttatcaccttttatgttacaagaacagggtacctagttgactccagtgtctagaaacagagggaaaaaaagaaagtggtaagaagtaaacatgatacagaaggacataaagataattcagaaaaraaaaaaggcaaatagcaagcctatgaaaacatgttcaacttcaataagaatcaagtttgaattagagcaatgagacaccagttttctcctacattcaaactgacaaatgtcttcttaaatgattgtaactaaatgatggtacttcaaggaaatgttgttagtgatttcaacaa

SEQ ID NO: 787519 - DNA, 581 bp, Homo sapiens
tctttggcacacttcacaggccttgactatctgcttgatagttttgaaaaggcctggtctagtaaataataatttgaccatctgatgggtgctattaatgcctaagagaaagatatggtgaagggttttaagtaatttccattggttagctgcaggcataagtatttttccttcttcggtggctggccattctgaggggaggaaactatgtcctcgtgaggttccccattctrtttcttctgagtactggggcttggtttcctggaggggattaccctatactagggctccttctataagcatttctaatggagggtcctgccttgtggctcttttggcttcaatatccgcttggtggttcctttctatttccctttcctttcctttctggtgaccccggcagtgtaagactgccacctctttaggtttctgtacagccaataataatctcctaatggcttcctgatgtttgataggtgttccctcggaagttaggaattcccttcctctccatattgctgcacgggcatggaggactaggtaagcatactgtatatatatttacccgaaaaggtgaaagt

SEQ ID NO: 787520 - DNA, 582 bp, Homo sapiens
aagcaagtatgtcaaggcaaaggatccttctcacttataaatgtgtataaaagaaatttctttttcctccccctccactccttctatttctgccctatttttttccaggaagaaaaaatgctgggcatcttggtgcagcacaaagtccggagtggcgtctcgggcatcgtgggcatggaggtggatgggctgcccttccacaacacccacgccgagatgatccagaagctggtggacgtcaccacggcacaggtgtaaccgtccatgttccgtgtgagcagagtccctaccaacgggcaggtctgcatccggggagaatgcagctgcttctggcgacaatcctgctagtaaacactggtcttcggtgagcaacgaacactcgcctggcctgggaaactgcatgcccactttctgggaggggttagtgcaggtgcygtggacaaaggacaacatttctctggggctttttaacttttattcctaagactctaaaggcgttgatttcaaccctccttcactctggcttcttcaggcaacccacgtggtctcctgtgagaatcttctcgacagttacttatgggg

SEQ ID NO: 787521 - DNA, 651 bp, Homo sapiens
tctcagtcttggctgttgtggaggtttcagcaaagagaagagagatgagccctctggaaagcagatggagacgtcctcgcaggcagcagtaggagtgcatgcctaatgggcacaccggcctggacgtgcttggcagggagtggctggggtgaggctggcaggccagcaaggactgggaagggcttggagctcccaggctggagcagcacagcacatccagggaaggcagtgagcccggtggggcagtggcagatgaaggaggggagacaggacagaatcccaggcaggaggtgccttggaggggaaaagaraggcagcttcgaagggaagcctcctgcaggcaggctcaccaggcgcccctgctagccaggcctggcacacaaagatgctcagtaaacgcatgggcacagtggctcacacctgtaatcttggcactttgggaggccaaggcatgaggattgctttgaggtcaaggaggtcgagaccagcctgggcaacttagcaagactctgtctctaaaaaaaaaaaaaagaaagaaaaagaaaaagaaaaagaaaaaatagctgggcatggtagtgcatgctgtagccccaattacttgaaaggctagggtaggaggatccttgagcccaggaagtcaaagttgaagtg

SEQ ID NO: 787522 - DNA, 639 bp, Homo sapiens
gctcctagggcctggtggacagatgggaacaccacatactctcatactgttaccctacttctggatgggggcttggaagttctcatttgtaccaagagtcctggtaatgtggtaaccgtctggcagagccccaggtgaaattactgtccagagagcctcctggtttgktaacttacctacctgcttctccactgaatcaagctttggacttttgtcaaaactttctctccaaatattccctatagatctgtgtgtggtaggggggtgagaaattaagcgttcctaaaaaaactagagaataaatttaaatctcggaaacagattttctttttgtccctagttttacccctctcacacccctccatgatggttcatatttaataaataaataaatcaggcgggtgtggtgggtcacgcctgtaatcccagcactttgggaggccaaactgggaggattgcttgagcccaggagttcaagaccagcctgggaaacacagtgagactctgtctctacaaaaaataaaaaaattaagcctgggcaacatggacaaaaccctgtctctatcaaaaacaaatgaacaaacaaacaaaaaatcccccaaaatcagccaggcatggtggtgtgtgtcgatagtccca

SEQ ID NO: 787523 - DNA, 527 bp, Homo sapiens
atatgtatatatgcatgcttatatatgtggaatgggttataaaatgatgttaacatttggagaaactgggtgaagggtgtctggggattcttgatactgttcttgcaactcttccgtaagcctgaaattacatcaacattttttaaaaggggaagaaaggtgagaagatggattttttgtaggctagtgaacttgatggagttatttgcaaggtmtctttcagcatgctacatttttggaagattcaggcatcgggacagtaagctttctaaaaataacgaatgaaaggagttgactctcttacaagtgggataatacccattgacttattatattttcatagtgagtgcttctgcaacatatcttcctttcctttcattctgtttattttctttgttttcaaattgctagctttggcagacttcctaacctaagtaagatgagaatgaaacacctgaattctccttagtgctcctatttcaaccattgtcataattcacaacttgctgatgctgaaactgggatgt

SEQ ID NO: 787524 - DNA, 527 bp, Homo sapiens
atatgtatatatgcatgcttatatatgtggaatgggttataaaatgatgttaacatttggagaaactgggtgaagggtgtctggggattcttgatactgttcttgcaactcttccgtaagcctgaaattacatcaacattttttaaaaggggaagaaaggtgagaagatggattttttgtaggctagtgaacttgatggagttatttgcaaggtctctttcagcatgctacatttttggaagattcaggcatcgggacagtaagctttctaaaaataacgaatgaaaggagttgactctcttacaagtgggataatacccattgacttattatattttcatagtgagtgyttctgcaacatatcttcctttcctttcattctgtttattttctttgttttcaaattgctagctttggcagacttcctaacctaagtaagatgagaatgaaacacctgaattctccttagtgctcctatttcaaccattgtcataattcacaacttgctgatgctgaaactgggatgt

SEQ ID NO: 787525 - DNA, 624 bp, Homo sapiens
tgggctggtaaccctcccgttgggctcccagagcacctgtgtgtcctactgggggccgtcctcacagctcagggttgagtctgtgtacttgtccacggctcccgcctcactgtgcaagccctgacaccaggggctgggtctacctacctctcccaacagcccttgaaaccagcacagcaccaggcacagagctggcatggctcaatgctccacagggtcaccgaggatgtccccagtccccagggcttggtcctgggcctgcttttcttctcccactaatcaytctcacctcctccctcacggcctccgagagggataagaaacagtatcctctggtaacctgagcaaggcagcatcagggaagggttggggcagaaggaacccacaacccggagctgaccacagatgaccctttctggaatgcaacaaagggaattacagaaatctgcacacaaaaaaaagttcagcctgtaacctccctccacttcactattattccagcagtgtattcctaagagcatctgaaagcagaagttttcattcaagtcttaccttgaaagttttatccatagaagtggagagaagcatgtggctcttagaaaggactggacaccactgaatggt

SEQ ID NO: 787526 - DNA, 673 bp, Homo sapiens
atcaacataggttccacttcctggagagtgaccaggctgctccccttttgttggggaatctttcgtgtcaaggtctttagatcttttctttaaagttaagtgagattccccagagaaagctcccccagtccactgttcagagggggtgagtcccgctgccagagttctacggctgagtgggagagaagggctgggctgtgggatccttccccgaagctccctattctctgtgtgctgccagtgccccaactgtgcagactgcccccagtctaggcacctgtaactctgtcctctcttgacatgaaaccttggaatggaggggaaactgtgacactcccttggccgaggggagagggattctcaataactgcttcttgaagagacttcaaccagcgctcctgttttcataacccgctttcctgcccccactcctgtaagtgcscaaggtcactaaggcccgaacctttgggtgattccgtaacagtgtacactcggtcaccttccagtatttccatgatgtcttagcatttgtttttctctcatgctgttaggcactgatcattcatcagctttctggcttctgaaaccttgttgctgtcatcctcttcttgtttcctttgtccttgtgggattatgctttaaaaaaaaaaaaaaaaaagaagatctctgcttt

SEQ ID NO: 787527 - DNA, 565 bp, Homo sapiens
acagcttaatagaaggttttccctttttttgagcacttcagaacttgggaaaggtctattgaaatggccatttataacatttagtggctacaagtcaatcatagattacttaggtttcacctccagtgatactgactatggacctagaaggctggaagtcagcttaagagcagtgacttctcacatcgggcaagttcttactgtcatgcccttccttgagggccttcctgctcaggaaagactgttgccattccattgaagtctttactctgagatcattgctaattatcagagaagaaacagaactraaatgttttcatctaagtcaaagccattttccatgatttcagtatagactatcaatgagggaaaattcacttgaagaccgacattaattcagttcaacaaataaagaatgtgagaaatcatggttgtcaatgaatataaattttaccttaataaacaaatatatatatatatacctatttatatatgtatatgtttatattttgttgtcaaaagttgctagctggactgcattctgaatatgtttcccatcagaacc

SEQ ID NO: 787528 - DNA, 565 bp, Homo sapiens
acagcttaatagaaggttttccctttttttgagcacttcagaacttgggaaaggtctattgaaatggccatttataacatttagtggctacaagtcaatcatagattacttaggtttcacctccagtgatactgactatggacctagaaggctggaagtcagcttaagagcagtgacttctcacatcgggcaagttcttactgtcatgcccttccttgagggccttcctgctcaggaaagactgttgccattccattgaagtctttactctgagatcattgctaattatcagagaagaaacagaactgaaatgttttcatctaagtcaaagccattttccatgatttcagtatagactatcaatgagggaaaattcacttgaagacmgacattaattcagttcaacaaataaagaatgtgagaaatcatggttgtcaatgaatataaattttaccttaataaacaaatatatatatatatacctatttatatatgtatatgtttatattttgttgtcaaaagttgctagctggactgcattctgaatatgtttcccatcagaacc

SEQ ID NO: 787529 - DNA, 552 bp, Homo sapiens
ctgaccaggctggtcttgaactcctggcttcaagtgatcctcccaaaatgctgggattataggtatgaggcacaatgcccagcctacttgtctactttctacggttattggaaaaatcaaatgagattgatatgaaatgtttcataatctatagaatgccatgcaaatataaatcrttattgctcatgtttgctgatttacatattagctaagcctgtgactctgtaacactatattagacttccataactgggttagcactttgctgatccatgaacatttgtcatggtgcatttgctttttagccagatgttggttcaactctaggtttgtcatgaaaaacaataaagacgctaaatgcaagagcatctatttatcgctcctgatgcaagggatagagtcaactttttatctaaacggccagatagtaaatattttagcctttgcctaaaatacagtctctaacttctatttagctctgcccttctagggaaagcagccatagataatatgtaaatgaatggacacagctctcccaggttggagtgcagt

SEQ ID NO: 787530 - DNA, 547 bp, Homo sapiens
gttatgccctgtagtcaatctctaacctatcctgttaagtaatttctctcctcatccttcaaaaagcccctaaaatccagcctgggcaacaagagcaaaactccatctcaaaaaaaaaaaaaaaaaaaaaaaaaagaaaaagaaagaaagaaagaaagaaagaaagaaaaagcctctaaaatcctatgtaacattcctcgagctttgtactaggggtatagcaatgttaacacttttcctggtgttaatcagaacaatacttctattaacaaaaacaacaaacctgcacatatattccctgaatctaaaataaaaattgaaaaaaaaaaaaaactmcaaaaaacaaaatagaaaataaaaatgcaatcatccaaataaattaagccaaatttgaaagtatttaaatgtttttctcatactgcatgaaaagtgttaattattcaaaccaaaaattagcttattgcttacacttcactgtagcttgcaagtgatcttttctagtcttttttttcttctttacatttttaataattttggtactgctgct

SEQ ID NO: 787531 - DNA, 615 bp, Homo sapiens
gcactgtagggctcgaccttggtgtcactttgggtgaaggcactacactgaagatgttcacaatgcaatcagggtactcttctcagatcttgctaatgagagtgcccattccagagcctgtgcctctgcccagtgagtgggtcacctagaagacctgcaggcagtcacagttctctgtctccttccatactgagagaaagaaaagaaaattattatgattacctagaattgctgtttaagctgaaataggcttttgataacygcacccccaccccccaaagttgaagttaaagaatattaactgcttctctgtgaaacattaaccatatctctgctctgcatattttgtaagctctgtaagttcctgtttttcttgctgtgtagcgcaaggtcacaagacagataagtgcgagctgcaaaacgtgttttctaagatttaagacctgtcacatgattaatggcttttgttctcgcttctgtaagcctgctttctgcttcacgtttttcctcccttgagatgcttaaaagggcctgtgtccctctttgttcagggctcggactttctggatgcgagtccactgagctggtgtacaccttaatcctcctgtaacccta

SEQ ID NO: 787532 - DNA, 647 bp, Homo sapiens
cactgccctggccttcccctcaccgccccttggcccacttgagagccctcagctctggccagcatggctgaagtacgtgcacccttccacctcttctctccctgctggtccagccctgccgacccttgagagaaacgagaaaawcagtgaccccaaggaatcccgtaacttagagaactgagtgggagaagcaaggaatgggtccctgagtggaaggcctcagtgagtgccaggcccccaagggtcatctccacaaaagaatgcagggggcacagccctcatggtcccattgttccccggccaggtgaactgtgtggtgatgcgaggccttaacgaggatgaactcctggactttgcggccttgactgagggcctccccctggatgtgcgcttcatagagtatatgccctttgatggtcagtgaccagggatgggttgagggagggaagaaggggttgggcctgcaggtcgcatagtgtggctcacccactgggtatggctgacctcaggggcagtgagtctaggattatgatgggctgttggtggcttctcggagcccgctgtggatgtgattcaatccaccagttttaggcagagcccccgtccctcccttccaagaggctggagaactgattgctatgctgtgg

SEQ ID NO: 787533 - DNA, 631 bp, Homo sapiens
atgtctaagattgttaccagatggagaatcttgactatgaatcatccaggttattggcgcattgaacaaagaattgggcaaacacaaaccaacagaagaaagtgtaaattcattgatgcaaaagtacattctagagkgggagtgggctcaagcaagcagcctgagagccctgattgtaatgtaccttagtttttattaaactaaaggaatttggtaacccttctaggtactcattagaggcctccaattggttataccctatgtgagtgatgtcttgtcccatggccaatcagaggcgtttcacctttgtgacataagagaaaagggagttttgtagagggaagggtctttggcccccttagcatttgggtgtggaggggtgtggtttctcttctgaataacttccaagaagtcacccttagattggccttagactccttgtctccagaccgtcttctgcctcaagctctgaagggggagggtaactgctctgataccgtttggctgtgtccccacccaaatctcatcttgaattgtaactcccactattcccacgtggtatagaaggaacctggtgggaggtaattgaatcataggggcaggtttttcctgtgctgttctcctaatagtg

SEQ ID NO: 787534 - DNA, 608 bp, Homo sapiens
tggatccaaatgggtaaagaggaagtcaaactgtcactgtttgccaatatgatcgtatacctagaaaaccctaaaaattcatctctaaaaagctcctaaaactaatagatgatttcagtaaagtttcaggatgcaaaactgatgtacataaatcattagcactgctgtacaccaacaaccaagctgagaaatcatagatctcaaccccttatacaatagctgctaaaataaaatacttaggaatatagctaaccatggaagtgaaagacctccacaaggaaaattacaaaacactgttgaaagaaatcatagatgatgcaaatggaaacatatcccatgctcataggtgggtagagtcattattgtgaaaatgaccacactgccaaaagcaatctaaaattccttgcaattcctatccaaataccaccatcatccttcacagaactagcaaaaacaatcmtaaaattcatatggaaccaaaaaagctcacatagccaaagcaagactaagcaaaacgaacaaatctggagacatcacattaaccaactttagactgtaaggctatagtcaccaaaacagtatgatactgatataaaaataagcacaca

SEQ ID NO: 787535 - DNA, 642 bp, Homo sapiens
gtctcagctacttgagaggctgaggttggaggatcacttgagctcaggaggtcgaggctgcagtgagccaactgtgattgtgccactgcactgtagcctggttgacagaatgagaccccgtctctaaatagatagatggatagatagatagatagacagatagatagatagtttgctgagtactaagtcactttttgatctaaagagttaattcttcaagtcaggaaattttctttatatttctttaatgattgtttctccacgggctctatyctctatttctggaatgcctattatataggtatatttgatttctggatctttcttttctttctctctcttttagcctctttatttatttatttatttctgagttatagggaaagttctcaaagcaatctttccagatttggtttttaattggaaaataaatttcctgtttttgcatattttccatattcatatatgggttgacttttggaattctatttacagtataaattacagaattttactgtttttgtttcttagattctagtaaccctaatgataaagatataataacttacatcttttttcgtatgtctagaaattatcatatatttgctcactttatggagggacctagatctacatttgttt

SEQ ID NO: 787536 - DNA, 647 bp, Homo sapiens
aggtaagagctttgtggtgcagatacctgttgagccagcagtctctttctagaattcaatcctaaggaaataatcaaagactggatcattttctcaacaaagatgttcatctcgtcattatttgtaaaacaaacattggaaacaaagtaaccaccaataaatagtagattcaataattatagcataggacaggcacagtggctcacgcctgtaatcccagcactttgggaggccgaggggggcggattgcctgagctcaggagttcgcaaccagcctgggcaacacggtgaaaccccatctctgctaaaatacaaaaaaattagccaggcatggcagagtgcgcctgtagtctcagctrctcgggaggctgaggcaggagaattgctttaacccaggaagcagaggtttcagtgagccgagattgcaccactgtactccagcctgggcgacagagcaagactcatctcagaaaaaacaaacaaaaaaaattatggcatattgataaaatggaaaattattcacacattaaaatgatgtcaacaagttttttgtaacatagtaggtatagttatgatatgaaattaagtgaatcataagatataaatgtgcacatacaatatgatctcaattacataaaaatatgcat

SEQ ID NO: 787537 - DNA, 647 bp, Homo sapiens
aggtaagagctttgtggtgcagatacctgttgagccagcagtctctttctagaattcaatcctaaggaaataatcaaagactggatcattttctcaacaaagatgttcatctcgtcattatttgtaaaacaaacattggaaacaaagtaaccaccaataaatagtagattcaataattatagcataggacaggcacagtggctcacgcctgtaatcccagcactttgggaggccgaggggggcggattgcctgagctcaggagttcgcaaccagcctgggcaacacggtgaaaccccatctctgctaaaatacaaaaaaattagccaggcatggcagagtgcgcctgtagtctcagctactcgggaggctgaggcaggagaattgcttkaacccaggaagcagaggtttcagtgagccgagattgcaccactgtactccagcctgggcgacagagcaagactcatctcagaaaaaacaaacaaaaaaaattatggcatattgataaaatggaaaattattcacacattaaaatgatgtcaacaagttttttgtaacatagtaggtatagttatgatatgaaattaagtgaatcataagatataaatgtgcacatacaatatgatctcaattacataaaaatatgcat

SEQ ID NO: 787538 - DNA, 613 bp, Homo sapiens
ggtttttggctgcatttgtaatggcagaaatttaaaggcagccatgtcagggttaacagttacctgccacctgacccaagaggatccatgtagcttaccatggtgtctccctgtccccttcatccaccagccaatcaggacctgacagcagacactgatgaagctgcactggaagagacacttcattagacagacggagtttagcctgctgagcagtctgcctcggcctctgtgtgtgtatgtgtgtgtgtgtgtgtgtgtgtgtgtgtgcgcgcgcgcgtgcgcgcgagtgtgtgtatgcgcgcgcgagtgtgtgtatgtgtgtgtgtggtaagtacatagctgtttggggcagtcaggagataacgatcatgatgtaggactggagggaacccaaagaaaagcaccacctscatgaaagcccagctgttccccctggctgaacttatagaggcttttgccaaacattctggattttgccactgaacaaaggggaagggggaagaaggagaactgtcagtatgaagagagattatttccttgggctttgtccccggcatctcacagggcctctggatttgagaacttgccctgtttgttactctctgtggtc

SEQ ID NO: 787539 - DNA, 584 bp, Homo sapiens
ctcaccagcccctgctgtaagaccttaatttcctagtctatgggatgagaataatgaccatgcccacctcattgagtggctttgtggattaaatgataccatgttaatacttagcaaagggcctgtacacagtaagtactcattaagtgttagctataattactgtagggcatgtgcaggactggtgaggtggtaaagatgtaagagcctcacaagtgtctgggctgtgctgtttccacctctctataccatcttgatgctttgccctccattgccttcctttccatggccatgggaatggccarcaaagggttgaagcctggtttatgtctgcactgcctgcataacccaagaaccagtgggcttgatcaatcagaggttctgagaaggactggacattgttagttacaactcatccaaaagattagcctgaggtgttcattctcttatggatttttacacattctgcagagccagtgaagggaaaatgcttaattaatatcctgtttgggtaatttgcatctctgaggctctccagacacccactgggcctctacctggccaaggaacaatctttctgggta

SEQ ID NO: 787540 - DNA, 589 bp, Homo sapiens
taaccaattgaacttcattattttggttttcagtagcttttttaatatacaaaatgaatcatatattatacgttggtcaaaatatgtcaacaaacattttatttgtatttgaatttcttcctagccacctacaatttgtatgattttagaaatgtattttaaatgctttgagctctcattccttcatctataaaataaaatgttaatatcttccttgggggatttttgtgagaggaaaattagataatatggattaaagtactgtaacaaaaggcattgtgaatatctaattacatgctggatatagcttgccaacattaaatatttatgtatgtatgagacaaatattcatttcacattgtccctgaatcctttgagaggaartgttctcttagtacctcgagcttaccaaattttattgtaattgtttatttactcacttgccttctccacttgccactgaggacagaaactgttttggtcaccatcttattcccagcacagagtaggtgtttaagaaatacttcttgaaaagatgttgaatgaaattgttcaaaagaacacaatttcaaagtgaaatgcagagaaa

SEQ ID NO: 787541 - DNA, 376 bp, Homo sapiens
tggctttctatccattcatccatttattctaccatccatatgtccatcatttgatgcttcactgcctgtccatccaccaaatccatccctctgtttatccattcattcagccatccttccttgaaaggtcatcaccacaaaactcccttataagaattagagattttttaaaatgtttctcatcttcatttggctactcatctgaaaagccaaggtcaaggttacwaaatggggtcagtgaagcaacaggacgtgaacccaggagacgtgcttctcatcttctcccagtccatggtgggcagttcagcagctgtttcagccactgggcagcctcccaaggcccattttgggaacaatgagtccagtaatcaggcca

SEQ ID NO: 787542 - DNA, 613 bp, Homo sapiens
gtcataggcagatacaaagattttctgatttgcaattggttaagggaaagaagatttgtttaaaatgtttgggacagcagaaaaaaaatgttagctctggtccgtgggcatgacttcctccaggcccctaaagaagaattttaggacaaagaaagatggtcagagttcagtcctcagttcccccttatctgaggtccatgtgccagtggatcctgtaggtgggggtctagatttctagaaaacacttcagggacatatgttaagatgatatctttggtttctatgggaaatgtaacatcctgtgactctaacttccttggctatttttttaggttactattaccttcttgcttaygaagttgcccatttatttctcagggctagcgaggtgcctggaatttcccttgaaggaactcgggatttttctttatttccatgcgtggagggtcccacaggatcctaaaaggggtccctgctccatctcaggtctactgtctctggtactggccatgctcttatattgtcaatgccaagcaactttcagtcttcatcttactgtgtctctttgatgcaggccatatttgtgctctctccttgacacaattcttttcct

SEQ ID NO: 787543 - DNA, 568 bp, Homo sapiens
tttgcccatttttaataggattatttgttgttgagttgagttccttgtatgctttggatattagtcccctatcagtgaatagtttgcaaatattttctccccttctacacgttgtctttttactcttttgtttcctttgctgcgcggaagctttttagtttaacatagtgccatttgcctatttttgatttagttgcttgtccttttgaagtcttagccataaaatctttgttcagaccaatgtcctgaaatattttccctgttttctttcagtagttttatagctttgagttttatgtttaagtctttaatccagtttgagttgattttcatatayggtaaaagataggggtctagtttcagtcttctgtaaatggttatccaggtttcccagcactatttatggaagagggtgtcctttccctagtgtatgttcttggtaactttgctgaaaaatcaactggctgtaaatatgtaaacttatctctgagttcactgttctattccattggtctatgtccaacccaaggttttctcaggctttgtataattttgtactgagcaagca

SEQ ID NO: 787544 - DNA, 636 bp, Homo sapiens
ttatatcattgggtgaaaggattgtggagaaccttaaaatggataaatggatggtgctgacacctaaatctgcagttgaatcttaacatcactaaacttagaagtcctagacagtatgtgcctcctctatggtataataagaagtgcacatcacatccgatttatgcttatcacaaaaaaaattgaacttgaatttagtttaagcttctaaatctaattgccaatttataagaaatactggggaatatagaaacataacaagaaagtcaagtgacacaagaaagaagcaatcagccaaactcaaaatgtgagaaatttttcaggatgcacaacctatttatttaaaaagtaaatgatgtgaaagagtacaggggttgctacagattagaagaaacttaagagacaaaccaactaaatgtgtggatttcgtttgcatcctaactcaaagaaatcaacttgaaagctgttgggagwaaagctgagtgttgggagagaagctgaggcagggctagcatgtctgccagacttgctggctccttgtttctagcactgccgttatctcaagcagccatatgtttcttattcacttgatacactgtttcatttcaacccccatcctcaccacctgtttttttg

SEQ ID NO: 787545 - DNA, 573 bp, Homo sapiens
taaaagtgcattgtaaactgatgaacactaaaacattattgctgttgttatttaaagtagtattaactttatttaaagtagtgttactttagtaacactaaaacattattgctgttgttatttaaagtagtagtgaataatcmttttgaagaccaaaaagaggaatgggcatgacattaatattccaatggatcactcattctatcatttaagaggcataatctatgaataataacacacaccttggaaaatccaaaaatagaattagaaaatacaaagcaatatttcactaactgtcctttttccccccaaaaggatttactaaagactttcttcagttacttttgtattagtttatatatcctcactatttcagaacaaaggaatataaagctgatgttaggagccattgttttcagatcattccaaagtgaaaatatagttctccatggaacataaagaagtaatattcaactcatacaacttttgtgttgctgaaagctagacacagccttgcagtcagccttgctgtaagtagttattggcatgtagagctgtatgggactctctgag

SEQ ID NO: 787546 - DNA, 606 bp, Homo sapiens
tgtaaacttagaaattcaaaagagaaggtcagcaatgagggcagaggtatttagtgaaagatgtttgcttatcgtatgtcacattttgaaaggtatttatcaaaatctggattctctagattcttagtaactttactggttcgatttggtttctgagccactatgatacgcttctgtcattgctttacaataacactaagaacagaaatagactaggaaactgcacaacttataccactattcccaccatctagcgttgtacatggtatgtaatagatgctccataaatactgattaaataaatgaaaggagattttaagtgatttttagtaggtgagtggagtttggctacctgsaataagagtgcctagggagcagcaagatccaaggtagattagaggaagaataattttgatgctatgggcagagtgaatgttgggaagagcagttaatgagctttatcaaaggctggccttctccaacattctttagttcaagtgctttacgttcagattcttaaattctccttctaattaaaaagtcctcattactcctatcttactaattctgaacactgaccccactaccatcatcagcctaatgtgc

SEQ ID NO: 787547 - DNA, 606 bp, Homo sapiens
tgtaaacttagaaattcaaaagagaaggtcagcaatgagggcagaggtatttagtgaaagatgtttgcttatcgtatgtcacattttgaaaggtatttatcaaaatctggattctctagattcttagtaactttactggttcgatttggtttctgagccactatgatacgcttctgtcattgctttacaataacactaagaacagaaatagactaggaaactgcacaacttataccactattcccaccatctagcgttgtacatggtatgtaatagatgctccataaatactgattaaataaatgaaaggagattttaagtgatttttagtaggtgagtggagtttggctacctgcaataagagtgcctagggagcagcaagatccarggtagattagaggaagaataattttgatgctatgggcagagtgaatgttgggaagagcagttaatgagctttatcaaaggctggccttctccaacattctttagttcaagtgctttacgttcagattcttaaattctccttctaattaaaaagtcctcattactcctatcttactaattctgaacactgaccccactaccatcatcagcctaatgtgc

SEQ ID NO: 787548 - DNA, 620 bp, Homo sapiens
gtcttcttccaggatatattttgctgcagcttgttattcaaaaggtccagcgctttgcggcgaacagatggcaggggattgcccaccagccctctgatcacaggaatgaatgtctctgtgggcagcaaggcattgacctaaagagaaattttatatttaacatgaaaagaaaaacaaattaaaaaaaaaaycaacttcaattaagacagactgctgtccactgcacacctccaggcaccaggcacttccacacacattttcttatttaattcttaaaataacctttcaggtaggcattaccaaccacacattatcgaacaaaacaaaagcctgatgtcaggaggaagtgccaaaggcatgcagctaaatgactgagctagatttgaatcagcaatcctaacttcgaggccagtgatatgtatgtaatatacttcatacttttattttattccacttgaataaagtagaacagtatatattatatgacttaattattaaaatatacgaggtacatgttctcataactggtaaggaaacaattttttccagacaaatctatttctagtcatcaagagattgttttctaagaaaaatctgagcttcattatattcataaaagg

SEQ ID NO: 787549 - DNA, 654 bp, Homo sapiens
tctgggagactgaggcacgagaatcgtttgaacccaagaggcgtgggctgcagtgagctgagattgcaccactgcactccagcctgggtgacagagcgagaccctgtctcaaaataataataataataaacaaagccattcatagactttaaataaagatctctgctttaaataaagagtataggggctaaattatttttaaagggaagcaaaataggatataaaccactaaaccacggatatagtatgaccctcgatttataggtagggaaaaccatgcctgtaaagaagtaattcagccacaggtcacacagagagagtcaaacagagctgggatgggaacgcctcccctgtgcccaccccagccccagtccagttctctgcccgccccacccaagtggcacccaagtgccttctggttcaagacgagaactggacaaccagccagaggcagagatttcctctcygggcctaaaggtcaaacaactccagagcagcctatgcgtcaccaaactgtgaacaaaggtgtcgacacttccaagaaccacagggtctagcaactgtgtctgccacagacaagaaacttgcaatctggcaggcaccagcgggagagcaagtcacaaccaggaagggctctaagcaatatttcagaaa

SEQ ID NO: 787550 - DNA, 581 bp, Homo sapiens
acatatatgtgtatatacatacatatatatccacatatatgtgtatatacatacatatatatccacatatatgtgtatatacatacatatatatccacatatatgtgtatatacatacatatatatcaaaagatattttaacctgagatataacttattgttgcaatttatttaacatgaaatatgtaatgtgatgcaaatgataaactttaaaaagtcaaaataaagaacaaatgacctaatacattatgggaatagaattagagatacgtaagtgctaaagatagtgacatgatttgggatctgctgttttctgggcaaaaacagatccgtgtcttgtttttcttatttattttcccttctaaatgaataatatttcctaattaagtgagaaagatattaaattaatatacaagctataatgttttagaagttatctgtratattattagatttttttccattaatagatgcacaattactggttattacataatttcctgtttaaattcacaaataaaaattatatgtatttattatgtatattttgaaatatgtacacataatgaaatggctcaatc

SEQ ID NO: 787551 - DNA, 515 bp, Homo sapiens
gcgtaagttacaggacatgtttttcccaagatgtaagctgaatctcaagaatgttacctaatgattaactgctttagttcttgcttctgtaagcctgattcctgcatcaagtagttcctgccaaaaactgcttaaaaggcaacttctttgtctagtgctcagtctttcaggayacatgtccactaagccagtgtacaccttaaataaactctcctgccccccccattcagtctctctggtcccttaattcactgcaacatttctggtgctgaaacccgggactggagatggcagatttctgtctcctttgcctgtgggactgaggccccgggacagaggagacctgggaaacttggtgccaatgggagagcttcagccctgaaggggataggccctcccatgtcccggtgcccttccagacagtgcaacggaaccagtaaaggggattcctggatggcatcaggagcactgcacagacatctgaaccgtggtaaggtttgggccctgaggcagga

SEQ ID NO: 787552 - DNA, 515 bp, Homo sapiens
gcgtaagttacaggacatgtttttcccaagatgtaagctgaatctcaagaatgttacctaatgattaactgctttagttcttgcttctgtaagcctgattcctgcatcaagtagttcctgccaaaaactgcttaaaaggcaacttctttgtctagtgctcagtctttcaggatacatgtccactaagccagtgtacaccttaaataaactctcctgccccccccattcagtctctctggtcccttaattcactrcaacatttctggtgctgaaacccgggactggagatggcagatttctgtctcctttgcctgtgggactgaggccccgggacagaggagacctgggaaacttggtgccaatgggagagcttcagccctgaaggggataggccctcccatgtcccggtgcccttccagacagtgcaacggaaccagtaaaggggattcctggatggcatcaggagcactgcacagacatctgaaccgtggtaaggtttgggccctgaggcagga

SEQ ID NO: 787553 - DNA, 619 bp, Homo sapiens
aataaactctcctgccccccccattcagtctctctggtcccttaattcactgcaacatttctggtgctgaaacccgggactggagatggcagatttctgtctcctttgcctgtgggactgaggccccgggacagaggagacctgggaaacttggtgccaatgggagagcttcagccctgaaggggataggccytcccatgtcccggtgcccttccagacagtgcaacggaaccagtaaaggggattcctggatggcatcaggagcactgcacagacatctgaaccgtggtaaggtttgggccctgaggcaggacccatccctaaggacagaagggaagcctgatcacctccaggggagtgacaactaatctgacccagaggggctggggacaacaagagtggctcattgatttgaatgaaactcacaccccaacagagacaggacacgagagtggctcgctaagtcagctcggaaaagaaaaccggaggtggcgagagtggctcaccaccccaactaggaaactggaagtggcgagagtggctcgctaccccaaccaggaaagggagctggaagcagggaagtgtatgagtgtgtgtgataaagactgttccagaagga

SEQ ID NO: 787554 - DNA, 619 bp, Homo sapiens
aataaactctcctgccccccccattcagtctctctggtcccttaattcactgcaacatttctggtgctgaaacccgggactggagatggcagatttctgtctcctttgcctgtgggactgaggccccgggacagaggagacctgggaaacttggtgccaatgggagagcttcagccctgaaggggataggccctcccatgtcccggtgcccttccagacagtgcaacggaaccagtaaaggggattcctggatggcatcaggagcactgcacagacatctgaaccgtggtaaggtttgggccctgaggcaggacccatccctaaggacagaagggaagcctgatcacctccaggggagtgacaactaatctgacccagaggggctggggacaacaagagtggctcattgatttgaatgaaactcacaccccaacagagacaggacacgagagtggctcgcyaagtcagctcggaaaagaaaaccggaggtggcgagagtggctcaccaccccaactaggaaactggaagtggcgagagtggctcgctaccccaaccaggaaagggagctggaagcagggaagtgtatgagtgtgtgtgataaagactgttccagaagga

SEQ ID NO: 787555 - DNA, 619 bp, Homo sapiens
aataaactctcctgccccccccattcagtctctctggtcccttaattcactgcaacatttctggtgctgaaacccgggactggagatggcagatttctgtctcctttgcctgtgggactgaggccccgggacagaggagacctgggaaacttggtgccaatgggagagcttcagccctgaaggggataggccctcccatgtcccggtgcccttccagacagtgcaacggaaccagtaaaggggattcctggatggcatcaggagcactgcacagacatctgaaccgtggtaaggtttgggccctgaggcaggacccatccctaaggacagaagggaagcctgatcacctccaggggagtgacaactaatctgacccagaggggctggggacaacaagagtggctcattgatttgaatgaaactcacaccccaacagagacaggacacgagagtggctcgctaagtcagctcggaaaagaaaacyggaggtggcgagagtggctcaccaccccaactaggaaactggaagtggcgagagtggctcgctaccccaaccaggaaagggagctggaagcagggaagtgtatgagtgtgtgtgataaagactgttccagaagga

SEQ ID NO: 787556 - DNA, 632 bp, Homo sapiens
accacctcagcaacataaacaggttttaaaagctgagcagcaaactttggattattttaaaagagtgatcttcaaacatttttcttcatttgaactcaaaaagaattctgaagctttgtacctccttgtgtatttttaagttggtatctarcactattttgtcaaaaattgttttaatttttctagtggatggaaaatattggtatttgacaataaagctgtcatatcactcctttaaatgtacccattagaatataaatattatagacattcgataccctttattaactattcttttaaatacatgaataggcttttctttaacaacagtacattttgcaacattccttgttttccttgagcctattccactttccctacagaattatatttcaatgtaatgtgtttttatactttaaagtcttttcttgctctacctttcataattctttgcaataaaaatatgtgtatattggctgggtatagtggctcgggcctgtaatccaagcactttgggaggccgaggcgggcagactgcctgagctcagtagttcaagaccagcctgggcaacatggcgaaaccctgtctctactaaaaatacaaaaaaaaaaaaaaaaaaaaaaaaaaatta

SEQ ID NO: 787557 - DNA, 632 bp, Homo sapiens
accacctcagcaacataaacaggttttaaaagctgagcagcaaactttggattattttaaaagagtgatcttcaaacatttttcttcatttgaactcaaaaagaattctgaagctttgtacctccttgtgtatttttaagttggtatctagcactattttgtcaaaaattgttttaatttttctagtggatggaaaatattggtatttgacaataaagctgtcatatcactcctttaaatgtacccattakaatataaatattatagacattcgataccctttattaactattcttttaaatacatgaataggcttttctttaacaacagtacattttgcaacattccttgttttccttgagcctattccactttccctacagaattatatttcaatgtaatgtgtttttatactttaaagtcttttcttgctctacctttcataattctttgcaataaaaatatgtgtatattggctgggtatagtggctcgggcctgtaatccaagcactttgggaggccgaggcgggcagactgcctgagctcagtagttcaagaccagcctgggcaacatggcgaaaccctgtctctactaaaaatacaaaaaaaaaaaaaaaaaaaaaaaaaaatta

SEQ ID NO: 787558 - DNA, 623 bp, Homo sapiens
tgtaaacaaaaagaaaaatctcagtgatttatatttatcttcagtagttcatttttattctccctctgtttataaatccattaaatccttctttattattgttgaaagcacgaattagaaagtaagttgcaaaagaattgatttccaattcaatggggtcattcacttyataccaacacagtatttcaaattttcccattattgttctccccatggaagaaagtatttttctccccatggcaaagcaccctagtaatatttggaatgtatgacatccatgccttccttttagaaaattggagaaaaatcatcatgaaagcaaacttggggatggaaaattttcagaccacaggatattcttagacagatctgtgttagaagagtatgtgtggactgttaggattcattcatgcattcattcattcaaagtataattattgaatgcccagcatgttccacatagtagggatacaaatgtaaacaaaatagattttcttaaaaccatctctgtgctcacatatctcataaaaaatctttttgctctccaagagtatgccttccttagattggagactgctttagtgggacaaagcctgcgataagaccaggaaatgggcttactg

SEQ ID NO: 787559 - DNA, 589 bp, Homo sapiens
agtatctcatcatgtatatatactgagttttatttgtccattaacctgttgatgaatactaatgttgctttcatatcttggttattgtgaataatgctgaaatgaacatgggagtgcagatatctcttcaacaccactttcaattcctctggatatatacccaraagtgggattgctggataatattttcgattttctttatgttttctaattctctaagataaatgctgttttgaaaaaggaaatgtcatatccttatgtggacctcttttgtatcttacattgtgtttaggaacttctgagaatagacagtttctttaagtgaatatggactactttaagtgaatatggagctactccctgctgcaaagggtgaacattttttgtaaattcatttctgtaccttaagtgaaatagtaacatattgaattaagattttttttctgggaatggaagaatcttcacatcttacgtggttttaaagaatgtattgggtggggatggtggctcacatctgtaatcccagcactttgagaagctgaggcagaagaatcactttgagcgcaggagtttgagacaagcctgggca

SEQ ID NO: 787560 - DNA, 624 bp, Homo sapiens
caatagacctccaaattttaaaaatagagtaaaagatctatgcaaaacagccaaatgcttaattgttaagagagcagtaatgagtacaacttaaacatatgcccctaatagatccttgctgtatgaatatgtaaacaataattcaagagggaacgtgaatccggaagtacagctaggaatgtggaaatcaagagtaaagaatttactgtgcggttaagtctaaaagagcatgaactttatgaaataataataatactactaattttcaactttggygggcatgaaacaaagtagaactaaaatataggcaacaaaacttacagaaaatgagagaaatgattgcagataaaatgttctaagtttatattattcttgggataaggctacagatagtaatgaatttcagacttgttgagtcaagaactttgtaaaagttaaaattatccactaaaaaaaaaagcaaaatgtagagcttccaaacttcacagagaaagagagaatttatgaaatataattaatttggtataaggtaagccaaaagaaaaaataatgcaaaaatacagtacataagggaaatatctttctaacttaaaggaagcaatgtttcctcagcacagagataac

SEQ ID NO: 787561 - DNA, 597 bp, Homo sapiens
ggtgctactggcatttaattggtagacaccagtaatgctgctagacatcttacaacatacagtagagactcccaacaaaagagaatttttagaccaaaatggcaatagtgtcaaggctgagatatcctgatgtacattaaaatatatgtatagattatttattaaaaacattattcatattagtcaaaagtggaagaaaaagcaaacgtatatcacaattcaaatttataattgagatatatgcatacattagaatactacacagaaaaaaaaaacagaaaataaaggtttcgaattaaccctttttaaaatgttgagataagtatagattcacatgaagttytaagaaatcatatggaaagatcctgtgtactcttcattcaatttcaatttcaatccctgataacctcttgtgaaaataaggaacaatgtcacaagtaaaaaaaaaaaaaaaaaccacacacgcacacacacacaatataatccactgatctttttcatattttcccaattttatacacatgtatgtgcatgtgtttaattagctgtatgcaattttaacagatatgtatgtttgtgtaaatgccatcatattaa

SEQ ID NO: 787562 - DNA, 634 bp, Homo sapiens
cacccgtggggcctgctcccggcgcagtcccgcagtacctgagcggcactcggtcctttgaccacgcttggctgcctcagcttacacttcccagcaggatctggctgggagccccttcctcagatattcaccaggcaggtagaagcagagggagacgacggcgaaaggtggaaggagaggccgcggcctcgggcctcgggccccgggcccagacggcggcctctcgcggcgacagggtccttcctatttagcaggaccgcagggttggcagacagcagggcctgggccggcggggctctgcggtgcccattcgagtctctccagggcttccctctgtggctgtccctcgcctgccccctttccttgcctacccttccctggacggggttgttgtcaggtgacggcttcagcaacccagccatgcttggtgtggagtggttcgagttcctccgcgggcccccaccccccacmcagataagaagcttaagtcctccttctgcaggggagaatcggatgcaatgaaactaagacctgtggtcgttaacgcggttcaaagccgaccccaactgggacacggctcagcttagaagtgaggaaggcctgggacgctggaaacaaggggtcacacgtgcgt

SEQ ID NO: 787563 - DNA, 548 bp, Homo sapiens
cccaatttatattgtgaaatgtagcatccagaaaacttgtaataaatattaataaatatattgacaacttatccagtttaaaattcttgaaattttaagttcagtattaattaacttactttataataaagaaattattttttctctgaaagtactttagcaggttattttattaaactaaaccaactgcagcaacagtggaagcaaatcattgaagttactagactgtctgatttgcagattaaatttcctcatacacactcttatccattctgaatatatttccctctctctgtatgtcattcagaattaaggcctattatactggagcatatgctgatttccttaaaaataagtgagcaagtyagtgattttcttttttcaattaaaaataatatttaagatggggtctcactgtgttgctcaggctggtctagaactccttgtctaatccttctgccttggcctcccaaagtgctgatattacaagcatgagccaccatgctcagcttcagctatcttcttgaaagggtcttagcaaattaatt

SEQ ID NO: 787564 - DNA, 641 bp, Homo sapiens
cccccagaatgggagaaaatatttgcaaattacccacttgacaagggattaataaccagaatatataaggaactcagacaacttaatagcaaaaaacaaaatccaattaaaaactgggcaaaaaatctaaatagacatttctcaaaagaagacatacaaatggccagcagatatatgaaaaaatgctcaacattactaatcatctgagaaatgcaaatcgaaaccccaatgaggtatctcacttcagttaaaatggcttttatgtaaaagaaaaataatgctgcggagaatggggaacccttatatgccattggtgggaatgtaagtacggctactatggaaaacagtgtggcagttcttcaaaaaactaaaaatagaactamcatatgatccagcaattccactcctgggtatatatccaaaacaaaggaaatcagtatatcgaagagatatttgcattcccatgtttacggcagcattattcacaaaaaccaaagtatggaatcaacctaagtgcctactaatggatgaatggataaagaaaatgtgatatatatgtatatcacctggagccccacagatatgtgtgcgtatgtgtgtgtgtgtctgaaacacacgtgtacacatgcacacatacatat

SEQ ID NO: 787565 - DNA, 593 bp, Homo sapiens
ataaagaacactagaagtttaatagttagaaaatttagttttatttttatgaaaatgatttttaaaataattccagtaataccattgtctatttgtcaatgtttagtattatgcttcatgcatgctttgtctagatctttatatgtacaaatgtagaataatataaattttttatattgtaaaacattcctcagacaccattggaacttgtgaataatgtgagcatctctagaataggggttggcaacctatggcccatagaccacatctgtcctgccacctgtatttgtgaataaaatctcactggaacacaaccaccatcgwtcattcatgcgttgtctctgtcttcacactgcaacagcagtttagttacaacagggactgtgtggcctgcaaagcctgaagtatttgctctatggctgttcgtagaaaaagtttgcatccttctgctctggaaccataaattagaacaggaagaaaagtaagaagatgaaggcttgaccttactgtgaaacaatatcttttatgcaagaaatgcttacatttgtgctctctgagaagaaagatttgaaaacttagttttcccggccctc

SEQ ID NO: 787566 - DNA, 593 bp, Homo sapiens
ataaagaacactagaagtttaatagttagaaaatttagttttatttttatgaaaatgatttttaaaataattccagtaataccattgtctatttgtcaatgtttagtattatgcttcatgcatgctttgtctagatctttatatgtacaaatgtagaataatataaattttttatattgtaaaacattcctcagacaccattggaacttgtgaataatgtgagcatctctagaataggggttggcaacctatggcccatagaccacatctgtcctgccacctgtatttgtgaataaaatctcactggaacacaaccaccatcgttcattcatgcgttgtctctgtcttcacactgcaacagcagtttagttacaacagggactgtgtggcctgcaaagcctgaagtatttgctctatggctgttygtagaaaaagtttgcatccttctgctctggaaccataaattagaacaggaagaaaagtaagaagatgaaggcttgaccttactgtgaaacaatatcttttatgcaagaaatgcttacatttgtgctctctgagaagaaagatttgaaaacttagttttcccggccctc

SEQ ID NO: 787567 - DNA, 634 bp, Homo sapiens
actgttgcaaatatttgatgcattttatctcatttaatctttgccagaaaccatgaggacaatattatttttatccctaatttttgtggtgaggaaactgaggcacaggaacatgttgattatctttgcctttttgaaactcagcttattttttgctttccataccagttcatttcagtgaacatttatgacctactgtatttccgttataaagatgagcaatgcaggattccttccctcttggagcgtacagtggaggagatgaaaaattccactgtgacaagcaagggaggactgaggtgggcacaggcagcaatgaaaggtcattgtccattctgagggatagagaccacttcctgagggaggtggtggcagagctgccttggaggcaaaaatataaaaaataggcaggtgcggtggtgcacatttgtagtcccagctaytcaggaggctgaggtgagaggattgattgagcttgggaggtcgaggcagcagtgagccatgattgcaccactgcactccagtttagatgacagaatgagaccttgtctcaaaaaaaaaaaaaaaaaaaaagaaaagaagaaaaaaagaattagagaaataagatgggagggtgttccaggaagaaggcaca

SEQ ID NO: 787568 - DNA, 624 bp, Homo sapiens
acctaagatcaaatattcaaatctcatgcaaagaagctgaagtggactcatttctttcatttttatcaaggcattatattctgacaagattttgcccaaaaaaaagatgaaaatttctattcgaacaacaaaaaagattgtgctgctgctgaacttttaaaagatgtgttgttctttcaaaataatatcatttttcttttaaaagataaatcctttgaaaaaamcagatattctcattttgatgaaacttgaagaattaagtttgttttgccattttccctttttgtattgattctccttttaatgactctgtaatgttacaaaaatatctcaatcaactaaaatcatagcattttaagttttactattatattgataaagatccatccaacattgtcaaacgttcttgacattccaggcaaccagtaaagaagttaagaaagtaaatgtatattaatccaattcaatacgcattcacagatgcctaccattgtcaagacacttcacaaggtgttctggaaaattcagaaacaaagaaggagtagtccctaccagggctgacaatctgctggagcactgtggctcactgataaccacagcctaagataaagtgggtaacaggac

SEQ ID NO: 787569 - DNA, 624 bp, Homo sapiens
acctaagatcaaatattcaaatctcatgcaaagaagctgaagtggactcatttctttcatttttatcaaggcattatattctgacaagattttgcccaaaaaaaagatgaaaatttctattcgaacaacaaaaaagattgtgctgctgctgaacttttaaaagatgtgttgttctttcaaaataatatcatttttcttttaaaagataaatcctttgaaaaaaacagatattctcattttgatgaaacttgaagaattaagtttgttttgccattttccctttttgtattgattctccttttaatgactctgtaatgttacaaaaatatctcaatcaactaaaatcatagcrttttaagttttactattatattgataaagatccatccaacattgtcaaacgttcttgacattccaggcaaccagtaaagaagttaagaaagtaaatgtatattaatccaattcaatacgcattcacagatgcctaccattgtcaagacacttcacaaggtgttctggaaaattcagaaacaaagaaggagtagtccctaccagggctgacaatctgctggagcactgtggctcactgataaccacagcctaagataaagtgggtaacaggac

SEQ ID NO: 787570 - DNA, 617 bp, Homo sapiens
tcagaaaattgtaatatgatgacataagaagtcttttccatggagtgcccttaaaacgcattttcataatgtttttacaatacagttgaaatgcactcattttacaatactgcaaagcaccctcagagatgctggtcaacaacattgactrgatttaagagaatctagtcaatgttttgttgactagattttggcgagactgccagcacaagatgagacagaatacaggtatttttatcctctctaatcaaagatgcttgaaaatgagagtaattcaattgtaagaggtagaattaaaaataacaaccaacatttactgagtgctttctattaagcactctgcatatttaaacctagatcaaaaaaagagaaaagagacaagtacttactgagctagatatgtcacaatttctggaaacaggacacagatggaggccctaaactgatgaacagaggaagagatgcacagcctgcagcagatgagacagcaatgctgcagtagaagaagaacctgctgacctaccagcctggaggcccagaaactccaagatacagatccaagggaagatggaggaagaaatgggctgagaaatgaggcaggaactatatacccccac

SEQ ID NO: 787571 - DNA, 610 bp, Homo sapiens
aagtgctaatctttatgatttttgcatctggatggaaatgttgagtttgagcagctttctatacacttggtctttttgttcttgactttgctgggaatttcctattcattttttttttttttgcacatttttctactgagttgcttttctatcaactaagagctctaggctgggcgcagtgtctcatgcctgtaatccctgcactttgggaggccgaggtgggtggatcgcctgaggtcagtagtttgagaccagcccggccaacatggtaaaaccccatctctactaaaaatacaaaaattagcygggcatggtggtgtgcacctgtaatcccagctacttgggagactgagaatggagaatctcttgaaatctggacgtggaggttgcagtgagccgagaccaggccattgcactccagcctgggcaacaagagtgaaactctgtctcaaaagctctattgatatcagcattttatttaaaaatgtttattgcaaatatttttaggccttttatttgtctttcaactttgcttgtgatatcttttgcttttgcaaaattttaaaatttccatatagccaaatatgtatctttagtattatgtttatat

SEQ ID NO: 787572 - DNA, 610 bp, Homo sapiens
aagtgctaatctttatgatttttgcatctggatggaaatgttgagtttgagcagctttctatacacttggtctttttgttcttgactttgctgggaatttcctattcattttttttttttttgcacatttttctactgagttgcttttctatcaactaagagctctaggctgggcgcagtgtctcatgcctgtaatccctgcactttgggaggccgaggtgggtggatcgcctgaggtcagtagtttgagaccagcccggccaacatggtaaaaccccatctctactaaaaatacaaaaattagccgggcatggtggtgtgcacctgtaatcccagctacttgggagactgagaatggagaatctcttgaaatctggasgtggaggttgcagtgagccgagaccaggccattgcactccagcctgggcaacaagagtgaaactctgtctcaaaagctctattgatatcagcattttatttaaaaatgtttattgcaaatatttttaggccttttatttgtctttcaactttgcttgtgatatcttttgcttttgcaaaattttaaaatttccatatagccaaatatgtatctttagtattatgtttatat

SEQ ID NO: 787573 - DNA, 610 bp, Homo sapiens
aagtgctaatctttatgatttttgcatctggatggaaatgttgagtttgagcagctttctatacacttggtctttttgttcttgactttgctgggaatttcctattcattttttttttttttgcacatttttctactgagttgcttttctatcaactaagagctctaggctgggcgcagtgtctcatgcctgtaatccctgcactttgggaggccgaggtgggtggatcgcctgaggtcagtagtttgagaccagcccggccaacatggtaaaaccccatctctactaaaaatacaaaaattagccgggcatggtggtgtgcacctgtaatcccagctacttgggagactgagaatggagaatctcttgaaatctggacgtggaggttgcagtgagccgagaccaggccattgcwctccagcctgggcaacaagagtgaaactctgtctcaaaagctctattgatatcagcattttatttaaaaatgtttattgcaaatatttttaggccttttatttgtctttcaactttgcttgtgatatcttttgcttttgcaaaattttaaaatttccatatagccaaatatgtatctttagtattatgtttatat

SEQ ID NO: 787574 - DNA, 569 bp, Homo sapiens
tgggccacaatttctttccttagggatcccgtatcctgactcctgtgtcatttaaggataatgctgcaaatgaagtatcctttgttttctttttctgagatagtctcactctgaagctgaagataggctggagtgtggtggtgcaacctcagctcactgcaacctacgcctcccgggttcaagcgattccagtgcctcagactctcaagtagctgggaccacaggcgtgtgacaccacattcagctaatttttgttatttttagtagagatgggatttcaycatgtgggccaggctggtcttaaactcctggcctcaagtgatttccccacctcggcctcccaaagtgctgggattacaggtgtgagtcaccgtgccaggctccaaaaatcatatcccttaaaggacattaaaaaaatcatatgagaaaaatagctgtgtttttaacaaataagtactccccagtccacttactttgcaacactttatttttaccagccaattttttatttttagcagagccatagggtgaaatccataccacttccttgctctggcctgagaactttc

SEQ ID NO: 787575 - DNA, 569 bp, Homo sapiens
tgggccacaatttctttccttagggatcccgtatcctgactcctgtgtcatttaaggataatgctgcaaatgaagtatcctttgttttctttttctgagatagtctcactctgaagctgaagataggctggagtgtggtggtgcaacctcagctcactgcaacctacgcctcccgggttcaagcgattccagtgcctcagactctcaagtagctgggaccacaggcgtgtgacaccacattcagctaatttttgttatttttagtagagatgggatttcaccatgtgggccaggctggtcttaaactcctggcctcaagtgatttccccacctcggcctcccaaagtgctgggattacaggtgtgagtcaccgtgccaggctccaaaaatcatatcccttaaaggacattaaaaaaatcatatgagamaaatagctgtgtttttaacaaataagtactccccagtccacttactttgcaacactttatttttaccagccaattttttatttttagcagagccatagggtgaaatccataccacttccttgctctggcctgagaactttc

SEQ ID NO: 787576 - DNA, 518 bp, Homo sapiens
ggggggcaaggggagggagagcattaggacaaatacctaatacatgtggggcttaaaacctagatgacaggttgatggctgcagcaaaccaccatggcacatgtttacctatgtcacaaacctgcacattctgcacatgtattccagaacttaaaatttaaaaaaaattttttttaaaaagcactaccctccaggatgcagtaatgcctgaagtcagtcaccattatatagtgcagtatccycaagagaatacctgggagatgaatccatggtgtgggagcagcagtgtccccacttgctatcagtcccagtgacccagttaaagaatttatgttttcatcctcacaaatgtagcccacagggtcgaaggtcttggtttccaacagggaaacatttccaccagggaacacagcaagagtcttcattgaactttaagctacctcatcatgcaggcactttgggcctttcatgccaagggccagcaggcaaggaaaggatcccagttggggtgattgact

SEQ ID NO: 787577 - DNA, 561 bp, Homo sapiens
caatgagaacacatggacacagggaggggaacatcacacaccagggcctgtcggggggtggggggcaaggggagggagagcattaggacaaatacctaatacatgtggggcttaaaacctagatgacaggttgatggctgcagcaaaccaccatggcacatgtttacctatgtcacaaacctgcacattctgcacatgtattccagaacttaaaatttaaaaaaaattttttttaaaaagcactaccctccaggatgcagtaatgcctgaagtcagtcaccattatatagtgcagtatccccaagagaatacctgggagatgaatccatggtgtgggagcagcagtgtccccacttgctatcagtcccagtgacccasttaaagaatttatgttttcatcctcacaaatgtagcccacagggtcgaaggtcttggtttccaacagggaaacatttccaccagggaacacagcaagagtcttcattgaactttaagctacctcatcatgcaggcactttgggcctttcatgccaagggccagcaggcaaggaaaggatccca

SEQ ID NO: 787578 - DNA, 518 bp, Homo sapiens
ggggggcaaggggagggagagcattaggacaaatacctaatacatgtggggcttaaaacctagatgacaggttgatggctgcagcaaaccaccatggcacatgtttacctatgtcacaaacctgcacattctgcacatgtattccagaacttaaaatttaaaaaaaattttttttaaaaagcactaccctccaggatgcagtaatgcctgaagtcagtcaccattatatagtgcagtatccccaagagaatacctgggagatgaatccatggtgtgggagcagcagtgtccccacttgctatcagtcccagtgacccagttaaagaatttatgttttcatcctcacaaatgtagcccacagggtygaaggtcttggtttccaacagggaaacatttccaccagggaacacagcaagagtcttcattgaactttaagctacctcatcatgcaggcactttgggcctttcatgccaagggccagcaggcaaggaaaggatcccagttggggtgattgact

SEQ ID NO: 787579 - DNA, 620 bp, Homo sapiens
caatcagcaccctgtgtttagctcaaggtttgtgaatgcaccaatcgacactctgtatctagctgctctggtggggccttggagaacctgtgtgtagaaactctgtatctaactaatctgatggggaggtggagaacctttgtatctagctcagggattgtaaacgcaccaatcatcgccctgtcaaaacaggccacctggctctaccaatcagcaggatgtgggtggggccagataagagaataaaagcaggctgccccatccagcagtggcaacccgcyggggtccccttccacgctgtggaagcttcgttctttcactctttgcaataaatcttgctgctgctcactctttgggtccacactgcgtttatgagctgtaacactcaccgcgaaagtctgcagcttcacacctgaagccagcgagaccacgagcccacccggaagaaccaacaactccagacgcgccgccttaagagctgtaacactcaccgtgaaggtctgcagcttcactcctaagccagcaagaccacgaacccaccagaaggaagaaactccgaacacatccgaacatcagaaggaacaaactccagacgcgccactttaagagctgtaacactc

SEQ ID NO: 787580 - DNA, 620 bp, Homo sapiens
caatcagcaccctgtgtttagctcaaggtttgtgaatgcaccaatcgacactctgtatctagctgctctggtggggccttggagaacctgtgtgtagaaactctgtatctaactaatctgatggggaggtggagaacctttgtatctagctcagggattgtaaacgcaccaatcatcgccctgtcaaaacaggccacctggctctaccaatcagcaggatgtgggtggggccagataagagaataaaagcaggctgccccatccagcagtggcaacccgctggggtccccttccacgctgtggaagcttygttctttcactctttgcaataaatcttgctgctgctcactctttgggtccacactgcgtttatgagctgtaacactcaccgcgaaagtctgcagcttcacacctgaagccagcgagaccacgagcccacccggaagaaccaacaactccagacgcgccgccttaagagctgtaacactcaccgtgaaggtctgcagcttcactcctaagccagcaagaccacgaacccaccagaaggaagaaactccgaacacatccgaacatcagaaggaacaaactccagacgcgccactttaagagctgtaacactc

SEQ ID NO: 787581 - DNA, 620 bp, Homo sapiens
caatcagcaccctgtgtttagctcaaggtttgtgaatgcaccaatcgacactctgtatctagctgctctggtggggccttggagaacctgtgtgtagaaactctgtatctaactaatctgatggggaggtggagaacctttgtatctagctcagggattgtaaacgcaccaatcatcgccctgtcaaaacaggccacctggctctaccaatcagcaggatgtgggtggggccagataagagaataaaagcaggctgccccatccagcagtggcaacccgctggggtccccttccacgctgtggaagcttcgttctttcactctttgcaataaatcttgctgctgctcactctttgggtccacactgcgtttatgagctgtaacactcaccrcgaaagtctgcagcttcacacctgaagccagcgagaccacgagcccacccggaagaaccaacaactccagacgcgccgccttaagagctgtaacactcaccgtgaaggtctgcagcttcactcctaagccagcaagaccacgaacccaccagaaggaagaaactccgaacacatccgaacatcagaaggaacaaactccagacgcgccactttaagagctgtaacactc

SEQ ID NO: 787582 - DNA, 430 bp, Homo sapiens
gcccactccaacacaactttatccacttgttctcttcagcaagaaactccttcacagagaaaccaccagcccattcagcccctttgtggggaatatgaaaatgcacctcacagcaccactgacccagggtgcctctgagaggcagggagcaccctgtagcgagccaggtagggctcctctcccctcagagggttacagsctacacacacatgagccatgccccatcctcattctccccctactctagatcgaaacccagcttaggaaccaccttcagcatgtcccatgtcatctggagcttcatcacttccaaagagccccggtgacaacttcctaatctcatcctggctagaatgctgataaaaatgtactaaggggaaaacccaagcctgggcccttcttgctcagacctttttttctatgttgttcc

SEQ ID NO: 787583 - DNA, 430 bp, Homo sapiens
gcccactccaacacaactttatccacttgttctcttcagcaagaaactccttcacagagaaaccaccagcccattcagcccctttgtggggaatatgaaaatgcacctcacagcaccactgacccagggtgcctctgagaggcagggagcaccctgtagcgagccaggtagggctcctctcccctcagagggttacagcctacacacacatgasccatgccccatcctcattctccccctactctagatcgaaacccagcttaggaaccaccttcagcatgtcccatgtcatctggagcttcatcacttccaaagagccccggtgacaacttcctaatctcatcctggctagaatgctgataaaaatgtactaaggggaaaacccaagcctgggcccttcttgctcagacctttttttctatgttgttcc

SEQ ID NO: 787584 - DNA, 682 bp, Homo sapiens
ccagtggacaggttcaatctagtttcagattggcactgcagttctgcattctagaccaaggtacatattaaaagatgatttaccacgcaagagaatatacccaaagcattatactggctctgaggtaaataacttctggaccagttgtgtcagtaatacctactgttattgtgagaatcaaagtagcaaggtccttagtaaggaagccctaaatttgtttcagtatgttagaaccraagtgctaagttaatgtgtcagaatgtggacaccctgtatctccccatctttctccccagtgaaacctgcaagttttaaaagaaagatttagatttattctatgcattttatccactttgtcttgttacttaaagacactatttgttttttttagttgtttttttttttaccttttaagttcagggttacatgcaggtttgttacataggtaaacttgtatcatggggggttgtacagattatttcatcacccaggtattaagcctagtatccattagttatttttcctgatcctctccctcctcccaccctctaccctccaataggccccagtgtgtgttgttcccctctatgtgttcatgtcttcccatcatttagctcccacttacaagtgagaacatgtggcatttggttttctgttcctgcattagtttgctaaggataat

SEQ ID NO: 787585 - DNA, 682 bp, Homo sapiens
ccagtggacaggttcaatctagtttcagattggcactgcagttctgcattctagaccaaggtacatattaaaagatgatttaccacgcaagagaatatacccaaagcattatactggctctgaggtaaataacttctggaccagttgtgtcagtaatacctactgttattgtgagaatcaaagtagcaaggtccttagtaaggaagccctaaatttgtttcagtatgttagaaccaaagtgctaagttaatgtgtcagaatgtggacaccctgtatctccccatctttctccccagtgaaacctgcaagttttraaagaaagatttagatttattctatgcattttatccactttgtcttgttacttaaagacactatttgttttttttagttgtttttttttttaccttttaagttcagggttacatgcaggtttgttacataggtaaacttgtatcatggggggttgtacagattatttcatcacccaggtattaagcctagtatccattagttatttttcctgatcctctccctcctcccaccctctaccctccaataggccccagtgtgtgttgttcccctctatgtgttcatgtcttcccatcatttagctcccacttacaagtgagaacatgtggcatttggttttctgttcctgcattagtttgctaaggataat

SEQ ID NO: 787586 - DNA, 682 bp, Homo sapiens
ccagtggacaggttcaatctagtttcagattggcactgcagttctgcattctagaccaaggtacatattaaaagatgatttaccacgcaagagaatatacccaaagcattatactggctctgaggtaaataacttctggaccagttgtgtcagtaatacctactgttattgtgagaatcaaagtagcaaggtccttagtaaggaagccctaaatttgtttcagtatgttagaaccaaagtgctaagttaatgtgtcagaatgtggacaccctgtatctccccatctttctccccagtgaaacctgcaagttttaaaagaaagatttagatttattctatgcattttatccactttgtcttgttacttaaagacactatttgttttttttagttgtttttttttttamcttttaagttcagggttacatgcaggtttgttacataggtaaacttgtatcatggggggttgtacagattatttcatcacccaggtattaagcctagtatccattagttatttttcctgatcctctccctcctcccaccctctaccctccaataggccccagtgtgtgttgttcccctctatgtgttcatgtcttcccatcatttagctcccacttacaagtgagaacatgtggcatttggttttctgttcctgcattagtttgctaaggataat

SEQ ID NO: 787587 - DNA, 682 bp, Homo sapiens
ccagtggacaggttcaatctagtttcagattggcactgcagttctgcattctagaccaaggtacatattaaaagatgatttaccacgcaagagaatatacccaaagcattatactggctctgaggtaaataacttctggaccagttgtgtcagtaatacctactgttattgtgagaatcaaagtagcaaggtccttagtaaggaagccctaaatttgtttcagtatgttagaaccaaagtgctaagttaatgtgtcagaatgtggacaccctgtatctccccatctttctccccagtgaaacctgcaagttttaaaagaaagatttagatttattctatgcattttatccactttgtcttgttacttaaagacactatttgttttttttagttgtttttttttttaccttttaagttcagggktacatgcaggtttgttacataggtaaacttgtatcatggggggttgtacagattatttcatcacccaggtattaagcctagtatccattagttatttttcctgatcctctccctcctcccaccctctaccctccaataggccccagtgtgtgttgttcccctctatgtgttcatgtcttcccatcatttagctcccacttacaagtgagaacatgtggcatttggttttctgttcctgcattagtttgctaaggataat

SEQ ID NO: 787588 - DNA, 431 bp, Homo sapiens
aggttctctggagtctcagaaaaataatacctagtctttctctacataacatttgatacataaaatggtcttattgcaagacaaatatcagaacaaagatcaaactgcttaatttcctacatcaattcaagcagaaacttttcaattcaatctcaaacttttaggcaaaataattgtccagattactttgcttctctcactcctgctcctcctccttcacccctcccttgcctctcttgyctctttttctaacaacctagccttccttttctacctctctcgcttttaattctcacccctttctttccttttgtagaggaggggcttaaacttttaagaaattgctttgtttgctgtactctctcaaaagcttggtttgagcagccaaccctgtttgcataaaatgaaagttagaaaactaaaagttttgt

SEQ ID NO: 787589 - DNA, 631 bp, Homo sapiens
gttttttttttttttaatctaagagagagctggtggtatctgctttgtgcacctggaacagagcccagcccttgcggacagttgatccacagcagctgctgtcattgtcttccccattcctggggaagagacagggaaggcaaggaccccaggagctctccggggctgagctggggccgtgggctcctaggactgggcaggatgggaaggaggagckagagagagatggagaagggtcacctgaaaaagctcaggaagttacatgaaggtgcacatcctgagcatttctgctgctcttttgaaacctcattctcctaacgctgaatgctgggtgctgcttcctaggagtagacactccaaagtaagggtgcatctgatcttcaggacggggatccatggaggaaatgctggccatgttgctctcctccgtttagggtaggagctttcttcaaaccactcagaaacactattatttaaaattaaaaagtaagccatgtaaaaattcctccatagttttatgggatgagtgaaaaacaagatgctctagtagaaaactttcttttttctaagtagcattttgagaaaaatactcctgcttgccccagtgagcttgtttttctcctctctccca

SEQ ID NO: 787590 - DNA, 564 bp, Homo sapiens
atgtaaacaaacctcccatgcagccagtcatatcaaagtagaacacatacaattatatataatacacaattgtatataaagaatgataataaagaactatgggccatgcacggtgcctcatgcctgtaatcccagcactttgggaggccgaggccggtgaatcacctgcggtcaggagtttgagaccagcgtggccaacatggtgaaacctcatctctactaaatacaaaaagtagccaggtgtggtggcaggcgcctgtaatyccagctacttgggaggctgaggcaggagaattgcttgaacccgggagatggaggttgcagttattccgagattgcaccattgcactccagcctggaacacagagtgagactctgtctcaaaaaaaaaaaaaagttaacataaaatagcctcaggtaagtccttcaggggggattccagaagaaggcattgttaccataggacttgacagctccatgcgtgttactgcccctgaagaccgtccatggcacaacatgtggatgtggaagacagtgatattgacgagcctgaccctgtttagg

SEQ ID NO: 787591 - DNA, 549 bp, Homo sapiens
aaggatagaaagaatgaaaatatttttgtacagctgtaaaatatgtttgtgttttaaactgctattacaaagagtcagaaagcttttaaaatttaaaagtttatatagtaaaattgttactgtaatctaagattaatttatcattgtagaaacattttaaaaataaatttaaggtagcctaagtgtgcagtgtttatagagtttacagtagtgtacagtaagttcctgggccttcacactcactcactactcacccactgactcagccacagcaacttccaatcctacaagctccattcatggtaagtgtcctatagagttgtaccaatttttatcttttatgccatattttgactgtaccttttctaaatttagatgtgtttagatgcacaaatacttcccrttgtgttacaattgcctgtggtattcaggacagtaacctgctgtacaggtttgtagcctaggagctataggctgtaccatctagcaaaggtgtgaagtaggctatactatctagatttgtgtaaatacactccatgatgttcacac

SEQ ID NO: 787592 - DNA, 484 bp, Homo sapiens
aatacatatgtattatatatattgcatataatatgtataattataatgtgatatggattatagaatgcaaatatatttattagtattatataacacatagaatatatatatatatatacatgtgttctcagtaacagtttgttacctatttattgtttytaatgtatgttttattctcccttaaatagatgctaaggtctttgagggtagaaaaaaaatcttctatttcttaacacttataattagtataatgaaatgaaagtgataaaaattataaatttgtgttcaatctcatacttttacaataggccagatattgtcattagtttcccaattaacccagatatttacaatatgagcttgaaaaagttatctaagaaggcataaaaaatgaacattagatattcatcacagaaatagaaaaaaacccctaaaatttatatggaaccacaaaaaaccttgaatagacaaagctctcctgagc

SEQ ID NO: 787593 - DNA, 602 bp, Homo sapiens
cctggccctttctgttcatcatggaacttctccaacaggcagcctttgctctggagctctctgttgggctggctgagacttttgcaggacagcactgcagtttgagactcctcctaactaaccctccttctccctcccctttcacaggtgacagacctgcatctctagcctttttgtgcttcaggcacaactcaaagctgccaataatcatgttgcccaatttgtgagctggaactgcagtctttttgtttttttgagacggagtctggctctttcgcccaggcgggactgcagtggcgctatcttggctcactgcaagctccgcctcccgggttcacaccattctcctgcctcagcctcctgagtagctgggattacaggmgcctgccaccgcgcctggctaattttttttgtatttttagtagagatggggtttcaccgtgttagccaggatggtctcaatctcctgacctcgtgatccgcccgcctcggcctcccaaagtgctgggattacaggcgtgagccaccacgcctggcctggaactgcagtcttaagtgtggcatgagttgccttcagaacccaaagaggcctaccaggcact

SEQ ID NO: 787594 - DNA, 610 bp, Homo sapiens
gctgggataataggtgtaagccaccatacttggccctgtatgtcattcttgtataggggccatactaatcttctctgtattgttccaattttagtatatgtgctggcaaagcaagcacccactcacttcatattaaaagagttaatcatatctgtacacacttagwcaatgctaaaccaattactcattatttgccttaggaaggaagtctggttgtgctgtagtgcatggttaggctgcttttcaaagtccagttggtaggatgctgagcaaaaccttgccagaactcagaactgtgaactttaccatgactctccaagtgatcagtatgtaatgtgctatctaataacacctttttgaaaatctaaaacccatcttctttcatctctgtatggttttctattttttcatatgatatttttatagttagtaattgtaactaatactaaatgattttacaattttttaatttttttattattatactttaagttccagggtacatgtgcacaacgtgcaggtttgttacatatgtatacatgcgccatgttggtgtgctgcatccattaactcaacatttacattaggtatatctcctaatgctatccgt

SEQ ID NO: 787595 - DNA, 499 bp, Homo sapiens
gtgagcatgggttgagtagggtggcctacctgtggcatgtagtttcaagattctaaactttaatattgtgattatgttgttgagggacatttgaaatattccagagaatgttatattaagcattatgatagacaagggctttttatgtcaaatgatctggctttgagtcctggttctgcctgtcatcagataggaccttgggactcttgatgtcctcatctaagtgagaaaaagtcacagctacttttttytgcctccctccctctttcccttgttccccaccatcctgattctccctctctgcttcaaatatatgctgaacacctgctatgtttcagggatggttttaggcatgtaaatgaaaaattatgatctttcctttcaagaagttagtagctttataagaaaacagacacattggcagagcgcggtggctcatgcctgtaatcccagcccttcgcgaggctgagttgggtggattgcttgagctcagtagttc

SEQ ID NO: 787596 - DNA, 544 bp, Homo sapiens
tatagaatatttcatgtcaattgttatcacttcataaattttactatttgaatgtaccaaaatataatttaaagaataatatgttagtggatatttaggctacctcatgtattttgaattgatcaataacaccactgtgggaactcttagatgtacatttttgaaaagttgtctgattatatctttagggtaaatacttaatagtgaaaatctggatcaaaaaaatatgtattttaaaaatttcaatacctagttctaaactactctccagaaatgattagcgggccagtatgtaacacctctgaaagtgagacagctcattgaatgttgtctttttaaaatcttttccagttacataggttagagatgtagctcattgtttgtttgtggttttkttcacattatttgattactttggaggttgaatatattttatatgttttcatttttttcttctaagaattgtacatttcttgtccattgaccattttctattgagatgtttgtttgttattattgatttctaagttctcttgatatattt

SEQ ID NO: 787597 - DNA, 655 bp, Homo sapiens
ggtttgtgagtgcaccaatcgacactgtatctagctgctctggtgaggacatggagaacctttatgtctagctcaaggattgtaaatacaccaatcggcactctgtatctagctcaaggtttgtaaacacaccaatcagcaccctgtgtttagctcaaggtttgtgagtgcaccaatcgacactctgtatctagctgctctggtggggccttggagaacctgtgtgtggaaactctgtatctaactaatctgatggggacgtggagaacctttgtgtctagctcagggattgtaaacgcaccaatcagcgccctgacaaaacaggccactcggctctaccaatcagcaggatgtgggtggggccagataagagaataaaagcaggctgccggaaccagcattggcaacccactcgagtccccttccayctcgtggaagctttgttctttcgctctttgcaataaatcttgctactgttcactctttgggaccacgttgcttttatgagctgtcacactcaccgtgaaaatctgcagcttcatttctgagcccagccagaccacgagcccaccgggaggaacgaacaattccacaagcgctgcgttaagagctgtaacactcaaccgtgaaggtctgcagcttcactcctgagcca

SEQ ID NO: 787598 - DNA, 655 bp, Homo sapiens
ggtttgtgagtgcaccaatcgacactgtatctagctgctctggtgaggacatggagaacctttatgtctagctcaaggattgtaaatacaccaatcggcactctgtatctagctcaaggtttgtaaacacaccaatcagcaccctgtgtttagctcaaggtttgtgagtgcaccaatcgacactctgtatctagctgctctggtggggccttggagaacctgtgtgtggaaactctgtatctaactaatctgatggggacgtggagaacctttgtgtctagctcagggattgtaaacgcaccaatcagcgccctgacaaaacaggccactcggctctaccaatcagcaggatgtgggtggggccagataagagaataaaagcaggctgccggaaccagcattggcaacccactcgagtccccttccacctcgtggaagctttgttctttcgctctttgcaataaatcttgctactgttcactctttgggwccacgttgcttttatgagctgtcacactcaccgtgaaaatctgcagcttcatttctgagcccagccagaccacgagcccaccgggaggaacgaacaattccacaagcgctgcgttaagagctgtaacactcaaccgtgaaggtctgcagcttcactcctgagcca

SEQ ID NO: 787599 - DNA, 622 bp, Homo sapiens
ttcagcaaatttttatacagtgtcatttaatttgggagaggatactgtccagaaaattaatgcatacttttgtcacaatttgcctttttgtgggtgtacgttttggtttttttttgttgttttttttctttgttttttttttcttttctttttttttttttttttttttttttgcttcaatacttctgccgctttggaaattgtaacagttaattactttgaatgttgctaaaaggacattttgtgtagggtcaagttatttttatatgagttaatgtgaaattgtaaatggaaatttttccttaaaatacaacacaatgatgtctgtataaatctgtctgtttaraatctgtgctgtgtaagggcattcgtactcatgctgttactgtacttatgcaccattcagacttgttagagtagatgtgggtttatgactgccaagtttgcccagtacagtagttttttatcactaaaagttggactcattgatggagtcctgtagtagtttcagtgttagatacagttttttccaccatacatctgtgcattttctctttaggtgactgtttaagaaatttgtgtgcatagttactcagtttttatgaactgttgtatcctgtta

SEQ ID NO: 787600 - DNA, 611 bp, Homo sapiens
ccagaagaatatattcatactcattcaaatgtgctaggcactggccataaagaatattggtgttcattcataactgcctataatgtgctaggagctgtgcataaagcagtgtaacaggatcatcttggaaagcttatgtagtcagtagaggagacagataaactaggaattacatggtaarttgaaagaggaagttaggggtaagatgctgcaccaaatgcaggagattggaaggtttttctggaagaagtgatgtttagggggagtttcagaggtaaatttctggtttggttaacagaagatagtttcactgctcactgagattacagaagaaacaggctggaagagtttggtttcaatatgtcaaatttgatgtgcttataggaaattttatttatttgagacagtttctctctgtcgctcaggctggagtgcagtggtgtgatctcggctcactgaaacctctgcctcctaggttcaagcgattttcccatgtcagcctccccagtagctgggattacaggcgcacggcaccacgcccggctaatttttctattttatggtagaaacgggatatcaccatgttggccaggctggtgtcaaactgctga

SEQ ID NO: 787601 - DNA, 636 bp, Homo sapiens
caccacactgtgtcaggcgcttttattaatataggtgcacactggagacaatggaaatggggaaaggagcacttaaggtacagagcaaggctggcgggaaaggtactgcttccagagagacatcaaagacaagctggaatccgcagagggcagagtgagtggaggaacagacacaggagagaatacggaagatccagggcaaaagtgatcggggcacctgaggcagaatttgaaggtggcagctgtggaacataggtgggaagcacctatgtttgcagaagctcttgatacrtacttgtttgcctctccttcaatagcggaaaacacagacaatcctggaagaatgaccgtagagggaatgaatgccaaggaaaagcaacctgaatttcactacaaagacaaaaacaactcaaacagtactttgcgcccacagatactatgtgggctgtacaacaggataacatctttaatgacaaaaaagaaaagacagactggaagcatgagaaatgtcaaattgtaattcacactgaatttgctaaaatctaattgtggcctgttcttcaaatacagaagtaaatattaaaatgacattctcatagttttaaaactatccacagaaaataccaaaaaccatta

SEQ ID NO: 787602 - DNA, 645 bp, Homo sapiens
  misc_feature 645: n = A,T,C or G
taaaattgggcttttggtaatattaatttttcaccagtatgtgagatgatacttgagaagtttatttaaaatatttaaaatacagaaggacatccctatgcagatgtgattcattagcaaacttaaaatagtttaaattatcaaccatagatttcctaggtcactaaacagtatgagggcagactggatgtgctaagataagcaatctggtgatattttcacttgaggcaattgaaaagcttgaacccagtgatgttgatatgatttggctctgtccccacccaaatttcatcttgaattgtaactcccacaattcccatgtgtcatgggaggaacctggtaggaggtgaytgaattatgggggaggatctttcctttgctgttctcttgataatgaatgagtctcatgagatctgatggttttaaaaagaggagtttccctgcacaaattctctctctctttgcctgctgccatccatgtaacacgtgacttgctcctcgttgccttctaccatgattgggaggcttccccaatcgtaagtccaattaagcctctttcttttttaaattcccagtctcgtgtgtgtctttatcagcagcatgaaaaaggactaatgcagatgtttattatgattttctccagan

SEQ ID NO: 787603 - DNA, 615 bp, Homo sapiens
aggttgatatgatccctgtcctttcacactgttaatatgccaggtgataaaatgtctcattcactctgaaacattatcactatacaggcactccttacagtgtttgttctcatatatgtcctcgtatttttttttycttttaaagtggctctgagaaatggctaatgcacaatctaattatgtgataataaatgttaatgacagtattatcagatgataactaggcttcattaatgtgtctcattatgattctcagtcccttgtggaagattgtgaagaaaggaccttagatattccagattatatttgaatgtagtagttacagagcccatatccagggagaaaggaagatatcagagacacctttaagctctttctctaattttgcttcttcaaacctaagcatccatcaatcacatctcaaaatttatcatataccttcagcataataaaaatagtaattatagtaatagtaatagtcctgatatgacaaataatatggaagatcattttaattgtaactgctgatatattttggtataagtatataggcatttatgtcccaaacattatgaccttgattatccataagcaagttcaaatcatttagagagg

SEQ ID NO: 787604 - DNA, 543 bp, Homo sapiens
ttcaggcgtgagtgctgtagtgccattggctgtgagttcaatgttaatgaatgaacaatgtatattatttatttattcttcatttaattaattattattatttttttttgagatagagtctcactctgttgctcaggctggagtgcagtggtgcagtcttggctcactgcaacctctgcctcctgggttcaagcgattcccctgccttagcctcccaagtagctaagactacaggcatgcgccaccatgcctggctaatatatatatatattttttgtagttttagtagagacggggtttcaccacgttggccaggctggtctcgaactccagacctcaaatgatctgcccgccttggcttcscaaagtgctgggattacaggcattagccactgtgcctggccaacaatatatattaaataagcacacatacaacaaaagtaggtgttggtaagcttacaaaaatgtgaccagtagcttgctgaaacctaactttttatttgttcatggaactttctagaccgtaactacactgaataatga

SEQ ID NO: 787605 - DNA, 562 bp, Homo sapiens
aaactccattcaggcgtgagtgctgtagtgccattggctgtgagttcaatgttaatgaatgaacaatgtatattatttatttattcttcatttaattaattattattatttttttttgagatagagtctcactctgttgctcaggctggagtgcagtggtgcagtcttggctcactgcaacctctgcctcctgggttcaagcgattcccctgccttagcctcccaagtagctaagactacaggcatgcgccaccatgcctggctaatatatatatatattttttgtagttttagtagagacggggtttcaccacgttggccaggctggtctcgaactccagacctcaaatgatctgcccgccttggcttcccaaagtgctgggattacaggcrttagccactgtgcctggccaacaatatatattaaataagcacacatacaacaaaagtaggtgttggtaagcttacaaaaatgtgaccagtagcttgctgaaacctaactttttatttgttcatggaactttctagaccgtaactacactgaataatgagaatctgctgt

SEQ ID NO: 787606 - DNA, 648 bp, Homo sapiens
tcacctgaatgatgcaaagcaccggtgacattgtggacagtatttaggtaaggatgtttttttccatccttgtttttataaacgaaaacatttccatctttccgtctttgtgaattgatacatattgattgtacatatttatggggttcatgtgatgtttcgacgcatgcatacaatgcataatggccaaatcatggtaattaggatatccactacctccaacatttatttcgtgtgtatgtgttggggacattttaagtcttttcttctgaatattttgaaataggcaataaattattgctaagtataatcactcttgtgtgctattgaacactagaacttatcgcttctatataactctacatgtgcacccattaaccaatatctatcttcatcctgcctccttcccagcctctgttaaccatcattctactctctaccttmctgagatcagactttttagctcccacaaatgagtgagaatatgcaatatttgtcattctatgcttggcttgtttcacttaacataaggacctattgtttcattcatgtttctgcaaataacatgatttgattctttttatggcgctgtagtattcctttgggtatatataccatattttctttatccatttatttgttaatgaa

SEQ ID NO: 787607 - DNA, 648 bp, Homo sapiens
tcacctgaatgatgcaaagcaccggtgacattgtggacagtatttaggtaaggatgtttttttccatccttgtttttataaacgaaaacatttccatctttccgtctttgtgaattgatacatattgattgtacatatttatggggttcatgtgatgtttcgacgcatgcatacaatgcataatggccaaatcatggtaattaggatatccactacctccaacatttatttcgtgtgtatgtgttggggacattttaagtcttttcttctgaatattttgaaataggcaataaattattgctaagtataatcactcttgtgtgctattgaacactagaacttatcgcttctatataactctacatgtgcacccattaaccaatatctatcttcatcctgcctccttcccagcctctgttaaccatcattctactctctaccttactgagatcagactttttagctcccacaaatgagtgagaatatgcaatatttgtcwttctatgcttggcttgtttcacttaacataaggacctattgtttcattcatgtttctgcaaataacatgatttgattctttttatggcgctgtagtattcctttgggtatatataccatattttctttatccatttatttgttaatgaa

SEQ ID NO: 787608 - DNA, 564 bp, Homo sapiens
tagaggggtgtatcttcttgcaagtgaattgcaagggtgtgtccaggaacctgaaccttgcctctgggcaaggaagctgcagagctacactgagggttagggctcttgccaaataggctgcgatttagggcacattccagttccaatagccaactggagtctggcaggagaaccagtgcaaaactagacatagaagatgtctgatcatggcctggaaatctagatggtaatcccccatcccctgcataccaggctaagactgcaaatgtgtttgggtttagcatgtgttagggagctagggagaccacccaggactccaacaaaaggaaatgytcctcctgccgcttgccaccattcatacatattccatgtcttcctttgcctgaagccttctcataggcctgctcttttcctggttaatttttatattgaactgggctcattcagttgcaagtgacagaattccaatacacattaacattcaggataaagggagtgatagggcactgccgatgggcatggaagccagcgactcttgcattctcaactttctctgtatatttt

SEQ ID NO: 787609 - DNA, 600 bp, Homo sapiens
ttggaaagtctaatcaaacaactgactttacaactgactttgccaaggaatgcaaacaaaagccagccaaattagtttgtgtgcagagatatatccaaggatatatctaatatcacttaaatgtgagctttcttggcctggcaaggtggcttacgcctgtaatcccagcattttgggaggcagaggtgggcagatcacttgagattaggagttcaagaccagcctggtcaacatggtgaaaccctgtctctactaaaaatacaaaaattagccgggcatggtggcacatgcctgtaataccaactacttgggaggctgaggcacgagaatcgcctgaacctgggaggtggagattgcagtaagctgagatcacgatgccactgcactccagcctgagcgacagagtgagactccatctcaaaaataaatgcactttctgtagtactctcagagaccctyttctcaccatcctctcttcttgcataattgtattcaggcctttgcttcctttgccacctatatattgatgactcccatcttattactctctcgagttttaatctcatacatttgaggatctttggagaagcagagaatgag

SEQ ID NO: 787610 - DNA, 550 bp, Homo sapiens
tcctaacctcgaggagacagagaacaaagttgaggctgatacaagtcccctagagttagagcatacagtccaggagttggaagctgagctttggccccctaaaatcttccagaaatgaagccagttggctgaacccaccttcctccacaataaaatcattaagagcatcaactaagataaaaggaaaaaagcccatccaaagaacagcagcttcaaaaattgaaggaacattagcctagcaagatgagaaagaaccagtgacaactcaaaaagccagactgctttcattcctctaaacaacgtcactrcattgccaggaagggctctgaaccaggctgagatggctgaaatgacagaaatcaatttcagaatacagataggaacgaagatcattgagatgaaagagtacattggaaaccaatccaagtatactaagaatcatgatgaaacaatgcaggaactgacagacaaaatagccagtatagaaaacaatgtagccaacctgatagagctaaaaaacacactacaataatttcataatgcaatcaca

SEQ ID NO: 787611 - DNA, 550 bp, Homo sapiens
tcctaacctcgaggagacagagaacaaagttgaggctgatacaagtcccctagagttagagcatacagtccaggagttggaagctgagctttggccccctaaaatcttccagaaatgaagccagttggctgaacccaccttcctccacaataaaatcattaagagcatcaactaagataaaaggaaaaaagcccatccaaagaacagcagcttcaaaaattgaaggaacattagcctagcaagatgagaaagaaccagtgacaactcaaaaagccagactgctttcattcctctaaacaacgtcactacatygccaggaagggctctgaaccaggctgagatggctgaaatgacagaaatcaatttcagaatacagataggaacgaagatcattgagatgaaagagtacattggaaaccaatccaagtatactaagaatcatgatgaaacaatgcaggaactgacagacaaaatagccagtatagaaaacaatgtagccaacctgatagagctaaaaaacacactacaataatttcataatgcaatcaca

SEQ ID NO: 787612 - DNA, 550 bp, Homo sapiens
tcctaacctcgaggagacagagaacaaagttgaggctgatacaagtcccctagagttagagcatacagtccaggagttggaagctgagctttggccccctaaaatcttccagaaatgaagccagttggctgaacccaccttcctccacaataaaatcattaagagcatcaactaagataaaaggaaaaaagcccatccaaagaacagcagcttcaaaaattgaaggaacattagcctagcaagatgagaaagaaccagtgacaactcaaaaagccagactgctttcattcctctaaacaacgtcactacattgccaggaagggctstgaaccaggctgagatggctgaaatgacagaaatcaatttcagaatacagataggaacgaagatcattgagatgaaagagtacattggaaaccaatccaagtatactaagaatcatgatgaaacaatgcaggaactgacagacaaaatagccagtatagaaaacaatgtagccaacctgatagagctaaaaaacacactacaataatttcataatgcaatcaca

SEQ ID NO: 787613 - DNA, 509 bp, Homo sapiens
tattttaaaaaattggtaattgatagaatctttctggaagtcagtttagtaatatgtatcaaaagcttttcaagtgtgcatttgttttgacatatgtgcatttattctaaagatataatgcaaaagtgtatgaaactcattgctcaaaatattttcatcaccaccttgtttttgcagaaattcagaaataagttaaatgcacaataatsaggtcctggcttctacataagtcacagagtttagaaggctatctaatggcatgaaaagcatatatactctgttaggcataaaaagtagttatggagaaagagaatgtgcagcattctgaaacagaaacttgagtaatacacatcaaagtgttaattatagttttctttgagttgtggaattatacatggtttaaattgcttccttttgcttttctgtattttccaaaatttttataatgtccacacacatttcataatttaaaaacccccataaaacaataaatactattcgtttaaagg

SEQ ID NO: 787614 - DNA, 615 bp, Homo sapiens
aaacactcataataatcactttacattttgttctgtggttttcaattaacaaattaatgaatgaacaaaaagtacagagtggtttgtgccagacgataggaatgtaaaaaatataaactattatgttcttacctgaagtgaatattgtcataacacaaaccacctcatctaagaaactcttgctctcattgtgtttatttactgagacggactgtatatattttatcaggcacagagttcattattaattgcattttgattgaggggccatggaaagatttagataatccctcatcctgacactcatttattatcttaaatattgcctggggactttcatctgatgtaaatttctaggaaaaatgtagcattaagagaaatcttttttcagactattgaacccagtacatagccaaagaagttartgtaaaaacattacacaactgggactttcttttctgttgattagcaatttgaactttgcagagaggtaaaagaaaagtgatcagtttaaggcttcaactctggggatttagtagcagaggaaaattctcagccccattatgttgctgaccttctgaaattaagaaataaagaagttatgggattagaaat

SEQ ID NO: 787615 - DNA, 543 bp, Homo sapiens
tttgcagagaggtaaaagaaaagtgatcagtttaaggcttcaactctggggatttagtagcagaggaaaattctcagccccattatgttgctgaccttctgaaattaagaaataaagaagttatgggattagaaatatgtagccaagattgcattataatagcctgataaataactgcaaaaagtttattagcccacttattaaaaaaatgacttctttctaccatgtgtattacattgatgataaaaatgaacaaaatcagcatacaattttactcccttaaataaattgtttctcaccttgggaaaaaaggtgagtggttatttctcctgctgtcttacaatgtagtcattttaggttttccatgyttttggaattctaatcaccacaaattttatacagacacaactctataattaaaagaaaaaattatctattggtcattatctatttagttgaaaatagattcattttgtcccaggaaagatatacttcatatttgtcagctttctacttgtgtacacaaattctttcagagctgaa

SEQ ID NO: 787616 - DNA, 544 bp, Homo sapiens
tttccatggatttgcctattctagatattttatatcaatggaataatgtaatatgtgatcttttctcagtgacatctttcacttaacatgttttcgagtctcactcaagttatagtatgtatcaggacttccttctattatggccaaataatattctactgtgtggtaataccacattttgtttttccattgaacagttgatgaacatttgggttgtgtctttttggctcttacgccaggtgcagtggctcacgcctgtaatcccarcactttgggaggccaaggtggatggatcacctgaagtcaggagttcaagaccaacctagccaacatggtgaaaccctgtctctactaaaaatacaaaaattagccaggtgtgatggtgggtgcctgtaatcccagctactcaggaggctgaggcaggagaattgcttgaacctaggaggcagaggttgcagtgagccgagattgcactgctgcactccagcctgggcgacagagcaagactctgtctcgataataataataataccactgatgtgaa

SEQ ID NO: 787617 - DNA, 622 bp, Homo sapiens
tcccctatttcaattattttcactctgttattttcttctttctgcttgctttgggtttagtttgctttgttttttttccagcttcttaaggtagaagattatgttattgatttgccatatttcttcttttcaaaatatagacttttagagcttttaattttcctctaagcccatatttgactgcactaataattttactgtgttgtgcttttattttcattaatttcaaagtattttctaatttgccttgtgatttctcctttgatccaacggttaagagtttggccgggcgcggtggctcacgcctgtaatcccagcactttggcaggccgaggtgggcggatcacaagatcaagagatygagaccatcctggctaacgcggtgaaaccctgtctctactaaaaatacaaaaaattagcagggtgtagtgttgggcgtctgtagtcccagctactggggaggctgaagctggagaatggcgtgaacccgggaggcggagcttgcagtgagacgagattgcaccactgcactccagcctgggcgacagagcgagacaccgtctcaaacaaacaaacaaacaaacaaacagtttgttatctaatttacacgcatttataaatt

SEQ ID NO: 787618 - DNA, 622 bp, Homo sapiens
tcccctatttcaattattttcactctgttattttcttctttctgcttgctttgggtttagtttgctttgttttttttccagcttcttaaggtagaagattatgttattgatttgccatatttcttcttttcaaaatatagacttttagagcttttaattttcctctaagcccatatttgactgcactaataattttactgtgttgtgcttttattttcattaatttcaaagtattttctaatttgccttgtgatttctcctttgatccaacggttaagagtttggccgggcgcggtggctcacgcctgtaatcccagcactttggcaggccgaggtgggcggatcacaagatcaagagatcgagaccatcctggctaacgcggtgaaaccctgtctctactaaaaatacaaaaaattagcmgggtgtagtgttgggcgtctgtagtcccagctactggggaggctgaagctggagaatggcgtgaacccgggaggcggagcttgcagtgagacgagattgcaccactgcactccagcctgggcgacagagcgagacaccgtctcaaacaaacaaacaaacaaacaaacagtttgttatctaatttacacgcatttataaatt

SEQ ID NO: 787619 - DNA, 630 bp, Homo sapiens
cagagacaagggcagaggccctgtgggtagattcattgtagggagagtggcatcaggggacaaatgggccttttctcttctcacctgcagctccattccttaccatgaagagcctctcctgcaagcatgtggacaccccatataattgtgtcctagtccctccgcaacaaatagcagcgtctgaggcctgaaggtgtgcagagtagctccatctgcccttgggaggacagagccctgggaagagcctcatgcaggccttaaatcaggcttggagttgttggggtagggagctccagactcttgagtgcttagrgttatataggaagagagagattgggctgcaagtatccatatactctgggactcagagactccatgctctgtggggttggtctggtcagaggagggaacgagaggagctccctttggctggactgagggtagtatatgtgaaaggtcttgcctgggcaggtggacttctgggaagagacgtggctttgagactggaggccaagcttgtgttacatggatcctgtgggcaactttggtggatgccgtgccccagctgagctcttaagtggctggaataatctcatagcaatagggaagctaagagactctttgaacttg

SEQ ID NO: 787620 - DNA, 630 bp, Homo sapiens
cagagacaagggcagaggccctgtgggtagattcattgtagggagagtggcatcaggggacaaatgggccttttctcttctcacctgcagctccattccttaccatgaagagcctctcctgcaagcatgtggacaccccatataattgtgtcctagtccctccgcaacaaatagcagcgtctgaggcctgaaggtgtgcagagtagctccatctgcccttgggaggacagagccctgggaagagcctcatgcaggccttaaatcaggcttggagttgttggggtagggagctccagactcttgagtgcttagggttatataggaagagagagattgggctgcaagtakccatatactctgggactcagagactccatgctctgtggggttggtctggtcagaggagggaacgagaggagctccctttggctggactgagggtagtatatgtgaaaggtcttgcctgggcaggtggacttctgggaagagacgtggctttgagactggaggccaagcttgtgttacatggatcctgtgggcaactttggtggatgccgtgccccagctgagctcttaagtggctggaataatctcatagcaatagggaagctaagagactctttgaacttg

SEQ ID NO: 787621 - DNA, 601 bp, Homo sapiens
ctttactttaatggacagacaactccactgcaaagtttgaagcatgagaagctctgtgaacactcttttgcattgtagtaagtttttttattgttttgtagactactgttcataaagttttattatatttcattgcttagagtttttttctacatcatcctgtctgttcactctccccaataattaggaaggagaaatgcctgttcataaatatctattgacttagcctagctactaaggtacaacccctttaaccttcaccaaagtgacaccttagaagtaatgatacatgaaacttcactcacatatacaagatacccacttctttcatgccattgagaaatatttatttcatgattaaaagcagtgactcaaaaatgaactggatttccctttattttctacattctaagatgcctgatggtctcactgctgagttgtaacagctckattagtccctttctctggggttctgagtgtgagtgtgcttcccctcactttaaaccctgtaggaaaagggggccaaaagatgtggagatagaagatatggaggaataaacagaaatgcactgactgagaaacagctgacttgcaggagaga

SEQ ID NO: 787622 - DNA, 527 bp, Homo sapiens
ctcaatgttgcccaggctggagtgcagtggcatgatcttggctcactacaacctccacctcccagccgcctgccttggcctcccaaagtgccgagattgcagcctctgaccggccgccaccccgtctaggaagtgaggggcgtctctgcctggccgcccatcgtctgggatgtrgggagagcctctgccccgctgccccgtctgagatgtgaagagcacctctgcctggccgcgatcccgtctgggaactgaggagtgtctctgccccgccgccaccccatctgggaggtgaggagcatctctaactggccgccccgtctgggaagtgaggagcgtctccgccgggcagcctccctgtccgggaggtggggggcgcctctgcccagccgccaccccatctgggaggtgtacccaacagctattgagaacgggccatgataacgatggcggttttgtcgaatagaaaagggggaaatgtggggaaaagaaagagagatcagattgttactgtctctgtagaaagaagt

SEQ ID NO: 787623 - DNA, 527 bp, Homo sapiens
ctcaatgttgcccaggctggagtgcagtggcatgatcttggctcactacaacctccacctcccagccgcctgccttggcctcccaaagtgccgagattgcagcctctgaccggccgccaccccgtctaggaagtgaggggcgtctctgcctggccgcccatcgtctgggatgtagggagagcctctgccccgctgccccgtctgagatgtgaagagcacctctgcctggccgcgatcccgtctgggaactgaggagtgtctctgccccgccgccacccsatctgggaggtgaggagcatctctaactggccgccccgtctgggaagtgaggagcgtctccgccgggcagcctccctgtccgggaggtggggggcgcctctgcccagccgccaccccatctgggaggtgtacccaacagctattgagaacgggccatgataacgatggcggttttgtcgaatagaaaagggggaaatgtggggaaaagaaagagagatcagattgttactgtctctgtagaaagaagt

SEQ ID NO: 787624 - DNA, 527 bp, Homo sapiens
ctcaatgttgcccaggctggagtgcagtggcatgatcttggctcactacaacctccacctcccagccgcctgccttggcctcccaaagtgccgagattgcagcctctgaccggccgccaccccgtctaggaagtgaggggcgtctctgcctggccgcccatcgtctgggatgtagggagagcctctgccccgctgccccgtctgagatgtgaagagcacctctgcctggccgcgatcccgtctgggaactgaggagtgtctctgccccgccgccaccccatctgggaggtgaggagcatctctaactggccgccccgtctgggaagtgaggagcgtctccgccsggcagcctccctgtccgggaggtggggggcgcctctgcccagccgccaccccatctgggaggtgtacccaacagctattgagaacgggccatgataacgatggcggttttgtcgaatagaaaagggggaaatgtggggaaaagaaagagagatcagattgttactgtctctgtagaaagaagt

SEQ ID NO: 787625 - DNA, 615 bp, Homo sapiens
tatgtgtgcaccatggtatgaaaaaaatgtgaaaaaggagaatttcactgttttgtttttttctcccactcccacaagcaattctctttttagcagtaactaaagaaagctaaacatttatttttatcttttaactgttccattttgtcttgtcatcatcttttgattgcatataactgagtgtttttttttatttaatcagtaagtttagggcgatctaactgcaggcaatctaaatgcatgcatgtgcacacacacacacagacacacacacacacacacacacacacacaagaactattatttcatagcatagttgttgaagggctttggaatcagaaggcctggatcatgccctgatatttaatacctgtgagactttgggcaagtaactcagtcattctaaagatgacttcctaccttagaatgatgtgacaatcmgctaaaaaacataggtaagtaaaactgtagttcttggaacatgacattcatttgctcacgtattcactcatcatttgttcatgaattcattcgatgactagttactagcacctatttcatgcaggccctgagccaggtcctggagatacagcagggaacaaaacagagcaactc

SEQ ID NO: 787626 - DNA, 601 bp, Homo sapiens
cctgctgtccttgggtcctccacgtgagacctgctgtccctgggtcctccgtgaggcctgctgtccttgggccctccatgtgaggccttctgtccctggtcctgtggctgcatcttccggtggatgcaaccacggccacatatccatctcatctctaccacatctgagtcacagtttctagaccagaaaactcttgctaacrtttaggatttagacagcatctctttgcttctcttttcccaattttagacttcccttgtaaggaatgaaaaccattataattctgagaaacctaggccagacaaagcctcatggccattttcctcagctcatagtgccctactaggccaggggcaaggtcactctccccgcaatccacccatcctgctccaagtcaggagccctcacagagtttctcagcttcccactagtaggtctttgttcatcgcattctcccacattgaagcaaattggagctaccttcttttttccctcctcttgggagttgctttattttgggtttctttgtacaaattgttgccatagcccttgatgggaaggatcaagatggatcctctcatccttccccttactgagcaga

SEQ ID NO: 787627 - DNA, 601 bp, Homo sapiens
cctgctgtccttgggtcctccacgtgagacctgctgtccctgggtcctccgtgaggcctgctgtccttgggccctccatgtgaggccttctgtccctggtcctgtggctgcatcttccggtggatgcaaccacggccacatatccatctcatctctaccacatctgagtcacagtttctagaccagaaaactcttgctaacgtttaggatttagacagcatctctttgcttctcttttcccaattttagacttcccttgtaaggaatgaaaaccattataattctgagaaacctaggccagacaaagcctcatggccattttcctcagctcatagtgccctactaggccaggggcaaggtcactctccccgcaatccacccatcctgctccaagtcaggagccctcacagagtttctcagcttcccactagtaggtctttgttcatcscattctcccacattgaagcaaattggagctaccttcttttttccctcctcttgggagttgctttattttgggtttctttgtacaaattgttgccatagcccttgatgggaaggatcaagatggatcctctcatccttccccttactgagcaga

SEQ ID NO: 787628 - DNA, 612 bp, Homo sapiens
ccacccatgaccctgaaacagaatgggcagggtggaaaatgaatggctacatgaatacattatggtaaaataaatatttggaaagtccacaataatcatacaaatgcatgataataaatgatgcagtaaggcaacaatcagtgggcctgtaatttttttttttttttttttttttttttttttgagatggagtctcgctctgccacctaggctggagtgcagtggcgtgatctcggctcactgcaagctccgcctcccrggttcacgccattctcctgcctcagcctcccaagtagcgagtatgtgggattacaggcacccatcaccatgcctggctaattttttgtatttttagtagagacgggggttcactttgttagccaggatagtctcaatctcctgacctcgtgatccacctgcctcggcctcccaaagtgctgggattacaggcgtgagccacctgtaatatttttaattgcttgtttcttaactgagtggtggcagaagatgccccttataatgtttgcttagcaaacatatattattttatttaaaccactacaacaattttcactcactgattcaccaaaaattgggtaaacaattgtcttt

SEQ ID NO: 787629 - DNA, 620 bp, Homo sapiens
ggccttctttgtctcttttgatctttgttggtttaaagtctgttttatcagagactaggattgcaacccttgcctgtttttgttttccatttgcttggtagatcttcctccatccctttattttgagcctatgtgtatgtgtgtctctgcacatgagatgggtttcctgaatacagcacactgatgggtcttgaccctttatccaatttgccagtctgtgccttttaattggcgaccagggcrtatttcatcccttatctacaactgcataagacagatactcccagagcggccattttagagaccttctcctgggagttcattcattttcccagggttattccttgctgagaaaagaatttagtgatatttctcctattcactttctgaaagaagagaaatatggatctgttctgcctggccccgcaggcagtcagactttatggttatctccctttttctcttaaaatcgatgttatcctgttcttttcaaggtgcccagatttcatattgttcaaacacacatgttttacaaacaatttatgcagataacacaattatcacagggtcctgatgtgacatgcatcctcatcttaagaagatgacgggattaagagact

SEQ ID NO: 787630 - DNA, 501 bp, Homo sapiens
atatataggatccagtttcaatcttttgcctatggctagccagttgtcctagcaccactgaatagggagtccttttcctattacttgtttttgtgaattttgtctatgatcagatggttgtaagtgtgtggcataatttctaggctctccattcttttcccctggtctatgtgtctgttttgtaccagtaccatgctgttttggttactgtagccctgtagtctagtttgaagtcaggtagtgtgattcttcctgctttgttctttttgcttagaatcgctttggctatctggggtcttttttggttccatataaattttataatawttttttccagttatgtgaagaatgttattggtagtttgataggaattgcattgaatctatacattgctttgtgtggtatggccattttaatgatattgattctttctatccatgaccatggatgtttttccatttgtttgtgtcatctctgatttctttgagcagttttgtgta

SEQ ID NO: 787631 - DNA, 576 bp, Homo sapiens
ttccattctccccgtcattttctggtacaccaatcaaatgtagatttggtcttttcacatagtcccatgtttcttggaggcgttgttcatttctttttactcttttttctctaatcttgtcttttcgctttatttcattaatttgatctgcttgatctaattggctattgaagcttgtgcatgcatcccgaagtctcgtgccggggttttcagctccatcaggtcatttaaggtcttctctacactggttattcgagttagccattcatctaaccttttctaaagatttttagcttccttgcgatggtttagaacatgcttctttagctcggagaagtttgttattattgaccttctgaagcctacttctgtcaacttgtcaaagtgattctctgtccagttttgttctgttgctggcgaggagctgtgatcytttggaggagaagaatcgttcttgtttttggaattttcagcttttctgctctggtttctccccatctctgtggtttcatctacctttggtctttgatgttggtgacctacagatggggttttggtgtggatgtcctttttgtt

SEQ ID NO: 787632 - DNA, 530 bp, Homo sapiens
tgctagaaagactcacagaactttctgagttacactcacagttaagatttaccacagagaaaggatatagattaaaatcagtcaaaggataaagtgcatagtgcagagtctaggaaagaaccaaatgcagagcttccattttcctctccccatggatcaggacatagtacttttccagcattgatgtatgacaataagcacaggctatcattaaccagggaagctcagcagagcctctgtgttcagagcttttattgaggctccattacaaaaacatgattgactattcacatagctaattttagtttccagtctccagtcactcaaggtgtgacccaaagctctcatcttaaatcacatttttggcatggatcaaagctccaccytaaatcacatctgttactgtctggctagccaaagccctccaggcaaacaaagacactcctgtcagacacgaggatccaagggcttagagatgactcccaaaagctcaagacaaaggccatttcttttgggacaaggttaaattc

SEQ ID NO: 787633 - DNA, 625 bp, Homo sapiens
aaaaacacatttgaaagaactggtggacagaaatrcagaaccaagaattggggctgagaatgctgaaagcacatggagagaacacctgataagagcttgaaattcaagcaacagcccaagtgcttgacatgactgatcaggaatgaatgactatctacaagcatcttatagcttttcagttttcttttttggggttattttgtttcacacttgtgttcattggattgactttttaatattttttgtttggatactcaagtataggattacagcacagtgaatgcttatatcactaacctaattaaatgcaagtatttattactacgtcttgatactaagtgagtttttgtagtgttcattggttccttacaaatcctttttttaaataggaacagctagtggttccaacagtcctacctcagattctgcatctgtacagagagcagacactagcttaaacaactgtgaaggtgctgctggcagcacatctgaaaaatcaaggtaagattgaacgtttcagagtttttatgatattacaaagaagaaatcaagatgtctgtactggtccaataataagttaatagatacccttggctttgcaatcgaggatttcagtgtcttttaa

SEQ ID NO: 787634 - DNA, 564 bp, Homo sapiens
tgattaggaaataaattgttcactgggcacggtggctcacgcctgtaatcgcagcactttgggaggctgaggcaggcggatcacctgaggtcaggagttcgagaccgtctcggccaacatggagaaaccccgtctctacaaaaatacaaaagttagccaggcatggtggtgggcgcctggagcagctacctgggaggctgaggcaggagaatctcttgaactcgggaggtggaggttgcagtgaggcgagatcgggccattgcactccagcctgggtgacagagcaaaactccgtctcaaaaaaaaaagaaagaaagaaaaataaattattcttccttaattagcttgatttaattattccataatgaatacatatacatgaaaatatcrcattgtacctcataaatatatgcaattattaattatccattaaaaataaaatacattttttaaaagaattaaaataaaataaatggctcctcagagcagagagatgtgaactgagcctcaggaaaaccgcaggctacttctgggtctgccgtgaagcagctgtgtgaccacaga

SEQ ID NO: 787635 - DNA, 587 bp, Homo sapiens
aaatattttaagttttcttgaattacagctttagatcagggttggcaaactatagtcatgtgtcacttagcactggggataccttctgacaaatgtgttgttaggtggttttgtccttgtgttagcctcagggaatgtactcacacaaacctagatggtatagcttactacacacctagcttatatggtgtggcctattgctcctatgctacaaacctattccttcttcaaaggtaaactaactttagcttactgtaacatttttacttttttaaactatttaatttttaaaaatttttgacttttataataaatttagcttaaaacacattgtayagctgctcaaaaatattttatttccttatatttttattctataagctttttttcatttttagaatttttactagttttttactttttaaattttttgttaaaaactaagacacaaacacacaccttagcctaggcctgcacagtgtcaggatcatcaatatcactgctttccacctccacatcttgtcccacttggaaggtcttcatggcaataacatacatggagctgtcacgtcctatgataacaatgc

SEQ ID NO: 787636 - DNA, 550 bp, Homo sapiens
aactcttctcttccccctattcctccctcagggctcagccttcctttaagactctcccacaagaaagagttgatcttaccctcctactcagacattaagtttagtggccagaactaactgatctttcaaggacaacaggtggatttaggaattgctcactggtagctcatacctggcaactttttatttcctttaatgtaaggctaataattccttcacctaagaagagaggaaagatcattcgctggccaacttattctgctacatacattcatttattgtakttattgtggtaatctccccaggtgccattggtaatttgatagtgttgtttacttgtggttttggattttttttacaatgaatacatgtatttttgtgcaaataaataatacatgttaataataaatgaatgtggctaatatattttataaagagatagtctgatgatctactctggtttaattctcccagatctattagtagaagcctttttttgttttttttaaccacttttgttaatcattaaaatattttccaaaggtagaaa

SEQ ID NO: 787637 - DNA, 621 bp, Homo sapiens
tacctaggtcattctgtttcttgacatctatgactaattaatatgtcataaacatgacccaaactacacaaaattagtatcagttttaaaattttgactggaaatgcctgaaataaattgtttttggggggcaaggttcaggcagaaaggcaaggagtgtagaattttagagtttgttgtggtcatatttaccaacattagatgtgagattttattwttcagaatgctttgatgtatcaaaacctcaaaatgctgcaaatgagaaatcaaaacattcatggattgaatatataccttgattttgtggctccaatttactaaaaaagcagtctggccagtccaggaaatatgtcatttctcactattcctggcacatcaagtttttcctcacattaaggtaatgtttcagcatgtgcttattttgtttttgaatataatggtgcatggctgtttgggctctcagaattttttaagccattaattttatctcaggtcttttttgcattccacaccttcctgcatactaactaggtgtgtaaatttcttttaaaatcacataaattttcacttaaaatccttaccagtccaaatcaattcattcttcctcatggtatatattcc

SEQ ID NO: 787638 - DNA, 621 bp, Homo sapiens
tacctaggtcattctgtttcttgacatctatgactaattaatatgtcataaacatgacccaaactacacaaaattagtatcagttttaaaattttgactggaaatgcctgaaataaattgtttttggggggcaaggttcaggcagaaaggcaaggagtgtagaattttagagtttgttgtggtcatatttaccaacattagatgtgagattttatttttcagaatgctttgatgtatcaaaacctcaaaatgctgcaaatgagaaatcaaaacattcatggattgaatatataccttgattttgtggctccaatttactaaaaaagcagtctggccagtccaggaaatatgtcatttctcactattccyggcacatcaagtttttcctcacattaaggtaatgtttcagcatgtgcttattttgtttttgaatataatggtgcatggctgtttgggctctcagaattttttaagccattaattttatctcaggtcttttttgcattccacaccttcctgcatactaactaggtgtgtaaatttcttttaaaatcacataaattttcacttaaaatccttaccagtccaaatcaattcattcttcctcatggtatatattcc

SEQ ID NO: 787639 - DNA, 670 bp, Homo sapiens
gtattagggtgggagtgacccgattttccaggtgccatctgtcacccctttctttgactaggaaagggaactccctgaccccttgtgctcttgagtgagggaatgcctcgccctgctttggctcgtgcatggtgcgctgcacccactgtcctgcaaccactctctggcactccctagtgagatgaacccggtacctcagatggaaatgcagaaatcacccgtcttctgtgtcgctcacactgggagctgtagactggagctgttcctattyggccatcttggctccatccccattttggtgattttaaacttttttctcacaatgttaacattttcacaataaatatataaatcattttcatataaaatcagatggattctataacgattttttaagtcatgcttttagatgaaaattctgtttttttgaaattagtatggttgtatctctttacttcccgccaacatttgcttcatatttttttctgcctctttgtctttgactcagttatcaatagtaagattaaaagacatgctctttctcagtagtttcaaatgatgcaggagacagaagtaataccagtcaggatgcagtagagatgtttctctttaaccactcctttctctagtgaataatagagctacacagtgaagtgtttttcctttattg

SEQ ID NO: 787640 - DNA, 670 bp, Homo sapiens
gtattagggtgggagtgacccgattttccaggtgccatctgtcacccctttctttgactaggaaagggaactccctgaccccttgtgctcttgagtgagggaatgcctcgccctgctttggctcgtgcatggtgcgctgcacccactgtcctgcaaccactctctggcactccctagtgagatgaacccggtacctcagatggaaatgcagaaatcacccgtcttctgtgtcgctcacactgggagctgtagactggagctgttcctattcggccatcttggctccatccccattttggtgattttaaacttttttctcacaatgttaacattttcacaataaatatataaatcattttcatataaaatcagatggattctataacgattttttaagtcatgcttttagatgaaaattctgtttttttgaaattagtatggttgtatctctttacttccygccaacatttgcttcatatttttttctgcctctttgtctttgactcagttatcaatagtaagattaaaagacatgctctttctcagtagtttcaaatgatgcaggagacagaagtaataccagtcaggatgcagtagagatgtttctctttaaccactcctttctctagtgaataatagagctacacagtgaagtgtttttcctttattg

SEQ ID NO: 787641 - DNA, 670 bp, Homo sapiens
gtattagggtgggagtgacccgattttccaggtgccatctgtcacccctttctttgactaggaaagggaactccctgaccccttgtgctcttgagtgagggaatgcctcgccctgctttggctcgtgcatggtgcgctgcacccactgtcctgcaaccactctctggcactccctagtgagatgaacccggtacctcagatggaaatgcagaaatcacccgtcttctgtgtcgctcacactgggagctgtagactggagctgttcctattcggccatcttggctccatccccattttggtgattttaaacttttttctcacaatgttaacattttcacaataaatatataaatcattttcatataaaatcagatggattctataacgattttttaagtcatgcttttagatgaaaattctgtttttttgaaattagtatggttgtatctctttacttcccgccaacatttgcttcrtatttttttctgcctctttgtctttgactcagttatcaatagtaagattaaaagacatgctctttctcagtagtttcaaatgatgcaggagacagaagtaataccagtcaggatgcagtagagatgtttctctttaaccactcctttctctagtgaataatagagctacacagtgaagtgtttttcctttattg

SEQ ID NO: 787642 - DNA, 619 bp, Homo sapiens
tggtgtgctatcaggggcattgctgaaagcaggaatcttagcggctgggagtcaccgtgtgggcagaggaggagaggagacagagactgtgtggagaggtgaggctctgtgctgtcagtgagggctgttctctgcccccatctcttccagtccctttttatctctgccatcccaggaatgatggaagtgcctgaggaagactacctgggcttcctgatgagttactggcagactgcctctgtgggacaagagggtcacctgcaagccagacagtccaaatcctccctgaaacacaycactctccactcactgcttaccaattcccttcaaggctgctccagctgcacatttttaaaagttgttctattcaatgagaagacatagacacagggaggggaacatcacacaccggggcctgtcagggggtcagggggtcagggtcaaggggagggagagcattaggacaaatacctaatgcaggcagggcttaaaacctagacgatgggttgataggtgcaacaaaccaccatggcccatgtatacctatgtaatgaaacggtacattctgcacatgtatcctggaactttaaaataaaataaaaactttttaaaaagttgt

SEQ ID NO: 787643 - DNA, 602 bp, Homo sapiens
tgaaatcttttgattaaccactgagtctctaatatccagcacaatatttggcacaaaataggtactcaaaaaatatgtattaaaggaatagggcaatgataccaaattcaaaacaaaagactgataggaagtatgaactggtagaaaggccaaaggaaaaaaaaagataatagtaaaaatgtgatcacagaaaaccttctaggcaaaaattgaatacaggcctctaaatgtcgtgtccaaaacccaygcccaaataaatgtgtgctctccctaggtagcttgccatcctctgtaatactgtgacagtccagtagactcaaaggagaggtcagcatatattagtccttatgaggtttaaacatatatgatggaatgtggtggatttcattatttttatgcttttgagactggaaaatatttggtttgctggtgatggagggagctgttgttatatataatccagtgggtactttaagatttgggtagtccgggttatataagaaaaaaattttaaagtgtagctattaaatgacaatcatctaagttggtttaagaagttaatgattcaaaatgtgaataatttaagatctgttttccaaaat

SEQ ID NO: 787644 - DNA, 602 bp, Homo sapiens
tgaaatcttttgattaaccactgagtctctaatatccagcacaatatttggcacaaaataggtactcaaaaaatatgtattaaaggaatagggcaatgataccaaattcaaaacaaaagactgataggaagtatgaactggtagaaaggccaaaggaaaaaaaaagataatagtaaaaatgtgatcacagaaaaccttctaggcaaaaattgaatacaggcctctaaatgtcgtgtccaaaacccacgcccaaataaatgtgtgctctccctaggtagcttgccatcctctgtaatactgtgacagtccagtagactcaaaggagaggtcagcatatattagtccytatgaggtttaaacatatatgatggaatgtggtggatttcattatttttatgcttttgagactggaaaatatttggtttgctggtgatggagggagctgttgttatatataatccagtgggtactttaagatttgggtagtccgggttatataagaaaaaaattttaaagtgtagctattaaatgacaatcatctaagttggtttaagaagttaatgattcaaaatgtgaataatttaagatctgttttccaaaat

SEQ ID NO: 787645 - DNA, 602 bp, Homo sapiens
tgaaatcttttgattaaccactgagtctctaatatccagcacaatatttggcacaaaataggtactcaaaaaatatgtattaaaggaatagggcaatgataccaaattcaaaacaaaagactgataggaagtatgaactggtagaaaggccaaaggaaaaaaaaagataatagtaaaaatgtgatcacagaaaaccttctaggcaaaaattgaatacaggcctctaaatgtcgtgtccaaaacccacgcccaaataaatgtgtgctctccctaggtagcttgccatcctctgtaatactgtgacagtccagtagactcaaaggagaggtcagcatatattagtccttatgaggtttaaacatatatgatggaatgtggtggatttcattatttttatgcttttgagactggaaaatatttggtttgytggtgatggagggagctgttgttatatataatccagtgggtactttaagatttgggtagtccgggttatataagaaaaaaattttaaagtgtagctattaaatgacaatcatctaagttggtttaagaagttaatgattcaaaatgtgaataatttaagatctgttttccaaaat

SEQ ID NO: 787646 - DNA, 602 bp, Homo sapiens
tgaaatcttttgattaaccactgagtctctaatatccagcacaatatttggcacaaaataggtactcaaaaaatatgtattaaaggaatagggcaatgataccaaattcaaaacaaaagactgataggaagtatgaactggtagaaaggccaaaggaaaaaaaaagataatagtaaaaatgtgatcacagaaaaccttctaggcaaaaattgaatacaggcctctaaatgtcgtgtccaaaacccacgcccaaataaatgtgtgctctccctaggtagcttgccatcctctgtaatactgtgacagtccagtagactcaaaggagaggtcagcatatattagtccttatgaggtttaaacatatatgatggaatgtggtggatttcattatttttatgcttttgagactggaaaatatttggtttgctrgtgatggagggagctgttgttatatataatccagtgggtactttaagatttgggtagtccgggttatataagaaaaaaattttaaagtgtagctattaaatgacaatcatctaagttggtttaagaagttaatgattcaaaatgtgaataatttaagatctgttttccaaaat

SEQ ID NO: 787647 - DNA, 625 bp, Homo sapiens
agaaggcaaagaaggaggtacgtcttacatggcaagtgcaggaggaagagagagagagtaaagggggaagtgctacacactttcaaacaaccaaatctcatgagaactcactatcataagtacagcaaggggaaaatctgaccccataatccaactacctcccaccaggtcccttccccaacattgaagattataattcagtgttagatttgcatagggacacagagccaaaccacatcgctaacctttacctgaagttaggatttctccaactctaatgtaggtaactamccacgttgatttagcagtacctgtaactctgccatcaagagaaaccatagatatttttatatcacattacgtatattgaaatatgtgttatgctacccaaaatttcaaaattatagtaattattgaatctgccactagagaatgatgagctaattaatttaatgggataattaagaaggatgtattttactaaaccacaaaaaattttgaatttcagtacatgtggcttcctttgcaattctatgtattttattgactgaatttctaaacgtagttttgagaatgggatccataggcttcaccaaactgccagtgtggtccgtggcaccaaaaa

SEQ ID NO: 787648 - DNA, 624 bp, Homo sapiens
tgatttccagcacaacagaggtaaaaacagcagcaatagccactccagtttctcccttagggccttgaagaacgacagctacctggagatttctcttcaggtggcacctaaggtggagccgcccagccctgcacatcctagggaactagtcacctaggagacagcatgaaaggggccagcaaattgggtctttaataacctgtgggtatttccacttcacaaaacttagaggccagaggagcaagtgaacataatatctcacatatatctaacactgtgtactttaccaaaggcctctgtgcccaactaaagaaatatttatgaagcatttaacagaagtcaagtaatgtgctggcactttcggatctattactttgttataaatttgatactcaccctgttggctaattattrtcagaactgaatcagagaaattatgagtttgatacaagttcaaatttctcaaaagtggcagcagaattaaatattctggctctattaaatctcctttgttcattgtgttgcctccaagccccttgcccacaggcggcctaagaggtgaacatcgctttagagtaaatgtcattaatagtttgaatctcatactacagcctgaagaaatgg

SEQ ID NO: 787649 - DNA, 624 bp, Homo sapiens
tgatttccagcacaacagaggtaaaaacagcagcaatagccactccagtttctcccttagggccttgaagaacgacagctacctggagatttctcttcaggtggcacctaaggtggagccgcccagccctgcacatcctagggaactagtcacctaggagacagcatgaaaggggccagcaaattgggtctttaataacctgtgggtatttccacttcacaaaacttagaggccagaggagcaagtgaacataatatctcacatatatctaacactgtgtactttaccaaaggcctctgtgcccaactaaagaaatatttatgaagcatttaacagaagtcaagtaatgtgctggcactttcggatctattactttgttataaatttgatactcaccctgttggctaattattgtcagaactgaatcagagaaattatgagtttgatacaagttcaaatttctcaaaagyggcagcagaattaaatattctggctctattaaatctcctttgttcattgtgttgcctccaagccccttgcccacaggcggcctaagaggtgaacatcgctttagagtaaatgtcattaatagtttgaatctcatactacagcctgaagaaatgg

SEQ ID NO: 787650 - DNA, 636 bp, Homo sapiens
cctttcatcttccattctcactgggcttttgtacacatggcctcatctccctagaatgtccttgccaacctcatttgcctggccaacttttcctcccttccaggactcaacccaaatatcaaacttcccggacatccacctcctccttagtctgaactggtcctccatcctctcgtaacccctgtattctgctatatccttagttatcactgtgcactgtaactgtaacytgcctcccccacttgcaaatgaggctattgaaaaataaaagctatgtcttatttcttgtgtatctcctgtccctaaccccaagtctgacacacaaagacatagtgcaaataaatgaaagtctggtcattcatttattcattccacaaatattggaccaggcactgtacttggtgccgagggtacaagagtaaaaaggcctgagagtatgaatctgtcacctcaaggagtctgtatcctaataggggtgagacagacaataccaagtagataaataattgtagataattataattacagatttattattattatagattattgagtcattatagatcatgatctattagtagtagagaaataattgtagattaatatttgagagtgctcactctgtgccagaatatc

SEQ ID NO: 787651 - DNA, 636 bp, Homo sapiens
cctttcatcttccattctcactgggcttttgtacacatggcctcatctccctagaatgtccttgccaacctcatttgcctggccaacttttcctcccttccaggactcaacccaaatatcaaacttcccggacatccacctcctccttagtctgaactggtcctccatcctctcgtaacccctgtattctgctatatccttagttatcactgtgcactgtaactgtaacttgcctcccccacttgcaaatgaggctattgaaaaataaaagctatgtcttatttcttgtgtatctcctgtccctaaccccaagtctgacacacaaagacatagtgcaaataaatgaawgtctggtcattcatttattcattccacaaatattggaccaggcactgtacttggtgccgagggtacaagagtaaaaaggcctgagagtatgaatctgtcacctcaaggagtctgtatcctaataggggtgagacagacaataccaagtagataaataattgtagataattataattacagatttattattattatagattattgagtcattatagatcatgatctattagtagtagagaaataattgtagattaatatttgagagtgctcactctgtgccagaatatc

SEQ ID NO: 787652 - DNA, 636 bp, Homo sapiens
cctttcatcttccattctcactgggcttttgtacacatggcctcatctccctagaatgtccttgccaacctcatttgcctggccaacttttcctcccttccaggactcaacccaaatatcaaacttcccggacatccacctcctccttagtctgaactggtcctccatcctctcgtaacccctgtattctgctatatccttagttatcactgtgcactgtaactgtaacttgcctcccccacttgcaaatgaggctattgaaaaataaaagctatgtcttatttcttgtgtatctcctgtccctaaccccaagtctgacacacaaagacatagtgcaaataaatgaaagtctggtcattcatttattcattccacaaatattggaccaggcactgtacttggtgccgagggtacaagagtaaaaaggsctgagagtatgaatctgtcacctcaaggagtctgtatcctaataggggtgagacagacaataccaagtagataaataattgtagataattataattacagatttattattattatagattattgagtcattatagatcatgatctattagtagtagagaaataattgtagattaatatttgagagtgctcactctgtgccagaatatc

SEQ ID NO: 787653 - DNA, 616 bp, Homo sapiens
ctttttcctgaactccagaaatcaatttcaataatcaggtggggaaaccagcagggaatccaatgtctggaacagaaaaatgatgatggtggtcaaaataaaattttctgttttaaaataaatgcacatgaataaaaatatgaaaaattgaaaattctagcttggagacttatttattcttttagggtaccagtctttttattattacagtgtamgtggagaatgtttcaccatggacacagttgtgtatgctaaatagagattttacattgcttgagtttccattcgagtttggttttctgagcatcatgcctaagggaacagcctgacaactacatcatatcatttgtgagttaactttttaaatctgagtttaacaaatggaaatgagatttagaagctaaaagaataaagaggcataaaaatagcaagaaagccttaactctgtggctccagattattctgatgtatcgactgacaaatttttcacttttctaatttatcctcttctttactgtttactgacaagaaaattatttctataggagatctttaagattcttcatttgtgtagtaagtagattacaacaacaaaactgcaaactccttagaagta

SEQ ID NO: 787654 - DNA, 579 bp, Homo sapiens
gctacagctttctgaatcccagcaaaaccattacatctgagaagtatgctcagcaaatcgataagatgcatcaaaaactgcaatgcctgcagccggcattgctcaacagaaaagggccaattcttctctcaacaatgtctgaccacatgtcacacaaccaatgcttcaaaagttgtacaaattgggctatgcagttttgcctcacctgccatattcatctgacctctcgccaaccaactaccacttcttcaagcatcttgacaactttttgcagcaaaaacacttccacaaccagcaggatacagaaaatgctttccaagagtttgccgaatytggaggcatgaatttttaggctacaggaataaacaaacttatttcttgtaggcaaaaatgtgttgattgtaatggttcctattttgattaataaagatgtgcttgagcctcattataatgatttaaaattcatggtccaaaacagtaattacttttgcaccaacatttcttgtgttcttattatgcaccagtacagtgctaagcattttacatgtgtaaattcagttatttcttacaaccactcaa

SEQ ID NO: 787655 - DNA, 612 bp, Homo sapiens
cctgaaaaggaataaagtcctgatacatgctacatacctgataggagtcctgatacatgaatctcaaaaacattatgctaagcaaaagaagccagacaaaaggccacatattgtatgattccttgtatttggaatactcagaataggcaaatccatagagacacaaagctgattagcggaggaggaatagagaatgattgcttaatgaatgtaaggtattttgtggtgtaatgaaaaagttttaaaactagagaaaaayggccattgtacagcattgtgaatgcaccaaatgcccctgaattatctactttaaaagttaattgaatgttatttgaatttcagctctgtttttacatcagactcaaaacataacaaaaatctaatcttctcatttagaggtcaccccataaacatcaggacaaaatcccaataacttatattggcattcaagtcccttcacaacttggcctaaacttatatcctccccctgatctccaccacttcccacaagtcctctatattctagccacatgtttctctcataactcttctttgaaatgtctttccacaacagctttgcatatgctgctctgcttccccatctagaccatg

SEQ ID NO: 787656 - DNA, 620 bp, Homo sapiens
ccactctcaatcccccctgcttctaatccatgtctaagctgcttctgttcaactgctttactttacatgcatttctctttttcttgcagagggaaagtaacacggcatatcgtggtcttttagagaactacttcaagatatattgaagtcaaatgtcagaaaaataggttttttaaccacataccattaatgtaaattagtccaatagactcctgagtactgtgttacacagtacaaaacccaaagcagatgcataataaaatacctatgtaagaatgttgctcaaatttctagctccctttaccaatctagctctaaactcttatcaccttttatgttacaagaacagggtacctagttgactccagtgtctagaaacagagggaaaaaaagaaagtggtaagaagtaaacatgatacagaaggacataaagataattcagaaaaraaaaaaggcaaatagcaagcctatgaaaacatgttcaacttcaataagaatcaagtttgaattagagcaatgagacaccagttttctcctacattcaaactgacaaatgtcttcttaaatgattgtaactaaatgatggtacttcaaggaaatgttgttagtgatttcaacaa

SEQ ID NO: 787657 - DNA, 509 bp, Homo sapiens
tttctacatcttggctattgtgaatagtgctgcaataaacttcagagtgcagatatctctttaacatagcaactttatttcctctgaatatcaacccagcagtgaaattgctggataatatgatagctctatttttattttattgagaaacttccatgctgtttcttttagtggctgtactaatttacaatgccaccagcaatgtaagggttccttcctctccacaacctaaccaacacttgttttcttttgacattttgataacagtcattctaactggaatgaggtggtacctcattggagttttgatttgtgtttctccaataattagtgatattgrgcatgttttctcatgcacctgttgtttatttttatgtcttctttagagaaatgtctgttaaagtatttttcccgtttttaaatccgtttctttttttttcttttttttgctgttgagttccttaagttctttatatattctggatattaacaccttgtcaggcatatac

SEQ ID NO: 787658 - DNA, 546 bp, Homo sapiens
atcaagaaagtgaacgatgacccaggaaatggaacaaaatatttgcaaatcatataccttataagagtctactatccagaaaatataaagagctcttatacctaaatgataagaacataaataactcaatattttttaatgagcaaataatttgaatagacatatctcaaatgaggtgraaaaatatttcacatcattagctattaaagaaatgaaaatcaaagtcacaatgagatacttctttatatctaccatgatattataatttaagagtcacacaataccaaatgctgacaagcatgtggaaaaatcagaaccctcatttattgctgaagggaatgtgaaatgatgcagccacattggaaagcagtttggcagtttctcaaaatgttaatcatatagctcacacatgactgagcaattccactccctggtaaacttccaacaaaattgaaaacatatttatataaaaacatgacattattcataataaaggtgaaaataacggaaatgttcatcatctaatgaatgaattaacaaattgta

SEQ ID NO: 787659 - DNA, 703 bp, Homo sapiens
aatcaggatcccctttgaatggcagcattagaatggccactacctttcttgggttgattgagtacatcttatcttataaagctgtcttgataattttgcttttcttcatactctttccttgacatatttatcaaaacaccatttaagccaagcattctgttgatggactagttacatttcagacwcttgaattattaatgatttgtagaatggtttcttcacctgttccttaaggtttacatgaagcccctgaaatcatatgcaaagttttgtacatatgaccattattctggggagagtacatagcttccatcatattattaaaaatatctgtaacccctaaaggtttggggtaagaatatggtaacaatacagtaagaaacagagagaaacctcaagtgccccagagtgtatctgtttttcaggctctctctctccataaaattgctctgctgctctgataattctaccttttactctgagactcttaatttctaatatgcatggttcaccaaatcacatctgctaaacttacctctcactctggctccaactctaggaaatcatggcaataaaaatcaagaactagaacttgttaatgtaggagagagtttttctcacagggcatgcatatggagtactctaatgggaacttgccaaacaatcgggggtggtgagatgacagtattgtaagttaagagaa

SEQ ID NO: 787660 - DNA, 608 bp, Homo sapiens
cactcccagatatatacccaacagaattatgtgcgcatatgccccaataaatgtatacaagaatgttcatagcagcactatttgttttagcaccaaaagtaggtaaagattctgtgttccctttgaagttctcctcttaatctctattcacccctgtaacccctgtatggttttcttgcctcagggtgcagkgggtcagatgtgacataatatacctaaggtgatgtgcatttgtagatataaaattaaatgcccccttaggaagaccaaggtatgggcccagagagaaagggtgagaaaatatttgaaagaaagaaactggcactcctcgtggcagctaatgtcttaggaacctctgttgaccagtataccaggatggaaacttgacttttagaaaatcataagagctatacattcacctggtaattttttaaaaaatcaaacggtacagaaatacataaaataaattgtgttcttcccacctattgctcctcaaacataatcaatatttttgtgtgtactttccaggaaaagaagaaagtatacttaaaagagttgatgtacacatatatcctattttttatatttacccaatgggataatactac

SEQ ID NO: 787661 - DNA, 648 bp, Homo sapiens
cactcaggagaaagctgatgaaaataaatggactgaccgtgtaaccgtaggtattcagtgggtgcctgctggcagctataacattttctaattctacgagtctggaatatgaaactactatcaaggctgtcaccctgtaccaaatgtataaatagaaatatatgagagaggaaatacatatgcccatagtgcaactgggttgaaggagagaggaagaaaggagacgagaaattctatatctatggcaagtaaaatggtgattctgaattggatgtgctattgctcattgtctgtggtatccctctgtgggcttgcaggcagatacaagcttcagtcgagctgttggacctatcaggtcctagcttgccagtcctagagcagtaatttcaatgtaggaaactgatattagggttttagctcaggtgcacatgctcaggaatgtcagctgtgtgagaccarctgaggcagttcggtggtcatctctggtgccaccactggaagctgtgttttaaaggaaatttcctgaagggcactgtcctttactcagtgactatgctggagagaggtggaggagaggagggaacttcccagggctcctaggttagtgcctctaaaaatctaaaatctgattatatctctgttctcatt

SEQ ID NO: 787662 - DNA, 624 bp, Homo sapiens
attaggtcatatcctttttgtctaatcatatttctacacagctgttcatactttgttaacctaagcataaaaatggacactgttctcctgtatctgtcggtcttcattctgaatgctcctgtgtatgcacatttaataaatgtttatgtattttctccaattaatctgctttttgtgagttgatttttcagcaaaccttcagaaggccaaggggaaagctctcccttgtcccctacatgcttaaggtgtttggaaacttggagggagacaaaactcaaaccatgagtgatttcggtctatatcccagcgattgccctgcctggccctcaacagaccttctagttggagaaggaaatatcctgaagaatatttgtgaaaatgaaaacaaaaacaccaaggcaccaatttcatgcctggacraggatgtcttgagctgaaggaagaaaatgaaagcaacagttacggccttatcactatgaacaagaaagtcttataagggtggaaacattttgctttattttttttgtccccatagcacttggcttcaaagaacaaaagatggtgttcaccaagcagacaacttaccaaagccattttttgaaatgatgcccaataatcaatatt

SEQ ID NO: 787663 - DNA, 645 bp, Homo sapiens
catataacataatacaatcatgcaatataagaaaatataacaaaattctaaatagtatgtacctaataatctaccaagttatatgcagcaaatactaataaaactgcaaagaaaacagacaaatcactattaaaatgggatatatttagcacatttctctcagtaagtgatagctcatgctctccaggaataagaatatagatttctaaaatacaattaagaaactttatgtagtagacatacaaaggccatcacaccaataacaaragaatacatattttgttcaagcacacatggatcccagatcacattttacgcaataaaagagggcttactaaatttcaaagggtatcatacagcccacattcctaacaataacacaatatgttagaaatcaataacaaagaggcatttaaaataatctcatacatttgggagaaaaaaaaacctcctgagtaaagaggaaatccaatagaaattttaaaatacttgtatctgaaaaataatagaaaaaataaagtagtattttaggaaaatttaatgccttataaatttctatataaaaaaaggaaggattaaaattaagaatgttggaccatcctggccaacatggtgaaatcccgcctctgctaaaaatacaaaaaa

SEQ ID NO: 787664 - DNA, 642 bp, Homo sapiens
tcagcactcttctggtggtcaactattaagattgtgaattggattaactacatctattgtaatcaacaaagattcatcagttatacttggaatgcactcaaagggatggtaagccagtttgatgccaccagctgagtggcctgggaaacaggcttgcgttaagacatgatactagcagaaaaaggagacgtatgtgttatgctgrgtggaaaatgttgtactttcattcctaacaatactgccccagatggcaccatcacaaaaactttataagggctgacaactctagccagtgaactggcagagaatgctggaattgatgacccatttacatgttgggtagaaggttggtttggaaaatggaaaggcatggtagcttcaatccttaaatctcttataattgtggcaggagtcttaacagcagtgggatgttgtgcctctacgtccattctttgggtttggatgcgtgagtgtgtttctcacaagaagcaatactttccaattcatttcatgaggctagcagaaggttcataccaaaccttgaggaaggtaacaactgaaaattacatgttaatttcatttatgaatgtacatgcaaaaatcttaaagaaaatattagcacatttaattcaacaatttata

SEQ ID NO: 787665 - DNA, 555 bp, Homo sapiens
acaggagggtacattctactagaaaagtcaaatacagaaatatctataatttagagatgaaaattccataagaggcacacaaatatattaaggcgttttagcacagacagaaagacgcatacctttgttcattaatcatatatgggttctcatttctcagagaaatagtcgacataaagttccaagccatgggcaggattttcaatgtgccattgccttctcatgacatcctgtaaagttaacttccatcagaaaagtaaacatagcaggggaggtaatgggtttctgtcagggaaagtgtggagaagccagaaggstaagtgctatatcaataataaatgtgtatgaatacactatggcttgtaattaaaccaggctttcccaagagtcaatagggttcttcagaaacatgattatctttgccaggatactgctgtgctggtgtaagaatgcagctgagattttttgatggattatactagtacatcactttatatttcctcaactaaattcacacttatgatcaaattcacatctaaaattaactattgcatt

SEQ ID NO: 787666 - DNA, 573 bp, Homo sapiens
tatgcattccaaaagcaagacagatttaatgtaattgaatgtaaaaattcactgatacactttaaaatttcacattaccattaacctttaaaaagctaccactctacaagttttggtgtaatattaaaagagaatatccactatcatccaaaaaggctattaaaatattcctttttctctcagctatatattcatgtaataccaaattttcttcatatacttcaatcaaaacaataaatcacagcaaattgaatgcaaacaaataagataatttaaccagcttccattaaactagactttcaagagaactacaaaaacataatattaatatcatactttttwaattttggatatttgtttttcataaaatatgttattttatgaaatgtaaaatgtagtgtcagtactacaaattagtgttgacatgtgattaatctatttttgataaattaatatatttttaatttgtcagttttaagttgtaatatgaaaagtgaaaatagatataatttttaagaaaaaggtctttgaggatcccaataattttaaagaatataaaggaatcctagaata

SEQ ID NO: 787667 - DNA, 623 bp, Homo sapiens
acaaaatatttatacttctgttataacattatgttttcatttgtctttacaattctttctccctcactagactgtgcactctgtgaaggtgaagaccaaatactgttgttttttctctcagaacatagtaggtgcacaataaacatctgttaaggaaatgaaagctgatattatactgatagcagttgccaccggtgctgtgcctttatcccctcagtccaccccagaggccacctgcagaaatttcctatccatgctgaagtttccctgagtctctctaccacaaggtgtcctctggctgttggggaatgcatggccaagtgtggagttgccaggaaattaactcctgggagcaacgcacaaccaagaaagcttggagttggtgggtagatgtcccaacttccttgctccttgctgggctacttgtgaggtgtgctccaygtgatctcagagcatccctggcacaactgagtcggcttgcctatggggttgcctgttcatcaacaaaccaggcttcttctcctttctggcctcagtaccccattccctcagaactgtaaggaaatgaattttgcgaagtggattcttgccctgtcaagcctctggatgggaaggcagtgggg

SEQ ID NO: 787668 - DNA, 622 bp, Homo sapiens
cacccggaactccagctggcccgcaagcaccgcatgcagccccggttcccacttgtgcctctccctccacacctccctgcaagctgagggagtgggctccagccttggccagcccagaaaggggctcccacagtgcagcgggggggctgaagggctcctcaaatgccaccaaagtgggagcccaggcaggggaggtgccgagagcaagcgagggctctgasgactgccagcatgctgtcacctctcactttgggtatatacccagtaatgggatggctgggtcaaatggtatttctagttctagatccctgaggaatcgccacactgacttccacaatggttgaactcgtttacagtcccaccaacaatgtgaaagtgttcctatttctccacatcctctccagcacctgttgtttcctgactttttaatgatcaccattctaactggtgtgagaatgtttctttaagactctgcttccatctagaatgtttcttatccaatgataatgataatgatactccagggtaagaaaataagtcttagtttcatgtgagaatttttctttccccatggtgataaatagtagaagacttttcagggcacactgctcattgcattttc

SEQ ID NO: 787669 - DNA, 574 bp, Homo sapiens
cacacagcttttcaggggcagagtggaagagagaggacccagtcctctttgattttttccttgtatgtttttatcactcctacaaaaatattaagtaactacttctgtataccaagtactataggcaaggtagtggtgtttgagactttatagagtagaagggagaagaaaaaccaagcacagtgaagtctagagtcagtcttctgggttcaaacctttgttcttctacttaatggggcaaattacttaatctctttatgcctcagcttttcaataaagtgcagctaattaatatctatgtcaaatgttgtgaacatttaatgagttaatacttgttaagcacataaaatactgcctggcatggaatgagcattccataattgttagctattattattattgtaaaggaaagaaataaaatgttaagagagatgaakagtccacaaatctctccatactatcttcacaactttctgtgaatttgtaataatgtttttaaaagtacacacataaatgtacactttacttgaattgtaccccccatttgtacatcttacatagttagggtaccata

SEQ ID NO: 787670 - DNA, 616 bp, Homo sapiens
tcaaagaagttattcaaggcaataaaaattgttataggtcagaaggtcatatctacataacaaaagaaagaacatcagagaagaaataagtgaaggtaaaatgaaatttttaacttgttactcttaatctaacagatcaatttgttcaaaattattgtagccacaatgtattaacatatatacaaatgtgctaccgagccatgaaaagatatgaaggaaacaaatgcatattactaagtaaaagaagccaatctgagaaaagctatgtaatatataattccaaccacaggactcactggaacaggtaaaactaaggtggyaataaaaggattagtggttgtccggggttagggtgtgggagggatgaacaggtagagcacagaggattttttagggcagcgattctttatgatatgacaatggtagatacagctcagacacttgtcaaaacccatagaatgtgcaaatgaaaagtgaaccctgatgtgaactatggactttgagtgataatgacgtgtccatggaggttctttgactgcaacaaacatgccactttggtagagaatgtcgatcaagggggaggctgtgcatgtgtaggggcagggggcatatggaa

SEQ ID NO: 787671 - DNA, 616 bp, Homo sapiens
tcaaagaagttattcaaggcaataaaaattgttataggtcagaaggtcatatctacataacaaaagaaagaacatcagagaagaaataagtgaaggtaaaatgaaatttttaacttgttactcttaatctaacagatcaatttgttcaaaattattgtagccacaatgtattaacatatatacaaatgtgctaccgagccatgaaaagatatgaaggaaacaaatgcatattactaagtaaaagaagccaatctgagaaaagctatgtaatatataattccaaccacaggactcactggaacaggtaaaactaaggtggcaataaaaggattagtggttgtccggggttagggtgtgggagggatgaacaggtagagcacagaggattttttagggcagcgattctttatgatatgacaatggtagatacagctcagacayttgtcaaaacccatagaatgtgcaaatgaaaagtgaaccctgatgtgaactatggactttgagtgataatgacgtgtccatggaggttctttgactgcaacaaacatgccactttggtagagaatgtcgatcaagggggaggctgtgcatgtgtaggggcagggggcatatggaa

SEQ ID NO: 787672 - DNA, 643 bp, Homo sapiens
tcactcatgatttggctctctgtttgtctactattggtgtataggaatgcttgtgatttttgcacattgattttgtatcctgagactttttgaagttgcctatcaacttaaggagtttttgggatgagatgatagggttttctraatatacaatcatgtcatctgcaaacagatacaatttgacttcctctcttcctatttgaataccctttattgctttctcttgcctgattgccctggccagaacttccaatactatgttaaataggagtggttagagagggcatcctggtcttgtgccagttttcaaagggaatgtttccagcttttgcccattcagtatgatattggctatgcgtttgttataaatagttcttattattttgatatatgttccatcaatacctaatttattgagtgcttttagcatgaagcagtgttgaattttatcgaaggccttttctgcatctattgagacaatcatgtggtttttgtcattggttctgtttatgtgacggattacatttattgatttgcgtatgttgaaccagccttgcatcccagggatgaggccaacttgatcgtggtggataagctttttgatatgctgctggattcagtttgccagtattttattggggat

SEQ ID NO: 787673 - DNA, 597 bp, Homo sapiens
cgttataggtgttcaataaatataatttatttcaattattcttccagtgataactacaacctctcaaacaggattgaatatgcaaggtatatgcccctagaaatggaataagttctctcagatcctatgcttgcaaatggaatagctgtcgttagatgacggtgtggtactgcggaatgccattgaacttgtttggctcctcatcaggcatagggactgatacaatactatccacttgacctgctacagaggaaaaagaccctttaccaaaactaccttgtaaagcatttagctaatcatcgattawctgcatattctctgatttctctggccagtctttttcccgcccactgcttgttgttttaaatgacatcattgcacccctttcttcgtttacattctactcgcatattcaaatagctcttcctagtccatgactcttactttcttattagaatgctcacctgagcgcacttaccttttagggttggaggctttcccctctccttttagtttcatgaatcatttgctaagattctgcttgctgtggaataaatgcttaattaatcaatacagtagcagtctttcatttttttt

SEQ ID NO: 787674 - DNA, 597 bp, Homo sapiens
cgttataggtgttcaataaatataatttatttcaattattcttccagtgataactacaacctctcaaacaggattgaatatgcaaggtatatgcccctagaaatggaataagttctctcagatcctatgcttgcaaatggaatagctgtcgttagatgacggtgtggtactgcggaatgccattgaacttgtttggctcctcatcaggcatagggactgatacaatactatccacttgacctgctacagaggaaaaagaccctttaccaaaactaccttgtaaagcatttagctaatcatcgattatctgcatattctctgatttctctggccagtctttttcccgcccactgcttgttgttttaaatgacatcattgcacccctttcttcgtttacattctactcgcatattcaaatagctcttcctagtccatgactcttactttcttattagaatgctcacctgagcgcacttaccttttagggttggaggctttcccctctccttttagtttcatgaatcatttrctaagattctgcttgctgtggaataaatgcttaattaatcaatacagtagcagtctttcatttttttt

SEQ ID NO: 787675 - DNA, 540 bp, Homo sapiens
tctagtagaaattgttttataaatttgggatctcctgtgttagatgcatacatatttagaattgtgatattttcctgttggactagtctttttatcattatatagtgttcctctttgtctttttaaactgctgttgctttgtctgatgtgtgttttttctgatataagaatactcctgcttgcttttggtgtccatttgcatgggatatctttttccatccctttaccttaagtttatgtgagttgtcatgtgttaggtgagtctcctgaagacagcaagaacttggttggtgaattcttattgattctgccattctgtatcttttaaggggagcatttaggccatttacattcaatgttagtatsgagatgtgaggtactattctattcattgtgctgtttgttgtctaaataccttgattttttcattgtgtaattgttatacaggtgagatttatgctttaaggagatgctgttttggtgtatttttaggatttgtttcaagatttagaggtccttttagtagttcttgtagtgctg

SEQ ID NO: 787676 - DNA, 590 bp, Homo sapiens
tttaaatataccattgtcgttaaatacaccaatggcgaggggctgagtcattgagcactagaattccacatgcatttgataatgatggtttctagtcggtaattacgtggctgtggcccccatgtttttcttggagtctttgtgatactccctcaakttgctcttcctgtactcacttcttgtctttcattcttgtccttgaatattttgggtatataggacaaaaataagaatgcaagcaggcacccaccagcatgacaaaaatgaaatagatggaagatgcttactgttggcaaggaagtgggacaactggaactcacatgcactgctggtgggagtatacattgacacaacctttttggaaaaatggttgctagtatctactaaagctgaaagtagctatgctattgttcaaccagcccacttgttggtgtgtgcttaacagaacgcagaaaacagtcaccaaaagacacgtagtagaatgttcaaactcctcataactggaattactctaatgcccatcagcaatagattggataaataaattctggcatgtttgcaaaaatggggtgctatacagtattgagagt

SEQ ID NO: 787677 - DNA, 683 bp, Homo sapiens
cccatgtttctggaactttcaggatccaaaagagagattttgttcctctcctatttggcttcactctgtgtggtagattaaagatgactgcagattctttttcactccctacagagaggtagaatttatttcccctgcctagaatctggggtggcccgaggattgcttaaccaatagaatgtgayggagctgttgctgtgccagttccaagcctagtctgtggagggctagcggcttctgcctcctgcttcttagaatgcttgcacattggcttctcatactcccaactcagctgccatgctgtgagggagtccaagccacacagataggccaggaggaggctttcctgttgacagcacaagtaagtttagtggtcagaatctaaatcccgggcaaattctagaatagagagactctaataatcctatcacacttcagtctctggtcatgctcagtgaactttcttaaaagaggtatccagtagattctataagcagaagattgcctccccttcccgttaattctcttttttttttttttttttttttttttgagatggaggagtttcactcttgttgcccaggctggagtacaacggtgcaatctcagctcactgcaacctccacctcctgggttcaagcgattctcctgcctcaacctcccgagtagctgggattacaggt

SEQ ID NO: 787678 - DNA, 683 bp, Homo sapiens
cccatgtttctggaactttcaggatccaaaagagagattttgttcctctcctatttggcttcactctgtgtggtagattaaagatgactgcagattctttttcactccctacagagaggtagaatttatttcccctgcctagaatctggggtggcccgaggattgcttaaccaatagaatgtgacggagctgttgctgtgccagttccaagcctagtctgtggagggctagcggcttctgcctcctgcttcttagaatgcttgcacattggcttctcatactcccaactcagctgccatgctgtgagggagtccaagccacacagataggccaggaggaggctttcctgttgacagcacaagtaagtttagtggtcagaatctaaatcccgggcaaattctagaatagagagactctaataatcctatcacacttcagtctctggtcatgctcagtgaaytttcttaaaagaggtatccagtagattctataagcagaagattgcctccccttcccgttaattctcttttttttttttttttttttttttttgagatggaggagtttcactcttgttgcccaggctggagtacaacggtgcaatctcagctcactgcaacctccacctcctgggttcaagcgattctcctgcctcaacctcccgagtagctgggattacaggt

SEQ ID NO: 787679 - DNA, 599 bp, Homo sapiens
tctttaaccgggggcggtcagagatgtgctctggggctgagctggatttcttgagccttttccatgatgctctggtctcacagtttgtgtgtcctggaagccatttgtgttgcttattttccatattggggttgtgcctgtagctccaggaaggactaactgcagaggctggctactctgtctctttggagggacaactgttctgcttgatgggctgcatcttctccatgtgcaatgttctaaagagccccttctcggaacagtcycctctgcctgaaaactgaatggaaaaagaaccatacattcatacagaacctgacaccacccaggcagctacattaaataccttcctagcaatgtttgcttagagtgtctttgtcgtggcctaatgcatcatgtctgcgggtggcctgcccttcataggtgcaggactggggcaagaatacaaatggaggccatcagcttatggtctacccccttctcttcttagccctgactccatctttgtgcatgtacacatggacacttcagcctacaagttcaagccccatccatattatgcgcaaaaagtcaccctgtggcctctctttgggcctagg

SEQ ID NO: 787680 - DNA, 599 bp, Homo sapiens
tctttaaccgggggcggtcagagatgtgctctggggctgagctggatttcttgagccttttccatgatgctctggtctcacagtttgtgtgtcctggaagccatttgtgttgcttattttccatattggggttgtgcctgtagctccaggaaggactaactgcagaggctggctactctgtctctttggagggacaactgttctgcttgatgggctgcatcttctccatgtgcaatgttctaaagagccccttctcggaacagtcccctctgcctgaaaactgaatggaaaaagaaccatacattcatacagaacctgacaccacccaggcagctacattaaataccttcctagcaatgtttgcttagagtgtctttgtcgtggcctaatgcatcatgtctgcrggtggcctgcccttcataggtgcaggactggggcaagaatacaaatggaggccatcagcttatggtctacccccttctcttcttagccctgactccatctttgtgcatgtacacatggacacttcagcctacaagttcaagccccatccatattatgcgcaaaaagtcaccctgtggcctctctttgggcctagg

SEQ ID NO: 787681 - DNA, 579 bp, Homo sapiens
agctcactgcaacctccgcttcccaggttcaagtggttccccttcctcagcctcccaagtagctggtattacaggcgcctgaaaccacgcccagctaatttttggtatcttaagtagagacagggtttcatcatgttggccaggctggtctcaaactcctgacctcaggtgatccacccgcctcagcctcccaaagtgctgggattacaggtgtgaaccactgtgcccggccagctgtgtctttttgttggtgatgtccattcagcagatatcaaatggaatggtacctcgttcttattctgctttgcattgccttctgtataggcatacgtttcccacagcctttgttgtcagattccctcttgtctgaattctacctgtccgtrtcttctgaggcttgttcttaaaagcagaaactgattttattgttgttgttgttgttagtttttggactttattcccacacaaatacctatcggagtattacagaataagtgttcttaaaaaagaagtatatttttagaaattttttatttttaaaataaagactagtaggcatggggggagtgcactagctct

SEQ ID NO: 787682 - DNA, 626 bp, Homo sapiens
tgtctatgtaccagagtgtgtttatgcatttacttcttaaaggacgttttctttgctttcacttttgggctattttgataaaactgttttaaaaactcacatgctggttttatgtggacctaagtttgcaaacttaaatacataggagcattatttctagattgtttggtaatctttgtagccattttgagaagttgctgtatcattttcscattcccaccaatgaatggaaatttctgttgctccacatccttgccagtagcaggtattgccgtttcatttttcactttgctttgcttttgtttttgccattctaatgggtgtgtacgtagtcatatcttatcattttgttaatttgcaattccctaattatagttagttaagcatttttcatatgctaattagccatctacatatcttctttggtaaggtgtctgttcagatattttgtccacttttttacttgaattgtttggtttttatttttttgttttgtttttgttttattattattatactttaagttttagggtacatgtacacaatgtgcaggttagttacatatgtataaatgtgccatgctggtgtgctgcacccattaactcgtcatttagcattaggcatat

SEQ ID NO: 787683 - DNA, 626 bp, Homo sapiens
tgtctatgtaccagagtgtgtttatgcatttacttcttaaaggacgttttctttgctttcacttttgggctattttgataaaactgttttaaaaactcacatgctggttttatgtggacctaagtttgcaaacttaaatacataggagcattatttctagattgtttggtaatctttgtagccattttgagaagttgctgtatcattttcccattcccaccaatgaatggaaatttctgttgctccacatccttgccagtagcaggtattgcygtttcatttttcactttgctttgcttttgtttttgccattctaatgggtgtgtacgtagtcatatcttatcattttgttaatttgcaattccctaattatagttagttaagcatttttcatatgctaattagccatctacatatcttctttggtaaggtgtctgttcagatattttgtccacttttttacttgaattgtttggtttttatttttttgttttgtttttgttttattattattatactttaagttttagggtacatgtacacaatgtgcaggttagttacatatgtataaatgtgccatgctggtgtgctgcacccattaactcgtcatttagcattaggcatat

SEQ ID NO: 787684 - DNA, 623 bp, Homo sapiens
catatgcagaaaactgaaactggatcccttctttacaccttatacaaaaatcaactcaatatgcattaaagacttaaacatgagacctaataccataaaaaccctagaagaaaacctaggcaataccattcaggacwtaggcatgggcaaagatttcatgactaaaacatgaaaagcaatggcgacaaaagccaaaagtgacaaatgggatctaattaaactgaagagcttctgcacagcaaaagaaaatgtcatcagaatgaacagacaacctacagaatgggagaaaatttttgcaggtggatatctgacaaagggctaatatccagaatctataagaacttaaacaaatttataagaaaaaaacaaacaaccccatcaaaaagtgggcaaaggatatgaacagacacttcgcagaagaagacatttatgcaatcaacaaacatgaagaaaagctcatcatcattggtcattagagaaaatcaaaatcaaaatcaaatgagataccatctcatttgaaatcaaaaccacaatgagataccatctcacaccagttagaatggtaatcattaaaaagtcaggaaacaacagatgctggagaggatatggagaaatagaaacac

SEQ ID NO: 787685 - DNA, 633 bp, Homo sapiens
ccttctttacaccttatacaaaaatcaactcaatatgcattaaagacttaaacatgagacctaataccataaaaaccctagaagaaaacctaggcaataccattcaggacataggcatgggcaaagatttcatgactaaaacatgaaaagcaatggcgacaaaagccaaaagtgacaaatgggatctaattaaactgaagagcttctgcacagcaaaagaaaatgtcatcagaatgaacagacaacctacagaatgggagaaaatttttgcaggtggatatctgacaaagggctaatatccagaatctataagaacttaaacaaatttataagaaaaaaacaaacaaccccatcaaaaagtgggcaaaggatatgaacagacacttcgcaraagaagacatttatgcaatcaacaaacatgaagaaaagctcatcatcattggtcattagagaaaatcaaaatcaaaatcaaatgagataccatctcatttgaaatcaaaaccacaatgagataccatctcacaccagttagaatggtaatcattaaaaagtcaggaaacaacagatgctggagaggatatggagaaatagaaacacctttacattgttggtgggagtgtaaattagttcaac

SEQ ID NO: 787686 - DNA, 477 bp, Homo sapiens
catagccacacatagatgttttccaagcatgttctgaactttaaagtgtaaagcgttaggtctcctgttataagaaagaatccaactggctgcagccagtgactgtcagctccgttctgcaaaaggatggtccatgagtcagggcatcaggcctgttgctatccttctctagttatcatggctttgtctgctttctttacatcatcattcttgtagcacataatttgatgtcttccacactttcatatcttgtgctagaagtataagaaaaacagattatacctttagatagctccgccagcttttcagagctttagtgatcttgaagtctatyctgtttgattttttaaaaaaatgtttgtacttctatgtgtccatgaattgctgagggcaagaaactcaaaacccaagttctcccagataaaggttcgcattattctttgtgccacctgatgtcctggcagatactgtcaggat

SEQ ID NO: 787687 - DNA, 622 bp, Homo sapiens
tataccactttccaatttctgaaattatgcactctttaaatgtcatgtgaagacaataaaatatgagtgcaaagagatttcttttttataaaacttagttgaatactttggacaatctcgataaaggtgaataacttaaaatttgctatgaattaatttacactccccccaacagtgtaaaagtgttcctatttccccacatcctctccagcatctgttgtttcctgactttttaatgattgccatgctaactggcataagatggtatctcactgtggttttgatttgcatttctctaatgaccagtgakgatgagcttattttcatatgtttgttggctgcataaatgtcttcttttgagaagtgtctgttcatatcctttgcccaattttttatggggctgttttttcgtgtaaacttatttaagttccttgtagattctggatattagccatttgtcagacggacagattgcaaaaaatttgctcccattctgtagcttgcctgttcactctgatgatagtttcttttgctgtgctgaagctctttagtttaattagatcccatttgccacgttgggcttttgttgcattgcttttggtattttagtcatgaagtcctt

SEQ ID NO: 787688 - DNA, 622 bp, Homo sapiens
tataccactttccaatttctgaaattatgcactctttaaatgtcatgtgaagacaataaaatatgagtgcaaagagatttcttttttataaaacttagttgaatactttggacaatctcgataaaggtgaataacttaaaatttgctatgaattaatttacactccccccaacagtgtaaaagtgttcctatttccccacatcctctccagcatctgttgtttcctgactttttaatgattgccatgctaactggcataagatggtatctcactgtggttttgatttgcatttctctaatgaccagtgaggatgagcttattttcatatgtttgttggctgcataaatgtcttcttttgagaagtgtctgttcatatcctttgcccaattttttatggggctgttttttcgtgtaaacttatttaagttcyttgtagattctggatattagccatttgtcagacggacagattgcaaaaaatttgctcccattctgtagcttgcctgttcactctgatgatagtttcttttgctgtgctgaagctctttagtttaattagatcccatttgccacgttgggcttttgttgcattgcttttggtattttagtcatgaagtcctt

SEQ ID NO: 787689 - DNA, 586 bp, Homo sapiens
aaattaaaggaaggaaagcggacctccttctgaacattagagccagtctcctttctcccctttaactccaggcctcccctcttcccacagcaggaccggaaggggcatatcaggaaaaactctgatccaatatttttctcaaccttagttgcagttagaacttattgtttacacgtgtttccaaaccatcgtcataacagctctactagcaaaaaaaagcctccaggttaaccctaggaaataatttaactgtttacactccacatgatgtggcattatcactgtcctgtagggggagctcttagttaacaaacagccagtaaagcaagaagtacataaggcaggataagcagtagtcactctaaataatgtctctccccaggcacaagcacttaattgacggagctaatagcwcttacaagagcacttgaattaagcaaggaaaggtagctaacatttatacctactccaagtatgctctcttagctctccatgctcatgctgccatttaaaaggaaaaccgccaatggacctcctataaaatatcaccacaaaattagcaggttattatcctcagtttttcttc

SEQ ID NO: 787690 - DNA, 511 bp, Homo sapiens
tggcgccattgcactccagcctgggtgataagagtgaaactctgtctcaaaaaaaaaaaaaaaaaaaaatttttgctttttctagagtttcatataaatggaatcatatgctaaatagtcttttgtgtctggcctctttcactgagcctgttgttgagaggtctatattctggcatttgtcagtaatttgtttcttttttattgctgagtaatgttctattacatgaatgtaccacaatttgtttaccattcacctgttgatggatagttgaattgttgttttttgcttyacaaataagggttctatcactgttaatgtacaggtgttcttgtggatatatatttttcagctgtctcagtaaatgggtgtttataaactgcacattcataggaactgcgaaagagttctccaaagtggctgagtaatttttgcatttccttcaacaatgttgctggagaactccagttgctccttcacatcctcagcaatacttggtattgtcagtctttt

SEQ ID NO: 787691 - DNA, 617 bp, Homo sapiens
aagatgggtgagaacaaaggggaaaaaacaactaaaatatgtttactgataaaccaattcagtgagatgagatgtcttcagctagtaaaacctcaaaaaaataaaaaccaaaaaaaaaaacaaaaacaaacaaacaaaaacatatacacaagaaagaaacaaaagaaaacactcacgaatcttctgaaaagaaaatctgactttattcctgagtcagtatgcattcaggaagtttgaaatcagaaaatgagtgagagcgtgtccaggggattgctgtcaaaatatgaacatgtccataacaataaaacaaacaaaaggcttagatagtagttttattttctctaagcatctaatagaatcttacaagaggatgatgattttctstgtctcaataacaagcaaaaaaccaaaagcttaaacggcaacagaatgaatttgtgttagtcataacaattattttttccttacttgaattataaaccactgaaaaaattaagcaagaataatttttgaaatttctggtttttggttaaaaacaaagattataatgcattacatttggttataaggaagagtcaggaatagtaaatttttgagatttgtaatctgcaattata

SEQ ID NO: 787692 - DNA, 536 bp, Homo sapiens
cagatactatatgacttttatccatatattccactgattaattcttaccagttctagaagttatctccaccaatctttcctgctagtgtcaaaattattttgtttctcatacaacaaaaaaagcccctttaaaatgaaggagataagctgaccctcataggaaaggtccagggcctcataatgctataataatatcagaacagtatatctgatcaaaacagtatttggcttctgaacaaaacaaaatcttctgtttacatttcaaattgtagaactgtttggacgcaattatcttccagcccaacattttctttttcctttttttaatatctataagctgttcacatttgaagtcstaatgatgaaatggggatagggtacagggataatgattcatcagtttatttacatgttttttagggatccaatgttccaaaatattgtttttcaaccaatcaagaaggctattagaattacttattaataaaacttgtcctatattgtaatttgggatagtaagtagagtagtacatata

SEQ ID NO: 787693 - DNA, 602 bp, Homo sapiens
taacatgtcggtgttctgcctatggagtagccattctttcattcctttactgtcataaacttgctttcattttactctatggacttgccccaaattctttctcatgcaagatccaagaaccctctctgggatctggatcgggacccccttcgggtaacagatgaattcgatcgtatgagagttctatctcaacaatgctgtttaaaaaatacacaatgaaataacactacaaacaagaaaatggctaaaattaaaaagtgacaatattaagcactggagagaatgtgaaggaaggggaacctctatataatgctgatgagaatgtaaaatkgtagagtctggcagtttcttaaaaagttaaacatacagtttccatatgactgagacattccacacaagagaaagaaataaacatgtttttatctgtaaaaatcacaaagaaagatttgtaatgagtatgcataggagcaatattaataatagtctaaaaccacacactatccttcagctgggaatgaataaataaaaaatagaatacaatggataaaatggaataaaatggataaacaaaaaatgcaataagaaaggacaaactactgaca

SEQ ID NO: 787694 - DNA, 530 bp, Homo sapiens
tagagatggggttttgccatattgccaggctggtctcgaactcctggcctcaagtgatctgcctgcctcagcctcccaaagtgttgggattacaggcgtgagccactgctgccagcccatgtcaacatttatttatttatttatttattttgagacggagtctcactctgtygcccaggctggagtgtagtggtgtaatcttggctcactgcaacctccgcctcctgggttcaagcgattctcctgcctcagcctcccgagtagctgggactacaggtgcccaccaccacacccggataatttttgttcttttagtagagacggggtttcactatgttggccaacctggtctcaaactcctgacctcaggtgatcctccctcctcggtctcccaaagtactggtattacaggcgtgagccactgcgcccggccctagtcaacatttttagggtgacttcagtgaagactcaggaggtatgctgatcaaatttgcagatttcacaaaattaaagaagggatttgaactaat

SEQ ID NO: 787695 - DNA, 530 bp, Homo sapiens
tagagatggggttttgccatattgccaggctggtctcgaactcctggcctcaagtgatctgcctgcctcagcctcccaaagtgttgggattacaggcgtgagccactgctgccagcccatgtcaacatttatttatttatttatttattttgagacggagtctcactctgtcgyccaggctggagtgtagtggtgtaatcttggctcactgcaacctccgcctcctgggttcaagcgattctcctgcctcagcctcccgagtagctgggactacaggtgcccaccaccacacccggataatttttgttcttttagtagagacggggtttcactatgttggccaacctggtctcaaactcctgacctcaggtgatcctccctcctcggtctcccaaagtactggtattacaggcgtgagccactgcgcccggccctagtcaacatttttagggtgacttcagtgaagactcaggaggtatgctgatcaaatttgcagatttcacaaaattaaagaagggatttgaactaat

SEQ ID NO: 787696 - DNA, 544 bp, Homo sapiens
gtctacttaatggtattccacaagttccttggtctctgtccacttttctttttttctttttttgagacagagcctcactctgttgcccaggctagagtgcagtgacacaatcttggctcactgcaacctctgcctcccaggttcaagcaattttcctgcctcagccttctgagtagttgggattacaggcactcatcaccatgtccagctaatttttgtatttttrgcagagataaggttttgctgtgttggccaggctgttttcgaactcctgacctcaagtgatccacccgccttgacctcccaaagtgctgagattacaggcatgagccacctcacttggcctatccacttttctttatttatttttctttatgctcctcagatttgaaaatttcaattgtcttattttcaagttcactgattcttctgtgtttgagctcctctagtaaattttcatttcagttattgtgtctttcagctatagaatttctgtttagctcctttttacaatttttgtccctttcttggttttctaattttg

SEQ ID NO: 787697 - DNA, 620 bp, Homo sapiens
agacttctaagccagtgatgttagcctctggggttgcttttaacacaaaatcatttaaatacttgaagcctgcttgagtcataaaaggccagtgggactctagctcctaagtctgtttgctgcttctgtaacaatagcacagactaatttgtaaagaaaagaggtrtaggctgggtgcactggctcacgcctgtaatcccagcactttgggaggccgaggtgggtggatcacgaggtcagttcaagaccagcctggccaacatggtgaaactctgtctctactagaaatacaaaaagtagctgggcatggtggtgggtgcctgtaatcccagctactcaggaggctgagacaggagaatcgcttgagcctgggaggcggaggttgcagtgagccgaggatgcaccactgcactccagcctgggcaacagagcgagcctccatctcaaaaaaacagaaaagtgtatttctcacagttctggaggctgggaatttcaagagcatggtgcctgcatcaggtgggggtcatcccatgtcagaagggcacaaggtagaaatgagtacatgagacaaagggaccatgggccaaacttgctttataacagccctctctcatgataac

SEQ ID NO: 787698 - DNA, 554 bp, Homo sapiens
gggtgtcatgtgccaggtgtggtggctcaggcctgtaatcccagcattttgggaggccgaggcgggtggatcacgaggtcaggagttagagaccagcctgatcaacatggcgaaaccccgtctctactaaaaatacaraaaaaattagccgggggtggtggtgcgcacctgtaaccccagctactcaggaggctgaggcaggagaatcgcttgaacatgcggggcggaggttgcagtgagctgagatcacgccattgcactccagcttgggtgacaagagtgaaatctgtctcaaaaaaacaaaacaaaacaaaacagtttattaagaaagtaaaggaataaagaatggctactccttaggcagatcagtggcttgggctgctggttgaccatttttatggttatttcttgattatatgctaaactaggggtggattattcatttattcatgagttttctgggaaaggggtggagaattcccaaaactgagggttcctccccattttagaccatacagggtaacttcctacatggccatggcatttgtaaactg

SEQ ID NO: 787699 - DNA, 554 bp, Homo sapiens
gggtgtcatgtgccaggtgtggtggctcaggcctgtaatcccagcattttgggaggccgaggcgggtggatcacgaggtcaggagttagagaccagcctgatcaacatggcgaaaccccgtctctactaaaaatacaaaaaaaattagccgggggtggtggtgcgcacctgtaaccccagctactcaggaggctgaggcaggagaatcgcttgaacatgcggggcggaggttgcagtgagctgagatcacgccattgcactccagcttgggtgacaagagtgaaatctgtctcaaaaaaacaaaacaaaacaaaacagtttattaagaaagtaaaggaataaagaatggctactccttagrcagatcagtggcttgggctgctggttgaccatttttatggttatttcttgattatatgctaaactaggggtggattattcatttattcatgagttttctgggaaaggggtggagaattcccaaaactgagggttcctccccattttagaccatacagggtaacttcctacatggccatggcatttgtaaactg

SEQ ID NO: 787700 - DNA, 484 bp, Homo sapiens
aaacttatttctcattggcaaaaatgtgttgattgtaatggttcctatttttattactaaagatgtgtttgagcctagttataatgatttaaataatttaattattattatattattaatactatataattagtcatattctgtattccaaaccctttctttgaaaactcctacgttccctccacraattgaagagtggaattgctttctactcttcccctgctagcatggataataaagacatcttgctccctcttatcataactattattattttgacttctttccacaagcagcaagcagctggactcttttgctggttatgcttgttaagtggtatgtgcagcattctgcagaatattactcagacaacaagtcctgcacttcccctaggtttcctcccaagttgtgggtgaggccttttctgaaaccctcctccaacctttctgaattctggggctataaattccaggaatctttgtgt

SEQ ID NO: 787701 - DNA, 638 bp, Homo sapiens
tatgtcctgagaccatgactgcacccaggctgcccaagctaacctcgctacccagaaggtccctcaggaaagtgacctgttcgtgagaggaccctcaccccacccccaggcccggggagaatcactgtggaggaggagtctgaaggggtgagggaggtccccagagggactcctggagcagaccttcctctctcagtgcctggccccaggagcctgcccttgggacacctaggtcattttcctttaggagctctgcaagctttgcctgaaggccttatgacctgggctgccctgggagggayagtcctcctcaggccatctccacactcatccaatctcctctccgcaggccctggagcactgtgggggcgtcgacttcctggtgtgcagcgcaggggtcaaccctctggtagggagcactctggggaccagtgagcagatctgggacaaggtgagaggcctcccctggggaggcggctgagggcccgattccagctctgcactgggctccagcatgcctgtgcccaccaagactctgtttccctccagaggttatgggagaagcaggccctgggtggtagtcctgcctggccagctgtctcccaaaatgtgcccggatgctactttctggcttgttg

SEQ ID NO: 787702 - DNA, 604 bp, Homo sapiens
tctatcttagcctgttcatgttgctatcacaaaatactgcagactgggtaatttttttttttccccactcttgttgcccaggctggagtgcaatggcgcgatctcagctcaccacaacctccacctcccgggttcaagcgattctcctgccttagcctcgggaaagctgggattataggcatgcgccaccatgcccagmtaattttgtattttagtagagatggggtttctccatgttggtcaggctggtctcgaactcctgacctcaggtgatccacctgcctcggcctcccaaagtgctgggattacaggcatgagccactgtgcccggccgcagactgggtaatttataaagagcagacatttatttctgacagttctgaagcatgagaagtccaagatcaacgtgccagcattctgtgtctagtgagggctgctgtctgcctccaagatggcgccccattgctgtgccctcacatgctggaagagcagaaaagcatgaacccgctccctcaagcccttttataagggccctaatcccacccatcagggctctgcactcatgactttatcatctcttaaagatcccacctcttaatactat

SEQ ID NO: 787703 - DNA, 604 bp, Homo sapiens
tctatcttagcctgttcatgttgctatcacaaaatactgcagactgggtaatttttttttttccccactcttgttgcccaggctggagtgcaatggcgcgatctcagctcaccacaacctccacctcccgggttcaagcgattctcctgccttagcctcgggaaagctgggattataggcatgcgccaccatgcccagataattttgtattttagtagagatggggtttctccatgttggtcaggctggtctcgaactcctgacctcaggtgatccacctgcctcggcctcccaaagtgctgggattacaggcatgagccacygtgcccggccgcagactgggtaatttataaagagcagacatttatttctgacagttctgaagcatgagaagtccaagatcaacgtgccagcattctgtgtctagtgagggctgctgtctgcctccaagatggcgccccattgctgtgccctcacatgctggaagagcagaaaagcatgaacccgctccctcaagcccttttataagggccctaatcccacccatcagggctctgcactcatgactttatcatctcttaaagatcccacctcttaatactat

SEQ ID NO: 787704 - DNA, 635 bp, Homo sapiens
gacagaaaaagcacgagaagtgactaaagtactgttaagagacattatccccgggtttggactgcctctaactttaaagtcagacaatgggtcagcatttgtagctgaaatagtgcaagatttaacaagactgttaaaaataaaatggaagttacacacagcctatcggccacaaagttcaggaaaagtggaaccaygaaccggacactcaagcagctactgaagaaatattgccaggaaattcatctgagataggatcaggttttgcctatggtcctcctctgagtcaggtgcacccccaccaaacaaactgggtatttaccctatgagattttgttcggtgggccacccccaaatcataagtcaaattaaagatgatctccaggaactaggggaattaactttaagaaaacaaatgcagaaatagccatgcaaagtgttcataattaggtacatgaaaaaaatgcctaaaaacctgatacccctttaaacctggtaactctaggttaaaaagtagaacccaacttctctaagactcatgtgggatgggccccatacagtaatcttgtcctttcccactgctgttaaagttgcagctgttgtgtcttggatccaccacagttggctgaaaccgg

SEQ ID NO: 787705 - DNA, 624 bp, Homo sapiens
atccactgggtgaagccagctgggctcctgagtctagtggaggcttggagaacctttatgtcttgctaagggattgtaaatacaccaatcggcactctgtatctagctcaaggtctgtgaacacaccaatcagcactctgtgtctagctcaaagtttgtaaatgcaccagtcagcaccctgtgtctagctcaaggtttgtaaatgcaccaatctgcgctctgtgtctagctgatctggtggggacttggagaacctgtatgtctagctaagggattgtgaatacaccaattggcactctgtatctagctcaaggtttgtaaatgcaccaatcagcactctgtatctagctaatctagtgaggacttggagaacttttgtgtctagctcagggattgtaaatgcaccagtcagctccctgtcaaaamggactaatcagctctctgtaaaacagaccagtcggctctctgtaaaatggaccaatcagcaggatgtgggtgaggccagataagagattaaaagcaggctgccccagcctgccgtggcaatcgggtagggtccccttccagagggtggaagctttgttctttcgctctttgcaataaatcctgctgctgttggctgtt

SEQ ID NO: 787706 - DNA, 716 bp, Homo sapiens
tcatccttcgagacccaactcaggatcccctttttctgggagcctcccctggctctctagtctgagagcagtgcttttcagatggtgtcgtaactgcctgttaactttatctgtgactctgtagctctcctcccttcaccatgctgcacacaccgcttgccctcccttaggctctggaggmccaggccgtgccattcttattctttgtatctctagtactttacacagcacttggtgaacatgagtgctcaataactatttgttgaatggatggaaggatattgtatacgatcaggcatcacttaatgacaggcacattctgagaaatgcattgttaggtgttttctcattgtgtgaacatcatggagtgtgtgtttacagaaaccttcatggtccagcctgatggtctagcctgctgctcctgggctacagacctgtacagcacatgactatagggaatactgcaggcagtggtaacacagtgttaaatattggtgtatctaaacatagaaaagataccataaaaatacagtattataattttgtgggaccacagacatctatgtggtccatcattgacagaaacacccgtgtctagcccatgactgcatttcatttgaaagccacagccattcaagaactatgtaaacagcaccacctatgggtagacaattttaacaccacattttacactggaagatgagacttacgcattt

SEQ ID NO: 787707 - DNA, 478 bp, Homo sapiens
gaccacagacatctatgtggtccatcattgacagaaacacccgtgtctagcccatgactgcatttcatttgaaagccacagccattcaagaactatgtaaacagcaccacctatgggtagacaattttaacaccacattttacactggaagatgagacttamgcattttttactgaaaaaaatgtttcactcttcaagccatggggtcatttatgttttaataaatttcaaaatgataagtgctaatattcttcatattgttttagttttgagactgttagctgaggagtctggaaatacaaaggtttttgcagtgaaaggaggaggaagagggaagccatattaattaataacatgttggacgcattgtaacatatcttatttaatcgtgccaataacctgttcctcacagtggttgtattcccatttttagattaaggaggttaagctggtggaggtgaagcccctcacccaagcc

SEQ ID NO: 787708 - DNA, 587 bp, Homo sapiens
gcttccataaagaccaatgttttcccagtcactgcagccagccaagagagagatggcgacacagcaccagttaaatgcacccaccgggaagtaacccaccttgccacagccaaagtttcactggctacagcaagccacatgggcacaccaaatggccagaggacagagtgtgtctctccattaggaacagcagtaatgtctgcacccctttcattgagtttttttcccccgaattgaccgtctgtttctttgtttgtttttcaagtaatccattttaattatgaaatagagcacattgtgtgagctgtggtcaacaggtatccaaaatgtaaatcatgtgatttccaatatgcaaatcataacgccaggggcaagasttttcaaaacatcgctccctcccacggagttgcatttgcattttaaagcacgaaaataaatttctgaatgattcggtcatcacctccagcgaggaaaagcataaccaagaaaaaccttagccagaaatatcttttgactttttatttgctgaggtacaaaagagggtgttggaatgagtaggctgtggaatccgtttattcagtgtaatc

SEQ ID NO: 787709 - DNA, 553 bp, Homo sapiens
tgccatttttgtgagtttggagtgcattcttccatatctctttctaagctctgtgcctgggagggagccctgtgggttgggagctctggggtgcgaatggtatctgaggactcatttccacatagagttggacaccatgattgctcaaggacaggcagtgaagtgggaaaacaaaatgctgcagctggtgcccagggcagggcaggtaaggagagcaggcaacgggagtagagggcaggaggggaaccgggattgccctctcatggactgtaggaggcccaaagtttctacactgtcacgtccctttgaggtcagggctgaagggccacagtgaccaacagagkacctgtggaactgttaggacaagagcaagggaacagcatccatcctgagtggaggagaatggtgaaaccccagggtgtagttcagttactacaactccaacctgcaatctgggtctcaaggggaggccagaaagactgggagggaccacccaccttcactctgcacagtatcctctctgtggagagggagggcacatggcagtccacca

SEQ ID NO: 787710 - DNA, 610 bp, Homo sapiens
taactttgacctatgaggatataaataatagttttatttccttctgctgtctgtgttgtctgtttcctcatatcccctcactctacctttttttgttacttttatatgttctcaaatgttcagattcttggctctccattcaagtcttagaggggggacattcaaacagtacctgcaagtcctgagactacagatgacacttgtcaacaggcgaacttcactttatttcccaacctgcccaacctctaggtctttccacaagacttcgtcatattccctaaaaaaggtccttccacacttttgcctggacagcagacccctggctgccaatgttctgagagctgagggtaggaaggggctggggtgaggtctgatcattcagcatcaggctatcatttatttgccatcttcaggatgcttcccctcscctctggtatgcctttgtgtagagaaccccttggttcacctatttaacagattgaaactccaatcttcacagtgagaggaaggagacgggggaggaatctatctgcttctgtcttagtcaccttgggctgccatagcaaaataccatacactgggtgactcaaacaacagaaatttattcctc

SEQ ID NO: 787711 - DNA, 570 bp, Homo sapiens
cttaaactctcatattttctccaggctgcagaaaatggtctagttgactataatgacatgctgggttttgagctttgcttttggttgaataagtaccacagtttaaaggtatgtgaatgaagctgggtggtacagtggctcacgcctgtaatcccagcagtttggggggcaaaggtgggcagattgcttgagcccaaggagatcaagaccagcctgggcaacatggtgaaaccccatctctacaaaaaatacaaaaactagctggacatagtggtgtgtgtctgtggtcccagctacttgggaggctgacggaggattgcttgagcctgggaggtccaggctgcagtgarctgtgattgcgccactgcactccagcctgggtaacagatgagaccctgtctcaagaattagccgggcgtggtggcgggcgcctgtaatcccagctacttgggaggctgaggcaggagaattgcttgaagccgggaagcggaggttgcagtgagccgagattgtgccactgcactccagcctgggcaacagagagagactgcatttaaaaaaaaaaacaaa

SEQ ID NO: 787712 - DNA, 571 bp, Homo sapiens
tgtaagacatttttgagtatcttttatcaaagactacatttttttctgttcttgttacaattgttattcagcaaagctgtgagagcccactgtatgccaggagcagtgtgtggtttggggcaaactgtagtgaacaagaaacagttgtttgtcttcatgaaaattatggatgcagttggcgggtggggggcatagaggaagccggtaactacaatatagggtgatagggctcttgataagggcacagaacatcatgaaagcatytagggggcccagccacccttgaaagatcatggagcttttccagagaaatctgaggcctggcggatacagaggcgtcagccaaggtgcaggtgttggaggaagagaggggaggtgggatgagggtggctccactggcaagtgcataggcctgagtttgagagtttgcacgtgtaactcgagtaagtttagtaagattggagaattgggtggggggaagggaggtgccaagcttgtggtagacgagggcaaactttgtagacttcattctgaaagggccgtgaaccttactatgtgcattttaaaatga

SEQ ID NO: 787713 - DNA, 600 bp, Homo sapiens
ggatccattatgattaactaaaatcctcacttccccttgtttttacctaaagtgccttttctgttacagaaccccatcggggataccacattacctttcatcatgtctccttaggcaactcttggctgtgacggtttctcagatggtccttgttttttatgacattgacagtcctgagaggtactggcagggcattttgcagaatgtcccctcaattgggatttttttttttttttgagatggagtytctctctgttgcccaggttggagtgcagtggtgcgatcttggctcactgcaacctgcacctcctgggttcaagtgatcctcctgcgtcagcctcccaagtagctgggactacaggtgcctgccaccacgcctggctaatttttgtatttttagtagagacagggtttcactatgttggccaggctggtcttgaactcctgacctcaggtgatccacctgcctcggcctcccacagtgctgggattacaggcatgagccactgcacctggcccctcaattgggatttgtctgctgtttttctcatgattagactggagttatagtttttgtgtggaacaccacagaggtgaagt

SEQ ID NO: 787714 - DNA, 600 bp, Homo sapiens
ggatccattatgattaactaaaatcctcacttccccttgtttttacctaaagtgccttttctgttacagaaccccatcggggataccacattacctttcatcatgtctccttaggcaactcttggctgtgacggtttctcagatggtccttgttttttatgacattgacagtcctgagaggtactggcagggcattttgcagaatgtcccctcaattgggatttttttttttttttgagatggagtttctctctgttgcccaggttggagtgcagtggtgcgatcttggctcactgcaacctgcacctcctgggttcaagtgatcctcctgcktcagcctcccaagtagctgggactacaggtgcctgccaccacgcctggctaatttttgtatttttagtagagacagggtttcactatgttggccaggctggtcttgaactcctgacctcaggtgatccacctgcctcggcctcccacagtgctgggattacaggcatgagccactgcacctggcccctcaattgggatttgtctgctgtttttctcatgattagactggagttatagtttttgtgtggaacaccacagaggtgaagt

SEQ ID NO: 787715 - DNA, 483 bp, Homo sapiens
ttttgtggaatacaagaagaaattttaatagttattaagtataaggtggttagtgtatggtacatgactcagcaaatatatgttatgcagcttgaatttgtggagggtgtgcaggtagttattgggtcgtgtattmtatatggaaactactatgtcagtttgctggtagagggagaattgctgtctttcaaaatatgaattataggcacttaatatttctaaatatttttgtttttttctttttaaatatttcttaatagtatgtggtggttaatattttccttaaacttagataacctttaatttgcttatatagccaagttttattttaaattgggtaattgagtatccaacttaaatacgaatcacccgggtgggctatagttaaattctggagacacagtgggaatttcaggcccaagatgtagaaattacttaggtttgtcaagtggcaacaagtgtattttcttggaaagctatgta

SEQ ID NO: 787716 - DNA, 617 bp, Homo sapiens
acagaatgggcttgcttgctgtggcccagagaccccatcaccccaggtgacagtgaccttacactggccacgtgagtgaggcaattctagaccagccagctaacctcagacacttgagtgggcctagcagagatcggacaaatccatccagatccatagactcataagcaataataaatgcttattgtttcaagctactgagttttggaatagtttgttatactaacatagccaactgataygtagttccctggacatggtccccttatggggtctattaatgtcattataaacccttagttcaactcagtagaagagattcagtcactggatggaggggttctattaaatgggggtggtgggtcctcaattcttgtgattgtcagcattactctgagacatttttaacacagatgcctaggccttgtactagagtattcaatcaaatatctgtagatgaaggttcggaacctgtaatttttaaagctctggtaattgaccaggattaaaacccaataattcaatggtcttgtcaatcccttccattactgaaagatgcagtgattccagttcatctatacttaaacaaataacactcaggtggttcagagttcatt

SEQ ID NO: 787717 - DNA, 590 bp, Homo sapiens
gaaacaagtattttgacaaaatatgattatgctgaccaatggaataaattatacaggggtttcaccttcttagtgttcagcttaccagatgttgctacaagataagcactttaaaactcactggcttaagcgcaattcaaaattgcaaaattgtggaaccaaaccaaaagcccatcaatcaactagtgaataaagaaactggtacatatatatgatggaatactacacagccataaaaaggaatgaattaacagcacttgcagtaagctggatgaaattggaggctattattctaaatgatgtgactcaggaatggaaaatcaaacatcatatgttctcactgatacgtgggagccgagctgtgaggacgcagaggcataagagtkatacaatggactttggggacttggagaagaagagtaggaggggggcgagggaaaaaagactacaaatatggtgcagtgtatactgcttgggtggtggctgcaccaaaatttcacaaatcaccactaaagaacttattcatgtaaccagataccacctgtactccaataacttacagggaaaaaaccccaactcactggcttaga

SEQ ID NO: 787718 - DNA, 609 bp, Homo sapiens
ctgtaactgtagctgatacaactttaaattataaaggttgatgattatagggcagtgagtatggaacagacagcattctaggtgcttttcatgcatcctcttattttatccttagagaaccccttataatagtagtagtattcagctgggcgcggtggctcacacctgtatgcaatcccagcactttgggatttggctcacactgtaatcccaaggcaggcaggtcacctgaggtcaggagttcaagaccagcctgaccaacatggagaaaccctgtctctactaaaaatacaaaattagctgggcgtggtggcgcatgcctgtactcccagctactcgggaagctgaggcaggagaatcgcttgaacccaggaggcagaggttgyggtgacccaagatcatgccattgcactccagcctgggcaacaagagcaaaactctgtctctctctctcgctatatatatattagtagtattctcctcattttatagaaaagaaagctgagacttagaaacttgtccagggtcaccagctagtaaatggcagagttagaatttacctatgcacgtatatgagcatttcgtgcatgtcattggctgtgggagaat

SEQ ID NO: 787719 - DNA, 630 bp, Homo sapiens
ggatttggaaatgttgttgatcagctctccagtgacacatgcgtgtggactgggtgggacacacgtgcggcacacactccactcacacacagccaaaccttcaccacctattttactgcttctacctcacctcctaccttygccatccatgtagcctgacatatattttgttcacattttgatgcatggttccaatgttatatttttccatttgagaaaatgtgcaaccagatcaaaagcacctggtgacttaggaacaccagggtcccccactggtgaagctaatggagtcactaatttgcctggccaataaaaccaatgatttctatactaaaagcctttgagtgaagcctccggggcttgcttcagggcaatggaagggggctagtttcctcttagccaataacctaattatttttttaaagcactaactgtacctttcattataataatgcatataattgattttactgattatgtctttcatggcatctattagtcactgagaactatatttacttctttctgttgtttttatgattgtttagctttgggatctcataataggtaattaataaaatatgttaatctgagagtaatttacctaatgagatctccaggaatgctttt

SEQ ID NO: 787720 - DNA, 608 bp, Homo sapiens
caggcaatccagaacaacaccgaccagccagagctccccccatcaatggagtctctctaaagagctacatctccagtcaatttctccctctgcccactccttctctgtttctctaccttccacagatgttattccaaagggcactccagaataaacaccctagcctactaaactccatctcagagtcgacttcccagagaatggagcctgtgaccaagctaaattcaacaccatgaatgttatctaccaaatcagagtatcagagagtaagggctgagggctctctttggaaggagagggaaattaagttataacagaaagatttctaaaggaggggagatttgaactacatctggaatggtggttactattaggtagttgaggaacaacaggaccttttagtgaggaacaattcakgaaaaaggcaaaggggcaggaagtacaaagtatgttcaagggaaatttaacagagtcacccaatgaaataagtgagatgtaagaaagaaaccagactgtggatggagcttgcactttaaaaaaaaaaaaaaaatgcacttcatctgttagaccaattgacaaccaatcaacatttggcactgcagatgaat

SEQ ID NO: 787721 - DNA, 537 bp, Homo sapiens
acagagaccctttgttctggtgtgctctcatggtgactggccaaggagaagcacccctctgcacagaagtaaaattgcttcgctgaaaatcctttgtttgagtgctcagtttccttaagattctgagctttatttccaacagagtcaaaccgtatcattccaccccaacccctcccaaaagaacccatgtccttttcacatttcaaaactaatccctctccctctccctctccccggtctccctctgatgacaccaaagttgtgcccctccmcggtctccctctgatgccactgaagttgtgaaagctgaggctggactgtactgcggccatctcggctcactgcaacctccctgcctgattctcctgcctcagcctgcagagtgcctgggattgcaggcgcgcgccaccacacctgactggtttttgcattttttggtggagacggggtttcgccatgttggccgggctggtctccagctcctgaccgcgagtgatctgcctgcctctgcctcccgaggtgccgggattgcagacg

SEQ ID NO: 787722 - DNA, 617 bp, Homo sapiens
attcaaagttccacagatctctaggccaggggcaaaatgccaccaatctctttgctgaagcacagcaagagtgacctttgttccagttcccagtagattcctcatctccatctgagaccacctcagcctggacttcattgtccatatcgctatcagcattttggccaaaaccattcaacaagtctctaggaagttccaaacttccctgcgtcttcttrtcttcttctgagccctccaaactgttccaaactctgcccattacccagttccaaagttacttccatgtcttctggttatctttatagcagtaccccactcctggtaccaattttttgtattagtccattttcacgctgctatagagattctacctgagactgagtaatttataacaacaaatgtttaattgactcaccgttccacatggctggggaggcctcaggaaacttacaatcatggtggaaggcgaagaggaaataagcaccttcttccaaagcagcacgagagagagagagcatgcaggggaaactgccactcttaaaccatcagatctcatgagaactccctcaccatcacaggaacaccataggggaagccactcccatgatccaattatc

SEQ ID NO: 787723 - DNA, 623 bp, Homo sapiens
actgagtaatttataaagaaaagaggtttaattgactcacagttccccatggctggggaggcctcaagaaacctacaatcatggcagaaggcaaaggggaagcaaggcacatcttacgtggcagcaggagagagaaagcaaagggggaagtgccacactttaaaccagcagagtcacctacaaaagttattcttccctgtctttcagtaaaaaatgccagtagtcttgaacatcatgatgtattataaagaaaaatgccagtaattccccccttgaaagatacattctttgggattaatgtatttcatctattataatgcaatttcttatatgcagtgtctgggtaggatgtagtgagtgggagagcaaatgaaataggatttaccttgcgttrattagcagagaggttggttggtggtatacaggggttaaatatactatcctcttcatttttgtatacatttgaagtttgtaaaaaactgttatgctgggaggagtcatatagttttttttttttttacattttattattaattcatcaggcatgatagcttcaaggaataacgcaaggaacactgatgggaaagcaaagatggaaatatacatactcatctcccgatgat

SEQ ID NO: 787724 - DNA, 623 bp, Homo sapiens
actgagtaatttataaagaaaagaggtttaattgactcacagttccccatggctggggaggcctcaagaaacctacaatcatggcagaaggcaaaggggaagcaaggcacatcttacgtggcagcaggagagagaaagcaaagggggaagtgccacactttaaaccagcagagtcacctacaaaagttattcttccctgtctttcagtaaaaaatgccagtagtcttgaacatcatgatgtattataaagaaaaatgccagtaattccccccttgaaagatacattctttgggattaatgtatttcatctattataatgcaatttcttatatgcagtgtctgggtaggatgtagtgagtgggagagcaaatgaaataggatttaccttgcgttgattagcagagaggttggttggtggtatacaggggttaaatatactatcctcttcatttttgtatacatttgaagtttgtaaaaarctgttatgctgggaggagtcatatagttttttttttttttacattttattattaattcatcaggcatgatagcttcaaggaataacgcaaggaacactgatgggaaagcaaagatggaaatatacatactcatctcccgatgat

SEQ ID NO: 787725 - DNA, 631 bp, Homo sapiens
actccaagcagaggaagttctttgcttctaagagtttatgtgattaacttgagcccctcctgccccagataatccaggataatctcccttaattacactgcaaagtcccttttccatgtaatgtgacattcacaggttccagaaattagggaatgaacatytttgggaagtcattctgcctagtacgtgtgcatactgactttttttccaattttaagttcatgtttcttagaatttatctctgggaattctttgataccttgatttaaagtgtgcttcttttttttttttagacacagtctcactctgtcgcccaggctggagtgcagtggcaccatctcggctcactgcaacctccacctccgagttctagcgattctcctgcctcagcctcctgagtagctgggattataggcacacgccaccatccccagctaagttttgtatttttagtagagatgggatttcaccacattggtcaggctgatctcaaactcctgacctgatgatctctccgcctcggcctcccaaagtgcttggattacaggcatgagccactgcaaccagcctaaagtgtgtttctttagaaagtttatttctcaaggcatgttggtcactgctaatgccactg

SEQ ID NO: 787726 - DNA, 615 bp, Homo sapiens
aggataaaaatagtgtcaccagctttctaaggttactgtgaggattgtgcagaaaaataggaaatctataaatgttgcctgttttattacaacaattccaatgtgtgggacctttatcagaaaacttagagaaacagaagacgccttacttccagagactggtaaaataggctgtgtctgtttttacaggttccagaawttctcctacctcaaatccccctatcagcctccaatcccctgaaagctggcagtgactcagatgagcctgtcagtctggaatcaatggttcatttctgctgtaaaagggacattggaagagagcactatgcctcactggtcatttgactgaatttatcagctcttttcctgagagcaaaagtgggagaattagactcgggtgggcctgcggcagagagtaaaaaagcagggatggactggaggtgaggagtcctaacaaatatgtttatcctactcaacattacctaaaaactagatatagccacacaaggaaggagaaaaacatctcttctgtgtgcatctttgcgatggatttagaggcaatgtataggaaggcattattgcctgggggttatgaacagaagctctggtaccaga

SEQ ID NO: 787727 - DNA, 620 bp, Homo sapiens
tcttaatgaagtatatattttttatcacaagggaaaatgcttacaatttcataactctggagagggtcagacactctagaatccagtcctattttgccttaactaaatgcttgactttgtacccgtcaatctttaggaacctcagttacttgtctttaaaaattggagttagggcagggcacagtggctcacgcctataatgccagcactttgggaagccaaggcaggcagatcatgaggtcaggagatggagaccatcctggccaccacggtcaaacctcatctctactaaaaatacaaaaattagctgggtgtgatggcacacacctgtagtcccagtttctgagaagctgaggcaggagaatcacttgaacccagaaggcagaggttgcagtgagccaagatcgygccactgcactccagcgtggtgacagagcgagactctgtggcaaaaaataaaaaaataaaaaaaaatcagagttagacaagctgattttgaaagatttttccagacccattccaagatggccaaataggaagagctccagtctgcagctcccagagtgatcgacacagaagacgggtgatttctgcatttccaactgaggtacctggttcct

SEQ ID NO: 787728 - DNA, 542 bp, Homo sapiens
cacacacaacacccatgaacaaaaccatggaataacttttattccacagcttttggcattacaccaattcattccccttacctccgctctctctcctttttaagttactcttcatccctagcgaaagtgagttgcccttcaggaaagactttttctggaacgaatctttccaactgcagaggagcttttgagtatctggcaacgatgagtagtattactgacattctggttttgtgacgttgggcgggtcatagactctggagctgtttcctaatccataaaaagtgctcttattctagaaatctattattctgggagtccccttattctgtttattggytttgaagctcttccaatccaaacaatttctcccataagtcataggaaatgagcacttttacaaaaagcaagacattgaggactgaagtgagtcattctaacagctaattagattgttgtgcattttggatacatgtaattaatggaccctcctttaagaatagtgagaagatctgattggcaaaatggacaaaaatagaaca

SEQ ID NO: 787729 - DNA, 651 bp, Homo sapiens
taagtttataggtgtcatgttattataactcagtttaaaaccttgttgcttgcaaaatggtttaacctacaatgaagacccaattacgggaggagcagtagaatgaccatgagtaatgtctctgggaacagagctagaagcaaagctatagctgacactaggacttccaacaggcagaatgattttatttgctaaatccttatggccaggagcagtggttcacatctgtaatcccagcattttgagaggccaacgcgggtggatcacttgaggtcaggagtttgagaccagcctggccaacatggtgaaagcctgtctctactaaaaattcraaaattatccaggtgtggtggagggtgcctgtaatcccagctactcaggaggctgaggcaggagaatcgcttgaacccaggaggcagaggttgcagtgagccaagatcatgccactgcactacagcctgggtgagagtaagacttcatttcagaaaaaaaaaaaaaaggaaaatgtccttacaaccttcacaataatttgtgaaatgatatattgactcggtttaaagaatcttgaattatcaagttttaacctgtaccatctaccatcaaccttattacaccgattcacaaaaatagatttggaaataaataaaattt

SEQ ID NO: 787730 - DNA, 600 bp, Homo sapiens
tatagtagtccctatggactagtaaagccctctgcacagacacacgcaggcaaaaagatgggaagggaatgagatctccacatttgtgatatattttccctttccatcatggacagttggaagctgagatgagatcaagttctgtgtgcaacaggaaagatgggcagtggaggtggtggcagctgtggtatygttagagtagaagctctagagctgttggtggcatcaggtctaagagttacaagtttacgttggtgaagtgcttcagatttcaaagtgttttcacatgtatgactccatctaatgctcataacaacactgtcctcaatgtactagagaaagtaattgagacccaggggttaacttgtccatggccatgcagtttatgggcagcagagcaagatctttagtctgagtctagcagcttttccaactattcccttaataaagtgataggtcaattcttggtcaaaaattccagataaaatgtcatgtaactccaccaaaaaccctgggtctggagtgtattgaatcctcttgactcttccctgaattcttcttgctgcccagtggcacccttagcaatcaattacgtagatg

SEQ ID NO: 787731 - DNA, 579 bp, Homo sapiens
gattgcagccaatgtttactaagtccaggataattcatgagaccaccacaaacatcatgaatgacagattctggttgtaaacaaggttcagggaacagaagcagttctaccatctaatatcaagctgaagctactagactaactcagggactaaatctatagacaaagaacaataaaatctttctgatgaggtccccaaatgagattcctgtgctccacttcttagaccagtgattctcagttttacctacacattcgaatcatccagattccaccctagagattccaatttaattgatgaacttaggcattggtgttttaaaaaagtttccaaggggataccaatgtacagttagggttgaaaacttttgtcctagagtacaaggttctgctcaaagttctcattcatttgaggcawtgagaatagcttaggaccgtggttcccatcaacatcttcctgtgtggttttaaaaaatacagattcttgtattctacccccatacttccaaattagaatttttaggagttggtcccaggaatccacaattttacaagctcctcacataattcttatgaagc

SEQ ID NO: 787732 - DNA, 559 bp, Homo sapiens
aagtttatttctaggtaacttatttgtagctattgtaaatgagattagtttcttgattttttttgtttgtttgttttttgttttttttcagattgaccactgctggcatatagaaatgctactgatttttgaatgttgatattgtgttctacaactttactgaacttatcagttcaattagttttttggtggtgtctttaggtttgtctaaatataagattatattatctgcaaacaaggttaatttgacttcctcctttccaatttagatactctttatttacttatcttctctaattgccctggcaaggatatccagtactatgtcaaataagtgttgaaagtgggcattcttgttttattccagattttagaagaaaggctttcaatttttcatggagaaaatcatgtagaatatgatcagaaggtgacattggyaaaaatgactggaacaatgtatatattgtgagctgataaatacttattaaattttccttgtctctcctccaaagaaacagagccactttagtaagaatcccaaaatctgccaataaaatta

SEQ ID NO: 787733 - DNA, 646 bp, Homo sapiens
ccacacactcagtctaaataggagcatgagtatgggagaatgggagtatttagaaatatgtgcgaggatttcaaaaaattaaggtttgaaaaccaaaggaaaaatgcagttaactccaggtagagaaaagttgcctaagaggaattataactgcagtcaaattacagtcaatttttattgtttgctaattgtgtatttgtaaatttgcctaaaatttacaccaaaacttatttgttatcccccagtcaatattcayggcacttttgcaggcattcacagacatgtgaaaagcagccaaaaatttgagatactcaacacgcatatgcccaactgaggtcaagccaagcaacactctgccttcttctttctgctctcaaactatatacaagtgtctttttgctgtctgtttagtgtcacattattttacattttcgttataatttcactgttttaaacggcctgcaaatgtagtgtgtagtttctcagtgcaagaaggctatgatgagcctcatggagaaaatgtgggcactaaataagtttcattcaggtatctgttattgcaccggttggccatgacttgaatgttaataattcaataatctatattaaataaggagttttgtatttattggcaaatacataaata

SEQ ID NO: 787734 - DNA, 604 bp, Homo sapiens
gattatagttttagctcttacatttaggactatgatccattttgagttaatgttttgtttatggtgagaggtcctggtctaactgcatttatttgcatatagatacccagctgttcgagaaccatttgttaaaaagactgttctgtccccattggattatagtatgcttgttgaaaatcagttaaccataaatgtaagggtttatttctgaactcytgatttaattccattaatatctatatctagccttgtaccagtaccacatgattgtaatgactgtaatgattgtaatggctttgcagaaatttggaaatcaggaaatgtacataccccgattttgttcttttttgccgggtctgtcctgcagaccctggctgatggacgaaatgagtactcagacacaggtatgcagtgtaagagcagttaggtgactgcctggctctagtggccagacagcagcccctagaagctggacctgcttgcttttattcagtgcaggcacaatgccaaaaacctggagccaacacaacctgtaggtaattaaaatttattgttcccctttcggtgaaggtcaggggcatggatgatcaaaggtcagttcctg

SEQ ID NO: 787735 - DNA, 604 bp, Homo sapiens
gattatagttttagctcttacatttaggactatgatccattttgagttaatgttttgtttatggtgagaggtcctggtctaactgcatttatttgcatatagatacccagctgttcgagaaccatttgttaaaaagactgttctgtccccattggattatagtatgcttgttgaaaatcagttaaccataaatgtaagggtttatttctgaactcttgatttaattccattaatatctatatctagccttrtaccagtaccacatgattgtaatgactgtaatgattgtaatggctttgcagaaatttggaaatcaggaaatgtacataccccgattttgttcttttttgccgggtctgtcctgcagaccctggctgatggacgaaatgagtactcagacacaggtatgcagtgtaagagcagttaggtgactgcctggctctagtggccagacagcagcccctagaagctggacctgcttgcttttattcagtgcaggcacaatgccaaaaacctggagccaacacaacctgtaggtaattaaaatttattgttcccctttcggtgaaggtcaggggcatggatgatcaaaggtcagttcctg

SEQ ID NO: 787736 - DNA, 549 bp, Homo sapiens
tagagatgtacaaagagccttagactcccacacaataatagtggcaggatcccactgtcaatattagacagatcaatgagacaggaaattaacagcgatattcgggagttgaattcagttctgaaccaagcagacctaatagacatctatagaactctcctccccaaattaacagaatatacattcttctcagcaccacgtcacacttattctaaaattggccacataattggaagtaaaacactcttcagcaaatgaaaaagaacgaaaatcataamaaacagtctctcagaccacagtgcaatcaaattagaactcaggattaagaaactcactcaacaccacacaactacatggaaactgaacaacctgctcctgaatgactactgggtaaataatgaaattaaggcagaaataaagatgttctttgaaaccaatgagaacaaagacacaatgtactagaatctctgggacacagttaaagcagtgtttagagggaaatttatagcactaaatgcccactggagaaagcgggaaagatctaaaatc

SEQ ID NO: 787737 - DNA, 519 bp, Homo sapiens
tgctgtttctgccataacctactattgggaaaggagggggagggaggatccgctattgtttcttaagccctacttcacaggtagagagcatcaggagagggtgccaggaggcagcaccatccagcagaaatcaataatcccggaccagaaaatgggcccctggctttctgtcccagccttgccacaaactgagtgattttgcaggtcatgacctctttggatcacagttatcttatgtgcaaagcaaagcatttgacctagagaatttttttgagccctcaggttctatgagaattgtgctgctctagtaacaacagcagttagggtgacccacccctcctggtttgccaattggagcattgaagtcctgtgtgtcaggaaaytccttagtcctgggcaaaccaggatggttggtcactctaactgctgtcatcttttcagtatgcggcgtgttcggcctctggcacacgacaacaggagcagtggcagcagtaggctgtggtcttactgccatacctt

SEQ ID NO: 787738 - DNA, 614 bp, Homo sapiens
tccttttgggtgggaactgtctatttaaatcctttgaccatttttatttctgtttgttctctttatttccctattgattcacatactgggtaaatgtcatctgcaaatatctctttctgacttgccttttgtttctggactttgtattatactggaagccttacagaattcaaaatttttatatagtcacatttagaaatattttccatatggtctctggtttttctcattcaatmcttttataattaaattccttcccttcccttccttccttccttcctttttttgcttatttactgtggcatcttcagatcatttggaatttattttgatgtaaagtgtgatgttgggacttgatttgaattttttccaaatggttatcaagttgtcccaattattacttgaattaggcacatgttccccactaatatttgaaataccacatctaccatagatcatattaaactctaaaaggaatgtaataactcctatgaagagagctaatatgacaaattaaaagcatcttctagagatatctacttgttggtgagcagccgatgacataacatggtactgttagtgaacagataagccccctaaaaatagcaataaac

SEQ ID NO: 787739 - DNA, 570 bp, Homo sapiens
gtggcacggtgactgatcaaactttatattcctcaagccaacattaacttcctaaatgtgtgcaagcaggagatcatatctggcaacattcattgttataccttcattcctttcattcctttttttttttttttttttgagacagagtcacccaggctgaagtgcagtggcacgatcttggctcactgcaacctctacctcccrggttcaagtgattcgcctgccccagcctcccaagtagctgggactacaggtgccccccacaatggcaggctaatttttgtatttttagtagagatgaggtttcaccatgttggccaggctggtctcaaactcctgacctcaggtgatccacccacctaggcctcccaaagtgctgggattacaggtttgagccactgtgcctagcccctataccttcattcattatatgggggtgtccccaaatgcctaacaagggatgtctagatagctcactaagcccacaagttggagaagctctctaacagctaatttgcttccttgccttcctacttttatctaccatccaatggcaatgatggggtctgc

SEQ ID NO: 787740 - DNA, 588 bp, Homo sapiens
gacagtgtcaggacaaggagttgaatttttaaacagggagccagggaaggcctcactaagaacgtagtattttagtggaaattgaagttaaggaacaagctctgtggatttttaagggaaaactttccaggcataggaaagttgaaattcaagcgcaaggcaactgtgactggagcggaatgagcaaggggaggagttagatgaggtcagaaaggttaccaggacccagatcgggaaggtccttgaaggttatagtaaggaatttggttttgagtgaagtggggagcccttggagggctttgaacacaggaatgacaaaactcggtattagagctgattttttgagaaaagccaggtgtggttgagagggagggtaaaacaatcaggtagaaggctactgtaaggatytagaggagacacgagggcgacctgaacaaagatttcagccctggtgaactccaatcggattctgaatctatactgagagagagtctgctggatttgttgaaagagcggataccgggtttgagagacagcaatcagagatgagccaggatttcgacttcagtaactgaaaagatgttttga

SEQ ID NO: 787741 - DNA, 588 bp, Homo sapiens
gacagtgtcaggacaaggagttgaatttttaaacagggagccagggaaggcctcactaagaacgtagtattttagtggaaattgaagttaaggaacaagctctgtggatttttaagggaaaactttccaggcataggaaagttgaaattcaagcgcaaggcaactgtgactggagcggaatgagcaaggggaggagttagatgaggtcagaaaggttaccaggacccagatcgggaaggtccttgaaggttatagtaaggaatttggttttgagtgaagtggggagcccttggagggctttgaacacaggaatgacaaaactcggtattagagctgattttttgagaaaagccaggtgtggttgagagggagggtaaaacaatcaggtagaaggctactgtaaggatctagaggagacacgagggygacctgaacaaagatttcagccctggtgaactccaatcggattctgaatctatactgagagagagtctgctggatttgttgaaagagcggataccgggtttgagagacagcaatcagagatgagccaggatttcgacttcagtaactgaaaagatgttttga

SEQ ID NO: 787742 - DNA, 594 bp, Homo sapiens
gctttgacttttgaaaattgttcaatttattttggagacattaaattctaaataaggcctggggatatatggaattaaccatgccccctagctatataaagaaggttataaagaaaagagattttatataagagaggatgttgtatggtaaattattgtcctaaagtaaaatgactggttgtttaaaaagagggatgtttaagcaagtcagaaagtctaaacatgtcgtacatggtctgtgtaagttgtgaaataatttattaaaaggaatttatgccagaaatgttgtataatttgaaggtgcttcataagctgmcactatgacttttcactgtacagcttgctggctttacagctagctaaggcctgggacacatggagttcgatgctggaataagtcataccttatctgcatttctatctgggtcctaggctccacacctagtacataattaaaatcccttactcaccaaggtttttaccaaaagtaaaagttgctatgagttaacactgtaatatgtaattgagcctactgaaaaaaataggtttacatgcaaggtatgtaaggagaattaaatgtattttttgtaagag

SEQ ID NO: 787743 - DNA, 646 bp, Homo sapiens
gtatttaaacaagctcttcaggtaattctgttgcagttgatttacacatcacgtttgagaaaaaaaaaatgacacaaaagcaaaggtgatagtagaagaccatggttcttgaatgcttagcgtcttgatgaccttgttccctccttagcaggttacaaaaggtctactctgtcaactgctcacccacttaacacaaatgaaccctcgcatttagtcaaagtgatggttaaaaatagtaccacaatgaagctttatcaaaaaatatgtggataaggaatcaacacttcaggtgggttcatgaggacgccattccaaacaactagaactctacccatggtggaaccccttcctcctcccttcggaagcagtcatcattgtctggatgtaaatccccagatgtaaccctgattgatctcattttctcttttctggcactcagtggatatgtggattmtagcttgtctgtgatagctttctttccctagcatgaatgatctgtttctttaccataagttttttttcaaagccttacagatatgaaaatgacccacactccagtcttttctaaaaagtatggatggtgtcatcagacactttcccccccgcaaaaaaaaagagagaatatttgcttctttccaaataccat

SEQ ID NO: 787744 - DNA, 542 bp, Homo sapiens
ccctcacctgaagtctcagtgacctggttactttcccatttatcttaagtgtgaaggctaggtcttgacataatacttccatgggtctgaaaggtatagagtagagtagggctcctcttaccttttaaaaatttaagctctatatttttgtagtaggtgaattactaacaatgaccatttactggggactttctatgttctaagttctgccaaattctactaggcactgggctaggtcctccatgtaccctattgctaattctcaaaataacccttcaaggatggcattgccatcttctttcagctagattcttggtctcagagagggccatggataacycaaggttacatagctactaaatagcagagctgggatgtgaacccatttgtttttttctgattccaaggagctaaatgtttctaccagacagcctccccaacactgcttatgatttttagcagctctgtcgtggttggcccctattaagcttgtggtcagttttaaaacttgcattttttaaaaataagtgattgttaaaatg

SEQ ID NO: 787745 - DNA, 573 bp, Homo sapiens
ctttgtaatttttaaaggtcataagagccaacaggggacaaggagagaagctgcacaagtccctgggtgccatccttattatgctctgtgtaagtagcaaaactataggattgtgcagtgcccaacctgtgcagctatatgcaacaaccctgcctgaactagggaaatggcagtggaaatagagaagaaatgacagatctaagaatcatactctgagctgcgagggtgcaggtatggcccttggmgctactgggctcagctgtcctgggacatatctctctactctgagggtaaaggtgggaacatgacccagttggaagaaatcttcccaagaatttccttccagagcaacagacctcccaggatgagggagatccagaagggggcagtgtgaggccccaacacctgacccctcttcctggggaccttgcaaacagaggctagaaggcactgaggggctctagggattgcctcattttataggcaggaacactgaggcccagagaggagacattttaggtggcctggaaacagtatgaattttggagtcaaatagatcaggattcacatctt

SEQ ID NO: 787746 - DNA, 638 bp, Homo sapiens
tctggaaggatcctgggatctgctggctctctggcttcccatggggtgtttggaaaggctcttgagaaggcaggagcccagagggagtgatgaagttaagggggtggcctgtgagggtcaggggaggccatgttcaggaaagtgggtaggacacccaagaggtcctaagctttgttcacagacagccctggacttctaggcaaggggagctggcgagctttgagaggcagctcgcctgcccctcrgctgagagcttcctgagggcagagatcctcttttcactaagattgttccaaagtctctgcccaggtctcccctctctttgatgctccctgccagccattcccatgggctctcatcaaccctggggctattcccatcatagcattttgggcactgtgttggggctgcctctttgcttgcctagcaactaaaggcacatcaagggcaggcacttccactgctgtatccccagaccctggcacagaccctggcacagcacctggcacatagtaggggcttggcaaatgcactgtgcacatatcaaatgaggcaaaagtaaagtcatcctttgtttgtgtaaggtctcctggaagggggcatggggagggcagtggagatctggccactacctttgg

SEQ ID NO: 787747 - DNA, 638 bp, Homo sapiens
tctggaaggatcctgggatctgctggctctctggcttcccatggggtgtttggaaaggctcttgagaaggcaggagcccagagggagtgatgaagttaagggggtggcctgtgagggtcaggggaggccatgttcaggaaagtgggtaggacacccaagaggtcctaagctttgttcacagacagccctggacttctaggcaaggggagctggcgagctttgagaggcagctcgcctgcccctcggctgagagcttcctgaggrcagagatcctcttttcactaagattgttccaaagtctctgcccaggtctcccctctctttgatgctccctgccagccattcccatgggctctcatcaaccctggggctattcccatcatagcattttgggcactgtgttggggctgcctctttgcttgcctagcaactaaaggcacatcaagggcaggcacttccactgctgtatccccagaccctggcacagaccctggcacagcacctggcacatagtaggggcttggcaaatgcactgtgcacatatcaaatgaggcaaaagtaaagtcatcctttgtttgtgtaaggtctcctggaagggggcatggggagggcagtggagatctggccactacctttgg

SEQ ID NO: 787748 - DNA, 638 bp, Homo sapiens
tctggaaggatcctgggatctgctggctctctggcttcccatggggtgtttggaaaggctcttgagaaggcaggagcccagagggagtgatgaagttaagggggtggcctgtgagggtcaggggaggccatgttcaggaaagtgggtaggacacccaagaggtcctaagctttgttcacagacagccctggacttctaggcaaggggagctggcgagctttgagaggcagctcgcctgcccctcggctgagagcttcctgagggcagagatcctcttttcactaagattgttccaaagtctctgcccaggtctcccctctctttgatgctccctgccagccattcccatgggctctcatcaaccctgsggctattcccatcatagcattttgggcactgtgttggggctgcctctttgcttgcctagcaactaaaggcacatcaagggcaggcacttccactgctgtatccccagaccctggcacagaccctggcacagcacctggcacatagtaggggcttggcaaatgcactgtgcacatatcaaatgaggcaaaagtaaagtcatcctttgtttgtgtaaggtctcctggaagggggcatggggagggcagtggagatctggccactacctttgg

SEQ ID NO: 787749 - DNA, 678 bp, Homo sapiens
ggcactgtgttggggctgcctctttgcttgcctagcaactaaaggcacatcaagggcaggcacttccactgctgtatccccagaccctggcacagaccctggcacagcacctggcacatagtaggggcttggcaaatgcactgtgcacatatcaaatgaggcaaaagtaaagtcatcctttgtttgtgtaaggtctcctggaagggggcatggggagggcagtggagatctggccactacctttgggtggaaggctgtggcaggggctctgggacaagggtacacctccccatccacacatrtctttaatcctatctcacgtctcctctctgttactttcttggatatacctgtctcctttctctcttgggagagctcctgagaccagccctggctgagaagtgagggggttgggagaggagaaagcagggctggaaatccagagagcagatagggtgggactggggaggatgaaaggggtttctgggccccccccgggggcctcatgcagagatggggatcttctgaggcctggggagcccactggggtcagaggctgccccatccttgacgccgaggcccctactgagcagccagagctggcagcatctgtgcagaagcagggggcccagtgggaggatcagcgccagccacgccaggcccaggaggatccagatg

SEQ ID NO: 787750 - DNA, 635 bp, Homo sapiens
ggagtggcaaagttattcaagacaggttaataagcttttaaaacaacaacaacaacaacaaataagtgtcccccctgctgtacaattttccaacacaatggataatttggaaagtgccacattctgtcagtacaaagaggagaagtggagatgatctttgagggaagaattggtcttgtgttttgagactacttttgttttcaaagctagatttgggttctggtttcagaaaaatccaatgaaatcttgaaaaaaaaaacaactctcattatatcttcaaaattgatttacaacatgacatatatggaaaaggraaaaaagctcataaaattgaatgttggatccttgaaatctatatatctgataatgtggtggttagacatgtcaaaaatgaaatttcccgttcatcttgacaaaattaaatttaaatgtctttttcggttttctatgtttaaaattttgaaaaatggattgaagatagcaaatgtctgtatcttcttttttttctggaacttgaaataatttcatgtgagtggcctaattataatatgctacagtctgtatcatctcctaaagcagagaaagactcattgagacttttttcatgttaaacatgaaagaattttaatgctgta

SEQ ID NO: 787751 - DNA, 573 bp, Homo sapiens
atcttcttttactgcaccttgggtaactgaaaccaaggaaagagaaacagtgggtgagtggggactactgtattcagctacaggtcataataccaatgaactgtggcattaaaaggaaagacaatcaatgatcatacctaacagaaaatttggaggcatgttccttatgattctttacagcagctcaacattgttaccaattacttgggttctgagctctttctttacttactgtgtgtggtttttatccttagttgtcatttacataagatgcagcagcagctccaggcatcaagttatctcccccmaaaaaattcctagacagaagaaaggggagagactggaaagagtgatctctggttatcaggaaataaaaatttacccagaggcattgtggtagactaaatactggccaccatatccttgtttgagtacccagaacctgtgaatgaaaccttatatggcaaaaggactttgcagatgtgattaaattgaaatggggagattattctggataactcagtggatcctaaatataatcacaagtgtcctgataagagggagacaaccaga

SEQ ID NO: 787752 - DNA, 573 bp, Homo sapiens
atcttcttttactgcaccttgggtaactgaaaccaaggaaagagaaacagtgggtgagtggggactactgtattcagctacaggtcataataccaatgaactgtggcattaaaaggaaagacaatcaatgatcatacctaacagaaaatttggaggcatgttccttatgattctttacagcagctcaacattgttaccaattacttgggttctgagctctttctttacttactgtgtgtggtttttatccttagttgtcatttacataagatgcagcagcagctccaggcatcaagttatctcccccaaaaaaattcctagacagaagaaaggggagagactggaaagagtgatctctggttatcaggaaataaaaatttacccagaggcmttgtggtagactaaatactggccaccatatccttgtttgagtacccagaacctgtgaatgaaaccttatatggcaaaaggactttgcagatgtgattaaattgaaatggggagattattctggataactcagtggatcctaaatataatcacaagtgtcctgataagagggagacaaccaga

SEQ ID NO: 787753 - DNA, 588 bp, Homo sapiens
aattaaattaaatgaccatcccagtggtctacgtagaaataatggtgtttttcaaagtggtttgtattgaagtggacagaagtggattgactcaagatgtggtttatagaaatactgatagaactggacttctagttttgataatggcagattattcaaatcactgatgaaaattactgactcagtcggtttgtgctgctataataaaatatcacaggctgggtaatttacaaacagcagaaatttattttctcactgttctgtaagttgggaagtccaaggtcaaggtgctggcagctttggtatctggtgaaggcycattctttatagatggtgtccttacatggcagaagagacagaaagggcaaaagaggatgaacactgtcctcatatggcagaaaagagaaaacctattccccgaagctctttctataaggaccataatcccatccaggagggccctgctctcatgactcaatcacattctaaaggtccacacctcctaataccatcactttcactttcaccatcaaaagtttcaacatatgactttgcagggcacacattaagaccataacaactactaag

SEQ ID NO: 787754 - DNA, 622 bp, Homo sapiens
aaacttaatccctatgcctggatttcaccgtgaaggcttcaacatgtcagctcaaatgctatcgcctttgaggttttctagaccatctcctccctgccccagttcctctaccaatcagaattcattgctgtctcctctgtctacatagactctcttcctctattgttgtgccagtcattacagtgcccttgcctgtcactcacactaractcacagctagttcactagtggtcatgttcacttctgcttaccccacagggccttacccttataaggggctcaaaactggaattgggtttaagctgggctgggggttggctgccagttgcaggagggattttacaactaaggaaatgcttcgagccggagccttaggtacagatgggtctggaatgtttggtaaataaagggcaggccagtgtggctggaactgatggttctgatgatgctaggaagactaagttgttggggtcaaggatttcaaaggacactggtggacaggcttaagggtctggacctcatcctttaggcagtaccctgtgttttcccaagttctgtctatttcagatgtctatttttctgtcagaccattcactgcaagtatctttccagaaatcatggt

SEQ ID NO: 787755 - DNA, 619 bp, Homo sapiens
gcactgtagggctcgaccttggtgtcactttgggtgaaggcactacactgaagatgttcacaatgcaatcagggtactcttctcagatcttgctaatgagagtgcccattccagagcctgtgcctctgcccagtgagtgggtcacctagaagacctgcaggcagtcacagttctctgtctccttccatactgagagaaagaaaagaaaattattatgattacctagaattgctgtttaagctgaaataggcttttgataacygcacccccaccccccaaagttgaagttaaagaatattaactgcttctctgtgaaacattaaccatatctctgctctgcatattttgtaagctctgtaagttcctgtttttcttgctgtgtagcgcaaggtcacaagacagataagtgcgagctgcaaaacgtgttttctaagatttaagacctgtcacatgattaatggcttttgttctcgcttctgtaagcctgctttctgcttcacgtttttcctcccttgagatgcttaaaagggcctgtgtccctctttgttcagggctcggactttctggatgcgagtccactgagctggtgtacaccttaatcctcctgtaaccctattgg

SEQ ID NO: 787756 - DNA, 657 bp, Homo sapiens
cttccctccacactgccctggccttcccctcaccgccccttggcccacttgagagccctcagctctggccagcatggctgaagtacgtgcacccttccacctcttctctccctgctggtccagccctgccgacccttgagagaaacgagaaaawcagtgaccccaaggaatcccgtaacttagagaactgagtgggagaagcaaggaatgggtccctgagtggaaggcctcagtgagtgccaggcccccaagggtcatctccacaaaagaatgcagggggcacagccctcatggtcccattgttccccggccaggtgaactgtgtggtgatgcgaggccttaacgaggatgaactcctggactttgcggccttgactgagggcctccccctggatgtgcgcttcatagagtatatgccctttgatggtcagtgaccagggatgggttgagggagggaagaaggggttgggcctgcaggtcgcatagtgtggctcacccactgggtatggctgacctcaggggcagtgagtctaggattatgatgggctgttggtggcttctcggagcccgctgtggatgtgattcaatccaccagttttaggcagagcccccgtccctcccttccaagaggctggagaactgattgctatgctgtgg

SEQ ID NO: 787757 - DNA, 550 bp, Homo sapiens
gcctgggtgacagagtgagactgactctaaaaaaaaccgaacaaaaaaacaaaaagggacccccctctgggcaaaccagttaaaaagaaaatgactttaaatataaatacatataaattaaaaataaagacatagagaaaaaatgttatgctaatactaatcaaaagaattaattttagatgatatagayctcaaagaaaaaaacaggaatagagtggcattacataataataaaggagtcaactctctaagaagatataaaaatctttaatgtttatgcacctaacaacagagcatcaaaatatgtggaattaaaaactaatagaactgcaagaaaagagagatgaatccactattatagttggcaacatcaacacccctgtatcagtaactgacaggttcgttaggcagaaaatgaataagaacacagatgaactgaatagtaccatcaattaactgaacctgattgacacctatagactgcttcatccaacaacaacagaatacacattcttctcaagctcacacagaatattcactttatgataga

SEQ ID NO: 787758 - DNA, 569 bp, Homo sapiens
aaggaggatccacgatctcctgtttccactatccactgtcacctgtttcaaaggaacaaatacagcaacatgaatcagttttgaaatatatataaaacaaataatgtatctttttcaaaagttcacatgtaagtcccaactaacaaacacatctgcccatgccacataaaatccccacctcctcccttgcctcttgctgaactctgccccctttatytacttttttttttttttttttgagacggaatctcactctctcacccaggctggagtgcggtggcacaatcctggctcactgcaagctccgcctcccaggatcacgccattctcctgcctcagcctcccgagtagctgggattacaggcatctgccaccacacccagctaattttttgtatttttagtagagatgggatttcaccgtgttagccaggatggtctcgatctcctgacctcgtgatccgcctgcctcggcctcccaaagtgctgggattacaggcgtgagccaccgtgcccggccccctttatctacttttagatgaggccaagcagaggttgttccaccctcag

SEQ ID NO: 787759 - DNA, 492 bp, Homo sapiens
atatcttttttttttttttttgagactgggtctttctatcacccaggccatagtgcagtggcacagtgatgcaatcatggctcactgcaaccttgacctcccacgttcaagacattctcctatttcagcctcccaagtagctgggaccatcaggtgcatgcaggtaatttttgtaatttttatttttttatatacagggtctcactgtgttgcccaggcaggtctcgaactcctgggctcaagcaatcaacctgcctcaaccatacaaagkgctgggattacaggcgtgagccactgtgctcatcctgaaatatcttcaaatcctacgctcagccaggaacggtggctcacacttgtaatcaaaacactttagggtaaggagacagagcaagatggcttaatagaaggctccagcaatcacttccccttcaggaacaccaaattgaacaactatccacccaaaaaaagcatcttcataagaacaaaaaatca

SEQ ID NO: 787760 - DNA, 631 bp, Homo sapiens
ccagtttactgaagctgcagggaattggaagtccagaagtcaaagaccaaaagagacacaataaaatagtagataactgtgccaaaaaatgatatatttttatttttatttttattttttttgagacgtagtctccctctgtcaccaggctggagtgcagtggcacgatstcggctcactgcaacctctgactcccttgttcaaacggttatcctgcctcaggctcccgagtagctgggattacaggcaagcgctaccacacccagctaatttttgtatttttagtagagaggggtttcaccatgttggccaggagggtctcgatctcctgaccttgtgatctgcctgcctcggcctcccaaagtgctgggattacaggtgtgagccaccatgcccggccgctaaaaaatgatttaaaatctaaaaactcaagagaccccattgatggtagtggcaggagggcgaactgtggagagagaggtattgggattgtgatagttagatcttgattgtgaagaaaataaaagttttcattctaagggtctgggtctctgaaaattctgcaataccaaggaagcccagtgagtccagttctgccagagtcttggctttttcctctatgaacgctcag

SEQ ID NO: 787761 - DNA, 634 bp, Homo sapiens
gggatgtgggtggacttatcaggtacttggctagaatatggataaggtatacaggtctcaagagatcaagacttatcaggtacttggccagaatatggatgaggtatacaggtctcaagacatcaagttaagggcccagtttactgaagctgcagggaattggaagtccagaagtcaaagaccaaaagagacacaataaaatagtagataactgtgccaaaaaatgatatatttttatttttatttttattttttttgagacgtagtctccctctgtcaccaggctggagtgcagtggcacgatctcggctyactgcaacctctgactcccttgttcaaacggttatcctgcctcaggctcccgagtagctgggattacaggcaagcgctaccacacccagctaatttttgtatttttagtagagaggggtttcaccatgttggccaggagggtctcgatctcctgaccttgtgatctgcctgcctcggcctcccaaagtgctgggattacaggtgtgagccaccatgcccggccgctaaaaaatgatttaaaatctaaaaactcaagagaccccattgatggtagtggcaggagggcgaactgtggagagagaggtattgggattgtgatagt

SEQ ID NO: 787762 - DNA, 634 bp, Homo sapiens
gggatgtgggtggacttatcaggtacttggctagaatatggataaggtatacaggtctcaagagatcaagacttatcaggtacttggccagaatatggatgaggtatacaggtctcaagacatcaagttaagggcccagtttactgaagctgcagggaattggaagtccagaagtcaaagaccaaaagagacacaataaaatagtagataactgtgccaaaaaatgatatatttttatttttatttttattttttttgagacgtagtctccctctgtcaccaggctggagtgcagtggcacgatctcggctcactgcaacctctgactcccttgttcaaamggttatcctgcctcaggctcccgagtagctgggattacaggcaagcgctaccacacccagctaatttttgtatttttagtagagaggggtttcaccatgttggccaggagggtctcgatctcctgaccttgtgatctgcctgcctcggcctcccaaagtgctgggattacaggtgtgagccaccatgcccggccgctaaaaaatgatttaaaatctaaaaactcaagagaccccattgatggtagtggcaggagggcgaactgtggagagagaggtattgggattgtgatagt

SEQ ID NO: 787763 - DNA, 631 bp, Homo sapiens
ccagtttactgaagctgcagggaattggaagtccagaagtcaaagaccaaaagagacacaataaaatagtagataactgtgccaaaaaatgatatatttttatttttatttttattttttttgagacgtagtctccctctgtcaccaggctggagtgcagtggcacgatctcggctcactgcaacctctgactcccttgttcaaacggttatcctgcctcaggctcccgagtagctgggattacaggcaagcgctaccacacccagctaatttttgtatttttagtagagaggggtttcaccatgttggccaggagggtctcgatctcctgaccttgtgatctgcctgcctyggcctcccaaagtgctgggattacaggtgtgagccaccatgcccggccgctaaaaaatgatttaaaatctaaaaactcaagagaccccattgatggtagtggcaggagggcgaactgtggagagagaggtattgggattgtgatagttagatcttgattgtgaagaaaataaaagttttcattctaagggtctgggtctctgaaaattctgcaataccaaggaagcccagtgagtccagttctgccagagtcttggctttttcctctatgaacgctcag

SEQ ID NO: 787764 - DNA, 631 bp, Homo sapiens
ccagtttactgaagctgcagggaattggaagtccagaagtcaaagaccaaaagagacacaataaaatagtagataactgtgccaaaaaatgatatatttttatttttatttttattttttttgagacgtagtctccctctgtcaccaggctggagtgcagtggcacgatctcggctcactgcaacctctgactcccttgttcaaacggttatcctgcctcaggctcccgagtagctgggattacaggcaagcgctaccacacccagctaatttttgtatttttagtagagaggggtttcaccatgttggccaggagggtctcgatctcctgaccttgtgatctgcctgcctcggcctcccaaagtgctgggattacaggtgtgagccaccatgcccrgccgctaaaaaatgatttaaaatctaaaaactcaagagaccccattgatggtagtggcaggagggcgaactgtggagagagaggtattgggattgtgatagttagatcttgattgtgaagaaaataaaagttttcattctaagggtctgggtctctgaaaattctgcaataccaaggaagcccagtgagtccagttctgccagagtcttggctttttcctctatgaacgctcag

SEQ ID NO: 787765 - DNA, 631 bp, Homo sapiens
ccagtttactgaagctgcagggaattggaagtccagaagtcaaagaccaaaagagacacaataaaatagtagataactgtgccaaaaaatgatatatttttatttttatttttattttttttgagacgtagtctccctctgtcaccaggctggagtgcagtggcacgatctcggctcactgcaacctctgactcccttgttcaaacggttatcctgcctcaggctcccgagtagctgggattacaggcaagcgctaccacacccagctaatttttgtatttttagtagagaggggtttcaccatgttggccaggagggtctcgatctcctgaccttgtgatctgcctgcctcggcctcccaaagtgctgggattacaggtgtgagccaccatgcccggccgctaaaaaatgatttaaaatctaaaaactcaagagaccccattgatggtagtggcaggagggmgaactgtggagagagaggtattgggattgtgatagttagatcttgattgtgaagaaaataaaagttttcattctaagggtctgggtctctgaaaattctgcaataccaaggaagcccagtgagtccagttctgccagagtcttggctttttcctctatgaacgctcag

SEQ ID NO: 787766 - DNA, 582 bp, Homo sapiens
agaattaaatatatgcatattcatatcatgatagtttactttagaagttacaaagggctctcacataaattatttcatatcatgattacaaaaatctggtgagacaggcacagagtgcttaaagctagttaatgacttgcttagatttccatagtcactgagagtggtctcataatatatcaagacccaattcttgtgaatgaaagttcctcacctaaattccctgttatgaaccatgtgactttcccattaacaaatgattggactgaaagtggcatctgacccaaaggccagtcagaaattgtgccacggattgatatgaaaagayggggtggatcaatcagctcatctctcctgggaatatgaactgtgaatgaaagttgctggagtgcaagtagaagctgaaaggatcctatgaggtaattgatggcctctgggctcctggtgagtcaaaatcacagggaagagaaaattatgggccaagtggaagtcaagaggggaaaaagaatgtcactagaagacatttgatacaaggcagacattagcagatatacagaggtaattgagctactccaatggtgg

SEQ ID NO: 787767 - DNA, 627 bp, Homo sapiens
gtggaggcagctagtgtgaggcggctggggagcgccgagctgcgtgtcatgccctgcactgcttagactagtgaacactatagtcaggatggctaacgataaccccgagcaaaaagggcaacatgtctgcttatgccttctttgggcagatgtgcagagaagaacataagaagaaaaacccagaggtctccctgtcaattttacagaattttccaagaagygctctgagaggtagaagacagagtctgggaaagagaagcctaaatttggtgaagtggcaaaggcggataaagtatgctatgattgggaaatgaaggattatggaccagctaagtgagacaagaagaaggaccctaatgcccccaaaaggccatcgactgcattcttcctgttctgttaagaattcagccccaagataaaatccacaaaccctggcaactcttttggtgacatggcaaaaaaaagaaaactgggtgagatgtggaataacctaagtgacaatgaaaagcagccttacatccctaagatggccaagctgaaggagaagtatgagaagaatgctgctgactataagtttcaaggaaagtttgctggtgcaaaggatcctgctaaagttgcccggaagaa

SEQ ID NO: 787768 - DNA, 611 bp, Homo sapiens
tccaggcatttccatgagtcttctgaaatctaggcagaggttcccaaacctcaattcttgacttctgtgtacctgcaggctcaacaccatgtggaagcttccaaggcttgggacttgcaccgtttgaagccacagcctcagatctacattggcccctttaaaccacagctggagcagctgggatgcagggcaccgagtccctagactgcacacagcaagggaaccctggccctrgcccatgaaaccactttttcctcctgggtctctgggcctgtgatgggagggatgccatgaaggtctctgacatggcctggaggcattttccccatggtctcagggggaataacatttggctacttgctacttatgcaaatttctgcagccagcttgaatttctccccagaaaatgggtttttcttttctattgcatagtcaggctgcaaattttccaaatttttatgctctgcttcccttataaaactgaatgcctttaacagcacccaagccacattttgaacactttgctgcttagaaatttcttctgccagatgccgtaaatcatctctctcaagtttaaagttccacaaatctccaggcaaaatgctgctagt

SEQ ID NO: 787769 - DNA, 634 bp, Homo sapiens
agattactgccagatcaaactgtaaattttaaggacaatcaaggatctgaaatacttgcaaagctgaggcaaggaaacccttgagtggtgtcccataatgttggacggttcctactcatttctaccttctgctgactgaattttgaggtgatggtggaggaaggaaaggaagagatagaaaatttgtagttgaaaaacacaacaatgggcttgaacttgtgtttrctttcggcatatgtttgaaggaaagtggggaggagccttcttaaaaatgccacatactttaaaacctgaaatctgactaagctatggattgttgttattggggatcagcccaagttgacaccttgaaaaaattctgaggtcaagaaacttctaaaaacatttcttaaaataattctcttggcacctcatagaaacttttctgatgagaataattgctcagggaagctcttttggttgagaaatatattatttatatggacccccagtcaattgaagtcagtctttgaatatgaaagaggcctcaggtccagggcagccgtttccctctggctggatttgcagcttgtgttttaatgtcctcctgcattgaagaggtgtaggagaaggtcacagatccaacactgctgaa

SEQ ID NO: 787770 - DNA, 462 bp, Homo sapiens
gttatctttcaatgcccttttttatgttgacccaaatttcataatgtttgacagatattttctatattgtgatttaggattcttactcccttcttcattataacctttttgttattttgggcaggtttcaaaagaaagaagtttcatctctagctaaaagtatcagagttgtttttaaaagtgtactgtacaatcctggtacagtgatggtgtgtttgggaatggttgttgtctccttgactcccacttcatgcccccactttgtgtagaagtcatctgattggaggaataatatcggtttytgggcctggcatatccctaagtatgagcttggttcaggagtgagcatgtgaggtacaagataaattttgcaaaacttctgagaaatattttctccatcttacaagagagcacaggaaagaatagctttttttttcctctgttaatgtcttatatagatgt

SEQ ID NO: 787771 - DNA, 604 bp, Homo sapiens
cccttgcggggcacgcggaggcccctgttgacggagcaaaggcctgctctttgcctgagaaccataattatgtgtgttaacgtcaggagagctctctctcatacttcagccccgagtttgtccctttcttgcatcctgtggccttgaagaagaatgtgctcattctcccaggccacagcaagatacacagataagcacgtatatagaaattgctatagaaacacttctaaatattgctttggacaaggaaaaagattttttttcagggtgggaggtagccttccaacaagaggaatcattttgactcctcttgcagtcactttcccttctcatagtagattttttttttcaagttccaagttgcttgatttccacatttgcacttggggttgcaatggaattcagaatccccctttacgacgatacacccagatagaccagtatgccracaaaactgcccagaagccccatggcagcttcctgcagctcctagccttgagcacctctgcattgtggtgtttgattggtatgtgcggcctcggacaaaggaatggagcagtagaaaacacctgtcaagggatccagctagtggctttgttagatg

SEQ ID NO: 787772 - DNA, 584 bp, Homo sapiens
ggaatccctgcgttttcattttgcaccaggacccacaagttatgcagtcagtcctgcttccctggtgatgtttgcttcttccttccaaaccaaatacagtactgatatttgtaggtcctggaaccccatgtagtcaaaggggttggactggctccttggtgtgtattatcgaggtggaggatgcaataggctactctcatcagcagaaactttccaccatcctgttcacctccactgaatctcttttgagtctcttaggtcatttggtgacctccactccaacacatttttctccccggtcttagacctctgtttttcttctctcagcattcctaatctgaactttgtctctccctcttctatctcaagtaatttatcctcagatgattgggggatggcacaacccaayaattcaatggtagagatactaaaattaatatccaaaaacctttggccctgaagcctgagttcaaatgttcaacacagccgaaaagaaatcttctgacagtgactaaaatgatgcctagaagaagcaaccaccaagaggtgagctgtgggagaaataaagaatcagccctttaaaa

SEQ ID NO: 787773 - DNA, 484 bp, Homo sapiens
cttgacctcatgatctgcccgcctcggcctcccaaagtgctggaattatagacgtgagccactgtgcccagcctacaataggtttttaatttcagtttctgacacttattaaaaatgaacttctatatcttcagatttataaaaaagatgcaaatacagctgatatactcacacgcagtttacctgatcactaacatcttacattattatagtttattgatctcattttgtttgtgcagatattgtttwcctgattttgtgtgttctttgtagctcactgaacatctttaagatgattactttgaattctgtcagacaactaatagatctccatcgtttctgtttttttcttttttcttttttttgacacatggtcttaatgtgtcacccaggctggagtgcagcggcataatcatggctcattgcagctcgacctgccaggctcaggttatccacctgcctcggtctcccaagtaagtagcgg

SEQ ID NO: 787774 - DNA, 586 bp, Homo sapiens
cttacgtagatgtagcaagaagcattatttaacatttagaaaccaacctgtggtgtataactaggaaattcagagctgtacctacttaagaccagattaacttctgtctaaagtctttgtaggaactgtctttttaacagtctccattactccaagatgtttttagttactcttgtattatgatgttagaaaaccaaacccaagaaattcatctctgttagattacctgcagtacctataaatgtgggtaaattcctttgttttcaaggtctcaaaagtcktctgaaaccatgggcctgcaagaaagcgaccttacttcctgtaaggctgggtctctataaaccatgaaatagacaccagaacagcttcctaggaggctttttagcattggtttcatatgtgaagtacaactcttgctttttaatggttgactagtcatacatatttaaataaatttattggcactctaaaaaaataatttggaacttgtcaattaatttgtaaaattaattgtctgttaaaaaggttttattgaatctatgtaggtaactacattgccactgaaagaaaagggattcggtaaaaa

SEQ ID NO: 787775 - DNA, 610 bp, Homo sapiens
gtcgtaacccccagtacctcagaatatgaccttattcagaaataaggttattgcagatgtaatcagtgaagttaggatgaggtcatactggagtagggtgggcccttcatccaaatgactgtgtccttataatcaggggaaatctggatacagacacatgcatagggacaatgtcacatgaacataaaagcagagatggggcgatgtgtctgtaagctaaggaacaccagagactcctgataaaccaccagaagccaggagagagagagagacacggaacagatttttcctcataggcctcagaaggaaccaattctgccaaaaccttgatttcagacttstagcccctcaaaacgtcagacactttctgttatttaagccactcagtttgtggtactttgttattacggccctaacaagccaatataagagctaaatgcgaaggaagattttcaaagaccagatagtagaacatctatatgaccctggggtcagagagtgtttcttagacataaaaagtctagccataaatcagaagattgacagtctgattacattaacataaagaatttctgccatgaaaagacactaaaagagagaagagacaaac

SEQ ID NO: 787776 - DNA, 643 bp, Homo sapiens
tggatcccgaaacagaaaaagggcattattgaaaaaatgggtgatactccagcaaggtctatagtttagtgagtagcactataccagtgttaatttcctggtctgaacattgtacaatggttacataagatgttttaattgggagaaaccaggtgagagggatatgggaattctttgtgctatttctgaaacttctctgcaagtcccaaattagttcaaaattaaaagttaaaaaaagaaaataattctgcaagtttaattagttcactagaatcatttatgtccctgtgtatgtgtgtgtgtgagtgaagtatgtcctggaataacttctcagtgamataaaatacggaatgctgccatgtttgtatcaaagaagagacattttgactaatactctcactccattaagtcattctaataagcatagttgttgtttggtatttagactgcaatctaaagctccaaaactcaagtttatttgttaatagacatcataagctatacttttttcctctttggggatttagggaagaccctgttatttttttttaaatatatatatatatatatactgtaagttctggaatacatgtgcagaacatgcaggtttcttacataggtatacatgtgccatggtggtttg

SEQ ID NO: 787777 - DNA, 569 bp, Homo sapiens
gtctcttgggtcagaaaagatttcttactgttttgttttgtaaattttattttgaagtcaagaacattactacctggtaatgtcagcacccaacaattttatttctctctctcactttctttgtttttggttttttccccaaagacagggtctcacccttggccagactggagtgcagtggcgtgatcataactcactgcagtctggaactcctgggcacacggagtagctaggactacaggtttttgccaccacgtctggctagttttttatttttatttttttaatgtttagtatagacaggggtctccgtatgttgcccaggctggtctgaaactcctgacctcaagccatcctcctgcctatgtctctgtctctcaaagtgttaggattacaggtgtgagccacagcgcccagcttctctcttcgattaaaaataaaaacaaatttctgtctgttagttgaaggctcaatatttgcacgtcagtcgtttcttcccattcagkctacccgggaatattaaaaggaaaaataactataatttctgataaatttaaaagataaaatat

SEQ ID NO: 787778 - DNA, 567 bp, Homo sapiens
tttatttatttttgagacggagccttgctctgtagcccaggctggagtgcagtggtgcgatctcggctcactgcaacctctgccttccggttttgatgattctcctgtctcaccctccagagtagctgggattacatgtgtgtgcccccacgcccggctaatttgtttgtatttttagtacagactgggtttcgccatgttggccaggccggtctcgagctcctgacctccggtgatctaccytccttggcctcccaaagtgctgggattacaggcgtgaaccacgacacccgacctaaactttttgacttgtaataacgtttgacttaaaacacaaacacattgtgcagcagtatgaaaatattttttctttgtattctttctataagctttttctatttttaaatttttctttttctttattttttctttactttttaaacttttttgttataaactaaggcacaaccacacacattagcctaggcctgcacagggtcaggattgtcagtgccactgatgccacctcacatcctgtcctcctggaaggtctttagagacaatagg

SEQ ID NO: 787779 - DNA, 475 bp, Homo sapiens
tatattagttttggaaactgtgatatttatgccagttagttaatagagaaagctcactttactttcttctttttccacagcccagaaccaatatatgtacaattacctaccttcctgttccactcatgcaaactaacagaatatgaagcaaggaatcagtgactctctctattcataaggagttwcctaattctgtgtaaataaatttcaaatatttcagtcatgcttgtcatttgtacaaagttttaaaattctggaactcatctgagcttgtaatcattgctggtagggctcaagcttttagtctccaagggcctttcacttgtgacttgaacagtgaatccaaaagtaaaagctcggcatagggtgaatgtcgtgcaggtcacagagtggaccccacagcccagatgaaggttctctcagcaccaagaagggggacgaagggagggctcaggccagcaggagcctgggcagc

SEQ ID NO: 787780 - DNA, 585 bp, Homo sapiens
aagcacaatgggaataattggatcccaaggtgacaggggccaaatggtggcactcaactatcaaaggcaaggtgggcatagctacgtaatggacagcagagacaaagcagcagtcagaatagtctgactcatgtagagctctggcactggcttattaatcacagtgttcctagaagtgaaagtgataggaagccttctgcattcttacttagtttgtataggcagaaaactttcaggtcgagtggacaaaaaactaatttaaattataaaaatagagaatcactactgggggaaccagccctcaatatttcaacrtaggttctcttctattttccctaagtgttggccggtctgagaaataaagggaaagagtacaaaacagagaaattttaaagctgggtgtccgggggagacatcacatgtcagcaggttccgtgacgccccatgagctgtaaaaccagcaagtttttattagcaattttcaaagaggagggagtatacaaatagggtgtgggtcacagagatcacatgcttcaagagcaacaaaatatcacaaggcaaatgggcagggcaaggtcacaaggc

SEQ ID NO: 787781 - DNA, 624 bp, Homo sapiens
aaccacgatcactcaattaaaaaacttaagcacaatgggaataattggatcccaaggtgacaggggccaaatggtggcactcaactatcaaaggcaaggtgggcatagctacgtaatggacagcagagacaaagcagcagtcagaatagtctgactcatgtagagctctggcactggcttattaatcacagtgttcctagaagtgaaagtgataggaagccttctgcattcttacttagtttgtataggcagaaaactttcaggtcgagtggacaaaaaactaatttaaattataaaaatagagaatcactactgggggaaccagccctcaatatttcaacgtaggttctcttctattttccctaagtgttggccggtctgagaaataaagggaaagagtacaaaacagagamattttaaagctgggtgtccgggggagacatcacatgtcagcaggttccgtgacgccccatgagctgtaaaaccagcaagtttttattagcaattttcaaagaggagggagtatacaaatagggtgtgggtcacagagatcacatgcttcaagagcaacaaaatatcacaaggcaaatgggcagggcaaggtcacaaggccagggtaaaact

SEQ ID NO: 787782 - DNA, 624 bp, Homo sapiens
aaccacgatcactcaattaaaaaacttaagcacaatgggaataattggatcccaaggtgacaggggccaaatggtggcactcaactatcaaaggcaaggtgggcatagctacgtaatggacagcagagacaaagcagcagtcagaatagtctgactcatgtagagctctggcactggcttattaatcacagtgttcctagaagtgaaagtgataggaagccttctgcattcttacttagtttgtataggcagaaaactttcaggtcgagtggacaaaaaactaatttaaattataaaaatagagaatcactactgggggaaccagccctcaatatttcaacgtaggttctcttctattttccctaagtgttggccggtctgagaaataaagggaaagagtacaaaacagagaaattttaaagctgggtgtccgggggagacatcacatgtcrgcaggttccgtgacgccccatgagctgtaaaaccagcaagtttttattagcaattttcaaagaggagggagtatacaaatagggtgtgggtcacagagatcacatgcttcaagagcaacaaaatatcacaaggcaaatgggcagggcaaggtcacaaggccagggtaaaact

SEQ ID NO: 787783 - DNA, 608 bp, Homo sapiens
aatgagctgtgaggggcacctcttcaggtaggctggattgacccagtggcagtggctgctgaggccggggtccatattctgtcccccgaggctctgaggttcgtggaggaggagagtgacgttctggaacccacagtccttcaagggygcagaagccatggctcccctcgcccatcctctcttcccttcacttgacatttccaaatgtcagatgtgagacaaaatctgtgtcttccctacatttttgatcccatacatgttctgctgcgtggggtcaatctatatttttgtgtcgtgttattgcacatttcaaataagataatttccatggacaaaatcctaggcaatggggccctcgtgggctggtgccgcacctgctggtggctcctgccccacagccctgggtcccctcagctgacagggaggttgtcctcatggtactgggttcccaggagcactcccagctgcctgtacggagtacaggacctctccgcttctctgccccaacgtggcctcctgaaccacagatggcacagcccacctgcaggaggcgggagttccagttcccaggtgaagccagggaggacaggtgggtgcccaggccctcc

SEQ ID NO: 787784 - DNA, 608 bp, Homo sapiens
aatgagctgtgaggggcacctcttcaggtaggctggattgacccagtggcagtggctgctgaggccggggtccatattctgtcccccgaggctctgaggttcgtggaggaggagagtgacgttctggaacccacagtccttcaagggcgcagaagccatggctcccctcgcccatcctctcttcccttcacttgacatttccaaatgtcagatgtgagacaaaatctgtgtcttccctacatttttgatcccatacatgttctgctgcgtggggtcaatctatatttttgtgtcrtgttattgcacatttcaaataagataatttccatggacaaaatcctaggcaatggggccctcgtgggctggtgccgcacctgctggtggctcctgccccacagccctgggtcccctcagctgacagggaggttgtcctcatggtactgggttcccaggagcactcccagctgcctgtacggagtacaggacctctccgcttctctgccccaacgtggcctcctgaaccacagatggcacagcccacctgcaggaggcgggagttccagttcccaggtgaagccagggaggacaggtgggtgcccaggccctcc

SEQ ID NO: 787785 - DNA, 629 bp, Homo sapiens
gttagagcttcctctagaagtgtcagggatgccaccataatgcaaactgtggttttgattatctcacaaattcatcccacatctaagacaggccaagtaagaggagatgccaggtttcctgtggaacacaagcatgatggtatggagagccttactgtttgtttttccccagatggaataaaattccctggagtttgaattctcagaagtaaggtgtcagattccaaccctttcatatcccccagggccacaattttagagacaaaatatgcttagcttctggggtagawgtgagatttagccacggttcagtgcgtttgaacacgcatgcctatacgtcgctgtggcctggcttcctctgaagaggatctcaccttagctcccagaggtgagttaactggacgtaaaacagacaggtgcaagaagacagtcattcatggcggcatgaaaatacattttgtctaacgtcacctttaagtcatgacagaatatgagaggaaatcagagggaccatgctgtcgtcctgggtgcaaaataaaagtcgagtttcgtgggtcctggccatttctaggaccagttatatttttgatgaagccacattggatgttaagtaaagtacgctctttgcc

SEQ ID NO: 787786 - DNA, 629 bp, Homo sapiens
gttagagcttcctctagaagtgtcagggatgccaccataatgcaaactgtggttttgattatctcacaaattcatcccacatctaagacaggccaagtaagaggagatgccaggtttcctgtggaacacaagcatgatggtatggagagccttactgtttgtttttccccagatggaataaaattccctggagtttgaattctcagaagtaaggtgtcagattccaaccctttcatatcccccagggccacaattttagagacaaaatatgcttagcttctggggtagatgtgagatttagccacggttcagtgcrtttgaacacgcatgcctatacgtcgctgtggcctggcttcctctgaagaggatctcaccttagctcccagaggtgagttaactggacgtaaaacagacaggtgcaagaagacagtcattcatggcggcatgaaaatacattttgtctaacgtcacctttaagtcatgacagaatatgagaggaaatcagagggaccatgctgtcgtcctgggtgcaaaataaaagtcgagtttcgtgggtcctggccatttctaggaccagttatatttttgatgaagccacattggatgttaagtaaagtacgctctttgcc

SEQ ID NO: 787787 - DNA, 641 bp, Homo sapiens
aaatacattttgtctaacgtcacctttaagtcatgacagaatatgagaggaaatcagagggaccatgctgtcgtcctgggtgcaaaataaaagtcgagtttcgtgggtcctggccatttctaggaccagttatatttttgatgaagccacattggatgttaagtaaagtacgctctttgcctgtttctgggtaatggatctggagggattggaatacattttttgtattttttcaaaatattacaatgggcatgataatttttagcaagaatcagtgaagtaattaaaataaaaacattttatgctttatgcttttctagaaattgccattttgtttgtcaaccctgtgatttaataactcaatgcttgaatgctgctgcgtgataatgagggaaaaatgggaayaggagacatgtttgccgttgggtgtggagtgcaaaaacacaattgtgatttggccaaagaacagctcactagcaaatatctacctccagggaaaaccgagttcacttgctctagcaaagctggcttcatggactgatgggaagattaagtggttaatttccataaagtctggaagagtgcctggcgtagcttaggcacatcaatcaatgtaagttatgcttgtggttattaaaata

SEQ ID NO: 787788 - DNA, 641 bp, Homo sapiens
aaatacattttgtctaacgtcacctttaagtcatgacagaatatgagaggaaatcagagggaccatgctgtcgtcctgggtgcaaaataaaagtcgagtttcgtgggtcctggccatttctaggaccagttatatttttgatgaagccacattggatgttaagtaaagtacgctctttgcctgtttctgggtaatggatctggagggattggaatacattttttgtattttttcaaaatattacaatgggcatgataatttttagcaagaatcagtgaagtaattaaaataaaaacattttatgctttatgcttttctagaaattgccattttgtttgtcaaccctgtgatttaataactcaatgcttgaatgctgctgcgtgataatgagggaaaaatgggaataggagacatgtttgcygttgggtgtggagtgcaaaaacacaattgtgatttggccaaagaacagctcactagcaaatatctacctccagggaaaaccgagttcacttgctctagcaaagctggcttcatggactgatgggaagattaagtggttaatttccataaagtctggaagagtgcctggcgtagcttaggcacatcaatcaatgtaagttatgcttgtggttattaaaata

SEQ ID NO: 787789 - DNA, 641 bp, Homo sapiens
aaatacattttgtctaacgtcacctttaagtcatgacagaatatgagaggaaatcagagggaccatgctgtcgtcctgggtgcaaaataaaagtcgagtttcgtgggtcctggccatttctaggaccagttatatttttgatgaagccacattggatgttaagtaaagtacgctctttgcctgtttctgggtaatggatctggagggattggaatacattttttgtattttttcaaaatattacaatgggcatgataatttttagcaagaatcagtgaagtaattaaaataaaaacattttatgctttatgcttttctagaaattgccattttgtttgtcaaccctgtgatttaataactcaatgcttgaatgctgctgcgtgataatgagggaaaaatgggaataggagacatgtttgccgttggrtgtggagtgcaaaaacacaattgtgatttggccaaagaacagctcactagcaaatatctacctccagggaaaaccgagttcacttgctctagcaaagctggcttcatggactgatgggaagattaagtggttaatttccataaagtctggaagagtgcctggcgtagcttaggcacatcaatcaatgtaagttatgcttgtggttattaaaata

SEQ ID NO: 787790 - DNA, 522 bp, Homo sapiens
cccaaacaccacacctgcagatgcactctatccctcagccagcctcattcctgcccaaggtaacagagccagcaggtcctcatcacggtgccatggggacgtccgctctcctgcccacccccacgcaggtgctgtgtgtcccaagtccaccctcttcaccctgggatgaaagaaaggcatgcaggaaattcaaggggccagctggctctgargcatcattgctggacactgtttttataacaaccactgagcgagatggttgaacgccgcatgcacagaactccaccggctgaatggtctgtgggctgggatttgcattcaagttccatttcctcacaggaacgggtgaactgagtttcataatccaaggcgaccttctcaaggaagctattgcctttggtgagtatcaccctgaaaacagtgctgggtgtttgtctctcctctctcgctgcttggctgggcaagtgccctttgcctagagggagggatctgagccacacggggctgtgagggaccccatct

SEQ ID NO: 787791 - DNA, 522 bp, Homo sapiens
cccaaacaccacacctgcagatgcactctatccctcagccagcctcattcctgcccaaggtaacagagccagcaggtcctcatcacggtgccatggggacgtccgctctcctgcccacccccacgcaggtgctgtgtgtcccaagtccaccctcttcaccctgggatgaaagaaaggcatgcaggaaattcaaggggccagctggctctgaggcatcattgctggacrctgtttttataacaaccactgagcgagatggttgaacgccgcatgcacagaactccaccggctgaatggtctgtgggctgggatttgcattcaagttccatttcctcacaggaacgggtgaactgagtttcataatccaaggcgaccttctcaaggaagctattgcctttggtgagtatcaccctgaaaacagtgctgggtgtttgtctctcctctctcgctgcttggctgggcaagtgccctttgcctagagggagggatctgagccacacggggctgtgagggaccccatct

SEQ ID NO: 787792 - DNA, 453 bp, Homo sapiens
gagagattgagagtttacctctttagagagcttctggtcaagtttgtgaagcctcgatatggttcagaatagtttcccttccaccagagtttattattttatttcatattatttcagagttattagttcattagggagactaaaaatgtctaatttactaaacaaggtatttgttaaatactcctaagtggcaagcactgtgctatgtacaaagcatacaatgatgacaggagacagatgaggtctctgatcttatgcagcccactgtctagggggaagtasataattattaatcacataaataagagctcaattgcctcagtcatcagtgcacaaatcagaaaggtgtcataaacacacagaggagaagtgtttaacctattcagggagatcagcaaagacctcctcaaagaaattaagaaattaccttggaggtgcaatctgtaccatgag

SEQ ID NO: 787793 - DNA, 633 bp, Homo sapiens
atattagaatattgttatgatcctaacagcaattgtttgatgttgcgcctggcaaacttcactgtgtgctggtatctgaagcagtggccttccaatcgaccggggctcctggccatgccttgttcattagaagatctgtgcacagagagcttctgtgagactccaatttttttcacgtcaaacaccaagcaaattccccaggaaacatctgtggagagacaggcaggcctcagcagacactactgtttgtaaaatgagaatttttgagatgcacgcaatcctaactttattcaatagacactgaacttctgttgtccctaggacttcagtacctgcctcaggaggctgcattctcatggaaactctgttttggaatgcatcgatcgctggcttgctgttcccaaagttctttccttcacacctgctgccacccccaagaagaggggaggrcagcggaagggacagggtggaagatagtagggccttattcctcctgctggctctggaacagagagcaactgcagcccagctcctctctgccagccagtgctgcccccactccagaaactactgcgtggtaataggttattcatctccagctcatatgaaagagggaaggggatgttgaaagag

SEQ ID NO: 787794 - DNA, 590 bp, Homo sapiens
aaatacttaacattgctaatcatcagggaaatgcaaattaaaaccacagtaagatgccatcttaccaaagttagaatggctattattaaaaagtcaaaaaataacagaagctggtgagcatgtgtagaaaaaggaatgtttacacagtgttgatgagaatgtaaattagtacatctcttatggattgaaaaacaatatggaaaacagtatggagatttctcaaagaactaaaaatagaaccaccatttgatccaccaattccactactgggtatctacccaaaggaaaaaaattgttatatcaaagacacctgcagttgtatgctaactgcagcactattcacaataggaaagtcatgaactcaacataagtgtccatcaatagttccatcaatggaatcaacataagtgtccataaagaaaatatggtrtatgtacaccattgaatactatttatccataaaaatataaaatcatgtcctttgtgcagcatggatggagctagaggccattatcttaagtgaaataactcagaaacagaaaaccaaataccacacgttctcataagtgttaactaaacaatgggtacac

SEQ ID NO: 787795 - DNA, 604 bp, Homo sapiens
aggggaaacaggcaaaaaactaaataaataagtaaaatatatagattattacataatagatatgttttggggaagaattaagcaggcatgttggatagcagaggtgcggttgtgattttgaataaggtagtcatggaaggcacctctgagcaaacgctcagctcagtcctcaagagagggcctgcagattctagggaggggcagggcagtgtcctgaggcccaagtgtggcagaatgtctgggcaccttagaraggccactttccttggagtgaaatcaatgaggggacagtggcaggaggaagggccacagagccttcagtgtaggagccctggggagcctggaggcactgtaagaaatttggatggtgatatcatctggctctgtattcccatcaaaatcttatcttgaattgtaattggaattgtaatccccacgtgttgggggaaggtcctcatgggaagtgattagatcgtggggtcagttcccccatgctgttctcatgatagtgagtgatttctcacgagatctgatggttttataggggcttttcccctctttgctctacacacttctctctcctgccgccatgtgaagaagtaca

SEQ ID NO: 787796 - DNA, 610 bp, Homo sapiens
tgttagttttcttctgtttcatattgcttttggaggtgaaagaattttcatcagcggaaatgttataatttgccttttttcagagaatctttatatgaagtcgctttgattttttcccactcataggcatttgtggacaggattcctagttcaaaaacctcttctccatcagtttagtaaaccacagtttattaaatggtgatgctggtattggtaaaaggggagaggttggtgtgttgtgtctgaaaattaagcacttcttcctayaccttctttctctgcctgacacatctctgacaggtaccactccttgtcaatatgaattctttccaagaagcagtgtttcctggaagctacaaaatccagtgctgctcactttttaaattgccaccctgtggccactcacagcccaacatttagcagattagactcagtgttggagttttcttagagtgattgctctacacttcattttagtttcttactcttctcttctatttttcctggaatctctgaagactcaactatcctgttctccaaagctaatggcttgcaatggtgatagacgctcctttggaatttggtatttacttctttgtctttacgtaat

SEQ ID NO: 787797 - DNA, 645 bp, Homo sapiens
tatcaaaatttaaagaattgtattgacttggatccaatgagagggaatttaatgtatattggggcaaacttccccctttttttcttcagccacctcctagccgaaccccaaatttccacaaaactgatggggggttctattgtctgccagagaatcaatcccctttctcctcccagtgatggaaaaaaaagaaaaataaattggggggaagggaacatgggctcaaggttgttttggtttggatgctaccaatgttgccctctgctggtggaacgctcaacttgcagatgaccagttgcgttcttttgctgctgtcaatctagtccaaccccaatttataaacaggctgtgcatgctgaaattcactgtttaaagcttacctgcattttcccataaatggaatcactgtttctcacagtggctgagcccccagggtcacctcccaaatcaataaagtaatcaaaacctacccatgtttctagggaaaatgctatttggatyaagtattcaccaagtgtttcctatgtgcaaggtattgcaaggggtaaaaatgtaattcaagaagagtctttgcctctaagacagttatttatcttgttaggagaaataaaacattagcatgagagactataagaagctatctga

SEQ ID NO: 787798 - DNA, 585 bp, Homo sapiens
gaagcaagaagtcaagttagggagctgtcagcaaaccaggagaaggatgatggggcttaacccacgatgacagcggcagagaccaggagttgcattcagattccaatgttttggaagaaagaaccaacaggagcctctgacacattgaattgaacatgggagaagaaggagaagcaatgttatactgtcacctctttctgactttattgtgaacctggtgaacataatggccaatcaaagacattggagtggatgagatgaaggtttcacaaaagtactaaagaaaaagctattgtctrtgggcagatgacactagtccagggaggaaaaaaacggtagcgagtagatgttcttttccaccaaaaggtatcgtgcctatcgtggaagctcctggtagacatttgctggaaacagcatagcccagagacattggaataaatttgagatgtcttgaaactataatacccaaatctgactatctgttcagtgctgaaatctgactatctgtcatatttgggtattatagtgtcataagtgagtgtcataaaatgagttaggagtgtttcttctgcctgtattttctga

SEQ ID NO: 787799 - DNA, 585 bp, Homo sapiens
gaagcaagaagtcaagttagggagctgtcagcaaaccaggagaaggatgatggggcttaacccacgatgacagcggcagagaccaggagttgcattcagattccaatgttttggaagaaagaaccaacaggagcctctgacacattgaattgaacatgggagaagaaggagaagcaatgttatactgtcacctctttctgactttattgtgaacctggtgaacataatggccaatcaaagacattggagtggatgagatgaaggtttcacaaaagtactaaagaaaaagctattgtctatgggcagatgacactagtccagggaggaaaaaaacggtagcgagtagatgttcttttccaccaaaaggtatcgtgcctatcgtggaagctcctggtagacatttgctggaaacagcatrgcccagagacattggaataaatttgagatgtcttgaaactataatacccaaatctgactatctgttcagtgctgaaatctgactatctgtcatatttgggtattatagtgtcataagtgagtgtcataaaatgagttaggagtgtttcttctgcctgtattttctga

SEQ ID NO: 787800 - DNA, 629 bp, Homo sapiens
taactgtgtaactgagcatggtggctactgcttggggaaggagggacatgcacttggaggcaggtactccaagggtttggcagcacacacgcagagggcttcaaccctctcctcatgtctggaagctagaaacatggatattcatggtaatatttttcatgccttttgtatgtctacactggagtcatctacactggagtctaccaacctcagcaytgttgacattttgggctggttgattctctgtggtggggctgtcctgggcattgtaggatgtttgtcggcatccctggcctctacccactagatgccagtagcaccctccccttctcaattgtgacaagccaaaaagatgtgtccagacattgccaaatgtcctctaagagtaaaattacccccagttgagaaccactagtctagaaaaaagaggacctatggctcggaaatattagatgacttctccaaagtcacagagtcagtaaatgaaagagatggctccagcaggcaggcttttcattgtcagctagtgctctttcaaacctctcagagtgccctcaagagcagatagctttattgttaggattacagtggagttgcatcagacgtaaatacaacggaatacacttgac

SEQ ID NO: 787801 - DNA, 624 bp, Homo sapiens
ctgcacctccgaatcctataagcccaaaacaaattgtgagcaatagtttagtcatcaagtaacttccttttgagccctcctgaaagcattatgcttgttggcatgaagtttttctggccaacatctccccatcccaaacatttttgtctacattgctacctcttcacatacagacatttaaatttccttttattcactttcactttggcgatttaatgagttgaagcaaaacactctgtatttatggcttctgtggaaacgtattttatgatatctcaggctaaaaatgttttaaataatttaaaaaaacacagtttttctttcggtctttttcttcttttttggatggcatacattgagctgcttcatggagatatacagaaaaatcaattgctaarcataaaatgcaactcacatttaggaaactgcaaatgataactaattataataagttgctatataaattactttgtgacagtcccagcaatcaatttcaaacacaaatagaccaagcccctggttggagaggaagatgagtacctaacaactgtgtcaataaaaataatggcaagattaccaacaatagtcaaagtagaaaggttatcatctctaagcaagtttcac

SEQ ID NO: 787802 - DNA, 619 bp, Homo sapiens
atctcttggacttctctgctcttccagggccattgccaccgacctggaatgtgtccttatcgtttcacgccaggcttatggcagcagtcagtcacccagatgacctcctgacctctggcttatttcacccccactggactgttgttcctaaacacttctttcgtatgtcactctaaaatctgaccctggctgtacctttctttaactactccctgactgcgtgctgagagaagatgggtcttgtcttttcctgcctctctgcttttgtaaactgccatttctacctgaagtggcaactgaaatcatatcttcttcataaactgtctttggctacctcagttagaattccttatcccattttcctgaagcatttctttgactcttctttactgctcccccacccttttttttttttctttgagactgaattttgcttgttgcccaggctggagtgcaatkgcccgatctcggctcattgcaacctccgcctcctgggttcaagtgattctcctgcctcagcctcctgagtagctgggattacagtcatgtgccaccatgcccggctaattttgtatttttagtagagacggggtttctccacgttggtcaggctggtctt

SEQ ID NO: 787803 - DNA, 621 bp, Homo sapiens
gtcttcttccaggatatattttgctgcagcttgttattcaaaaggtccagcgctttgcggcgaacagatggcaggggattgcccaccagccctctgatcacaggaatgaatgtctctgtgggcagcaaggcattgacctaaagagaaattttatatttaacatgaaaagaaaaacaaattaaaaaaaaaaycaacttcaattaagacagactgctgtccactgcacacctccaggcaccaggcacttccacacacattttcttatttaattcttaaaataacctttcaggtaggcattaccaaccacacattatcgaacaaaacaaaagcctgatgtcaggaggaagtgccaaaggcatgcagctaaatgactgagctagatttgaatcagcaatcctaacttcgaggccagtgatatgtatgtaatatacttcatacttttattttattccacttgaataaagtagaacagtatatattatatgacttaattattaaaatatacgaggtacatgttctcataactggtaaggaaacaattttttccagacaaatctatttctagtcatcaagagattgttttctaagaaaaatctgagcttcattatattcataaaagga

SEQ ID NO: 787804 - DNA, 642 bp, Homo sapiens
tgatcacaaataatcaggggaacttgacaccaagaaaggaacaaaataaagcactaagtaactgaccctaaagaattcgcgatctagaaactatgtgacaaatatttcaaaataatcatcttaaagaagttcagtcagtgatacaagaacacagacaactaaatgaaatcaggaaaacaatatatgaacaaaatgagaagttcaccaaagagatagagatagaagcgataaaaagtcaaacataaattctggggctgaagaatacaatgactgaactaaaaaaattccatagagagcttcagtggcagaacttgatcaaatagaagaaagagtcagtgaactcgaaaacagattgtgggaaattattcagttagaggaaaaaatgtttaaaaaaagaatgaaaaacgcttatgmgacttatgagacagcatcaactgaaccaatgtatgcattataggagtatgagaaagaacagagaaagcaaaataaacagaaagcatttttacagaaataatgtcagaacacttcccaaatctggacacgtaaatgaacattcagatccttgaagcctgaagaaccccaaataattaaacataaagagattttcaccaaaacatattataatcacattcttaaaagtaa

SEQ ID NO: 787805 - DNA, 569 bp, Homo sapiens
gatcacttcctgactcctgaaagtgtcactgaattccaagcatctgtggttcagatcattttttacacccacctgagaagctgttcttcttttaccccacctaaaatcatcaagctttcttcaaacacttcctaatgtcccaggccaagactgatgactctttcctctatgttttctctgcacttctataatagcacctgtttgattgtttccttgtttgtatctagttgctactctaaatgtaagcttctttacaaaaagagctaagtcatagttatttgtaactcccacataaccatcagcrgttccagagtatcaaaagagatcatttttgtttgactcttagttaggcaactgtatatctgttttaacatcttctctggctcagaaatatactctggactcttaaagattcatttcttctgattttaacaggtctcttttccacattttatagagtcactttcttaggattctgtctggattggacagtcctattatatttaattctaaacttgcaatttcttctgcaaaaatagtcttgtagaagaacatattaaaagcgtgtg

SEQ ID NO: 787806 - DNA, 569 bp, Homo sapiens
gatcacttcctgactcctgaaagtgtcactgaattccaagcatctgtggttcagatcattttttacacccacctgagaagctgttcttcttttaccccacctaaaatcatcaagctttcttcaaacacttcctaatgtcccaggccaagactgatgactctttcctctatgttttctctgcacttctataatagcacctgtttgattgtttccttgtttgtatctagttgctactctaaatgtaagcttctttacaaaaagagctaagtcatagttatttgtaactcccacataaccatcagcagttccagagtatcaaaagagatcatttttgtttgactcttagttaggcaactgtatatctgttttaacatcttctctggctcagaaatatactctggactcttaaagwttcatttcttctgattttaacaggtctcttttccacattttatagagtcactttcttaggattctgtctggattggacagtcctattatatttaattctaaacttgcaatttcttctgcaaaaatagtcttgtagaagaacatattaaaagcgtgtg

SEQ ID NO: 787807 - DNA, 616 bp, Homo sapiens
ggttctcaaatctgccacacattagaatctcctgcggatctttaaaaatgcctgggccacaccccaagagaacctaatttaattagtctgagctagatttaggctatggatttttttttaaacttaagttgccaattgattttagtacgcagccagagttgaaaaccactgagagagataagtgtcagcacttcagtgctcactggcagaaaaccacgtttttcatagaaccagtgactcctycaaatatagagcaaaatgcacagtaagagtggaaaaattgggaaaaggaactggattctatctatatatttttttaatttgtaaggttctgttacttggcttgatatagtcacaagcaaagagaaatacttggcatgctgtgaatttggcctaggcagcagtactcaatatcctggcaggagagaaaactccctaatttgagtgtctgctgtacaccaagtttccattatatcaatattcctatttctttcttttttctcttcaaaaaagaagattctaaaatgcctgtaaacatttttaaattatttttattttaatatatagtatagcactttcacacttcaaacagaagtatgaaaatgtgcatgaaaca

SEQ ID NO: 787808 - DNA, 578 bp, Homo sapiens
aaatttacattgaaaatgcaattgaacctttggtttagtagttcagtacgctacaggtaaccagggagcaatgttcagtaaataccgtgctactagatgcaaaacaatacagagaaaatgaggctatttagctctctttcttgattgagatttgcatgaagaaatttcgaaatatttaagtttcagcgtagcacttagagtgtcacttctcttccgcctctttataggttatatttttaatttttaataacgcaaaatgtgtayacagcctgatgcaatcagaaaggcatcttagaagggtaaaaagaggaggatgactcactaataaacagtcatttatagaatataattagtttttctcttttcttcattagcacatgcaacctgctagaggaatgagtctaagggtaattgtaggactccagggttttcacactcagaggtagcataatatataaaactgaagtaattaggagctacgtcaaaaatgtcatctttcttatgtgtaaaaactaggcattttgtagcaaaatagcaatattaataccacagggatactctgtttcttttccactctg

SEQ ID NO: 787809 - DNA, 583 bp, Homo sapiens
gattacatctagttatattctcgatatcataaagttagtgctacaagatttgctaatgtcatggatgcagggtgtaggaagggagtgatcaggtttgacatctaggtttgtagtctgaggcatcagaatttggtgtttccctttgttgacatgaraaagacagggagcaggtttggaaatgaaagtagtatgtgtgcagaatccatggctctattttgtcaacatcaagtcttggttgcccattagacatctcaagcagtgttgtcaagcagggtgtagggtgtgtcagtctttaattcagatgctttttgaacagtagacaggagtttcagtcattagtatgtaaatagagattaaaggcacatgaaagaatgagatttcttaggggagacacttagggaaaggaagagagctgagaattatgccccagggctctgcaacttctcatgtctgaagaagaggatccagaaaaggagacaaaggaggagtgcccagtgacgtaggaaggaagccagggcactagtgttcaagagctttggttaaaacactgacagggaaggatgataaattggataaggatgaa

SEQ ID NO: 787810 - DNA, 583 bp, Homo sapiens
gattacatctagttatattctcgatatcataaagttagtgctacaagatttgctaatgtcatggatgcagggtgtaggaagggagtgatcaggtttgacatctaggtttgtagtctgaggcatcagaatttggtgtttccctttgttgacatgagaaaracagggagcaggtttggaaatgaaagtagtatgtgtgcagaatccatggctctattttgtcaacatcaagtcttggttgcccattagacatctcaagcagtgttgtcaagcagggtgtagggtgtgtcagtctttaattcagatgctttttgaacagtagacaggagtttcagtcattagtatgtaaatagagattaaaggcacatgaaagaatgagatttcttaggggagacacttagggaaaggaagagagctgagaattatgccccagggctctgcaacttctcatgtctgaagaagaggatccagaaaaggagacaaaggaggagtgcccagtgacgtaggaaggaagccagggcactagtgttcaagagctttggttaaaacactgacagggaaggatgataaattggataaggatgaa

SEQ ID NO: 787811 - DNA, 583 bp, Homo sapiens
gattacatctagttatattctcgatatcataaagttagtgctacaagatttgctaatgtcatggatgcagggtgtaggaagggagtgatcaggtttgacatctaggtttgtagtctgaggcatcagaatttggtgtttccctttgttgacatgagaaagacagggagcaggtttggaaatgaaagtagtatgtgtgcaraatccatggctctattttgtcaacatcaagtcttggttgcccattagacatctcaagcagtgttgtcaagcagggtgtagggtgtgtcagtctttaattcagatgctttttgaacagtagacaggagtttcagtcattagtatgtaaatagagattaaaggcacatgaaagaatgagatttcttaggggagacacttagggaaaggaagagagctgagaattatgccccagggctctgcaacttctcatgtctgaagaagaggatccagaaaaggagacaaaggaggagtgcccagtgacgtaggaaggaagccagggcactagtgttcaagagctttggttaaaacactgacagggaaggatgataaattggataaggatgaa

SEQ ID NO: 787812 - DNA, 583 bp, Homo sapiens
gattacatctagttatattctcgatatcataaagttagtgctacaagatttgctaatgtcatggatgcagggtgtaggaagggagtgatcaggtttgacatctaggtttgtagtctgaggcatcagaatttggtgtttccctttgttgacatgagaaagacagggagcaggtttggaaatgaaagtagtatgtgtgcagaatccatggctctattttgtcaacatcaagtcttggttgcccattagacatctcaagcagtgttgtcaagcagggtgtagggtgtgtcagtctttaattcagatgctttttgaacagtagacaggagtttcagtcattagtatgtaaatagagattaaaggcacatgaaagaatgagatttcttaggggagacacttagggaaaggaagagagctgaraattatgccccagggctctgcaacttctcatgtctgaagaagaggatccagaaaaggagacaaaggaggagtgcccagtgacgtaggaaggaagccagggcactagtgttcaagagctttggttaaaacactgacagggaaggatgataaattggataaggatgaa

SEQ ID NO: 787813 - DNA, 619 bp, Homo sapiens
aggttctgtgaatatgcaaagttgaatcagaagctgttcctccccataaagctcacagtctaatcctagaaacttagaatagaaactggccattcatgaggttaagtgctatgaggtaaggcatgtgctttgtgcatagagttggaggtgaggttagggaagtagtctagtgggatgatgcttgacttgggttttgaagaatgaataataatttcctcaacgcatgggatacggtagctgaattgtagggaatacgtactgatctattgrtttttttttttttttttttcttaaccccaggtaacggtctgatggtaagttctgattttctcaatagttattatttgtacaattttaactggcagctccttatatctggaaatacagaggcatgtggatatagcaagaaagcccattggcatcatattaaatgagtgcatttagacctgggcttcacatatgattatccagtgagtgaaaattttacagaaatggctttctcaacacatagcttgtcattgttttcatcattattggaaaatttgacataatttgtaatctgagaaagaaaaccaaaatttagcttgataatcagcgtcaagctgcaataattgtctaa

SEQ ID NO: 787814 - DNA, 619 bp, Homo sapiens
aggttctgtgaatatgcaaagttgaatcagaagctgttcctccccataaagctcacagtctaatcctagaaacttagaatagaaactggccattcatgaggttaagtgctatgaggtaaggcatgtgctttgtgcatagagttggaggtgaggttagggaagtagtctagtgggatgatgcttgacttgggttttgaagaatgaataataatttcctcaacgcatgggatacggtagctgaattgtagggaatacgtactgatctattgatttttttttttttttttttcttaaccccaggtaacggtctgatggtaagttctgattttctcaatagttattatttgtacaattttaactggcagctccttatatctggaaatacagaggcatgtggmtatagcaagaaagcccattggcatcatattaaatgagtgcatttagacctgggcttcacatatgattatccagtgagtgaaaattttacagaaatggctttctcaacacatagcttgtcattgttttcatcattattggaaaatttgacataatttgtaatctgagaaagaaaaccaaaatttagcttgataatcagcgtcaagctgcaataattgtctaa

SEQ ID NO: 787815 - DNA, 573 bp, Homo sapiens
ggtggttcacacctgtaatcccagtactttgggaggccaaggcgggcggatcacaaggtcaggagaacgagaccatcctggctaacacggtgaaaccccgtctctactaaaaatacaaaaaaaaattagccgggtgtggtgggcgggtgcctgtagtcccagctacttggaaggctgaggcaggagaatggcgtgaatctgggaggcggagcttgcagtgagccaagatcgcaccactgcactccagcctaggcaacagagcgagactccgtctcaaaaaaaaaaaaaaaaaaaaaaaaaattagcyaggcatggtggcacacacctgtagccccagctacctgggggaggctaaggtaggaggattgcttgaccaggaggttgaggctgcagtgagccatgatcacgccaccgcactctagtttgggcaacagagcaagatccaatctcttacaagaaaaattataaaattataaaatacacagaaaggactggaaggttattattcagtgaaaagttaacagtgtgtaaccctggtggggattgtaaagcggattcttctttttttgctgc

SEQ ID NO: 787816 - DNA, 539 bp, Homo sapiens
tgcccagacaagcatacactgacattggggccacctggtggagaccggaacacacaggcttagagctctgcttccacaaaaacctcaatgggctcccacagaagggcactgaagagctcccagaaaattggcagaaagggaagcatccagactacagctctgggctaaaagggacatcaccacaaacaagcatgagatgcccgcaaattcacaggaaagacagtaatcagtataaagaaatgctcaacttccctcatggttaaataaatacaaactgaaaagtgaaacatttttttgcttattagattggcaaagactaaacaatgatgaagaccttgcagcaasgatagaatacttggtgttataagtataaactgttacaatgttttttggaaggtaatttggaaatatctaataaaaaatatcatgttcatttatacctacataaatctttggaactgtaaacaaatgtttacagggtggtagggataataatgttcactgcagcactgcttgtaatgtgaaagacagaaagtggc

SEQ ID NO: 787817 - DNA, 563 bp, Homo sapiens
cccagagttgaaatcattttgaatacagaattctgtaaccttcttttctttgcttaacattataacataatgacttaaccttattatgaaagtcttgataaacatactttcaagttgctgcataatacttgcatcaagttggtagatcataattcatttaccattcctctaatgtttgatatacttaagctgactgtaattatttaataatwtaaatgatgttgtggtgaagttttctttgttgttttttgagacagggtcctgttctgtcacccaggctggagtgcagtgatgcaatcatggctcactgcaggcttgatatcctgagcttaagcgatctttccaccacagcctcctgagtagctggaactactaatacaagcatatgccaccaagcctgacttttttttttttttttttttgagatggagtctcgctttgtcacccaggctggagtacagttgcgcgatctcgactcactgcaacctccacttccgggttcaagcgaatctcctgcctcagcctcccgagtagctgggattacaggcatgcaccaccacacc

SEQ ID NO: 787818 - DNA, 609 bp, Homo sapiens
cataagaaatgcaatcaatgtaacatatcacattaatagaacaaagaaaaaacactacatgatcatctcaatggatgcagaaaaagcatttgacaaaattcaacactgtttcatgaaaaaagcaaaacactcagcaaatgagtaataaaaggaaatgtcctcaacatgacaaagagcataaaaacccataacaaacatcatactcaatggtgagagacaagtttttcccctaatatcagtaaagagacaaggctaccacttttaccactgccattcaacactgtactaaaagtcagtcagagcaattatgtaagaaaaataaatwaaaggcatccaaattggaaaagaagaagtcaaactatctctatttgtgaatgacataattctattcatagaaaattccttagcatccacaaaaaaactactagagctaataaacaaataaagcaaatttgcaagcacaacagcaacatgcaaaaatcagttgtgcttctatataccagcaacgaatgatccaaaaagaaaattaagaaaataaatccatttgcaatagcatcaaaaattaaaaaataaccagaagaataagtgtaacctcatgaccagcctggc

SEQ ID NO: 787819 - DNA, 641 bp, Homo sapiens
gaacactgattacaaaactatagtaatcaatgtggcagtagaagcagggtagacatacagatcaatggaatagatttaagagtccagaaataagcccaatcgtctatggccaattcatttccaacaaagtgccaagaccattcaatggggaaaagaacagtcttctcaacaaatggtactgggacaactggataaccacgtgcaaaagaatgaagttggaagcctgtctcacaccaggtacagaaactaaatcaaaatggaccaacaatctgaatataaaagctaaatttgtaaagctctcagaaggcatgggttggatcctcatgactcttgatttggcaatggattctttgacatcaaaagcacgaacagcaaaaaacaaaacaaacaaaaaacagaaattgaactttatcaaaataaaaatcctttgtttatcaacaggtattattgaayatatttgaaatatattaatatccagaacacataaaaaactcaacaacaaaaagacaacctaattttttaaatgagcaaaggacgtgaacagatatttctcaaaaaaagatatataaatgaccaagcccataaaaagacgttcaacatcgtggtcattaaagaaatgcaaatcaatactacaataatac

SEQ ID NO: 787820 - DNA, 601 bp, Homo sapiens
gcatgggttggatcctcatgactcttgatttggcaatggattctttgacatcaaaagcacgaacagcaaaaaacaaaacaaacaaaaaacagaaattgaactttatcaaaataaaaatcctttgtttatcaacaggtattattgaatatatttgaaatatattaatatccagaacacataaaaaactcaacaacaaaaagacaacctaattttttaaatgagcaaaggacgtgaacagatatttctcaaaaaaagatatataaatgaccaagcccataaaaagacgttcaacatcgtggtcattaaagaaatgcaaatcaatactacaataataccacttcataaccattagaatagctttaataaacaaacgaaaaaacsaaaactaacaattactgacattgatgtagagaaacagagaccctcatacactgctggtgggataataagtatggataataagtttggcagttcctaaaagagttgagctagattaccatatgatccagctattcaatgcctagatatacatccaggagaaatgtaaactcatgtccacagaaaaacttgtacacatatgtttatagcactgtattcataa

SEQ ID NO: 787821 - DNA, 589 bp, Homo sapiens
agagcttctaaagaggaaggtgctattatcatctccaaggtgatatgctcaaaactacttatttgaatccattaagtgtaactgataaagttaggtgatttgggatgattttaaaatgtaaactgcaatatttactcctctgcatattccatcatttaatcatttattgraagaccatgaaattctattacagcatcaaagaaacaattaaagtaagaaattcattgttttcagtaaatctatgttgctttccctgtaatggttcgcattatttctgaaaagttactattcagtgacactgccctatatatttacgtgttactttctttgactgatctgagaaaagtgacacagtcctgcttgcagtcctgccaacttttggtatatgcagaagcagctcttgttcttaggtaaacacagtaaattggtacaatgctttatttatttttagagacaaggtcttcctctgtcacccaggctggagtgcagcagtgcaatcagatcataactcactgcagcctccaactcctgagctcaagggatcctcctgtgtcagcctcctgagttgctggaactagaggcacactac

SEQ ID NO: 787822 - DNA, 621 bp, Homo sapiens
ttgtattattttgcttccttttcaaagatagttggctaaactcatgtgggtcaatttctggaccctctattttgttacatttatttgtctattctttcacaaatacaatactttttatattactatagttttacagtaaattttgaagtcagatagtgtgagtctttctactttgtttttatcttcaatattctgtttgctattttgggtctttttcctctccatgtaaaactttagaatcactttcttgatacccacaaagtaacatgctgcacttttgatagagattgaattggatctgtagatacaatttggaagaacttagttcttgtctctattgactcttcctattcattaatatggactatattttcatttactttgttmtttaatttatttcattaatgttttgtcattgtcctcatatagatcttgtatattgatatggtttggctgcattcccacccaaatctcatcctaaattgtaactcccatagtccctgtgtgtcatgggagggacccagtgggaggcaattgaatcatgagggcggattttacctgtgctgttctcataatagtgaataagtctcacatgatctgatggtttcataaagggcagtt

SEQ ID NO: 787823 - DNA, 640 bp, Homo sapiens
acctgcctctttatgtgtctgattcattcaaaaacagtaaactatgaaagcaggaacaagtttgatcttggtcaccatggcaacctcagcactcagcacaatgcctggaacataagtaggtgcttaataaatgtgtcatgaatgaatggatggtgccaccaccacctccactgcttgtgtgatgacacagcatagttaatgaaaacacacaaaggatttcaatacaggaagagccacttcagctcagaccccaattaggaagtccttttccggggaaagtggggcaaggaatttatgcccaatgatcaccacagcctggagatcacaggcacagctgaccaaagaacaaaaagccgaggaagggcagaattgagtatagagtcggtaaggcagcacaaagtgttcacmtggctaataagacagccttccagtgcagcacagccatcccagactggagatcatgcaagacatgtgcgggacaggtcagcgctcctttgcaggaccctgactggactaagcagagttggcccttgagcaaagtttgagtaatcaagtttactggcaatgagtctgtatgaagggaaccaatcatctgatcctggagcaggtggaacaagcctggcgtgggacacccgaaagc

SEQ ID NO: 787824 - DNA, 608 bp, Homo sapiens
ctgactgtaggagaggcagattatctttaaattgctaattttgcctgaaagctcttatcagagactgagggatgattttatacttttctgtttgcttttcaattcccctcacccccaagtactcctagagcagtccaaatctgaggtttagttgacttagttgaacgcgagttcaaatctcaagaaaaataccaccaaagaaacccttttagtgtcatttgctatgagtgtttagtggtcagctgacatcggtaacagcaagttgtccctcaatatccactttcctttatctacagaataatggaactttgagttttgaytgggctcatggtttccaataaaaacatgaaatatttcaagtaatgtgattgacttccagtccacaagatatgaaaggaagtagtatgaacaacttcttggaagtatccttaaaggaaggtctgttcctttcccctttcttctccccactggttggaattcaaatgatgatggcaaagaagcagcatctatttatgaaatgattctgggaatggatgtcatgcatggtggaaaaaaaacataggcggaaactgtgttcctaccatcatgtagggccacaccacctctgg

SEQ ID NO: 787825 - DNA, 609 bp, Homo sapiens
gttcagtacttaagtgaatcaatttattcctgcagctcccacaagagaagtttgtgtcaccagatctccacgatgattccatgaaagtctgaggtaggtttcagatgatagacatgggaatttttgtctacaccaacattcagggaatcttggattgtaggtcagtggtttgggtggaccaaaaccagaataaaaatgtataccttagcacctgaaccaaagatcacgttycttcaatctcctatccctcatttcttttttcccataagtttcatagtagtgcagatgtcaaacaaaaatgctgaaaaattctgctttgacctggattcccgaacacttggagtataagtcaaagcacccagaattccaaaggcattataccattatgcaagtggagtgatctggctagggcatagggagtaatgggagagaaatattagagaagatagggaaaaaggccacttgagccaagatctgaatgacatgagaaatcaagctgtacaagtctagggggagaaggagcaacccaggcagaaggaagaacagatgcaaaggccctgaggcattgaatattaagtgtgtaagaggaacagcaaagaggccagggtg

SEQ ID NO: 787826 - DNA, 488 bp, Homo sapiens
acccaggcagaaggaagaacagatgcaaaggccctgaggcattgaatattaagtgtgtaagaggaacagcaaagaggccagggtgataggagtctagtgaggaaagggagggtggctggaggtgagggaggtgaagaattaggaagctagatcatctagagctagagcttcacagggtagggraagggcatggatcatactgtgagtgacttgggaagcttctggagagttctgagcagaggaaaaacatggcatgatttatatgctttacttttctaacagatttcttgggctgctttgtggaatgtagcttgtagggggagaagagtgaaagtaggaagcccagttaggaagctactacataatttgggtgagtgactgtagtggcttggtggaggtcgaggtgatgagaagtggtttattttgaaatatatttgaaggtagatgtcacaggatttttgaatggatttgaagtgtttgaagtagta

SEQ ID NO: 787827 - DNA, 639 bp, Homo sapiens
attgtatgcctgtatccaaatatctcatgtaccccataaatatatacacctactatgaacccacaacaatcaaaactttttaaaaatttaaattaaaaattaaaattaaaaagccctacagctaacatgtttaaactaagaagcttgatacttgtctcctaagattgggaacaaggcaaggatattccctctcacaactcctattcggcatcatataggaaatcctacttattgcaataagacaagaagaggaaataaaatgtwaatacaaactgggaagaaagaaaaaatactgggctgggcacagtggttcacaactataatccttgcactttagaaggccagaactgcaggattgcttgaggccaggagttcaagatcagcctgggcaacaaagctggaacccatctcttaaaaaaaaaaaaaaaaaaaaaaaaaagttaaagtagctgagtgaggtagcccatgcctatagtcccagctactcaggagactgaggcaggaggatcacttgagcccaggagttgagctatgatcctactactacactccagcctgggtgacagagtgagatcctgtaagaaagagagaaagagagagaaaagggagaaagaactgtctttatttatatagatgaca

SEQ ID NO: 787828 - DNA, 616 bp, Homo sapiens
acagtggttcacaactataatccttgcactttagaaggccagaactgcaggattgcttgaggccaggagttcaagatcagcctgggcaacaaagctggaacccatctcttaaaaaaaaaaaaaaaaaaaaaaaaaagttaaagtagctgagtgaggtagcccatgcctatagtcccagctactcaggagactgaggcaggaggatcacttgagcccaggagttgagctatgatcctactactacactccagcctgggtgacagagtgagatcctgtaagaaagagagaaagagagagaaaagggagaaagaactgtctttatttatatagatgacatgattatctatgcagacaatcccaaataattaatttctggaacttgtaagtaattataaaaatattgaagaatacaaggttaatatgcagaaatcaattgctttcctataactacagtaaagagtcagaattkgaagtttgaacaataccatttacaatagcaccaaaaaataaatacttagataacatctaataaaatatgcacaggatctatatgcaataaactataaaactctcacaaaagaaagtagatgtgagtaagtagaacgatattctgtgt

SEQ ID NO: 787829 - DNA, 556 bp, Homo sapiens
gttatcaggagattaattgtctggtgagaactcattctttgggaatggcaccttctttttttttttttttgagatggagtctccctttgtcacccaggctggagtgcagtggcacaatctcggctcactgcaagctctgcctccygggttcatgccattctcctgcctcagcctcccgagtagctgggactacaggcacccaccaccatgcccagataattttttttttttgtatttttagtagagatggggtttcactgtgttagccaggatggtcttgatctcctgacatcgtgatccgcccgcctcagcctcccagagtgctgggattacaggcatgagccaccttgtccagctgtgaatggcaccttctatgtgtgcccacatggttgaaagacacacaagatcccatgggtctctgtataagagcactattcccacttatgaaggtggagccctcatgacataatcagctcccaaagaccctacctttaatattatcacactggggactaagttgccacatgtgaattttgagaggaaataaacattgaga

SEQ ID NO: 787830 - DNA, 559 bp, Homo sapiens
acttactagctctgtgaccttgggcaagctactaacccggttacctcatctgtaaggtggagataataatgacctatgtaggtttactgtgaggattaagtgattagtacagtgactgacacatcctaaatcctcaatatgccagccagccattattattgttagaagaacaggctccctgcattgtgggcttttttgagtgtgtacactccctccttgtgtttctgatcgcaaataaatatttattaacaatgatttattgaataaaactatcagcaatcaagttccrcttttttaagagccactccgtgtgtcactagaagatgcccaaatgaatggaggaaacaaatctaatggtttataagaaaagtgtgaagaatctgaatatccaggaaccctttcagggaagcctcattaatattaactgctatatataagagaagaccaaaattctgtctcggggtacagacaaaatccagcagtaatttaaagtatgaagatatctaccactcacctgtaggtgtactcagagttcacaaaatacattaagtcctaatat

SEQ ID NO: 787831 - DNA, 633 bp, Homo sapiens
gaatctgaccatttttcagccctgggactgctaccactggagttaaaccaccaccgtccttcgtcagggttactgcgacagcctcctaaattggcccttacttctccagttaccggcccacaccagtctactgcctgcattaggttgatgccacagctctgctcagagaccaagggctcccccaaggtcaagtaaaagcccttcatggcctacaaggctggcctcgatcaggtcctcaacttttctgatctcatctatccctgtccttgctcccacactgccagcctcactgtcctctttgctggtcctcaaataagccagctgctctcttgcctcagggcctttgtattagctgttccctcggcttggaacgcttttccctcttgtgttcgcatggcycactcctgcatcttcttcaggttattttttctaagaatcaacctcctagtgaggcctgctgtgaacaccctactaaaaattctactccctcactttcccgatccaccttgccctgctcatttatcccataaatgtgttgctttataacattctatgtcatctactttgtttgtttgtttattgtcaggagggcagagatttttttttttttttgtctggctcattcatctagaa

SEQ ID NO: 787832 - DNA, 633 bp, Homo sapiens
gaatctgaccatttttcagccctgggactgctaccactggagttaaaccaccaccgtccttcgtcagggttactgcgacagcctcctaaattggcccttacttctccagttaccggcccacaccagtctactgcctgcattaggttgatgccacagctctgctcagagaccaagggctcccccaaggtcaagtaaaagcccttcatggcctacaaggctggcctcgatcaggtcctcaacttttctgatctcatctatccctgtccttgctcccacactgccagcctcactgtcctctttgctggtcctcaaataagccagctgctctcttgcctcagggcctttgtattagctgttccctcggcttggaacgcttttccctcttgtgttcgcatggctcactcctkcatcttcttcaggttattttttctaagaatcaacctcctagtgaggcctgctgtgaacaccctactaaaaattctactccctcactttcccgatccaccttgccctgctcatttatcccataaatgtgttgctttataacattctatgtcatctactttgtttgtttgtttattgtcaggagggcagagatttttttttttttttgtctggctcattcatctagaa

SEQ ID NO: 787833 - DNA, 577 bp, Homo sapiens
tatgttattactgcacacctgaatagagagatggctgacagatgccactgcaacatgaagcccccccagacagactgtggggctgcgtgttgataaccactaaaatatgtatccagaccacatttggaaaaacactcatccggaaaaaacmaaaaaaccaaaaaacccttcaatacacagtcctataaaatagtacatccgcttcatgagcggtagtgacttaaaaaaggaagctgagaactggtaagataattgagtggttttgtttttcacaaagccagataaaagcacaggacgtcagcaacctattttgtatcaatcaggagctttattcgagttaatgcaccaattagttattaatggaaacttattgagggcgtcatattgaagttcacccttggtaaagaatcattaagacctcaagacctgttttcattgaggaccacgtttctgaccacatttttctttgtaccaattaacctccccccccactttttttttcctttgcactttgttgcaggatatttctccatctgctggtgagcatggtgactgtactactcacagcactgctgcc

SEQ ID NO: 787834 - DNA, 544 bp, Homo sapiens
gtttttcttagtcttctgagccagccatcattaattgtgatgtcaaaaatcacggatgtaacaaaagtacattttactaataattaaaatatttaagttatcaaattatttactttaatatacatgtatacatatatatgcttttgtatgtatatacatgtgtgcataaaaagcttccagcattaggaatttttaaaaacccattcccccaaggtgatctgaaaacagcaaaagaccaaaagtagcaaaaagaatttaatatacatgatacatatatatgtatgtatatacatgtgtgaacayatatgtatacatatgtgtgtatatatacgtgtgtgtgtgtgtgtgtgtgtgtgtgtagagagagaggcaaattcaacattatcttgatatctacactattcttacaaactttgtcacagttagctgtgtggtctggaatcgacatttttcttttctaggtctcagtttcctgagaaatgactggcattatacccaggaagcacagggagttgagaataactctgggtttacccatgagagt

SEQ ID NO: 787835 - DNA, 578 bp, Homo sapiens
tgagcatcttatgtttgtactgctcaccatagcagcagctaaaagcagaggtaaactaagaggtgaacttggggtccagaggtgtctgccacagtcaaccgtatgatggtgttgcattgaaaaggtcttaaatcttagatgagttaaaagatggcctttattctgtggcaaagcagacttacagaactcttcaaggactgcaaattcaaagagaaaaacaaactcacactagtaccatttagaaatccacaaagagagaaaagccaaagtaaatgggagcagcaatgcttcctttcacagctaagtggctaagagatcacatgatccaacgtaggccaataaaacaatgcaaaatgaaaagacwctttcctctcaaagagagaagatgtttgtgactttcctaagccaattaccagaacctaacctaaaggatttcttggtgtcagatactacagtagacatttgatttgtaacttttttgaattgacttcctgtctatgtgacgtaatgaaagccaacacacatacgcctttgtcctgaaaaactcactggaaactgttttctgtaacataaagaaa

SEQ ID NO: 787836 - DNA, 639 bp, Homo sapiens
acttgtcgaatgtgtgtgtgtagagttatttgtggtgctcccttattatcctttcaatgtctacaagatctctaatgatccctccttttcaattcccaatattggccatttgtgtcttctttaagtcttgcaacaggcttgtcaattttattaatctttcaaagatagaggttttagttgcagtggtttttcctattgtttttctgttttcagctgtattgatttctgctctgtatcagttccttttyttttcttgcttgctttgggtttgttttgctgtatttatttatcttattttattttattttgttttcttgagaaaagatctcactctgtcacccaggctgtagagcagtggtgcaatctcagctcactgcagcctctgcctcctgggttcaagtgattctcctgcctcatcctcctgagtagctgggattactggcgcctaccaccatgcctgataattttttttttttcagtagatgtgggattttaccatgttggccaggctggtcttgaattcctggcctcaagtgatccacctgccttggtctcccaaagtgctgggattacaggcatgagccactgcacccagcctcttgtttcttaaaatgcaactttacagtatttcttggatat

SEQ ID NO: 787837 - DNA, 591 bp, Homo sapiens
agtcttttggagttctaatgataacttaaaggctacttaatatatagattatttactcagtagacttcaggggcttcttcaacacatgcactaaggagcatctcctggatttagagcatggagctttaatcagagcaatcccattaggtttaacaagatttatttaaacctgggaatcctgcggatgctggaatgaagaaaactctcagcctgattttgtacttaataataattaataatgagaatgctcttccccatggtagctaagcataggcacaaatgtctgctgcaaagtcaaattccttgccttggatstaagtcccatgccaaggacagcaccctaattcatcagtgcctgagaggctgtctagcttaagaaccacactgggtgacttataattaaaacaattgcaatgcttttttaaaatttaattccggatctaatttctcatttgcctcacgagggtacagtatgcacagcagcctatctgtggggaaattaaaagcaggaggacatgcaccacacagtgcttatattaaagtaatcattcatatttttctgacaacactctttaataagtgtcaaatctt

SEQ ID NO: 787838 - DNA, 575 bp, Homo sapiens
cctccctcattcctctccatccctgtggtctaaaataaaatctaccatctaaaaaatactgttctaaaaatagggagtttggcttaaatccaccagttggtgttttgatttttaaattatgtgcaaaaaattacgcttaagacccagagagtattagtaagtaattcaaggaggttgccattttattttgattccaaagttctaaaacatttattctctcagagtctraggaaaggtgaaaagagacaacagaaagggggtaaaatgatgtagaaggcttaaattccagtttgaaagtgaaaggcagctaaacattcctaaagcaaataatatactttaaaagtgtgtgttttttttttcttttttggtggtggaggccatgctataattcactctaaataagtagaagaaaaactggtgagtttcaacttagttactcctatctttcctgataccattttgggatccaacttttatgcacacaaaactgcaaataattcctaacatgcagttttaaaagcataaagaatctttttgtttgtttgtttttgagacggactcttgctctgttgccc

SEQ ID NO: 787839 - DNA, 576 bp, Homo sapiens
aagctgaccagtttatgtcattttgtaatagcagcccaagcaaatgaagacaggacatgaatagacaacataaatgtggggcatgaaaagcaatcatgtatgaaaagacctattcataaaagataattgtcttttcaaccagtgtttttcacacttggctcatattatgcagtaaagatacctgaagagattttttaaaattctctgaatatggaccttacctcagrtgtagaagataaaaatctctgaagttgagataaagatatttgtattttaaaatactgtgccagctattttggtgcacagccaaatttgggaacccactaaccaaatatatattctggaatataatcttatttttgtcaaaaccatgagagtaaaaaacaattctcatcacaattatagaaacatttcctagaagtcagttgcagtcagcctgtaccaaaaacattttgcatgaaagtacttgtgtatgctgggtttctagtatactgatggactcaggtttgaataattaccaaaaataattgcatttccatatgtaaaatgaatttttatcagctgcagaaaaataaa

SEQ ID NO: 787840 - DNA, 675 bp, Homo sapiens
acaagccacggggtgtccagggatgctggcaaccatcagaagccgagagagacatgggacagattttccctcagaggctcccatagggaaccagccctgaggacacttactgtgagataacacatttctgtttttttgaggcacccagtttatggtaatttgttagagcagctctatgaaactaatacacatactcaatgacccaayaattctactcctaggtatagacccaacataaaccatttcatgtgtacaagtgactgcataaggaagttcacaggatttcagttcacaacagcaaaaacctgcaaagaacctaaaagcctaactataaaagacagaataaataaattgtagtaaatccacgcaatggaatgttattcagcagtcaacatgaatgaactatagcaatgagggggtctatctgcagaccctgacccaaacgatggatgaatgaagtacactgacacacagatattctgctatgccagtccagctgagtgtctgggccacttacagactccaagcagagtgctgtaaacagtcacgaccatggccctgaccaactagtgagactcgcatttatttagtaaagatgaattgacaaaggcttgagtcaacaccaccagagggtaattgacattgtggacttcctgtagaaagtaattaagcacc

SEQ ID NO: 787841 - DNA, 675 bp, Homo sapiens
acaagccacggggtgtccagggatgctggcaaccatcagaagccgagagagacatgggacagattttccctcagaggctcccatagggaaccagccctgaggacacttactgtgagataacacatttctgtttttttgaggcacccagtttatggtaatttgttagagcagctctatgaaactaatacacatactcaatgacccaacaattctactcctaggtatagacccaacataaaccatttcatgtgtacaagtgactgcataaggaagttcacaggatttcagttcacaacagcaaaaacctgcaaagaacctaaaagcctaactataaaagacagaataaataaattgtagtaaatccacrcaatggaatgttattcagcagtcaacatgaatgaactatagcaatgagggggtctatctgcagaccctgacccaaacgatggatgaatgaagtacactgacacacagatattctgctatgccagtccagctgagtgtctgggccacttacagactccaagcagagtgctgtaaacagtcacgaccatggccctgaccaactagtgagactcgcatttatttagtaaagatgaattgacaaaggcttgagtcaacaccaccagagggtaattgacattgtggacttcctgtagaaagtaattaagcacc

SEQ ID NO: 787842 - DNA, 585 bp, Homo sapiens
agggatgctggcaaccatcagaagccgagagagacatgggacagattttccctcagaggctcccatagggaaccagccctgaggacacttactgtgagataacacatttctgtttttttgaggcacccagtttatggtaatttgttagagcagctctatgaaactaatacacatactcaatgacccaacaattctactcctaggtatagacccaacataaaccatttcatgtgtacaagtgactgcataaggaagttcacaggatttcagttcacaacagcaaaaacctgcaaagaacctaaaagcctaactataaaagacagaataaataaattgtagtaaatccacgcaatggaatgttattcagcagtcaacatgaatgaactatagcaatgagggggtctatctgcaraccctgacccaaacgatggatgaatgaagtacactgacacacagatattctgctatgccagtccagctgagtgtctgggccacttacagactccaagcagagtgctgtaaacagtcacgaccatggccctgaccaactagtgagactcgcatttatttagtaaagatgaattg

SEQ ID NO: 787843 - DNA, 628 bp, Homo sapiens
aactataaaagacagaataaataaattgtagtaaatccacgcaatggaatgttattcagcagtcaacatgaatgaactatagcaatgagggggtctatctgcagaccctgacccaaacgatggatgaatgaagtacactgacacacagatattctgctatgccagtccagctgagtgtctgggccacttacagactccaagcagagtgctgtaaacagtcacgaccrtggccctgaccaactagtgagactcgcatttatttagtaaagatgaattgacaaaggcttgagtcaacaccaccagagggtaattgacattgtggacttcctgtagaaagtaattaagcaccggtggtagatcaaaggttagtcttaaacaacctagctagatacactactctgccttcttccttacccacttgaagctttttactcaaggtaaggattaggttgccttcagccattgtcttatcctgagacttctgtaaaaaccttcaggccttccaagaaagtttgtgtttatttttataactatctttaatatttttcccaccagcctgattgaactcccacataacaacacacaaaaatatgaggaatcttaacaatataataataataaatgaatc

SEQ ID NO: 787844 - DNA, 614 bp, Homo sapiens
tgccttttgtcatgtgatgatgcaacaagaaggccctcaccagatgccagcactttgacactggacttctcagcctccagaactgtgagctaataagttcctgtttattgtaaatgacccagtctcacatgttgttatagcagcacaaaaatggactgagacaccttaagagggagatacatgctgctgtggtggatatattagagattaatttagaaagattattaaatcactgaagaccttttaaaaattrattttctttggccaggagcggtggctcacacctataatcccagcactttgggaggccaaggtgggtggatcacgaggtcaggagatcgagagcatcctggctaacacagtgaaaccctgtctctactaaaaatacaaaaaattagctgggtgtggtggtgagtgcctgtagtcccagctacttgggaggctgaggcaggagaatggcgtgagcctaggaggcggagcttgcagtgagctgaggtagcaccactgcactccagcctgggtgacagagcgagactctgtatcaaaaataaaataaaataaaataaattttctcaactacaaagatagtgagatcacaattattatcatggtcc

SEQ ID NO: 787845 - DNA, 578 bp, Homo sapiens
atttttaaactgatgaaagataagatctatcaagccaggattttatatccagaaaaaatatccttcagaaatgaaggtgaaataaagatattctcagatgagggaaactaagagaactcactgcaacaaatgtgttccaaaagaaatgctaaaagaagtttttttgaacaaaaaggacatgatgccatagggaaatttggaatatcaggaacaaaggaagagcaaaagagacctgtaaacatctaagtaaatataacaggcccttttctcttgagttmtttaaaatttgtttgttggttaaaagcaaaaattataacattgtcttgtaggcttttcaacaaatgtaaatataagacaactaccatagacaggggaaagggggaagggccctatcagaagggaagtttctatattcacttcaagtggtaaatattaattccaaagagactgtacaaagtatatgtactgcaatcctaaggcaaccacacacacacaaaaaaaggctgaatttaaatggaatactaaataatgttcaaactgcccaaaagagagtaaagagagaaatgaaaaacaaaggc

SEQ ID NO: 787846 - DNA, 560 bp, Homo sapiens
ctctcaggagaatctgatgtgtgatcatagtgcaatgaataacatccctgacatcgaaacacaaaaaatgcagttccgtattcccaaagacaattctgataatttgtgattatcaacaagttgatttataacaactacacttcctaatgcagaaagtctgcagaatttcaaagctgttatttcccattatggcctctattaagagctcaattttactatgaaacaagtctcttttaaaaataagactataggccgggcgcagtggctcacrcctctaatcccacaactttgagagattgaggcgggtaggtcacctgaggtcaggagtttgagaccagcctggccaacatggtgcaatcccgtctctactaaaaatacaaaaatcagtcgagagtaatggcgcacacctttaatcccagctacttaggaggctaagacacgagaatcgcttgaatccagaaggcagaggttgcagtgagccgagatcgcaccactgcactccagcctgggtgacagagcgagactccagctcaaaaaaaaaaaactataaatgaagatgc

SEQ ID NO: 787847 - DNA, 560 bp, Homo sapiens
ctctcaggagaatctgatgtgtgatcatagtgcaatgaataacatccctgacatcgaaacacaaaaaatgcagttccgtattcccaaagacaattctgataatttgtgattatcaacaagttgatttataacaactacacttcctaatgcagaaagtctgcagaatttcaaagctgttatttcccattatggcctctattaagagctcaattttactatgaaacaagtctcttttaaaaataagactataggccgggcgcagtggctcacacctstaatcccacaactttgagagattgaggcgggtaggtcacctgaggtcaggagtttgagaccagcctggccaacatggtgcaatcccgtctctactaaaaatacaaaaatcagtcgagagtaatggcgcacacctttaatcccagctacttaggaggctaagacacgagaatcgcttgaatccagaaggcagaggttgcagtgagccgagatcgcaccactgcactccagcctgggtgacagagcgagactccagctcaaaaaaaaaaaactataaatgaagatgc

SEQ ID NO: 787848 - DNA, 560 bp, Homo sapiens
ctctcaggagaatctgatgtgtgatcatagtgcaatgaataacatccctgacatcgaaacacaaaaaatgcagttccgtattcccaaagacaattctgataatttgtgattatcaacaagttgatttataacaactacacttcctaatgcagaaagtctgcagaatttcaaagctgttatttcccattatggcctctattaagagctcaattttactatgaaacaagtctcttttaaaaataagactataggccgggcgcagtggctcacacctctaatcccacaactttgagagattgaggcgkgtaggtcacctgaggtcaggagtttgagaccagcctggccaacatggtgcaatcccgtctctactaaaaatacaaaaatcagtcgagagtaatggcgcacacctttaatcccagctacttaggaggctaagacacgagaatcgcttgaatccagaaggcagaggttgcagtgagccgagatcgcaccactgcactccagcctgggtgacagagcgagactccagctcaaaaaaaaaaaactataaatgaagatgc

SEQ ID NO: 787849 - DNA, 472 bp, Homo sapiens
aaaattttatcaaattctagtgaatactgaaagatgtaaagacaatgtattagcaagggactataatttctaacatacttttaaaggctcatcccatcttattaatatattagatgtcacttattaaatttagcaaatacagaatgtttgtcatatgatgttaaatttttagtatctcatttatgtgaagacagagaaaatctaccatactyacttttccataacaatatttgccgcacagtcatgtccaaggttttctatgaaggtctgtacatcctgaacaagtctttccataaaaaacatttgataaagaacaacaggttttaaatagaaaaaaaattaaatccccaaggttaaagttaactaataatttatattcttttaattgaaagcctcaaaacaaagacataattctatacccaagtaggcacttaatacaagttatgaccagttgaaataatagcatctttta

SEQ ID NO: 787850 - DNA, 644 bp, Homo sapiens
taaactaggaaatgcagatgtttttaactactcagacttttgaggaattaatccttttaaaacatttttgttaaagttagtgtatcagtaagaaacagacctagtttaaaaggaataatcaacaattttataaaggagatggcttattcaaccatagcccctccaacatatctactggaaattctgctggttaactttatctctctctctcttaatttagactttcaacctatgaaaatgtaaatacctttgaaaaaactaaactatcagtcatttacatcytctcatgaatgaaatgcagtgtagggagaggagatggcaggacacagcaaacaggacacatttgcctgcttctctcttgcctaattcttcctgacctgtatttactgatgcttaataatacttgtaagactctaggggttcatttcccatttcagcggaaagtacttcactcaacaacaatattctcaagagtcttctactggaagctagaaagaaataggaatttaagtccatagaatgaaggtagttattcctgcctgtgttgcccacctgttcacaaaaagtacctttatgcttgaaaacattaggttctttggttactgcactgtagtttcaaatggatcctccagatggcattcatg

SEQ ID NO: 787851 - DNA, 600 bp, Homo sapiens
gagaaccgcagaagtgaacctgacatttgggttcatttttccgctaggcgtgtttgctgattccagaagacccacctgtgaggacaaacattggaatctatttagggcctgtcaaaggcagaagctcctgggaaaccctctgtgcttaagtctgtctgtagctaatctttgaagggactgttgtctggctttgaattatcatagtccctgattgtctcagttttacaaatcagattaaggtgatcctggattataataaccccaggtgactgtcagaagcaaacaaattctctgcagatgacatcattttcagcttcaatttatttctacaattttaaaaatacaatgtgtggcactcacaaaaacaatattaataatacaatgttcagaaacaagacaagataacataaagaaaagygaccagaaataagagacaatagaatatacttatagggatttcagatactggcactatgaaacttaaacttaagccgggagcagtggctcacacctgtaatcccaacactttgggaggccaaggagggcagatcacttgaggtcaggaatttgagaccagcctggccaacatgctaaaaccct

SEQ ID NO: 787852 - DNA, 712 bp, Homo sapiens
taaataagttaatattttcaaagcacccaaaacactgtctggtatgtgctaaacatcatataagtgtttgatactattattctgacactttctctctcttttttttttttttttttttgagacggcgtcttgctctgttgtccaggctggagtgcagtggcataaccatggctcactgtagcctcaatctcctgggctcaagtgatcctcccacctcagcatcctgagtaattgggactacaggtgtgcgccaccatgcctggctaatttttaaatttagagatagagtcttgctgtgttgccaaggctggtcttgaactcctgggctcaagctatcctccccgttcggcttcccaaagtgctgggattacaggtgtgagccactgtacctggtcgatttggacactttccattcattcattcattcgttcattcagtgatttcttggaatatcaatgtgataggcacaatgctaatgataaaaatattctcagccctcaaaggatcttgcartttagtggtcagagagacatataatgcaaaccatgtaggcatacagtaaggaaagtcctataatgaaggactttaagtgcagtggcagttaggtgaaggagcacctgaggggaagccttcacagggaccatttgagatgggacatgaagcatgagtaggagttggccagtggacatcagtggtgtgggcattccaggca

SEQ ID NO: 787853 - DNA, 574 bp, Homo sapiens
ttgcccatgacttggcttctcagcttcagcattatctgcaggctccaaagcctttgccattcgcattccacctccggccacctccctatcctctcattagtgttgtatcataaataattcacagccaagccataaagtaaaccatgattactttcctttcctgttttcactgtgtataatcattgtatgtatgtgtgcttaactgcactttgttttctatacatttgttactaattcaaccccagattcacgcctcacccaaatttcccctcaagacattggagatgttcagcagcacctgacgctctgtgcatcttgtcttgctgaggcaggggctccgctgagttgtctggtggctcctgactgccccggggctcccctctccatggtggtgcactctcatccagcgagctccctcyacccactcccggaggtcctctctgcctcctgtgttgggtcttctctttccagaaccttgggtcttccttttccttggttttcatcctcatcttacagagaccatccttcagtgtggtcttcttcagagaagatgcatgagagggaaatactttga

SEQ ID NO: 787854 - DNA, 607 bp, Homo sapiens
aaactcccaaagccgtcttgggtttggctcccacagctcttgaccaatgtggccaaagctggacacctccttgggacactgggattattcataaatgcagcccgccctgactctccctgaatagcatctgaagtctttgtgaaggtcatggatcctgaacaaagtgtcaagggcaccaagaaggctgagggaagtccccggaagcggctgaccaaaggagaggccattcagaccagtgtttcttccagcrtcccatacccaggcagcggcacagctgccacccaagagagccccgcccaagagctcttagccccgcagcccttcccgggcccctcatcagttcttagggaaggctctcaggagaaaacgggccagcagcagaagccccccaaaaggccccccatcgaagcatccgtccacatctcacagcttccgcagcaccctctgacaccagcattcatgtcgcctggcaaacctgagcatctcctggaggggtccacatggcaactggttgaccccatgagacctggaccctctggctccttcgtggcccctgggctccatcctcagagccagctccttccttcccacgcttccatcattcccc

SEQ ID NO: 787855 - DNA, 613 bp, Homo sapiens
acaaagatcaaaaaagacaaagaagggcattacatagtggtaaagggatcaacacaacaagaagagctaactgtcctaaatatatatgcacccaatacaggagcacccagattcataaaacgagttcttagagacctacaaagagacttagactctcacacaataataatgggagactttaacaccmcattttcaatattagacagatcaacaagacaaaattaacaaggacattgaggacttgaactcagctctggatcaagtagacctaatagacatctacagaactctccaccctaaattaacagaatatacgtttgtctcagtgccacatggcacttattctaaaatcaaccacataaatggaagtaaaacactcctcagcaaatgcaaaagaactgaaatcataacagacagtctctcagactacagtgcaatcaaattaaaatttaggattaagaaactcactcaaaaccacacaaccacatagaaattgaacaacctgctcctgaatgactcctgggtaaataacgaaattaaggcagaaatgaagaagttctttgaaaccagtaaggacaaagagacaacataccagaatctctgggacacagct

SEQ ID NO: 787856 - DNA, 593 bp, Homo sapiens
aattgttgcgtcactgggccagcgaaattgagcatgggcagaggaatgcccagaagtgtccaaagtgcaaggtgagataacttttaggaggaaaagaaaaaacatgtacatctggatgtgactgaacaatatttacattattgaagggaattataactgtcttaatgcaggtatgtggaaaaagagtattgctcttttattttggaaaagtaattatataattaaactgaaaatttttataaacmatgtatattcttatttttgcattactcttcaaaatttaaggaggccacatataaatattgacttaagacattgaggtccttatattacatttaaaaatgaggatgtactttataggaaaaatatagcgtaaaagtgatataaaagtataagttctagtctgccacgtgtactataattacttctcaattatataggctttgaatccttgcgatcttttgcttttctttccttgctgacattgctgatcacttaaaaattacattaaattgaactgattgttttgcttttttgcaaatctggtaaagtaaaagctcatagctaaaatcaggacttagggattttatgaa

SEQ ID NO: 787857 - DNA, 615 bp, Homo sapiens
ggttaaaagatttacatagcaccattacataactggggtaatctgagtttgatttatgagtttatcctagtcctgagttttatacttttaggttttatgacagtgattattgttgtttcactttagttgtaacactctgttaagaattttttgtaagtctggttgacatattttggatatttttcccctccacatatcctgttgaaatttgatccccaatgttggatgtggggccttgtgggaggtgtttaggtcatggggctggatcttttatgaatggcttgatgccatttccccaataatgagcragttgtcactcttagttttcaggagatctaattgtcaaaaaccatctggcaccttctcttctctcttggtcccaccctcatcatgtaacacactaacttcccttcaccttctgccctgagtggaagctccctgaatcccttaccagaagcagattctggcaccacacttcttgtatagtctgcagagctctgagacaaataaacccttttctctacaaattacccagccccaggtatttctttatggcaatgcaaatggactaagacactggtctagtggtgatgagttccctcttcttttctggac

SEQ ID NO: 787858 - DNA, 540 bp, Homo sapiens
ttgattttaaaaaattaaatttgctttgcactttttgctgacagctgtgggtgacaggattaggcatgtataggaccactggacatggggagctttttttctttccaaagcgggaaacatgagagctgatgggactgctggaaaagatccctttgcgactgacaagcaactgcctgaacttttgattcagcattgctgggatgggtgggtctttctctggcttccctgagctcctgccttccccactctgccacaggcaatgcttttctctctctctctctcttttccctttcttaycttttctgttactccgtgcaaccatcttccccagagaccacatgttgaaactcttttaatccactttaaatggattaaagatgacagggcccatctagggccaagtttgagacttgccaatttgatattgggtgctaagcagagtggctaatgtctatgttttgtcacatgtattttgctctggctggaatgaaaaatgtatattcagttctgctggttggggagcaacttgcaaaattgaga

SEQ ID NO: 787859 - DNA, 541 bp, Homo sapiens
ttaaaatggccatactacaaaaagcaatctgtagatttaatgtaattcctatgaaaatatcaatgccacttttacagaattagaaaaaaaacaattctaaaatttatatggaaacaaaaaagatcccaaatagccaaagcaatcctaagtaaaaagaacgatgctgggggcatcacattacctgacctcaaattatactgcaagactatagtgaccaaaacagcatggcaccatagtatgaaacagcagtatgaaaatagagacatatatcaataagcagaatagaaaamccagaaataaagccacatacttatagccaacttgtgacaatgtcaacaaaagcatacactggtgaaagaacactcttttcaataaatggtgctgggaaaattggattgccatatgcagaagaataaaactggattgctatcactcaccatatatgaaaatcaactcaagatggattaagactcaaatataagatccaaaactaaaaacaacactgcaagaaaacctagggaaactcttctggacattggtc

SEQ ID NO: 787860 - DNA, 541 bp, Homo sapiens
ttaaaatggccatactacaaaaagcaatctgtagatttaatgtaattcctatgaaaatatcaatgccacttttacagaattagaaaaaaaacaattctaaaatttatatggaaacaaaaaagatcccaaatagccaaagcaatcctaagtaaaaagaacgatgctgggggcatcacattacctgacctcaaattatactgcaagactatagtgaccaaaacagcatggcaccatagtatgaaacagcagtatgaaaatagagacatatatcaataagcagaatagaaaaaccagaaataaagccacatacttatagccaacttgtgacaatgtcaacaaaagcayacactggtgaaagaacactcttttcaataaatggtgctgggaaaattggattgccatatgcagaagaataaaactggattgctatcactcaccatatatgaaaatcaactcaagatggattaagactcaaatataagatccaaaactaaaaacaacactgcaagaaaacctagggaaactcttctggacattggtc

SEQ ID NO: 787861 - DNA, 533 bp, Homo sapiens
attgccttccaattccccttatcctggtctgcattctcccaaccaagcatttccaactcgctgtatgatatagttatttatcaagtttattgacagtcacctgcatttagaatacagcttcatgaagacaaggattattgtatcttttttattctccaagatattgtaagcataaagaactctgacaggcacttagtaggtgctcagtaaatatttgaagataaaaggattttgagttaatagtgagcaaaacatatttgagagtctagtgaaaccagccttatttgagtgaaaagagtcttatatattgtagattccagctggataaatagagtcaamccagattagagcaaaggaatttattattttgtaagaatgagagttttctacaagattttattttaaataacaatgtattaatttaatgatgtaaaagtaatatccttgtaacactttgttgcatttaaaaaaatactcgagtgtttttagttttacctggtaaaattgacttaatagggaaattagctatcttg

SEQ ID NO: 787862 - DNA, 568 bp, Homo sapiens
ctcgcagactgagaggtgcaattcaagctaaacatccccttaggggaccaattagtaatgattccataggaatcgttgtgcagcacctctgcctgttctgcaatgcaatcttactaaacaagtatgttcattttttctaactgggtccaatcctgtttacaaaaargtttttgagggtggtatgcctcaattatagtagcagatttattatggtaaatactgagatcagaaagcatgtgtaactgtgttatagagtgattgcatctaggcattattgccagccaagattgataaatatgcccaataagtataattgttctctgtgtcagcccttgctgaaggaatactcatggcagtggtgatcactgctatcatagctaccattaaattactcattgtgactggttgtactgctttcctcaggttttcttctgccatctgtgacagcttcttgatctgtccccatgtgggtggctgtgtttgacgggtgttgctcgtgacagttggggacctcctcagcgtcagtctcgacatggctgcaactagggggtcctcgggatcctcccag

SEQ ID NO: 787863 - DNA, 568 bp, Homo sapiens
ctcgcagactgagaggtgcaattcaagctaaacatccccttaggggaccaattagtaatgattccataggaatcgttgtgcagcacctctgcctgttctgcaatgcaatcttactaaacaagtatgttcattttttctaactgggtccaatcctgtttacaaaaaggtttttgaggrtggtatgcctcaattatagtagcagatttattatggtaaatactgagatcagaaagcatgtgtaactgtgttatagagtgattgcatctaggcattattgccagccaagattgataaatatgcccaataagtataattgttctctgtgtcagcccttgctgaaggaatactcatggcagtggtgatcactgctatcatagctaccattaaattactcattgtgactggttgtactgctttcctcaggttttcttctgccatctgtgacagcttcttgatctgtccccatgtgggtggctgtgtttgacgggtgttgctcgtgacagttggggacctcctcagcgtcagtctcgacatggctgcaactagggggtcctcgggatcctcccag

SEQ ID NO: 787864 - DNA, 568 bp, Homo sapiens
ctcgcagactgagaggtgcaattcaagctaaacatccccttaggggaccaattagtaatgattccataggaatcgttgtgcagcacctctgcctgttctgcaatgcaatcttactaaacaagtatgttcattttttctaactgggtccaatcctgtttacaaaaaggtttttgagggtggtatgcctcaattatagtagcagatttattatggtaaatactgagatcagaaagcatgtgtaactgtgttatagagtgattgcatctaggcattattgccagccaagattgataaatatgcccaataagtataattgttctctgtgtcagcccttgytgaaggaatactcatggcagtggtgatcactgctatcatagctaccattaaattactcattgtgactggttgtactgctttcctcaggttttcttctgccatctgtgacagcttcttgatctgtccccatgtgggtggctgtgtttgacgggtgttgctcgtgacagttggggacctcctcagcgtcagtctcgacatggctgcaactagggggtcctcgggatcctcccag

SEQ ID NO: 787865 - DNA, 515 bp, Homo sapiens
attcatttccatggccactgttttcccttgtattgtaacaaattacgcttgttacctcaaaaatgaaaggcttatttagggcaaagacattttcttgttcattcttgtatttcccaagcccctctcctagtgcctttcatataaaccgtcagataagaatgtttattaatttgcattattcagatattactaccacttctaaataaactatatttcagacactggtagtattctaaaatggctaagctacgaaaataacaaatggatattacttyttttcggtgcattaaaaattatttttaaagtgtcaaagtttttattaaaagtaatttcttttagaaaaatattctacagtttgccattattttttaattggctgatacgtgtggaatgcagtctgttgtggtccacgtcacattactccttctgagccgcctccagcagccccccagttggccacgcagctgtgctcacctccaaccccttatcctcgggtctctagttcagatcggggt

SEQ ID NO: 787866 - DNA, 521 bp, Homo sapiens
tcgtgaggtctgatggtaggtaaaaagtgtgtggcacttcccgccttgcactccctcttctgccaccatgggaagaagttccttgcttcccgtttcccttccgctgtgattataagtttcctgaggcctcacagtcatgcttcctgttaagcctgtggaactgtgagtcaattaaaccaaacaccgcatgttctcactcataggtgggaactgaacaatgaggacacatggacacagggtggggaacatcacacactggggcctgttgtggggtggggggagcggggagggatagcattaggagatatacctaatgytaaatgacgagttgatgggtgcagcacaccaacatggcacatgtatacatatgtaactaacctgcacgttgtgcacatgtaccctacaacttaaagtataataataaaaaaaattaaacctcttttattcataaatgacccagtctgaggtagttctttctagcagtgtgagaacagactaatacacaaaccatttactaaact

SEQ ID NO: 787867 - DNA, 587 bp, Homo sapiens
aatagtaccatgtggagaaacttgtgtgaaatgatagctgtggactactgtacacagtactcaggatgtagtaagtgctcaataaacagctgttggtatggttgacgttatggtagtggttgtggggaggacgtaggaaactggagactagcttggcaaagctggctcttcctccttttagggaaagcttagagcatccccatggggtatacccatactcagactgtcctctggcatcgaggttggcccaggattcagttcagctgtcacagtgaggtggcgggatcagatgtggcaggccatgtcccttggaacttgagtacatcgtgtgatctctggaatgaaaacaggccttcaccagtgttgatggtggaaagcttagggaagtgcttcaaacacagtaggagggacttacgttagattttggaaggamttgcctgattcggaagctccaaagagtggcattacagagctgggtggagagaggggctagccatcttttgtgtcgcccaccgggctcatgtgtcatcgcctctcatgcagtggtgaagttcatggatgtctatcagcgcagctactgccatcca

SEQ ID NO: 787868 - DNA, 699 bp, Homo sapiens
atgacccatgttgttggatccctcactttcaagtcttgttaccttctcagtgaggcttaccctgaccactgcatttacgattgaccccccttcccactccacacttgggtacctccttttcaccatcccttctttttccgcttagtacctgtagccacctgacagactctagaacagtgctacccaacagaaatatagtgtgagccacttatggagtttaaaattttccaggcaccagagttcgaaagctataaaaaggtaaaattaattttaataatttattttagctccaacatatctagaatatcacttcaggatctaatcaatggaaacattattaatgagtttttttttttttttttttttttttttttttttttttgagatggagtcttgctctgtcacccaggctggaatgcagtggtgcaatcttagctcactgcaagctctgcctcctgggttcaagtgattctcctgcctgaaccttccgagtagctgggactatgggcgcacacmaacacgtctggctaatttttgtatttttagtagaaatgggggtttcaccatattggtcaggctggtcttgaactcctgacctaagatgatccacctgcctcggcctcccaaagtgctgggattacaggcatgagccactgcgcccagcctattaatgagaaattgtatactcttttggtacta

SEQ ID NO: 787869 - DNA, 629 bp, Homo sapiens
taattatgtatttaaaatggagtgataaaaacacaacaagattaaaaacaagtaacaaattaaaacagagataagacatcactcactgcagactcattttattaagaaaatatatctatttctggtccctgttgtgaagayatcacaggggaatattattacattgtatcctaatatttgaaaacttaattttgaattagatatgatgccaattaaaatgtgaattttagatttttttaaaatatatattcaggaaagtagcccaaatcacttttggttaatacaacacaacagaaactccctctcttcgttgtcaaacaaatttctttaatgctcctggataaaaccaaccaagatggatatagcccataagtctacgttgtaacggataatgggtccattctcatttatgtacaaaatatagattttcgtattgttttttgaaaacaaattaatggaaggtccatttagatttattattttgaaagaaatttagtaatttattttaatataagaattaagaaacaaaataatttacctgaaatccacacattattacttgtgatattattactgcctggtttaatctgataatatcagtggatacttgggcaaaactgaaattacgt

SEQ ID NO: 787870 - DNA, 560 bp, Homo sapiens
actgagctgcagagtggtcaactgaatgcactgctaacccaacccagcttgcttctgcctgagacccccacttggtgacgatgtgagcagcacggcaatgctcacatcatcccctgtcgtggtaaccacacctaccttgctttcacagagaataagactattttatctgcgaactcattgctgctaagtgctaattattattattctaagccatcctcggaataaacctttttcataaaagcaatctggaggaggcagagagcacaagggaacaatgaggcagatgtraggttttcttagaggcaaaaagagtatctgcataagctccgtgtggctcttaaaaactgtaaacttttctctggccaagggtcattttgaagggattggaatttctttattgttatttatacctaaacagcaggggaaaaaaggaggggcataattctttagtttaatactatattgtgctcagggattctcatacctcccactttcccaaggctgcacttactgatgaaattatatgctggacctgtataattaaacatcctttgtcggtg

SEQ ID NO: 787871 - DNA, 619 bp, Homo sapiens
taagcatctgtaaccctattaagctaaacatgagttcatactgatattgtcaactctaatccatcaccgcatgagtcactctagcctcctccccttgcttatttgcaaattcccactgcatcaatgagaaagctggctcccaacatccatttatgtaattgtccgcttccagtgtacatgtgtggcagtatcagaattttttttgttgtttgagatggagtyttgctctgtcacccaggctggagtgcagtggcatgatctcagctcactgcaacctctgcttcctaggttcaaacgattcccccgcctcagcctcctaagtagctgggattataggtgcacgccaccacgcttggctaattttctttttttcttttctttctttctttttttttttttttctgtagttttagtagagatggcatatcaccatgttggccaggccagtctcgaactcctgacctcaactgatcagcccacctcggcctcccaaagtgctgggaatataagtgtgagccactgtgccctgcccagaattgttaactcatacctccaccagaagtaactttgtggtttgaagtagaatactacgtaaagatgtttggctttagccttacag

SEQ ID NO: 787872 - DNA, 619 bp, Homo sapiens
taagcatctgtaaccctattaagctaaacatgagttcatactgatattgtcaactctaatccatcaccgcatgagtcactctagcctcctccccttgcttatttgcaaattcccactgcatcaatgagaaagctggctcccaacatccatttatgtaattgtccgcttccagtgtacatgtgtggcagtatcagaattttttttgttgtttgagatggagtcttrctctgtcacccaggctggagtgcagtggcatgatctcagctcactgcaacctctgcttcctaggttcaaacgattcccccgcctcagcctcctaagtagctgggattataggtgcacgccaccacgcttggctaattttctttttttcttttctttctttctttttttttttttttctgtagttttagtagagatggcatatcaccatgttggccaggccagtctcgaactcctgacctcaactgatcagcccacctcggcctcccaaagtgctgggaatataagtgtgagccactgtgccctgcccagaattgttaactcatacctccaccagaagtaactttgtggtttgaagtagaatactacgtaaagatgtttggctttagccttacag

SEQ ID NO: 787873 - DNA, 619 bp, Homo sapiens
taagcatctgtaaccctattaagctaaacatgagttcatactgatattgtcaactctaatccatcaccgcatgagtcactctagcctcctccccttgcttatttgcaaattcccactgcatcaatgagaaagctggctcccaacatccatttatgtaattgtccgcttccagtgtacatgtgtggcagtatcagaattttttttgttgtttgagatggagtcttgctctgtcacccaggctggagtgcagtggcatgatctcagctcactgcaacctctgcttcctaggttcaaacgattcccccgcctcagcctcctaagtagctgggattataggtgcacgccaccaygcttggctaattttctttttttcttttctttctttctttttttttttttttctgtagttttagtagagatggcatatcaccatgttggccaggccagtctcgaactcctgacctcaactgatcagcccacctcggcctcccaaagtgctgggaatataagtgtgagccactgtgccctgcccagaattgttaactcatacctccaccagaagtaactttgtggtttgaagtagaatactacgtaaagatgtttggctttagccttacag

SEQ ID NO: 787874 - DNA, 619 bp, Homo sapiens
taagcatctgtaaccctattaagctaaacatgagttcatactgatattgtcaactctaatccatcaccgcatgagtcactctagcctcctccccttgcttatttgcaaattcccactgcatcaatgagaaagctggctcccaacatccatttatgtaattgtccgcttccagtgtacatgtgtggcagtatcagaattttttttgttgtttgagatggagtcttgctctgtcacccaggctggagtgcagtggcatgatctcagctcactgcaacctctgcttcctaggttcaaacgattcccccgcctcagcctcctaagtagctgggattataggtgcacgccaccacgcttggctaattttctttttytcttttctttctttctttttttttttttttctgtagttttagtagagatggcatatcaccatgttggccaggccagtctcgaactcctgacctcaactgatcagcccacctcggcctcccaaagtgctgggaatataagtgtgagccactgtgccctgcccagaattgttaactcatacctccaccagaagtaactttgtggtttgaagtagaatactacgtaaagatgtttggctttagccttacag

SEQ ID NO: 787875 - DNA, 369 bp, Homo sapiens
acttttttccatcctcttcagcaaaattgtttcataggtttgcaatacatttaaattatcttgtcaaattctgtattccatctttggatcccaggacagcctaaatgattgtttttgtttacatacattaaggttcacattttgtgctataagtttcttttttgttcacaaaggcagggtgtcatgtatccgctgtcacaatatcrtacagactagttttactgccctaaaaaatcccctaagcttcattcacctattcgcctttcctcttcgatctccaaatccctggcaaacactgacatttttttattctctctatagcttttgccttttccagaagccttttaaaactggcttctttcatttgga

SEQ ID NO: 787876 - DNA, 589 bp, Homo sapiens
aaagcatgtaactggcctcctataaacattctactaaatgggtagttgtacaagtaaatactcagttgtattatttaaacaaggggtctgccctctagccataatatttttacctttatcaattgcaaatataaataaatatatttccttacaaattacacataacagtaacatctgaacacgtttgggcagcaacatagttatgtatcaatcaagtttatactaacaacaattactgatatagaaattgatacagatcatgaggaaaaaatcaacattcatatcaattaaraacctactggaggcagctgcttcttctcaatcgtcaggaccagactgtgtgaccacctatgtctatcaattagagttatgtggccttctgggatggtcacagtaatgtagctgccacaagaagatatttatgtaaagattttatcattatttgcctcagattaaattatatacatgtaaaaagtaggtgagtgctcagctttcttactttgggagattaaatttatgtcccacttaacaaattgtttttcccacagatttttttcataaatctattccaaattcaagaaacataaaa

SEQ ID NO: 787877 - DNA, 589 bp, Homo sapiens
aaagcatgtaactggcctcctataaacattctactaaatgggtagttgtacaagtaaatactcagttgtattatttaaacaaggggtctgccctctagccataatatttttacctttatcaattgcaaatataaataaatatatttccttacaaattacacataacagtaacatctgaacacgtttgggcagcaacatagttatgtatcaatcaagtttatactaacaacaattactgatatagaaattgatacagatcatgaggaaaaaatcaacattcatatcaattaagaacctactggaggcagctgcttcttctcaatcgtcaggaccagactgtgtgaccacctatgtctatcaattaragttatgtggccttctgggatggtcacagtaatgtagctgccacaagaagatatttatgtaaagattttatcattatttgcctcagattaaattatatacatgtaaaaagtaggtgagtgctcagctttcttactttgggagattaaatttatgtcccacttaacaaattgtttttcccacagatttttttcataaatctattccaaattcaagaaacataaaa

SEQ ID NO: 787878 - DNA, 632 bp, Homo sapiens
ttcacgaggtgtgggtttgcctgatgcatcaggagaagtttcaccagatttgtctgaaatattaaagataattgaaatgggaaccaccatggcagaagctaggatacatcagtaagtcatacactgtgctgtccaastaacagccggcatgagacagtatcagcattcccactcagaagtccttcctgtcccctttcccagtgccttttctaaaaatgtcagatactcaaattatttcagccctttctggattcagaacaaaaattatttatccaataaggatttaatcactgaagatttgaaaaggacactttataactttcaggtttatattatacgtatttttaggatgagaaactagttacataacagtaaaaatgtattttaaagtaagttacactgaatgaatcactacactgaaactttaaaacgtgaaaggcaaaatacaacaaagtacaacaggacagtgtagactatatgccataatataacccgaaagtacataagctatactccttatgtgaggaattatatggtatagtgtgttttgttctgttttaattgagcaattcatcgaagtctaacttgttggcattgttgctctatgacagcaacatgggcagcaggaacct

SEQ ID NO: 787879 - DNA, 569 bp, Homo sapiens
attaaagggtttttttaattgttaaatctaactatataaattaacatttaaaaatccattttcatcactcaaactaattacagatttttttttaccacataacacaaattttatctggctgatcttgtctctcaattcttactatatagtatagctttactagaagcataatttcctggatagaagcttccatttctggcagggcatggtggctcacgcctgtaaacccagcactttgggagggtgaggcaggtggatcacctgaggtcaggagttygagaccagcctgggcaacatagcgaaaccctgtctccactaaaaatagaaaaaattagccaggcgtggtggtgagcgcctgtagtcccagctacttgggaggctgaggcacaagaactgcttgaactcaggaggcggaggttgcagtgatctgagatcacaccactgcactatagcctgggcaaaaaaaaagaaggttctattaaaaaaagaaggttcattaaaaaaaaaaagcaaagaagaaggttctatttctgtaggtttcttatgggcctctggaaggtctatgccta

SEQ ID NO: 787880 - DNA, 639 bp, Homo sapiens
aataataaatctagagatgttaatttttttctacatactctttagatcctgtacctgaaaccaccatggactctactacatttactacagtgctttaaaaaacattggttggctgtatttggattagttatggaaaagaacttgcttttaactattgagagcctatacaaaaatctccgtaaaggtatgaatcttttatttttctctttagcagtgttgtattaagtcagactagcagatatatttcctgggatgtgaagataaattaatgaagaatttgttaattagttcttaatcatttatrcttctaatttataaaggtatttgtggaaactggatgaacagatgcagctcatagagctatgtatttgtggaaactggatgaatagatgcagctcatagagcttgtgactgtaaatggtattgttgatatttcaaaatattgtgaatatataatttttgatgatgtctactttgaaaacttttaaaaccatgttttacattctgttcagatacaccaatagaattaattagacttttttcgtttcttacagtgtttaacacaaactttgagcacatttcatgtactaattttcagaatagtgtgtcaaggtttctatttaaactatatagataagg

SEQ ID NO: 787881 - DNA, 644 bp, Homo sapiens
acagtgtgcatggcatcttcaccaggagtagaaatcaatctcaagaaaccagtttcattgctcatttataagaagcaactcctaatccatgaaagcttttttttttttttttttgaaacagagtctcactgtgtctcccaggctggagtacagtggtgcgatcttggcccactgcaacctctgcctcctgggttcaggcgattttcttgcctcagcctcccaagtagatgggactacaggcacccgccaccatgcccagctaattttttaatatttttagtagagatggggtttcactgtgttggccaggctggtcttgaattcctgaccttgtgatctgcctacgtcggcctcccaaagtgctgggattacaggcgtgagccaccgcacccagcccccattaaagttttatyatgagatgatagaaattcagacacattttcaacctctacttcaaattctagttctcttgcagttattttctccactgaagtcttgaactgctcaaagtcattcatgaggtttggaatcaacttttccaaactcctgttaatgttggtattttgacctactcccacaaatcatgagtgttctaaatggcatctagaatggggaatcctttctagaaggttttcaatttactt

SEQ ID NO: 787882 - DNA, 616 bp, Homo sapiens
caaagaaatctttcataaaaggaagagagagtccatcgatgcctcaatttccattgttgtcttactttaagaaattgcctcacagccacccaaacttcagcaacaattaccaccatcaacactgtggcaagaccctccactggcaaagcttacaatgtgtcaaaggctcagatgattgttagcattttttagcaatcaagcatttttaaattaaggtatgtgaattgttttcttagacataatgattttgcacacaataaactgtggtatagtgtaaacataacttttakatatactgggaaaacaaaaaaatttttgtgacgtgcatttttgtgacattcactttattgcagtggtttgaacaggacccacaatatctccaacgtattcctgtatacacctggaccttaaccagtgggaaaaatgagcagcaaagttgtcctgggtcaactagagctggaaagtgtcggggctgggacaaaccaggcactatctgtgcccagccccctctcagctccactaaacagctttttttcctccttcagctcaagggccaccaaagtgaggggggctggtgatgtctgtggtgcccctgtccattcatgcccaaaacagg

SEQ ID NO: 787883 - DNA, 641 bp, Homo sapiens
aaatttcatttgctctggatccttgtctacacttggtattgttttgaaaattttagccaatccaataagtgcataataattttcattgtgttcttaatctgcattttctcaatgattaatgatgttgagcatctttttaagcacttactttctaaccgtatttcttcagtgaagcatctgttaaaatttttgcccattttttttgtttttggttttgtttttactgagttacaaggattctttatagattcttgatacaagtcattttagacgtgtgtcctgcaaagatctcctagtttgattgtttacatattttgcttgaggtatatttcaaagaataaaagtttataattttgccatagtataatttctcaattttttaagtgggtttgtcttcttatgtctttagaaacctttgcctatgccagtatgacaaggattttctcctaggtttcctttagaagttatatagttttgcagtttacacttaggactatracccaactcaagttctgttttgtatatggtatgaagtaagagttgaggttatttatttatttttgacttgaatatccagattttctggaaacattttttaaaaagtctctctttgctgaattatcttggcaccttatcaaaac

SEQ ID NO: 787884 - DNA, 573 bp, Homo sapiens
agaaatatatttatacatataggatctcgattaaagtatgtgttgagaatctgtctgcctgtttctttctttcctctttctttctttctttctctctttctttctctttctctctttctttctttcctcccttctttctttcttttgagacagaattttgctcttgttgcctaggctgcagtgcaatggcacaatctcagctcattgtaaccttcacctcccacgtttaagcaattctcctgcctcagcctcccaagyagctgggattacaggcgtgtgccaccatgcccagctaattttgtatttttagtagaaacagggtttcaccatgttggtcaggttggtctacaactcctgacctcaagtgatccacttgtctcggcctcctacactgctaggattacaggtgtgagccaccgtgcctgacctctttattatttcttactccatgttttagtctacacttcataaaggttattgagctgaatgcagtgacttttcccagtgaccatcctggaaacagttctaaaatgctgatcatgacctgggttctgggtgggaagatcatccctg

SEQ ID NO: 787885 - DNA, 577 bp, Homo sapiens
gcctctccccttccaattactgcccatctcacccatttccactatacatacattaatcttgccccttagttctcaggagacatttgttctcttaattccaagttcttagggagtgcctggttgtaacctacaatgattgttaaagacagtgttattcaataggtaagtatacatatytaatatacatatcaatatacatttaatatacaatacatattaatatacagtctaatatgcattatctctgttgttttgtataagaaaaatatacaatgactgtaacaaatcgtaggatatgatatatctcaatagaactaaaagtgctgtagacaaagtagtgagagatcacatgattttggaagactcaaaaaaggcatcttagagaaagtaattttcaaaaatcattgaggtaagatttggtcagataaagatacaatttagttagagcatagggttctaaaagaagagtaaggaggttggaccaatcagttgaaatacattccaagggctttgaaaaccagtctaaaaagtttgtagaaactaagctagtgcagcggcttgcctctgtaatcccagc

SEQ ID NO: 787886 - DNA, 568 bp, Homo sapiens
taaaaataaaaaaataaaaattaagggccacacacagtggctcatgcctgtaatcccagcactttgggaggccgaggcgggtggatcacttgaggccaggagttcgagaccatcctggccaacatggcaaaaccccatctctactaaaaatacaaaaaattagctggacatggtggggcacgcctgtaatcccagctacttgggtggctgaggcatgagaattgcctgaacccaggaggtcgaggttacagtgaaccaagatcacacaccactgtattccagcctgggtaacagagcaagattgtctcaaaaaaaaaaaaaaaaaaaaaagagagagagagaaaaagaatgacccacctgaatcaaaaaggtgtgtgaagattaaaacaactctttattttgaaaactggtaattaraaaagaaagaattagacattttaccttcctttacagtgggaaatatatttagggtaactatatcatgtcagtggataagataaggctctattttatcaaagaatgccaggtaatcaatatagaaataatgttagaaatataatatcagcat

SEQ ID NO: 787887 - DNA, 643 bp, Homo sapiens
cacttagaagaaaacaccaaacccaagtttcacatttttaaaattacaaatgcctcttacccatctggccaggaaccaactctgaagggggtgacctcaacccagcccttgtttctgtgaggtcctgcttttgcagaatggcctgcccctgggactggagcagrcttgggtgagctctaggtggagggtggtgggaggggcatagaaataaaccttcctctccatcagaaggaacctgtgatcccagcttttccttcagtcaccaccacctcgtgacactagaaagcctaccgtcacagatttccagcttactcaaaccccacaggttggggtcaaatgcatgttaacctaatttgggggaaaaaagactcaatcttgaaagcctgagcaaagtaaagggttacacaggacagtgtcaagtatatgccatacttcatacctggcattttccctaagcaagaactaattagttttcatttttaagtgttagctgtggcatggtttacacttaaatgttaacaatacataagctgtgtaacagaagttatacatagttatcatggaatatacaaacactaggtaattcaaatttcctttgtaatggcatggaagtctactgagaagcagaaaagaagcaccattt

SEQ ID NO: 787888 - DNA, 631 bp, Homo sapiens
aaaaaaaaaaaggaagggtcagagagatgcaacattgctgacttttaagatggaggaaggggccatgagccaaggaatgtgggcaacctctaagagcaagaaaaagcaagaaatacattctgcctcagagcctcagcatagaaatgcagccctgctgacaccttgatttgaacccaataagatccgtgttgaacttctaatcctatagaactgtaagataataaatttgtactgttttaaaccactgtttgtgataatttgttacatcagcaatataaaattatkaatacagtacccttttaaaatgtgccattctttatatgtcagttattattattattattatagtattatttttaagacagggtcttgctgtcacccaggctggagtgcagtggcacgatcacagcttattgcagcctcaaactcctgggctcaagcgatcctccctcagcctcctgagtagctgggactacagccatgcaccatcacacctggctaatttagagatgggggtctcggccgggcgcagtggctcacacctgtaatcccagcactttgggaggctgaggcgggtggatcacctgaggtcgcgagttcgagactagcctgaccaacatggagaaaccct

SEQ ID NO: 787889 - DNA, 643 bp, Homo sapiens
cacttagaagaaaacaccaaacccaagtttcacatttttaaaattacaaatgcctcttacccatctggccaggaaccaactctgaagggggtgacctcaacccagcccttgtttctgtgaggtcctgcttttgcagaatggcctgcccctgggactggagcaggcttgggtgagctctaggtggagggtggtgggaggggcatagaaataaaccttcctctccatcagaaggaacctgtgatcccagcttttccttcagtcaccaccacctcgtgacactagaaagcctaccgtcacagatttccagcttactcaaaccccacaggttggggtcaaatgcatgttaacctaatttgggggaaaaaagactcaatcttgaaagcctgagcaaagtaaagggttacacaggacagtgtcaagtatatgccatacttcatacctggcattttccctaagcaagaactaattagttttcatttttaagtgttagctgtggcatkgtttacacttaaatgttaacaatacataagctgtgtaacagaagttatacatagttatcatggaatatacaaacactaggtaattcaaatttcctttgtaatggcatggaagtctactgagaagcagaaaagaagcaccattt

SEQ ID NO: 787890 - DNA, 526 bp, Homo sapiens
aggggccatgagccaaggaatgtgggcaacctctaagagcaagaaaaagcaagaaatacattctgcctcagagcctcagcatagaaatgcagccctgctgacaccttgatttgaacccaataagatccgtgttgaacttctaatcctatagaactgtaagataataaatttgtactgttttaaaccactgtttgtgataatttgttacatcagcaatataaaattattaatacagtacccttttaaaatgtgccattctttatatgtcagttattattattattattatagtattatttttaagacagggtcttgctgtcacccaggctggagtgcagtggcacgatcacagcttattgcagcctcaaactcctgggctcargcgatcctccctcagcctcctgagtagctgggactacagccatgcaccatcacacctggctaatttagagatgggggtctcggccgggcgcagtggctcacacctgtaatcccagcactttgggaggctgaggcgggtggatca

SEQ ID NO: 787891 - DNA, 614 bp, Homo sapiens
aagaaaatgcattatatacctaaatgtaaatcctaaaactatacaaattatagaagattatacatgagacaatctttgtgacctatggttaggcaaatatttcttaactatgaacaccagaagcacaatccataaaagaaaaaattgataaattatactttaacacaattgaaaccttctgctattttaagacatttttaaagccacagactttcaaagccacaaaccatgaaaaaatattttcaaagtatgtatctgacaaaagacttaaatttagaatatataaagagctctcaatacttaaaagtgagaaaacagataccccaattaagaaacgagcaaatgatttaaacagagttcacaaaaaagatggcaaataagcacatgaaaagttgctcatcatcgttagtcattagaaatattcaaatgaaaaccacaatgaggtaccattacacactacmttaggctagcaaaaattactaagatttgctgctccaagtgttgttgaggatgaggaggaactggaaatcttgtaaactgcaaatgagaacgtaaaatggttcaaccatttcagaagatagtttggcagcttcttaaaaggagaacatctatga

SEQ ID NO: 787892 - DNA, 620 bp, Homo sapiens
cccaagtacaagccagcattaattcctaccaggataactgcaacagccttctaactggttatgttgttttttatcttgcttgctggagttcattctccatacaagagttcaggttcatttaaaataatatatatgtacaataataaacatttcaaactggtatttagaataaaagttacagcctccctatgtctcacaagctctacatgactttgtacccatcctacctctccaaactcatatcctaccattttcttatttgcacactgagttctagcagatctatttccttttcctctattactctaaactcattgccrgcttgtctcttttctaccacattcactctcttgtagatcatcaatggccaaactgatgatctacaagatcaaaatcagttaacatattcccagatctcaacctactgatttttccgtggtgtttgaaatcactgaccaatgtgtcattactgaattcctaccctcccctggctctcttgatgctgaattctctttgtttacccattaattctccaaatctttctctttagtctcctgggtgaagtcccctttctctgttcattcctcatatgtagactttcaatcaaagaaaaaaggata

SEQ ID NO: 787893 - DNA, 514 bp, Homo sapiens
aaggcaattgttgcggctctcagacaacagtctctgctttcaagaggcaaaatgggatccccagacaatccggagactccagaatctcaaagcctaactgtcagattagtgtcccaaacaggagacgagagaaggaagacctagacgaatgaaagctattgcatcggggcctccacatacaggaggggtctccaggtgggctgagaaagaaggaaagaaggagagaaagaaaggggagcagagaaagccaacttggcaggaggcaatatactgactgaaggcttccaaaaccatgtatggcacagtgccaggaactattcgaagtgctttacacatattaacatattaatgttcaccaccaccatgcatgagrtagggattattatcattcacctttcatatgaagagagtaagcacagatgggttaagcaacttgaccaaggtcacacagctaatgataggcagtctgtctccagagtcattgctcctaatatctgtgctgtactgcttctct

SEQ ID NO: 787894 - DNA, 646 bp, Homo sapiens
aaaaaaaaaaaaaaggtttttaaacacacatactcactgacccagcaattccaactctagaattttttctaaagttcatgatatggtataattcaagattattcacagcagaattgtttgtaatagcaggaaagcttaagtaacctaatatccatcaataagggactggtattgttatcagtagaaggtgtccaggttcttggcttctcgaacaaagaattggacaaaacycacaatatgaaagctgtcagccataaacaatacataaacaaataagcatgattgtgttccaacaatctaattgcagtacatctccatgttggattaaaagaaatggagagaggctgggcacggtggctcatgcctgtaatcccagcactttgggaggccaaggcgggcagatcacctgaggccaggagttcaagaccagcctggccaacatggtgaatccccgtctctataaaaatacaaaaattagccaagcatgatggcgagtgactgtaatcccagctactcaggaagctgaggctggagaattgcttgaacccaggaggcagaggttgcagtgagccaagatcacgccatcacactccagcctgggcaacagagtgagactccgcatcaaaaaaataaaaaataaaaggaa

SEQ ID NO: 787895 - DNA, 553 bp, Homo sapiens
agatccaaagcatgagaatgatttgaagtgccattgctggtttgaagatgaagggggcaatgtgacaaggaacacaggctgccttaaggagctgagagaagctgacagccagcaagaaaatgagggcctccagccacattgaactggattctgccagcaactcggctgatcttggaagctgatgccgtccccagagcctccagaaactgaggctctatcaacaccttgactttggtcttttgagacactaaccagytgagccccacagtgctagacttccgaccaaagaagtgtgaggttataaacgggtgttgttttaagcctctaaatttgtagtaatttgttacggtagcaataagaaacaaatacaccctcaaagcctaaaatatatgctatctgaccctttccagataaattttaccaaatcctgatctggatccttgttactcaaattgtggttttcaggccagcagcatcggtatcacctgggagcttgttggacatgcagaatctcagacctcaccaagacctactgactctgaatttgcatttt

SEQ ID NO: 787896 - DNA, 601 bp, Homo sapiens
tgtatctaactcagccattttatcctcatattcctttattgaattgcctgtgtatgcttagatcttcacatgcacttcaaaccagccttaatattctactggttcctgaataaattaatgagttgaataaaatctttagcatatgttcattttacatatgcataagagtcatgattttacctttttggaaattataccttagtgccacttaacacctcgtaccccctccggcaggcaagtgttgtggactacccctatgggaaagaaagcagaacagagagaacttgaatatgaaaaacaaaatgaaaaatcactgaagtcaagaaaaayataccttcaatctttgaagagaaaaaaaaaaccagtcaccatagaaaccaacgtttgtgtggtggtaaaaatgacctttatttggtccttattctgtttctgttctctggaaaagggaaggcattgggttccagcagtgggaaaggataaggggatgcattgtttgtaaacaagaggtatttgatttgcagatttgattacagatcttttctctcattgaaatccatgggatcccttagctaacaggctgagggcacttcatttccttttt

SEQ ID NO: 787897 - DNA, 580 bp, Homo sapiens
tttagattatacctgtgaatttttctttctctttttctgaaatatccaaatgtttccatgagagttttgagggcatgtcagaagtccagatatccttagccatttcaaactctcggatgacaatccattccacttytattcctcctcaaccagttattctgcttggtcagtgttatggttacattgtagtccctcaaaaagatatgttggacccccagtacctccaaatatgagtttatttggaaacagggtctttacagaggtcaagttaaactgaggtgaaaagggtgagtgtctgtgagcacagggttctgggaagcatagagacagatgcctgactcagagtctgaaggctgggaggtagagaggaacgccttgtggagaaacttctgtttcaactgagaccgaaaacagtgaagagtgtttagcaaaggcaccactagcagtgttctggaggagctggagccttccctgtgatttctgttattccccgcaccccatccccagcaacctaatagtaaaaactaacatttattgatattcatgtaccaagcacagtaatcagaagataacttaacag

SEQ ID NO: 787898 - DNA, 542 bp, Homo sapiens
caggatcccaaggcagaagaatttttcttagtatagaacaaaatgaaaagtctcccatgtctacttctttctacacagacgcggcaaccatccgatttctcaatcttttccccacctttcccgcctttctattccacaaaaccgccattgtcatcatggcccgttctcaatgagctgttgggcacacctcccagacggggtggtggccgggcagaggggctcctcacttcccagtaggggcggccgggcagaggcgcccctcacctcccggacggggcggctggccgggcggggggctgacccccccacctccctcccggacggggtggctgccaggcggagacgctcctcacttcccagacggggcggctgccgggcggaggggctyctcacttctcagacggggcggctgccgggcggaggggctcctcacttctcagacggggcggctgccggggggaggggctcctcacttctcatagggggcggctgccgggcggaggggctcctcacttctcagacggggtggctgccgggcggag

SEQ ID NO: 787899 - DNA, 598 bp, Homo sapiens
ttgaaaggggggtatataaatttggaaaacttaatttcttggctgtgtttgataacagttcctatgcatggtttttaatgtgaggtaaatttgtttctttcttcagaatacctctctccaccccccaccttattcttcctctttaatgaatatttttattggagctcaaactccatgacttacgtgctcactaagttttcttttttccccttgtttactctgtctgtatgtatgtcaaaagctggcaaaacctctaaaactgtcaagaaaatgcttgaaagttgattttgttcattttaggccccctttgcaaattcatgataaaatgtcttaatgttatttggatatgtagtacatagaaacagaaaaataaagtcatttttataacttaaaatagatatttgtccstctcttactcatttttagaaatcatgtttatcgtttgcatttcttaaactattactaaagctcccttttctctgcaggaaataagctgcatgcattctttcactttgtgttgagctagtttctgtaattgtgactaattatttccttccttaattcactctactgtatctacctaaggtgcccctggagt

SEQ ID NO: 787900 - DNA, 528 bp, Homo sapiens
aggttcaccgctaaagtgtttccttgcctttgtggatcttccctggcagaaagcgctaatgcttcccggtatttaacatttcacttcctgacaaatgtcacagaaccccaacttgctctctctttctcatttagaggatgcctgtggtcwtctggttttttaaaactctgcattccaaaccagtcattttccttgtttatgcattcaaagaaacagatggtgaaaaccacaggggggaaacgccaaccgaatacagcaccccccgcccgccaccaccgattccagccttcctgacattaccatctaattcacgttggtccacaaatggcatttaaatgggaccaggatgcaaaatgctggtcccatttaaatgccaagtccagtgcagcaatccgcattgtgacgtgtggaagatcagggagctcgaagtcttctacttttggacattctctgcctcgacctgttgcttgggtcactttcatgccaattgtgtgtcctctcctcggaggaaaagtgctgactgagctg

SEQ ID NO: 787901 - DNA, 699 bp, Homo sapiens
tctatgtcccgtgattcctctgagtctaagtctctacaatccaaagcaacattacaaatagcctgaattgtgcaatcctttgcctccaatatagagatagtgacttgattattgaccagtggagtttacccatgaatttagtagagtactaatgtgtggagtcagcttcttgtgtccttccctaatgcctagtcaggagctaggtaacccaggatgtgctcaggaaataacaatgggtaattgatgagaagttaaaaagtgtccccgtgctgtaatgattacagatttataacctcaccattcatagtacctaygattctctgaatttaaaagtaggttttactaagtaacagccatgtatttgcacttttcttggcatatgtgggaagtaaaatttgactgcttcctgtctatctctaattcctccccagcccctgatttatttatattatctctctttgcgtttcatgaattaacaagagtgtttagctttccaaaactgcctgttggaaagggcttctttcacttaaatgcccttgaaaagcattaacagagctaccacagtatttattagactttataataacctctttgtcttaaatgaactatttgatcccttccctttaaagaaaaccttaggaaaagaaacattaccattatcactgcctgcccattagaactgggatccaattttcagaa

SEQ ID NO: 787902 - DNA, 543 bp, Homo sapiens
ctctttattggttttaaaagttgttgtctccatataggagtttcatttttggcaatggaggactaggtaattcggaccagatctcttgttcatgataactagtaaaagctagatgcaatagataattaagttttaaaatcaagaagagcaaaagggtcataaggatttattggccaagatctgggagaagacacaaatcaggagagtgagcctcatatttaaggctccttttgtcctggggaacatttgcagatcttcaaagggcaactgaaagacagagttgcagtttaaaaaaccccttgagccagagagaaagagctgtgstctggagcctgccaggggcagaagtcttgggaagtaccctacaccttgggagtagagccctgaagagctggcccaagaaggaagggtgaagataactaaatgagtctttataaggctcatagcctctcttcaggtgattctgcaggcctagaaaatctcaaactctaaaattagaatagggcgaatccagattgctaatagtgccccctgggattacgg

SEQ ID NO: 787903 - DNA, 543 bp, Homo sapiens
ctctttattggttttaaaagttgttgtctccatataggagtttcatttttggcaatggaggactaggtaattcggaccagatctcttgttcatgataactagtaaaagctagatgcaatagataattaagttttaaaatcaagaagagcaaaagggtcataaggatttattggccaagatctgggagaagacacaaatcaggagagtgagcctcatatttaaggctccttttgtcctggggaacatttgcagatcttcaaagggcaactgaaagacagagttgcagtttaaaaaaccccttgagccagagagaaagagctgtggtctggagcctgccaggggcagaagtcttgggargtaccctacaccttgggagtagagccctgaagagctggcccaagaaggaagggtgaagataactaaatgagtctttataaggctcatagcctctcttcaggtgattctgcaggcctagaaaatctcaaactctaaaattagaatagggcgaatccagattgctaatagtgccccctgggattacgg

SEQ ID NO: 787904 - DNA, 478 bp, Homo sapiens
gtttccaacgtaaaggaaatgagtttttgggaaactgaatgatgctaggtctggggcaggaaaacactagttggatctggggcacactattgcaccagaaagtgaggaagcaatcaaagactggtgtgattacattaaaagaccataggaattaagtagaagaagctcccactggccaaaaaatgggagaatttgagttcacaaagagaataatgactgcgattgatagaaatatatcaaatatctaaaaatcagtaagttcagaacaggacaaggrtgtcactctttccatttccacattgtaccatagaacattctggctaggacagctaggcaaaaaaaaaaaaaaaaaaaaaaaaaagaagattcacattggtaagtaagaagtaaaattatttatattcacaaatgacatgatcttgtatattaaaaagatcaaagactctaccaaaaaacaatgagaactaacacacaagtt

SEQ ID NO: 787905 - DNA, 496 bp, Homo sapiens
cacttttatttttgtttcccatttagttttttactttcattgtttgacaaacaatagcaatgacaacaacagactcctctgcatacttatttgattagagaattccaatatgtttcaattatcattgtgaaatcaaggagactcatgactttttgtacacagctgttacatgtacggcaatcagtttttaaggtgggataaatttctctaaaataaatgatcctagatagctttccttcaagtcaagtgtcttgctgtttaaatccatttcttgtttaaagtaataatataaaaaagttcatcactttatcaacagaacagtgaarctatttcttataacaggagcagggctgtcatatcatgtcagagagtaagaggaattctatgagatttaagaggccaagacagtgtggtccaggtgcaaactcatgggtggattggcttgatcaggataaagcttagcatagctagagggatggatgagttgtaaatcttt

SEQ ID NO: 787906 - DNA, 456 bp, Homo sapiens
tttggagatgtcatatttccttgcttttttatgcttcctatgtccttatgttggtgtgagtgcatctgatgttatagtctcttcctccagtttttgaatttgctttcataggggagttttttttttttttcctgaagatgtatcacttgtgttggttggatagggtcctttggttttgattctgggtgcatgcagtagcrtagtctctgtgtgatttctttggcagtagacagcatcagttgtatctgtgatctccttggtggtttaacatgtggttattagtggaggttacggtgaaattttgctgggagcaaggatgccaggtggacagggataacaagtgggccggagtggtagcagcagtgggctgaatgtgcctgttcttggggcgcaaggtagtgtatgctggcactgatgttagaagaaccaggcaggcctattctggggcctcctggt

SEQ ID NO: 787907 - DNA, 578 bp, Homo sapiens
tgtcctttttgcaacacgaagtcataatcacagcctacccattcactgggaccttgcagaaaccaagccttacggagagttaaggtgcattatggatggaaagtgccacacaagagtaccttctttccactaggaaaaccttgacttggctggtgctgttctaggatcractgcttttcctttccttggcctcctgcattgagtttgcctttctccccccagccccctgtgtcaacatcacgggctccttaggagccccactcacagctccacaactgctaatgttcacttctgtggaaaatgataggtgacaagttgctctcggagatgcccacaatcagataagccaggaggggaaacaagttcttctggaagggaaacagcctgtactatggaaattaaatattccttagaggagagcagaaaactttagatcccagccacgggtttctgaggaaggttcaccagagaaactggggcatccctggggcacggactgggaaggatggaagctgttactcctgacatctgcaactgtcatttggagcctgggtctgggctgtgtgtccccctacccc

SEQ ID NO: 787908 - DNA, 598 bp, Homo sapiens
ggtttctgaggaaggttcaccagagaaactggggcatccctggggcacggactgggaaggatggaagctgttactcctgacatctgcaactgtcatttggagcctgggtctgggctgtgtgtccccctacccctgccccaacactggcaacatgatcaaagtcatacttccccttttccccctgtgggggccccagcgcccttctagtcattcagcaatcagggcgcatgtgcttttcaagtcagtgycctgatatttatctgcaagcagggatgtgagaggcagcctcctgccattcccgacatggggaaactgagtcacaaaagggctgaggtgagtggtcacgtgaaagccactctgaacagagctctggatgtactctgctctccttgtctcatgtgcacatacagacacacagacagacacacactgagttttacagctctctaaaatttatgagcaaagtcaagtacccggagatctcttaattaagcagccttcccctaggagaaaggaaatggccttccatattcttagcaccgacactggattgcatgatttactacctgaggcttgcatttctccccacatcaactcc

SEQ ID NO: 787909 - DNA, 524 bp, Homo sapiens
ttatcctacatatctgctactttgtgtcttctgacctacatcttcccatttcctcctcacctcccaccccaacccctggtaaccactgttttgttctctatctccctatatttgatttttaaaaaagatcccaggttgggcatggtggctyacacctgtaatcccagcactttgggaggctgaggcaggcagatcacctgaggtcaggagttcgagaccagcctggccaacatggtgaaaccccatttctactaaaaatacaaaaactagccgggcacagtggcacacacctgtagtcccagctacttgggaggctgaggcaggagaatcgctttaacctgggaggcagaggtagcagtgagccgagatcacaccattgcattccagcctgggcaacaagagtgaaactctgtctcaaaaaaaaaaaaaaaagaaagaaaagaaaaagattccacatataagtgagatcatgcaatattttctttctgtgtctggtttatttcacttagcataatgtcctccag

SEQ ID NO: 787910 - DNA, 619 bp, Homo sapiens
gtctgtatcattgtacttcgattgcatgtgaagtgcggaaaaatttgttactagtaataaagtaatcacgttggccagtgataacattttttttttttttgagacggagtttcaccctttggtccaggcccgagtgaagtggtgcgatctsgactccctgaaacctccgccccccgggttcaagcgattctcctccctcagtagctgagattacaggtgcccgccaccatgcccagctaattttttgtatttttcgtagagatggggtttcaccatattggtcgggctggtctcaaactcctcagaccaccgtgatctacccgccttggcctcccaaagtgctgggattacaggcgtgagccaccgagcccagccacaacagttcttttaatgccctggggatacatgagccaacaagattactatggcttctgctgaaatggaggagacattaagtaataatgacaaaagtgattatttaattgcaattatggtagttgccacaaagtaagagtagaacgtgctatgagagcatataataggatttctgatatgctcatgctctggggtcaggaagaagcttcccaagggacttcgcagttaaggccttaacaagact

SEQ ID NO: 787911 - DNA, 384 bp, Homo sapiens
gggcacagaagttccactctccttcccccgtactccatatatctcttcatctatatcctttataataaacatgtttccctaggttctgtgaggcactgtaacaaattaaacccaaaaaggaggacttgagatttctgatttataaacagttcgtcaaaaaagacagatcacataacctaaaacttaasattgacacctacttggggtggggggcagtcttgaggaccaagccctcaatttgtgatatctgacactatctccaggtatatggtggctgaggcaggtgaagtgcgaggctgcagtgggccgtgattgcaccattagactatggccagggtgacagcaagacccagtctctaaaaaaaaataaaaattaaaagaaca

SEQ ID NO: 787912 - DNA, 576 bp, Homo sapiens
ggatattaggaggcaactaacagtgccactgccctctcgtgcttccctggatttcacttgctttctttattttttgagacggggtctcgctctgtggcccaggctggagtgcagtggcacgatcttggctcattgcatcctccacctcccaggttcaagcgattctcctgccttagcctcccaagtagctgggattacaggtgcatgccaacacacccggccagtttttttttgtaattttagtagagacagggttttgccatgttggccaggctgttcctgaattcctgacctcaagtgatccacccgcctcagcctcccaaagtgctgagattacaggcgtgagccaccatgcctggcctggatttcactttaaagwcttactgatgttttacattttgtccgtttctcttgtgcaccaatttgctgagcattttaacgatacttaaggagaaagatgtacctcagaattgtgtggttactaagatcttaggcttaagagagactacctggatcctcgtccaactacttcctagcttggtgcccttgggcaagttatttaacgtttctgagcct

SEQ ID NO: 787913 - DNA, 568 bp, Homo sapiens
attgagttttaacaagtaactatgaacagtcacctttatgatccaccacccaggacaagaaatagaacagttccagcacctgagaaaccttgtgtctccctcgcagtccttcccaactctagagcaacccgtcatgaaaaatgctaccgtagtcacttcctagcttttctttgtagtttaataggtatatatatgtagccctaaaaatgtatttcagggagatttctttttattggtagaacttatggctgaagtaaaattttcttaggcttgaccaagaagtcatmttctctaagtctgtctgtcttttggtttacattaaacttcatttaaactcatgaaatgtatgaaaaacagaaaactgtctaaatgtagaaaatgtagcctttattattcttctctaaaaccatagttgtaaattttgatgaggaaatattgattggttttcaagtataagatgagcctcctttttaaagagtattttatacctataaagagcaaaataatacgttagcttgaagactagataaccacatcttaggttatctttgaagacttccacaaagcc

SEQ ID NO: 787914 - DNA, 522 bp, Homo sapiens
aaacttttaggagacaatataggataatatcttttggatcctgaggtaggaaatttgttttgttttgttttgttttgttttttaattgagatggagtctcgctctgtcgcccaggctggagtgcagtggtgcgatctcggctcactgcaacctccatctcctgggttcaagcgattctcctacctcagcctcccaagtagctgagaatacaggcgcgtgccaccacaccaggctaattttttgtatttttagtggagacagggtttcaccatgttagccaggatggtcttgatcttctgacctcgtgatctgcccacctcagcctcccaaagtgctgggagtagaggcrtgagccaccacgcccagccagaaatgatttttaaacaagacatcaaaaagtgtacaccataatgaaaaaagtcaataaaactaaaaaactaaaaaattccgttcacgaaaagatagcattgaggaaagtgaacataaaaaatacaaactgggagaagatatttgtaacacata

SEQ ID NO: 787915 - DNA, 554 bp, Homo sapiens
aggccaacgtattagatgatatgtgtaataggcctctttcattctattatataagtacagcatgacctctctatttctttacacccttttttgttttgagacagggactcactctgacagtggtgctatcacagctcactgcagtcttgacctccttggctcaagcaatcctcccacctcagcctactgaatagctgtgactacaggtgtgtatcaccatgcccaactaatttttaaaacttgttgtagagacggggtctcactatgttacccaggctggtctcgaattcctaggctcaggcaatcctcccgcctcggccttytaaagtgttgggattacacacttctttttttttagagaaactggggttctcccttcatttactcttgggtaagtgccttgtttattctttgattgagaaaacaagtcaccaaaacagaacctgcacaggtgccgccccctcacgcatccgtctgcctgcctttgcccctctgtgccaccttctctccattaccgcgggtgagctgtctgctccagggacagtgctctgggg

SEQ ID NO: 787916 - DNA, 551 bp, Homo sapiens
aagagatccccaaacttgtcaatcatcagaatcacccgggagctttaaaaatatatagattctgattctgtaggtctagggtggagtccagaaaactgtaggtttcaaaagctcctcagccagatgctgtgactcacacctgtaatcccagcactttgggaagccaaggcaggtggatcacttgaacccaggagtttgagaccagcctgggcaacatagtaagacccctacttytacaaaaatttaaaagttatataaatgttatggccaagtagttgggacctgtagtcccagcaacttgggaggctgaggcagggtgattgcttgcgtccaggagttcaaggctgcagtgaaccatgatcatgccactgcactccagcctaggcaacagagtgagaccctgtctctcaaaaagaaaaaaaaaaaaagacaactgatttaataataataccacagaagagggaggagagggaatagaactatatataagaaacatttctatgtatcactggaattaagctagtgtaaacctaaagctaattctgatgact

SEQ ID NO: 787917 - DNA, 549 bp, Homo sapiens
aacttgattcagtttagaatacgaatcaaggtgaaaacaaaacaaatctagtagcaatcaatagaatttctctatggtagatctgagtaatttgagattaattagcacaaaggaagctaaatcaaaccaaccaatgcttagtgtctttatgagcaagatctcaaaagggggcctttaaggtagttattagctggyggctcagagactagctttagggggtttgtgtagttctgcagacaggattgcaaggccagctggtatgtgcactttttgggggaaaagagtccttatttcttcatcaaattctttacagaagagtgccgtgctccccgctgtcttaggagttacagaacatttaaaagatgatttgcggacagattaaggacttcagaaggagagatgacaccagacctaggtcttgcagatgcaaactcctgtcaagtgtgagaggagggggagtattatccaccagtggcagataggctgggcatctgggcagaatgataagagctgtggccctgcagccagtccctgcatttgcaccctgag

SEQ ID NO: 787918 - DNA, 570 bp, Homo sapiens
tattttcatgtctttctctccagagataaattttgtggcctgccactgaatctgcttcctaaaatgtagcttggagattttatttgagataaactatcatgtgaataaatatagatactatattttaatctgggagcgttccatttggaacctttttttttttttaaagtcaacattagtggtgccgtcattcaaaggatatggacgtttgggggaaatttacatccaactgtgactgagaaccttttgccaggataatatctgtttctctgaaaatgacaatggctatggacgtaaagcatgatctcagatggcagtcccgaaatcaggaaggtccatttcaacacatctcctggcccctgtggcaagctacaatgctggtatgctcgcatggyagggtctctgccttgcaggtaacacgtgtccatctgagaatagtaaaggaggttcatttgtttatgtgctggtggtgctgaggagtttcacagaggctggaaaacaggggctggcaattgattccccccagagccctccgtttcacattgccccaccccagagaccatgggagat

SEQ ID NO: 787919 - DNA, 639 bp, Homo sapiens
acgttcaaatataggtcagaaaattattgaggctttatttactctctcttttcagggctgctggctgacatacacccccttctgctgaaaggtgttaaagaaatatgcccagagcatagtaggccctcattgcattctcattgacttgatgtcagagaaaaaaaaaattagcattttcaaaatttgctgttgaaaatttgagacccaaaaaagtgtatatagatcaagttgttgttttacagagcaatggtgaggggagggcagaatgctgtaagcatcaaaccacatgcggtcaattcatctataatgatggttaccaatttttacggacttccttctgcctccacaggcactgcttcatgtgatatgcacaaaactctgtgagttgttcactttcccttcccctcgttcattcatccatccaacaaatatttactgagcatctgctatgtgcccatgcgtgggaacagcacaytgatggagacaaactgacccacggccacacggagcattatcttggctcaaagagctgcaggctgtgatcttaggcctcttccagctccctgttggtggttatatgatccgcaagctaagaatggtttttacattttttgatggttgaagaaagatcaaagaaga

SEQ ID NO: 787920 - DNA, 658 bp, Homo sapiens
acaagttggtgggtgggggaagccagtgagccaagaacactgatcttaggagcagtttgtggagggtcagaatcttgtagcctccagctgcataactcttaaaccatagtttctaatcttgtggccgtgatggctaatatggagtgtcaacttgattggattgaagaatacaaagtattgatcctgagtgtgtctgtgagggtgttgccaaaggagattaacatttgartcagtgacttgggaaaggcagacccacccttaatctgggtgagcacaatctagtcacctgccagtatggctacaatataaacaggtagaaaaatgtgaaaagacagactggcctaggctcccagcctacatctttatcctgtgctggatgcttcctaacctcaaacatcagactccaagttcttcagttttggaacttggactggctctccttgctccgtagcctgcagatggtctattgtgggaccttgtgagttaatacttaacaaactcccatatatatatatatatatatatatatatatatatatatatatatatatatatatatcctctaaagttttgtccctctaaagaaccctaatacagattttggtaccaggagtggttctagaggaacaaaatattaaggatgtatttgtttcgttag

SEQ ID NO: 787921 - DNA, 574 bp, Homo sapiens
aaaagtgtaggacattagtaataagcttttgaatctccaaattatgcccaataaatattcgaattagagttgcttccagacagagatgccattcatttgggaagtttcccaccccccttcaaatttctgaatgggacaatagaggtagaacccagacaactgggacatcttcataaaatattcttgaacattcatgagttgagtttagtgctatttggaaggaaactggtaagcctgagaaaggcactaaattgataatgaaacactaaaaaatagcttataatttggtggcattaataatttcaggtactcttttatgtttatctacrttataccatttaatagtcagaatatacctatgaagtaggtactattattattatcattctacagataaggcagataaggagattgagacacagagatattaagactcatacttaaagtcacacaagcaaacgttagaacctggacttcagagatctggccaggatcctgttcagtactttcgatgttactctaattcttctctaatttgggtttgcttcatgaatgtttctatatgctgacatct

SEQ ID NO: 787922 - DNA, 614 bp, Homo sapiens
gaaaataaagttcatgagtggttatatgacatgtttttgttttctgtctcaaaaaccctagcagtttgcacactttgcttccatctgtaccctgttacctattgtgacatatcacatgctcgaaggccacatctgggactttcgtaagtagcaaccgtttttcttttctgtggtttctaacatgctatataagattttatctctattgtatttcccgtaacactgaccttccattggcttctttctcttttctacagagtatatttttggagggcaaatctgttaatgtgtattctttatgctctgtacatcctatgtaagatcatcagtaaatatctatttacatttttttgaagggcagagaaattagcaagtgtatgttcatgggtttagatgaagtagagtgtagtaattatgaacaccaactcakaaactcaacattttgggtacaggtgtaaactacaccacttctagccatgtgatcttggacaggttacttatgcatgctatagccatgtttcctcaaatggaaaatcagaatgataaaataatacttagttcagagagttgtggagttcaaatgcatgtagaaagcttagcatattgcagaatat

SEQ ID NO: 787923 - DNA, 602 bp, Homo sapiens
ggtgaaattaattgcggccagccagggaagacagaaaaaaacctataatggtttatcatattttttaggctttgtgagggccataaatttaaggcatataggaattgtatttattccttagatttcacaaatttgtcatgttccttttctccaatggcgacagcttcttccaacaactgggtctctgttgctgaagtagaaaatagaaaagggagtgggcacggggatgttcctagtgtcacagrtctctgcagagctctccctcgtaagcttctttggttacatggctgttaatagctaaattattaatgcaggtttgctggtggagggagctgcttttgaccattgcctctcttcttacatcagcttttcgatagctacaattgtaggagtcacattgcatgcagagcagttcataaattgaatggttgtttgtgtgtgtgtgtgtgtgtgtgtgtgtgtgtgtgtgtagcaggggaggctcagagttttggcctctggctgtatggctgtatgcttgtgagtatcctttgtctgaaacctgatgatgcaggaatttacatcttggaatgggagttggtttaaacaaggaaatttattca

SEQ ID NO: 787924 - DNA, 590 bp, Homo sapiens
actctactttgtgtccttgttattcctgtgtgtctaaagtcatgtcagaaattcactgcactaggaaattcacatccatagaatgtgacattaaagagtcaaacactatatattgtggttgggtagaatgtggtttaagaacttggacatgagggaaattagtaagaaatggtatatgaggaaaaagtcatggtccatactagggacagtaagatcaatcacatggattcagaccaaactcagagactacaattcagaattagtgagaattaggacagatgaagtgatggaaattgtggaagctgttgaatatcagggatgaggatttacttttctataaagggcctgagagtaaatattttaggttttgcacgctacataatctctgtcacagctactccactctgccattgtaggktcaaagcagacatagacaacacagaaaggaatgggtgtatttgtgttccaataaaactaattacaaaagcaagctggattcgggctgtgagccagtcattcaccagcccctgctgtaggggctccaaaacccccaaggtctaactggttcatcaaagagctgagtccacttc

SEQ ID NO: 787925 - DNA, 559 bp, Homo sapiens
accttaggactggataaagccaacgtgaacctcaagatggttaagccaatgaccttgacctctttaaccccaaccaacggagtacttgatcctaaggttaacaatgcgcgagtaacatagtgactgtaggtgtctaagtcagtggccactaatatcaagcaataaacatgtggaaatgataaagaacactgcttattttccttttaggaaaatatttcctaaacttactatgttaaagtgatctggactctgctgaacacctaaattytaaatgtctgaaaaatgaaaatcatcattcaacgttgtgttcttttcatcagcttcctgatgaattcactcacttccaatgacagcagaaggattactcacactgataaaggaaattggcggaagctacccagaagggccacacctccaaaaggtttttttaagtacatgaaacattgatgcacgtgccccgcctggtaagtagcttgtctgttactagggtgacatgttgcatggggtatgagcaaaggtttttgatgctgaactccatctcttccatttgttagcatcg

SEQ ID NO: 787926 - DNA, 603 bp, Homo sapiens
tgtttatagatgtttatgccttgcaaaacatattaacacataattttctgatttgatcttttcaataaccttaggcttgaaaagtattactatccaatttgacagatgaggaaagtaactcaggttaagtaagtcatccaaggtagcacagtaagccatggcaggttctagattagaacttgagttttaaaactcttattcaagactgagcctgagaaacagccttaatatatataagtatcaaatgtattttaggattgtgtaaaacttgctttatgggtgatatacaacattttgtaaacttgcttttctgtactatgaaggcagtcaccataaaaattttctgagcatatgaaattggaagaccatgtgtatttttaaaaagagcagaattagcctctaaactcttagtgagaggataakttggatgaccataccttttcatcaaccgaggcattggttcaggccctcaggcctgaaccccagttggaggatcatttagaaaacactttaatacatcttacaatataatgatacatttttcacaattaatgaactaatactaatatttaagtcattaagtataattaatactttactcac

SEQ ID NO: 787927 - DNA, 601 bp, Homo sapiens
aatttctccatattcttaccaaatcttgctatttctgtatttttaaaataatggccatcctagcaggtatgaggtaaaatatcattgtgacattgacttgcatttccccaattattcgtgaaattgaacatctttttgcatatttactacttgtatgtcttctttgaagaatgtctattcaagtcctttgcctattttctaattgatttttttttttctrtttagttttaaaagctcctcatgtattttggatattaacccattattatatgtgtgatttgttaatatcttcccccattctgttgattgcctttttattctgttgattccttcctttgctacacagaaactttttagtttggtgtagtcccatttacctatttttgctattgttacctgtactttttgtgtcgtatccaagaaatcattactaagaccaaagttataaggctttccccctatgttttcttccagggggtttatagcttagatcttacatttaagtttttaatctcctttgagttgatttttatgtgtggtgtaagataagggttcattttgcatgtaaacattcagtttccccaacaccaattgttaaaga

SEQ ID NO: 787928 - DNA, 625 bp, Homo sapiens
taattagaaaggaacttggaagtattcttgttcctgataatgtctctaacaaagacaccaacattaagtgacttgctcaaagtaaatggtgaaagttggaaagagaacctacatgtgctgatactaagttacttttccaccctcctatgtaattgtttgtatttatttcctggcatctcagtgccttatttataacacatagaaaataaaatctatcctaatttctcatagggttaatgtgactgtatataagagattattttcctcacttttaaaagcctttatttttagtagaaaaatcaatggacatattgtgacttgaattcatattaattatcctcattggacaactataaagttagtaaaatatgttggctttcagtttaaaaatattgactggatcatgtggaaaacactgtgcatagctcaggggatgtagaggtcaacytgacagacgaagcctgcctgccctcgtgtgtatgacagtccagaggcagacacagatgtgaatcaacacattgagcaaacaattactccattatgattgtgagaaataataaatgacattttataatattgtttccgtaagttactggcatacacagacccatggtctgctgtgggc

SEQ ID NO: 787929 - DNA, 574 bp, Homo sapiens
aatatattcaaagcaaaaagtgcttcagagtttcttcaaataagaaaaagttgggcatgaagtgtagggaataaaccatccccactctctgggtggccaaggtgggaggatcacctgaggtcaggagtttgagaccagcctggccaacatggtgaaaccctatctctactaaaaacacaaaacttagccaggcattgtggcacgcgcctgtygtcccagctatttgggaggccgaggtaagagaattgctcgaacctgggaagcggaagttgcagtgagccgagattgcgctactgcactccagcctgggcgagagtgagatcttgactcaaaaaaacaaaacaaacaacaaacaaaaaacaaaacaaaacaaaacaaaaaagcggagtaaggaataaaccaaataggtgccccctgcatttcagcgcttttgctttctcatgcttatgagattaaatcatctaaaaacaagtagtgttaacgggggtaacacagcatggggattttctgtttctttttattgctgctattgtagtcaataagattttatttagacccgaataaagcacctagt

SEQ ID NO: 787930 - DNA, 555 bp, Homo sapiens
ttttctccctaaatttttgtatagctaaaaagccaacggatgttggacagatttcaccttcagtatactgctggagggccagaacaaggagttaatgagaacagcatctatgaggcgtgccatgactgttgggtggagcagagagggcaggtgagatcttacttttcatatgctatttttttctatctatgttctcaacttataactatgccagctgggaacagaggcttatgcctgtaatcccaacattttgggaagctgagcaggagaacagtttgagcccaagagttccagaccagcctgggcaactataggaygaccccatctctacaaaaaattaaaaatgagatgggtatgatggcatgtgcctgtaatccttgctactcaagtggctgaggcaggagaatcgcttgagcccaggagttcgagactccagtaagccatgattgtgacatgccactgcactgtagcccaggtgacagggcaagaccttgtctcaaaaaccacccccaagccccacaaataaatgacgatgccatcaaaagctataaacta

SEQ ID NO: 787931 - DNA, 638 bp, Homo sapiens
ttctgttttgattaatggaccaggaacaggtctttttcctccagactggaaggtgtctcctgggcttgatgtcactcttttagttgttcataaacatcttatcaaagacctatgtatcatggacctgctctgtcacgcactgcatcatggcggcatgagagaagtcgcagaggatttactaggtagatgccgttttcatcttcagatgctaataataaataacatgagttggacacacaaataactctcattcgagccattagggcgatggaccaaaactgaggaacataaagtgtcataaaagttctcgggaagatgtgaccatttcagttgaggtgatcacaggtcacgtyaattcatgttttatggctgagggtaaaatttgggctagtggaataggtaggaagcttactctaagtagaaggattggtgtgaacaaaggcacaagctctgaaaggttacaagacatttctggagtggccagtggttcaggccaacaaaggcaacatggtctgtggaaaaagttaaactgcaaaccaggctttccctggtccagctgtgcctatcagttccagcttaactcctacccctcattaccatcatctttggctccagtgccaggaatcttgttatcttca

SEQ ID NO: 787932 - DNA, 612 bp, Homo sapiens
tgaaacattagagttattctatccaaataaaacacctagaaatgtatatttaaagaaaatactgatccctgggttcttctcccagaggacctgatataaatagtctgttgtgtggtactgggcctcaagatatttgaaagcatcccatgtgatcctaatggtcacctaatgaggtggcaaagttgagaaccagtgtgttagagctatacgttttatttgctatttataatgtagtgtttccgaaccttgggtactcagcacatgcatttagttctacttctatactatgtcctaagccagcacttctcaaactttagtgtgccactagagtcacttggagggcttgggccccactctctctttcagtaagtgggggtgggacctgagagtttgcatttcttaattcccaygtgacgttagtgcagccgttccggggccacacttttagaatcactgtctaaaacagaatcacctggggtactcttgttaaactcgctatcaaaagtgagtccttctaccaatgaggtctcgactcagcagaagcggatcctgcttgcgttttcatctagcacctccaacaattctgacattctctagtttaggaaatcctgt

SEQ ID NO: 787933 - DNA, 575 bp, Homo sapiens
gtgtgatttggaagtgcccagcacaatgacgggaggtcatagggtttcatctgtatttattgaataaccaaggaaaacatcattgtaacagaataattgatacatattatttgtcaagctgtgacatagtagaggcatattttaggtaagcaccttctatartgtaaaaggaatgcagttattactttaagatggccagagtaactaaagccagtccctgttcacatcgttgcttgctgctgtgatttaagacattgtgtactgtgtgagatgccttactgcaccccttctctttctaatgtctgtagcagatttgaattatacaataaattttgccaaattgtccttgtctctcccacctatggctgtactttcatgttcgccggctttaaaacatgaatgatgagaggaaaactgtggtgccaagtatctgcctccatttgtcagcgtttacattttccgttaattactgatgttgtgcagtcagtaatatacagcaccggaaagaaacacaagcttcatagaatagagcatcttttttttttcctgtgtgttttcctatagatttgctaaac

SEQ ID NO: 787934 - DNA, 570 bp, Homo sapiens
tattctgcacaatgcctagcacacagcagaggctcagtgggatgatttgtataaaaggccacaggaggctggtggttcctgagcagctgcttgagtaatatcaccaaagataggcagattgattcatgtaggctgagcttttgaagtggaagagtttgtctgggattctaaccacagggaacggagagaatggaatggatgaggaaatgggttgctggccagagagtttgagccatcaacaggaaccacctaaatagctcctgaatgtgcttctattacctctctatwaccactgcccccaactttttcaggtattcctcgtttcttgcctgaatttactaataacctcaaattggtctctctaggttccttatagtattcttttccaccatagtctcctcttatccatcttcgatatgacctccagcctgaactttctaaaaacaaatccagtatttgtttgcttaaaatcctttcagtgcttaaaatcctttcagtggtcacacacacgcttgcacacacacacacacacacacacacacacataggcaaatgcacatacacattgct

SEQ ID NO: 787935 - DNA, 645 bp, Homo sapiens
cagagacatttggaggaagacaatgttaagatggaggtaaagattagagtgatgtgtctacaagccaagaacaccaagaactgctagcagccattagatgatgggagagagagtcatggcatgaattcccccctagagcctccaggaggaaccaacacttacaatgcttgaatttgaacttctgacctcagaactgtgagagaatacatttctgatcataagccactcagtttggggtaatttgttatagctgagagacctaggaaattaatgcaatggtatctatctttccattcttttatagattctgcattcctatatttcaatcgtgtcagataaagagaataaactgggtatctttttatctaatttaacactctttctttgagagtcgcaagttcggttcatttaartctatttttattgctgatatactttaaaatatttctattgtcccattttgtgttttctatttgtcctactcttttatgcttttctcttcctttctttttgtcttttgattgattctattttttaaccttttaatttcaaaattttgaaagttattcattctattcttactcctttaggaataaactttaataagctaatattcatatataactaaaaattaatcaatatctc

SEQ ID NO: 787936 - DNA, 532 bp, Homo sapiens
gcccttttcatctgtatcctttgtgatatccttttaagtaaactggtaatcattttcccctgagttctgtgagtcactgtggcaaattaatggaacccaaacaggtatttgtgggaatcccaacttatagtcagtaggtcagaagcacaaaacaacctggggcttgccattggcattgcaagtcgggagcagtcatgtgggactgagccctcaacctgtgggaactgacgctatctccaggtagattacgtccgatctggtgtctgccacagaattgactggttggttgttggtgagaagaaatcccacacacttcttggtggccagaggtaacagaagtctaatgtgttgatgcttgtggtgtgagartagaggaaaaaaacaaacttttttcttcacagaggtgcatggactaaaatcagaccctaggctctacacctattctgctgttcgccaccatgtgatcttgggggatttacctaatttctctgtgcctctagttttcttgtttctcacatggggttaacaatag

SEQ ID NO: 787937 - DNA, 562 bp, Homo sapiens
gacatgcagcagctctgcctgttgaggcacctgggcagtttgttctcaggtcctgggagtgtgcctgctggcttccctgctcttggggaggcctccctgctgtgctgtactgcttgttccttgaggtatagagcactgtgtgggctcaggtgctggggttacagctgtaccactgggtccagttgtggatgtggcattgctgcytattgtatgagtgtgatgggaagagggaagtgctccagagaagtggagatgcagaggctcttgggtcccagggaaggatgcactgtagcagtgactttgttctcaaagtaataccatgctctagcagcttgggtcccagggagttgggggatgacatagcattagtttcttctctggattaatgcagccatgtgactccaggcagctctttataggctcagagcttgtgagagttatgacactctcctgtagctaggactgcaggcatccatggtagtaatggacactgctggggatatcctgggaatcttttccccacaatggagagtcacttctgactccaggccaatcccttcca

SEQ ID NO: 787938 - DNA, 525 bp, Homo sapiens
aagaatacaaaatacatagagagagcaaaagtctataggaagatagctgaatgcctcaatttttcctctttctaaacatgtaccttttcagctttttatcaggttagtttaatcaactttaaaatattattttaagtattttttcaaactttttaatcaaaataattaacactatatattagaacaatataaactgctatatataaaactatatataaattactatataaatatgaaactatatataaactataaaataaggcaatatataaagactatataaatttatttwtatatacataaatgcatatgcatatataatatgtaaatttatgtgtatatctgtatttatatacatatataaatttacatgttatacgatttacatattacacatgtttatatacaagtatacttatatatgtatatatacatatataaattatgtatgctgtgtaagtatatatatagatatatacttatcagcatattatgcttatatggcatattatgtatgccgtataa

SEQ ID NO: 787939 - DNA, 598 bp, Homo sapiens
tctcttttttacaataaatccagcattataaggcaaaagtaatcaggactgaagttatattcatctgtatttcagggaaaaagcaaactggtattactccctcttcacagcatgagaaggtggctaccactacactgtagacccaaaccyctctccatgcaggactgagggaggacatgaatcagggagactgcttttcctagaagttaaatgaagacaaacataactctccttaattaaacccagaagaaaacattattctcttattgataattggataaacttctttcagagaactgcctttcttccttcataatttcattaagaacgtgcactgctttttagaaaaataagcccaacaaatactatttttacatgacggcttctttgtttttctcctttaatctttatatgttcaacttttcccatcattgattttattcttttcatttcttctcatttttctcattttcttcagtgcacaagtcttccatcttcaaaatcacctctacacaatccctcaatcatgcaaatgccctcatttttaagctacatttagctctctcaacaccccttttttcctggtaaacaaataaat

SEQ ID NO: 787940 - DNA, 569 bp, Homo sapiens
tatataatataaaaagttacatgtttgtgtgtttatatatgttgcatatgttatatatattcaaattatcattgtatctgatacaagtaaacatattaatttgaacctaactctattcaagtttgtaactctctaaatactggtaaggatgatttatctttatkttatgtttatatattggttgctaagcaaacgccataaagactttaaaagaacagattacttttaaatgtaaacatccatttatatttgaaaaaagacataagctttaattgacaagctttgtaagcctaattgtgtcattaaaaactcagtagaaataaaggtatcatatgtactttattcatttatgaatttatagtctccttgtctctatttgttcgaattagtaattctttataatacctagtggtgatatatttctataaactactctggcttagatttctataaatgtaaatataattctgctctctctctctttttttttttttttttgagacagagtcacgctcttgtcgcccaggctggagtgcgatggcgtgatctcacctcactgcaacctcccc

SEQ ID NO: 787941 - DNA, 569 bp, Homo sapiens
tatataatataaaaagttacatgtttgtgtgtttatatatgttgcatatgttatatatattcaaattatcattgtatctgatacaagtaaacatattaatttgaacctaactctattcaagtttgtaactctctaaatactggtaaggatgatttatctttatgttatgtttatatattggttgctaagcaaacgccataaagactttaaaagaacagattacttttaaatgtaaacatccatttatatttgaaaaaagacataagctttaattgacaagctttgtaagcctaattgtgtcattaaaaactcagtagaaataaaggtatcatatgtactttattcatttatgaatttatagtctccttgtctctatttgttygaattagtaattctttataatacctagtggtgatatatttctataaactactctggcttagatttctataaatgtaaatataattctgctctctctctctttttttttttttttttgagacagagtcacgctcttgtcgcccaggctggagtgcgatggcgtgatctcacctcactgcaacctcccc

SEQ ID NO: 787942 - DNA, 547 bp, Homo sapiens
ggtagctgggcaaaacaccctgagcagccactgaagctgccttgtgatgcaagctagaagtgacagggagttgaaccccccatggagcaaactctgatcaatgggaaagggataagagggaatcaggtagatatagtcccctccctgcatccctggactgctgcaaggtacagtttctccctttgacctctctggagaagttcctggtagaccggctgaatgacttsgccattctggaagcaggagccaaggtggtaatgtttcccatcccactgatttcccatctgtctttgcgtagtttcccttcttactcattctggctcccctaggtttgcacctgtcatatacaactcagattttaaaatccctgttcacttcaatctctactttccaggtaacccagtccaagacaatattaatagtgttattatcatcacttgaactagccaaattgggcatccgttacttgaaaccaagggagtcaggataaagcaatgaggcagagtgtgcactgtcacgccgagctccatactgataaacaggtgag

SEQ ID NO: 787943 - DNA, 538 bp, Homo sapiens
gctaatggctaccatttactatatcagatagtatagaatatataatggcaacatattataaattgtgacattatcattaataccacattttaatctagcagtagctagctttataaaaatgtatacaatttgtaggtgacaatattcctttttatgtaaaatatttcagtatcatatgaacatattattttcactctaaagactactaaagtttaactgacttcagagtaaattgtytgagggcatgggtttcttttatccgaaaactgggaggcagtatgaacatattcctttcaataaattacttaaaaatcttggatttaaggccagatgtggtggcttatgcctataatcccagcactttgggaggctgaggtgggagaataacttgagcctaggagtttgagaccagcctgggcaatatagcaagaccccacctgtacaaaaaataacaataaaaaattagctgggtgtggaggtgcgcacatgtagtcccagctccttgggaaggctgaggtgtgaggatcatttgagcctg

SEQ ID NO: 787944 - DNA, 610 bp, Homo sapiens; identical to SEQ ID NO: 785418

SEQ ID NO: 787945 - DNA, 600 bp, Homo sapiens
acttgtaagcaatatataaatgaaactttccgtggtatccagaatactctcagaagagagcctgctacatttgaacttgctcttaaatacaaattttcttcatgagttagaagtcacttggtagctagttagtttgaacagtggttctcactattttagggtaataaaacagttctcccstctgtgttgaggttgccatgggcaagaaacaaacccattaaaacacgtttactacctgggatgagaaaaatgaatctggaacctcatttgggagttacttggttaggtctttgacatcccagaagaaagatcctaaaatgactcatttcacatttcatatattattcagaaatacttaagccttaactagttcatttcattcacaaaaaaacaatccaagaaaagtgaaagttaactgacactgaaatcccacttagaagacaggctaagagataaataatcaaacatattaccatcaccacaggcaggatccttccttttctccattaacaatgccacctgtttattttacaaatagaaattgctgtaagcagtttgggctcttttaatatattcaagtgctccatttcagctagttga

SEQ ID NO: 787946 - DNA, 600 bp, Homo sapiens
acttgtaagcaatatataaatgaaactttccgtggtatccagaatactctcagaagagagcctgctacatttgaacttgctcttaaatacaaattttcttcatgagttagaagtcacttggtagctagttagtttgaacagtggttctcactattttagggtaataaaacagttctcccctctgtgttgaggttgccatgggcaagaaacaaacccattaaaacacgtttactacctgggatgagaaaaatgaatctggaacctcatttgggagttacttggttaggtctttgacatcccagaagaaagatcytaaaatgactcatttcacatttcatatattattcagaaatacttaagccttaactagttcatttcattcacaaaaaaacaatccaagaaaagtgaaagttaactgacactgaaatcccacttagaagacaggctaagagataaataatcaaacatattaccatcaccacaggcaggatccttccttttctccattaacaatgccacctgtttattttacaaatagaaattgctgtaagcagtttgggctcttttaatatattcaagtgctccatttcagctagttga

SEQ ID NO: 787947 - DNA, 657 bp, Homo sapiens
ttgtaaaactgcttggcaggatccattagtgctgaacatatgtataccttaagtcccagaaattccactcttagaaaaacaccgaagatcaggtgaaatagaatcaacaagtagctcatagtacagtctgagcatccctaatctcaaaatctgaaacgttccaaaatttgaaactttttgaacactgacatgacgctcaaaggaaatgctaattggagcatttcacgtttcagattttcagattaggaatgctgaacaagtaagtatcatataaatatttcaaaatctgaaaaaaaaaaaaatcggaaacactcctgatcccaagcatttcagataagggatactcaacctgtagtactgttccaaacagccagacactacccaaatgtccacaacagcaaaactgataattaaatcatggtctattcacacagtgatttatggctayaagtagcaatctggatgagtctcatgttgttgagtgaaagaagccaggcacagagaataaatatggtatgactccctttatataaagtttctaaatggtcaaaattaacctagtgttgttaccagtcaggatagggttgcctttggaacatgctgaggacttggaagggctaagggtgacttttggggggttaataatgttctgcttgt

SEQ ID NO: 787948 - DNA, 602 bp, Homo sapiens
gtttgtgtaagtacactctatgacgttcacacaatggcaaaattgcctaacgatgcatttctcataacgtatccccaacattaaatgatgtaggactgtatttgattattttgtttctacaaatattattctcttcagtccttttttaaaggataatggtagtttattaaggtctaaatacctccagaaagaatgctaaaggcaaatatcagcaaagatgtctagcagggcttcaatgcatcctcaagcagtgttactcttaaaagcagaaaagagtagaatgcatttggttctgtttaaaaatcagatccagagggcatttcctaactgcagtctaatmttttagagctgctataaggtcaaatattgggcccaaatccatagctatgtggcataaacccttgtaaatgacaagatgaaatttgtaaagaaacaagatgaaacagtaaagaaacttcaacttagttacaattctatttctttttcatgttaaaaacaaaaatccctgacttctttctactcaatatcatttacagtctgaccagtgcttctccaccatctctctccccaacttcatcccatatggaagatggaattggcac

SEQ ID NO: 787949 - DNA, 573 bp, Homo sapiens
aataactcttctttttcttttttttcttttttttttttttttgagtcagagtcttgctctgtcgcccaggctggagtgcaatggcacagtttcagctcactgcaagctccgcctcccaggttcatgccattctcctgcctcagcctcccgagtagctgggactacaggcgcccaccacaatgtccggctaattttttttgtatttttagtagagacggggtttcacgtgttagccaggatggtcttgatctcctgacctcgtgatccacccccgtcggcctcccaaaatgctgggtattgataataactcttttgaccaattgccaatcagaaaatttttaaaccttcctataacctggaagcctccctgccygcccaacttgcttcaagttgtcctgcctttctggaccaaaccaatgtatttcttaaatgtatttgattgatgtctcatgtctccctaaaatgtataaaaccaagctccatgaaaaccctaaaccacagggttcagagagcttctggactggtgaggccatggcagtgctgggaggtggcgcacctggagggggcatggaa

SEQ ID NO: 787950 - DNA, 629 bp, Homo sapiens
tttgagaggcttgaatctgaaaattctttcttttttgtgtgtttgttttgttttgtttttttgagatggagtctcactctgttgcccaggctggagtgcagtggtgcgatcttggctcactgcaatctctgcctcccgggttcaagcgattctcatgcctcatcccgagtagctgagattacaggtgcccgccaccatgcccagctaattattttgtatttttagtagagacggggtttcaccatgttggccaggctagttttgaactcctgaactcaggtgatccgcccgcttcaacctcccaaagtgctgggattacaggcgtgagccaccgcgcctgcccttgaatctgaaaattatttctatctcactcttgaaacagatcccaacatgccactaactcgatgtagcctaggaaggcagggattgctgcttcataggcttcctgaatccagcttctaaasaatgagtcttacctccacaaaaaagcctgcagatgtgagtttatgtttatcattccctcggttaagaagagggactaataagtacatgaccttctgtgcaaggagctgatttctttccagcaatgcgctgcaaaacacaacaccaacagaatgactctcaggaat

SEQ ID NO: 787951 - DNA, 639 bp, Homo sapiens
aggatccactgtacatacaatgaaatattatccagccttggccaggcgcggtggctcacgcctgtaatcccagcactttgggaggccgaggcgggctgatcacgaggtcaggagatcgagaccatcctggctaacacggtgaaaccccgtctctactaaaaatacaaaaaattagctgggcgtggtggcgggcgcctgtagtcccagctactcgggaggctgaggcaggagaatggcgtgaccctggtaggcagagttcgcagtgagccgagatcrtgcccctacactccagcctgggcgatagagtgagattccgtcaaaaaaaaaaaaaaaagaaatattatcttgcctatatttctgtaaaataaatgatacatgctacaacgtgaatagaccttgaaaacactgttaagtgaaatcagccagacacaaaataacaaatattgtataattccactcatggaatttctacagtagacacatttgtagaagcagaaagtgattagaggttaccagggactctcagtgtatgtgtgtgtggtagcaggggagttactgcttaatggatatagagtttctatgtaaggtgataaagaatttcagaaatagtggtgatgattgcacaacattttgagtgta

SEQ ID NO: 787952 - DNA, 639 bp, Homo sapiens
aggatccactgtacatacaatgaaatattatccagccttggccaggcgcggtggctcacgcctgtaatcccagcactttgggaggccgaggcgggctgatcacgaggtcaggagatcgagaccatcctggctaacacggtgaaaccccgtctctactaaaaatacaaaaaattagctgggcgtggtggcgggcgcctgtagtcccagctactcgggaggctgaggcaggagaatggcgtgaccctggtaggcagagttcgcagtgagccgagatcgtgcccctacactccagcctgggcgatagagtgagattccgtcaaaaaaaaaaaaaaaagaaatattatcttgcctatatttctgtaaaataaatgatacatgctacaacgtgaatagaccttgaaaacactgttaagtgaaatcagccagacacaaaataacaaatattgtataattccactcatggaatttctayagtagacacatttgtagaagcagaaagtgattagaggttaccagggactctcagtgtatgtgtgtgtggtagcaggggagttactgcttaatggatatagagtttctatgtaaggtgataaagaatttcagaaatagtggtgatgattgcacaacattttgagtgta

SEQ ID NO: 787953 - DNA, 532 bp, Homo sapiens
atttgtctccccctaaaatgcatatgttgaaatctttttttgagatggagtttccctttgttgtccaggctggagtgcagtggcacaatcctggctcactgcaacctcagcctcccaggttaaaaagattcttcctgccttagcctcctgagtagctgggactacaggkgcatgctaccacgctcagctaatttttgtatttttagtagagacagggtttcaccatgttggtcaggctggtctcaaatgcctgacctcaagtgatccacctgcctcagcctcccaaagtgctgggattacaggtgtgagccactgtgcccagccatatgttgaaatcttaacccccaatgtgatggtattaggaagcagggctttggggaggaaattggataataatagtagaggcctcatgtatgggattagtactcttataaaagaaaccccacagagctttctcaccttctttcccccatgtgaggatacagtaaaaagatagtagcctgcaacccagaagaggatcctacaaagaaac

SEQ ID NO: 787954 - DNA, 532 bp, Homo sapiens
atttgtctccccctaaaatgcatatgttgaaatctttttttgagatggagtttccctttgttgtccaggctggagtgcagtggcacaatcctggctcactgcaacctcagcctcccaggttaaaaagattcttcctgccttagcctcctgagtagctgggactacaggtgcatgctaccacgctcagctaatttttgtatttttagtagagacagggtttcaccatgttggtcaggctggtctcraatgcctgacctcaagtgatccacctgcctcagcctcccaaagtgctgggattacaggtgtgagccactgtgcccagccatatgttgaaatcttaacccccaatgtgatggtattaggaagcagggctttggggaggaaattggataataatagtagaggcctcatgtatgggattagtactcttataaaagaaaccccacagagctttctcaccttctttcccccatgtgaggatacagtaaaaagatagtagcctgcaacccagaagaggatcctacaaagaaac

SEQ ID NO: 787955 - DNA, 635 bp, Homo sapiens
ccgccaagcccacacccacccggaactccagctggcctgcaagcgccacacacagccccggttcccgctggcgcctctccctccacacctccctgcaagctgagggagtgggctccagccttggccagcccagtaagggactcccacagtgcagtggtgggctgaagggctcctcaaatgcygccaaagtgggagcccaggcagcggaggtgccaagagcaagcgagggctctgaggactgccagcacgctgtcacctctcaatcccccctctaaacaggacaccccaactgctgttgggaatttggccgatgacagctctagctacttcctgctggataggggcgaagaaggggccctgcagttgtggtgtccttcagaggggaactctctaggccaggggaagtgccagcgggtcagtccaggggtcctcggtagaagttgttagttgaactcatttggggttccatttgtaagaccatctgtagcttgatggcctcaattctagaggaaacaaatttgacaagaaggttaaaaatacagggcccaaaggcgagtaacagcaagatggctgccacatgacctagaaagaggggaagccatgttgcccaactccagaggttggtataagaattt

SEQ ID NO: 787956 - DNA, 635 bp, Homo sapiens
ccgccaagcccacacccacccggaactccagctggcctgcaagcgccacacacagccccggttcccgctggcgcctctccctccacacctccctgcaagctgagggagtgggctccagccttggccagcccagtaagggactcccacagtgcagtggtgggctgaagggctcctcaaatgctgccaaagtgggagcccaggcagcggaggtgccaagagcaagygagggctctgaggactgccagcacgctgtcacctctcaatcccccctctaaacaggacaccccaactgctgttgggaatttggccgatgacagctctagctacttcctgctggataggggcgaagaaggggccctgcagttgtggtgtccttcagaggggaactctctaggccaggggaagtgccagcgggtcagtccaggggtcctcggtagaagttgttagttgaactcatttggggttccatttgtaagaccatctgtagcttgatggcctcaattctagaggaaacaaatttgacaagaaggttaaaaatacagggcccaaaggcgagtaacagcaagatggctgccacatgacctagaaagaggggaagccatgttgcccaactccagaggttggtataagaattt

SEQ ID NO: 787957 - DNA, 557 bp, Homo sapiens
tcattgctcttggcctgtagtaagaaagaaagaggataggacttgagttagagtactgagtgattgcttatatttggaggccaaaaggaaaaagagggcaagcaggaagcccacatttaagagattgaggtgcaaagtcccggccttgctgcagcctcyctgttgccgctgtcagcacaagatccatctcagccaagaactgtgcagccttccgtgctgaccactacacggttagagatggaaaaccaggagttgtgttggcttggcaaagcctctctggttatgttttggttttcaatttaccacatatggtctcaaaaagtgcttccagttaaaattttgtcactccatttatagaagagtttaatttaaaataccgtgttccatagaagtctttcacccttctacggcaggcgaaactaactggtttatgtgtggggaaatgtcatttgaaagtttaatcactgcagaggcaaaatcattccttaaatagacaaatagccactaataagtagcttcaccttgtgaataggaccccatataaattagcaaatgaa

SEQ ID NO: 787958 - DNA, 619 bp, Homo sapiens
gctgtgtcctcatatgacagaagagtgaatgagaggaatgctttgcgatgtcccattcccaagggctttaatctcattcaccagggaggagtcctcatgacctaatcacctcttgaaagccctacctcttgaggcttgctgctcrggctcagagcagtcttggctgccccagctgtggcacagataggtgaaggtgtgacttgggccatcactctagaaggtataagtgatgagtgttggtggtgtccacatggtactaacttcacaggcttgtagggtagaggtgctttagaggtatggcttcctccacctagatttcaaaggatgttgacagcctcagggctcaggcagagacttgcctcaggagcgggccactgcagaaagacccctactaaggcaatgcttagtggaaccataggggcagggtcacccccaacaccccataagtgtatgtagagctaccagcatgcgataccagcttgggattgctgcaggcacctgactccaaccagtgagagctgctgcgtgggctgtgcccagcaaagctgtgagggggctgtgagggctgtctaaggccttaagggcccaacctctgccccagtgtgtctggaaggcagta

SEQ ID NO: 787959 - DNA, 596 bp, Homo sapiens
tgatgggaggattgctgtgtcctcatatgacagaagagtgaatgagaggaatgctttgcgatgtcccattcccaagggctttaatctcattcaccagggaggagtcctcatgacctaatcacctcttgaaagccctacctcttgaggcttgctgctcaggctcagagcagtcttggctgccccagctgtggcacagataggtgaaggtgtgacttgggccatcactctagaaggtataagtgatgagtgttggtggtgtccacatggtactaacttcacaggcttgtagggtagaggtgctttagaggtatggcttcctccacctagatttcaaaggatgttgacagcctcagggctcaggcagagacttgcctcaggagcgggccactgcagmaagacccctactaaggcaatgcttagtggaaccataggggcagggtcacccccaacaccccataagtgtatgtagagctaccagcatgcgataccagcttgggattgctgcaggcacctgactccaaccagtgagagctgctgcgtgggctgtgcccagcaaagctgtgagggggctgtgagggctgtctaaggccttaagg

SEQ ID NO: 787960 - DNA, 628 bp, Homo sapiens
tgtagcaattttttttttgccttgctggaatattaataataccatgaagaaaacttcatctaggccgggcgtggtggctcacacctgtaatcccagcactttgggaggccgaggcgggcagatcacgaggtcaggagatcgagaccatcctggctaacacggtgaaaccccgtctctactaaaaatacaaaaaattagccaggcgtggtggcgggcgcctgtagtcccagctacttgggaggctgaggcaggagaatggcgtgaacccgggaagcggagcttgcagtgagccgagatagcaccactgcactccaacctgggcgacagagcgagactcygtctcaaaaaaaaaaaaaaaaagaaagaaaacttcatctagcagggaccagaaaagcaagtcattcaaggcggtggcttggtgtcttaattagatactaccttggtgcttgctttctcttcgtttgcactgacggtatctaaatgacagtgttctgggatttctggatcagacacaaaatgtcttctgctcaaatcttccatgaaatgtaattttgaaaccatgagcttggttcttactcaagcagaactcttagcgtatttactgggacttcagctgaattggaatgga

SEQ ID NO: 787961 - DNA, 653 bp, Homo sapiens
tctaggtaaccgaggtgatctctttcttcaattttttttcttttttaagacggagttttgttcctgttgcccaggctggcatgcaatggccagatcttggctcactgcaagctctgcttccctggttcaagtgattctcctgcctcagcctcccaagtagctggtattacaggagcctgccaccataccggctactttttgtatttttagtagagacggggtttcagcacattggccaggctggtcttgaactcctgacattaggtgatctgcccgccctggcctcccaaagtcctgggattacaggcatgagccactgcccccrgcctgttgctcagattttatgaaagagaattaatagacaatgaacctaaaataacccattattctacttatatttgcatatttctgatgtcttctataataaaacttgagtagataaaagttacagagctagagatgtgagtgctgttttttaaaaaattgtatctatttcattggcatggaatctaacttattctctgagattgaaacagttaactcgtgatgggctcatgatgcatctagttctgcgtgtattttctggttattgttagtagactgttggaagtggacctagatttgctcaggatatgaagcaggcatgattcatc

SEQ ID NO: 787962 - DNA, 617 bp, Homo sapiens
ttcaccatgttacccaggctggtctggcactccttggctcaagcaatagcagtctgcctgctgcagctctccaagtgctgggattacaggtatgagctaccaagccaggccatgactttttttttttaacccaaacaactccagtagttctctcattgtagactatttcattttagaaataaggaaaaccaagagaaatttaaaggtttttttttttttttttttgagacagagtttcactcttgtcacccaggctggagtgcagtggcacaatctcggctcaccgcaacctcctcctcctgggttccagcgattctcctgcctcagcctcctgagtagctgggattacaggtgcccactaccatggctggctaatttttgtaattttagtagagatagggtttcgccatgttggccaggctagtcttgaactcctgacctcagatgatccacccacctkggcctcccaaagtgctgggattacagtgtgtgccaccatatctggccaaggttcttaattattggtgttagtgaatatgaagtatacatcttaaaatttatagttcagtattctatttttctcagagaagtggtagagaagcattacagaagtactt

SEQ ID NO: 787963 - DNA, 586 bp, Homo sapiens
aagtataattagaaaaaccctccaggaggaaagtggcagctatttttatttgcctgggtatagactccttcccaccctctgtctgactttctggatcctcatggatggtcacctgctgtcttcttcccagggagaggtcattcctgattcttcccatctgatataggacttattttgtaaacagtgacttaaatagtcatttacagttaaactgacctgtttacagtttaaaaacccttctaccaatttcacttagcaactgatctgtttcagtatccttggaacagaaagatcatgcagttttgtttggttttattgcaaactcttactagcacctagcaccactaargacaggtttctgtctccagccctgctgtacttatgactgagacgatcttgcctcgattttttttggcccaccttaaatgggattaagaaattttttgttaatttaaagccgcaaattttgaaatacaaagtaatttggatcagagcaagaaaaaagcttatatctcatgctcatgctcttgaatttataaaaataaaatatttattatgttgctgattacaaaattaatactcatgc

SEQ ID NO: 787964 - DNA, 559 bp, Homo sapiens
aagtataattagaaaaaccctccaggaggaaagtggcagctatttttatttgcctgggtatagactccttcccaccctctgtctgactttctggatcctcatggatggtcacctgctgtcttcttcccagggagaggtcattcctgattcttcccatctgatataggacttattttgtaaacagtgacttaaatagtcatttacagttaaactgacctgtttacagtttaaaaacccttctaccaatttcacttagcaactgatctgtttcagtatccttggaacagaaagatcatgcagttttgtttggttttattgcaaactcttactagcacctagcaccactaaggacaggtttctgtctccagccctgctgtacttatgactgaracgatcttgcctcgattttttttggcccaccttaaatgggattaagaaattttttgttaatttaaagccgcaaattttgaaatacaaagtaatttggatcagagcaagaaaaaagcttatatctcatgctcatgctcttgaatttataaaaataaaatatttattatgt

SEQ ID NO: 787965 - DNA, 513 bp, Homo sapiens
ttaggctttattgaggaggtgacattttagcaaagatctgaaagaaactaatgatggtagcgatggaaacaggcataaatgtgccagaccaaggaggcacatcataaagaaatcattgtaaaaggagagaggatgggtacatcaaagtctcagaaatcacacctaaacaacttatccatgtaaccaaacaccacttgttccccaaaaactactggaaaaaaaaaagactaccttaaaaaaaaattgaggccaggctcatgcctataatcccagcattttgagaggctgaggtaggaggatcatttgagaccaggagtttgagaccagcctgggcaacaaaacaggacyccatctctacaaaaataaaagtaaaaaaattagttgagtgtggtggtgcacgcctgtcttcgcagctactcagaaggctgaagcaggaggattgcttgaacccagaaggttgaggctataatgagccatgactgtgccattgcactccagcctgggcaacagagc

SEQ ID NO: 787966 - DNA, 628 bp, Homo sapiens
aaaaatagaaagcatattgcttcctgatgtagggatactcaacatagtaaagatgtcagaactccctaaaataagctgtacattcatgcctttctgatttaaacaccaacatttatagatatatacgtacatgtgtatgtatgcatacatatttttagaacttgaacaaatgatactagagtttatctggaggaacaaccatgtagaaataatgagagagagagagagagagagagagagagagagaaaacagtaatgacagaggtagctatctaatggtctaaccaaacaygcagaatattaaaatgcaaaaggaagataataacaaaacagtttggaacttaagggaaaaatagatatatacaaaaaagggtccaaaatgaatatacctatacacaaatttgggtaacattttaaatgagtgggagaaagatcaattagtcaattgggatatttgaatattgggataatttagataactctctgtgaaaaaaaaaaaagctggactcctacctcacttcttataccgataactattctagctagatcaaagatgtaagtattaaagaaaaaaatggaagaaagaaagaaaaaatcgaagagtataggaaggaaacaagagtagatt

SEQ ID NO: 787967 - DNA, 527 bp, Homo sapiens
tgtggatatgcacattcacgcactgtagaccaaggcagagaaaactaggacttaagagtgcagccaacagtgggctgcacctggcgtgttctgggattctggtggcagagaaggaataccggcttcttgggagcaaatcctgacatacaagtgtgggaaatgcggcaaaatgaaacttgttgagcgctgttgacaagacaatttttctgggaactagtgcagtcattcagtgagccggccagacagagcagagttcatttcagatgtttctattgtcccagacatgggagttctacttgtcaccatttggtgtcagtattttctatcctaaaagtcctctgggttwtaaagcaaaggccctgttggagaaagtctggagtattttactgtgaataactaactttatttcagaaaattttaatattccttttagccttcactgctttgttttctgctttgtaattgtttttctttgtgcagaaaaaaggcagcattctctttatctgcaaaggcaaacatcagaatta

SEQ ID NO: 787968 - DNA, 602 bp, Homo sapiens
tatttggaaaaagaagaaataaaagtgcattgatctgaaaatttaattcaacaaatagctgtgtgggagagtggaaacaacacaggctcttaagttagaaaacctgacttcacttctcatattgactaattgtggggaagtcatgcaactgctgtgtgcctcagctttcgcctctgtaaaaatggacctaataatggcatctatgccataatatgctgtgcagttaaagtgcattggtgctttataaactgtacaggactacaggcacatgagctgttatctgaatttttacaaggtggtacrgcattgccagttaacttatacaacacaattctatatttgtgaatgtttcaccattcttgaaatcctttcagcttctttgaagatgattagcttctttctccttgctggggagtattctgggtttgctatttttagtttgcttaaatgtgttttctgacagcttctgagtggcagtggggggttggtaggaaaggaagaggtgaccgggaagttagaatcatccactgggtttcgagggagagggagctgaggccgcacctggaagaatgatctggaaggaggtagaaaataggaaacca

SEQ ID NO: 787969 - DNA, 614 bp, Homo sapiens
gtcactccttctgatggggtcaccctgatactgatttatcggggacacagtttatgtactatcttcacagcatgcttttaaaatttttgttcatctgggcttgctttgaaagagactagaaacctcatcgtggagatctctttgggtcgctggactcaaagtaaaaccaagctgtgcmggaggttttgatctttgaactttccctatggttgcaggcttgccttaatctgtaataataaagttttaaaaataagttaacctcttttcttatatggtgcaaatatatctttctccactaaagtttcagtgttgcttttcttttgtggcccctgccatttctttcaccttttcttttaaacagatacatgttcactaaaaaaaaacgactctgttgctttaagaagaaaaaagttacactcggtcagtctgaaaatgcaacacctggcgcccatatttagaaatgttaaaacacacacacatacatacacacacacattagcctttggcactgaactgtgcaaaacattacaggaagctcattgcttaagggcagttgagtttaatcatttatttgtaagtcagttgtttggtacttaaaagcactttttcccata

SEQ ID NO: 787970 - DNA, 631 bp, Homo sapiens
ccccaggagcatggatatttgacaacttctgccatttgtttcatcacatacttgaaaacaagcaaggcttccttaaagagccttgcttccaccagtatttatatgtgtttcccttctagcaatggggacaagtaggcccaaagtgtgccaggtgtgctgactagggacaggaggaagcccttttgagttgtaaaatgtgtcacggtacatccacagggtgaataatgaagacattgcctgaatttcctaattcttttctccttgtagccaaattttattccaattcttacctgggaagcaatcaagttaggttctgtttggtagttgttaacagaaagtttarcaaagggataaactttaggctttatagcctaaactttggcagattgtcttgtataatgtatattctatagactttttgttcttttacaatatatgttctttttccatacagacgtcctctcctgtcacaggtgggaaagaaacggtaactatatcacttaaatttataaaatggggataataataatgctccatccatcttgagcatttgttttgagctttaaagtttgataggtgaactgtcactaagcacagaatctggctcaagaattattcttgaccagctccg

SEQ ID NO: 787971 - DNA, 608 bp, Homo sapiens
ttttacatgtaaagatgtgttgacaagctgtaaattttaaacacatcaagaagtattgtggttagtggtggtattgtttaagtaatagtttctcaacctccagtgcactttaaaattatttaggaagctcaaaatttccaatcaccaaagccaattaaatcagaatttctggatgacaaagctgtggcactgatcttgaaaaaacaaaaacaattttttaattataatttcaaacatatactaaagtagagaggatagtataatgaacccaattattaacycatggccaatattgtttcatctctactctcaccctggattatttttgataactcacaatgatatttcttggcttaggtatgggtttggtttggtttgaggggtgatgttattagatgcctctgtgcttgttttgtttgttttaatgtacactcagatttaaaaagcactgattttaatcatagttacggtcaaatgctataacccttcacttcttcttctttctttcttttattattatattttttccaatttaggaaagtgacagaccatgtgaaatttcagaaattgatgacaatcccaagatatctgaggtaagaactcttggt

SEQ ID NO: 787972 - DNA, 605 bp, Homo sapiens
agtaagaagcagtgcaggagcttgcaaccaggtctgggatgaactcaacttgtgctctttcagaaaaattttatagcttgattttatttttaattaacatataataattgtatgcatttgtgggttataatatgatattttgatacatctatatacattgcagaatgataaaatcagactaattagcatgtccatcacctcaaacwtctaccatttctttgtggtaagaacattaaaaatcctctcttttagctactttgaaatatacacttttattaactatagtcaccatactgtgcaatagaacagagtttattccacctgtctgactggaactttgtacttgttgacccttttccctgtccattttctgtcctcatcccccagcctctgctaaccaccattctacattctattctgtacttctacgagtttgactgttttagattctacatatacagaaacgagatcatacagtatttgtctctctgtgcctgacttattccacttaacataatgtcctctaggttcaaccatgttgtctcaaatgacagaatgtcctgttttcgaaaggctgtgtcatactccactgtgcatatactaca

SEQ ID NO: 787973 - DNA, 644 bp, Homo sapiens
tgaatctttccttaacattccatctagcatatatagttactgaacaaccaaactatatattaacagttcatttcctaaattcaaaaatagacaattttctttttctttttctttttttttttgagaccaagtctcgctctgatgccaaggctggagtgctgtgatgtgatctcagctcactgcaacctccgcctcccgggttcaagcaattctctgcctcagcctcccgagtagatgggattacaggcacccgccaccacatctggctaatttttgtatttttattagagacaaggtttcaccattttggccaggttggtcttgaactcctgacctcgtgatccacccrcctctttcagtctatacattttgggatgcctctagcaataaaaattattctccttgcagtagaatgaggttatcagaggctggggaaggtaggagggagggaagatgaagagagactggttaacaggtataaaaatacagttagaagaaataagttctagtattcaacagcacagtagggtgactatagttaataatttactgtatatttcaaaatagctagaagagaagatttggaaagttcccaacacaaagaaacgataaatatttgaggtgacgggcatcctgattaccct

SEQ ID NO: 787974 - DNA, 644 bp, Homo sapiens
tgaatctttccttaacattccatctagcatatatagttactgaacaaccaaactatatattaacagttcatttcctaaattcaaaaatagacaattttctttttctttttctttttttttttgagaccaagtctcgctctgatgccaaggctggagtgctgtgatgtgatctcagctcactgcaacctccgcctcccgggttcaagcaattctctgcctcagcctcccgagtagatgggattacaggcacccgccaccacatctggctaatttttgtatttttattagagacaaggtttcaccattttggccaggttggtcttgaactcctgacctcgtgatccacccgcctctttcagtctatacattttgggatgcctctagcaataaaaattattctccttgcagtagaatgaggttatyagaggctggggaaggtaggagggagggaagatgaagagagactggttaacaggtataaaaatacagttagaagaaataagttctagtattcaacagcacagtagggtgactatagttaataatttactgtatatttcaaaatagctagaagagaagatttggaaagttcccaacacaaagaaacgataaatatttgaggtgacgggcatcctgattaccct

SEQ ID NO: 787975 - DNA, 617 bp, Homo sapiens
tcttgctctgtcacctaggctggagtgcagtggcagtcacagcttactgcagcctcgaactcctgaccttaagtgatcctcccacctcagccttacaaagtcctgggataataggcgtgagccactgtgcccagctactttgcccagttctttaaggtggctgaagaaagtcatatcagctgccaataccaactagtacagtccctcgctaataaatataaatcacgtgcaagaatcatgaggtgtttgatgaaaatcaagaatataaaagagaaatgtaaaaataaatagagcaaaccctgggggggatggtaaaaattatattatatttatatamccaaaagatatactatgctatcacatccataaaataagaacaggctgctatgaaaaagaagtaaacaatgaatgagaaaacattcttggaactaagaacatgcaatgcaatagaatagctgattggtagaagggtatagaattgaaaaacaaatccacaatttaaagaccaagccatggaaatctggaatgaagagtaaaatacaaagaaaagcaaagaactaattcacagaaaagttggaaatatacagggtagagctggagagccaatattgattgaa

SEQ ID NO: 787976 - DNA, 617 bp, Homo sapiens
tcttgctctgtcacctaggctggagtgcagtggcagtcacagcttactgcagcctcgaactcctgaccttaagtgatcctcccacctcagccttacaaagtcctgggataataggcgtgagccactgtgcccagctactttgcccagttctttaaggtggctgaagaaagtcatatcagctgccaataccaactagtacagtccctcgctaataaatataaatcacgtgcaagaatcatgaggtgtttgatgaaaatcaagaatataaaagagaaatgtaaaaataaatagagcaaaccctgggggggatggtaaaaattatattatatttatataaccaaaagatatrctatgctatcacatccataaaataagaacaggctgctatgaaaaagaagtaaacaatgaatgagaaaacattcttggaactaagaacatgcaatgcaatagaatagctgattggtagaagggtatagaattgaaaaacaaatccacaatttaaagaccaagccatggaaatctggaatgaagagtaaaatacaaagaaaagcaaagaactaattcacagaaaagttggaaatatacagggtagagctggagagccaatattgattgaa

SEQ ID NO: 787977 - DNA, 564 bp, Homo sapiens
aagactcagaaatgacacaaataatagaattagtatacaaagacattaaaactattaaaaatatcttccataggttcaagaaggtattagaaagataagaatgttaaggagagacatggcagatataaaaaagatctacatcagatttctaagaattaaaattacaatttctgagaaaacatttatwctgtttcatggaatgaagtgttgcctaactctagaatcacaaataaggccaactaagatctttaaacaacagcaacaacaacaaaaaaaccctataaactctggaatgaaaattacaccaaatgagatgaatagcagactgcacaccgcagaagaaatgattagtaaacctggagacacagtgacagaacttatcaaaataaagcattgagagaaaaaaagtttaaaaaaataaaaatgaacagagaatccctgaactatggggaaacttaaaagaacctaatgtatactatatatactatatttagtctttggaccttgaataaacatcagcagtagccaagaaatagttgttacaggccttgggcataacccagt

SEQ ID NO: 787978 - DNA, 564 bp, Homo sapiens
aagactcagaaatgacacaaataatagaattagtatacaaagacattaaaactattaaaaatatcttccataggttcaagaaggtattagaaagataagaatgttaaggagagacatggcagatataaaaaagatctacatcagatttctaagaattaaaattacaatttctgagaaaacatttattctgtttcatggaatgaagtgttgcctaactctagaatcacaaataaggccaactaagatctttaaacaacagcaacaacaamaaaaaaaccctataaactctggaatgaaaattacaccaaatgagatgaatagcagactgcacaccgcagaagaaatgattagtaaacctggagacacagtgacagaacttatcaaaataaagcattgagagaaaaaaagtttaaaaaaataaaaatgaacagagaatccctgaactatggggaaacttaaaagaacctaatgtatactatatatactatatttagtctttggaccttgaataaacatcagcagtagccaagaaatagttgttacaggccttgggcataacccagt

SEQ ID NO: 787979 - DNA, 651 bp, Homo sapiens
tagcagtggtggtcacaagagggcttgcaccatccctccccgaactgtaggcagctcagcaaggagagacagagaaagactcagtaagggaagagaacacgagactgtctggtaatccagggaattctcctggatcttacccaagaccaccaaggcagtatctcctcaagtctgcaagtcacaacattactgggctttgaatatcgcctaatgcaaatttggctgcagtgaccaaagacttagatcacaacactcaattccctttgaatatctggaaagccttctcaaaaaggacagatacattcatccttgagaggtctggaaaaaaaaaaaaaagacaagtacaaataagctcgragtgtgaagattagaataaatacctaactcttcaatgcccagacaatgacaaacatccagaagcatcaagaccatccaggaaattatgacctcaccaaaccaactaaataaggaaccagtgaccaattctggaatgacagagatatgcgacctttaagagaattcaaaatagctgttttgaggaagctcaaagaaatccaggataatacatagaaggaattcagaatcttatcagataatataacaaagagactgaaataattaagaatcaagcagaaattctggagctgaaaa

SEQ ID NO: 787980 - DNA, 616 bp, Homo sapiens
tcaggttgtcgtatcttttgccatatcaattgtgtttctttttattgcagagcagtatttcatggtaatggagtcccacagtttattcaacaaaagatatctagattgtttcccgtttgggctggatgctgcccarctgagctgctaagaaacatgtgtgacaggttttgtacgaacaatccagggagcacaatcactattttccagagtggtggttttacattcccactagcaatgagtgattcagtttctctgcatccttgccaccatctggtgtgtcagtggtttgtttttagtcatttgggtggctgtatatctctctatggttttaatttgcattgcgctaatgactaaaggtggtgaatatccttttatgtgcttgtttttgcctattttctttggagaaatattaaaagtcctttgtccagtttttaattgggttgttaatcactttgtggttaaattgtaagaagagttctttatatatactgatagacccttattagatatgtgatttgcaagtatcttcttccattatgttggttatcttttcacactcttgacagtgtcctctgatgaacacaaatttttaattttttttttttttttttttgag

SEQ ID NO: 787981 - DNA, 555 bp, Homo sapiens
ctgggcaacagagcgagactctgtctcaaaaaaattagtaaataaatgagtaaaattttgttgttagaaccaggaatacctcacctccctggtttcacgttaaggctttaggctctaaacagactgcctggaagtcacagaaggttacttgtttattatgtacatcaacatagaaactagttggagagataaattggcgtgctaaagaaatgactcccaaatccaagtccatgacccaggccacagtaaaacaagaaacataagcaaaagggagagaatttttcataaactgcaataatttaaaggcactgaagtcttcattcagattatgtctcatactttgatattagaatatccttttataaaatgatagtgataataamgggtactttcaaaaaatacattatatatgataaaattagtaaatttatgttgttctactaaattaaattattcgtattgggccataaacccaagaaataaggatacatctgaaatagttataaatacaaacagccagtaaatcagccttctctacgtgaaagttagtaggta

SEQ ID NO: 787982 - DNA, 589 bp, Homo sapiens
tcctattttacaggaggagaaactgaatctcagggagattagttaatttctacaatgcatagctaataagtggtaatgctgggatttgaatccaaatatccccaactccacaatctgtatctttcccatatgctttaaagttgtttagacctcaattcaatctatccttaactgtgttctgcaatataactcagtccttaggctaatccacaactgtcttcttacctaatagtgtaagtaaatatagcactattctaataagtactagagaatataatcaccataatacaagactgtttctgtgaytgaagttatggggaggttgagaaaactgtaggaaaagcatggacatttctaactccaagttacttgtcattcattcattcagttaatataatatagtgcctattatgtgcctgaagatgtgctggactcacggtgataaacaaaatagaaatagtccttcctttaaaaactttccaatctaaggaaagtgacagtctttaattaaataatcatgcataggagaaatacctaactatatcacacagagacttagcatagactgggtacttgactacaaaggctg

SEQ ID NO: 787983 - DNA, 589 bp, Homo sapiens
tcctattttacaggaggagaaactgaatctcagggagattagttaatttctacaatgcatagctaataagtggtaatgctgggatttgaatccaaatatccccaactccacaatctgtatctttcccatatgctttaaagttgtttagacctcaattcaatctatccttaactgtgttctgcaatataactcagtccttaggctaatccacaactgtcttcttacctaatagtgtaagtaaatatagcactattctaataagtactagagaatataatcaccataatacaagactgtttctgtgactgaagttatggggaggttgagaaaactgtaggaaaagcatggacatttctaactccaagttacttgtcattcattcattcagttaatataatatagtgcctattatgtgcctgaagatgtgctggactcacrgtgataaacaaaatagaaatagtccttcctttaaaaactttccaatctaaggaaagtgacagtctttaattaaataatcatgcataggagaaatacctaactatatcacacagagacttagcatagactgggtacttgactacaaaggctg

SEQ ID NO: 787984 - DNA, 606 bp, Homo sapiens
acgtggtcatcctgacaggctgggaaacacatcctctctcagagacaaaaagtaggcactttagagaaaaaaaggagaggctgtgatttgtgcccaatgagattagctatatgtacatattcagtaggttacaggataatcttacagatatttgtgagggaggcctaatgcatgcagactagataaacatatatgttacatgtgacccatgttcaccttgaagtggaaccttaatatttcggatgagatcaggcacattcagktcgtatggccgtagacaagccttaatatttcagtgcattacagtcaagccctatacgtcaaaaagtgagtcagggatgcaaaggcactcagtgcacagcctctgtgaaccagccaaagccagtccgtggtcagtggtctcttaccaggagaaaggtactgaaatcagtctcttgtccaatcaaagctgtagctacggctggtggaaagagggtgtggggggcaggtaggcagtgtgtggaggtcagaggagttgtaattgtttcgatactgcttatctccaggccagtgcttgtttcgctgctagagaaaaaaataaacaaacaaaatcccttgtggcagtta

SEQ ID NO: 787985 - DNA, 574 bp, Homo sapiens
gcagtaagccagatgagagctgatggcgactgagaatggaatgtgtggcattgaagatagtgagaagtgcttagccttgagatatttgggatactggtactcttgaagacttagagttttctttgatctctgtgtctcctccttcagcaagctcatcgaagtccatgacttcaattaccgcatacatacacatggatggctcacatttcatttatgttctccactgatgcctctcatttgatattcagtcccttataatcaattgtctacttggcatctccatttaattttctcaaaaacatctcaaaatcaacagttcaaaagttgaagttataatctcctccaaagtttaacacacccctaacctgaacagtagcctgttcctcttccagtktttctcatctcagaaatagtacccccgtccatccagttacatgagccacatgcctaaaggtcattctggactacccctctccccttatcatatagtctgtcagtgaggctgtctatttgcctcgtaagtattgtatcaatagactcttctgcatccccatccctttgttctggtccaagt

SEQ ID NO: 787986 - DNA, 645 bp, Homo sapiens
cattgttcagaatagccagcatatggactcaacccaagtgtccatcagtgaataaattgataaagaaaaggtgatatatattcacaatggaatactattcagccataaaaagaaggaaatcttgccattttttacagaatggctggaacatttggggaggggatttgggaggttggtcaaaggacacaaaatttcaattagttaggaggaataagttcaaaatatctgttatgcaacagggtgaccatagttaataacaatatattgtattyttaaaaatgccaagatagtgcatattaggtattcccaccacaaaagtgataactatatgaggtaaagcatatgttaattagctagatttagtcattccaaaatgtgtacatatttcagaacatcatgctgtacatgacaaatacatatattttatgtcaattttttaaaaatatatacacacgtacacacgcacctggggaatcccccatttagaattttaaaaaacaacttataaataacccataaataaaaaacaaatcacagatggaataagaaaatatgtttaattgaatgacaatttaaaaaattgtgtgtgtttgtaaacttgtgaatactactaaatcagggtttagaaaaaaactgatagatttg

SEQ ID NO: 787987 - DNA, 645 bp, Homo sapiens
cattgttcagaatagccagcatatggactcaacccaagtgtccatcagtgaataaattgataaagaaaaggtgatatatattcacaatggaatactattcagccataaaaagaaggaaatcttgccattttttacagaatggctggaacatttggggaggggatttgggaggttggtcaaaggacacaaaatttcaattagttaggaggaataagttcaaaatatctgttatgcaacagggtgaccatagttaataacaatatattgtattcttaaaaatgccaagatagtgcatattaggtattcccaccacaaaagtgataactatatgaggtaaagcataygttaattagctagatttagtcattccaaaatgtgtacatatttcagaacatcatgctgtacatgacaaatacatatattttatgtcaattttttaaaaatatatacacacgtacacacgcacctggggaatcccccatttagaattttaaaaaacaacttataaataacccataaataaaaaacaaatcacagatggaataagaaaatatgtttaattgaatgacaatttaaaaaattgtgtgtgtttgtaaacttgtgaatactactaaatcagggtttagaaaaaaactgatagatttg

SEQ ID NO: 787988 - DNA, 602 bp, Homo sapiens
tcttttatctcaaatccacaagaccagatgaatttcaaaatttagatttttgtgatataaaattaatataattcttatgttatatacaatacaccatccttgatgagatacagcataggacttcataatcaaatattagtatttctacagctaaagaagtagtaaataaagacatgaaataatggcatcagttcaatataggtttttatcactaaatccatataggttagatttcctcaccaaatgagttacaaaaaccttaattttggagctttttgagttttagaattgcaaataaggggttgcaattaatgaaaattggccttgtgttaggcttttaaaaaaatcttcacttttaaaaaaaggtctaaggagtcagcaccaaagagwccatgttttctgatctcagtgaaataaaagttgaagtcagtaacgaaagtatatcttttaaaaacctcaacatactcctatgcctagaaagaaaacaaaatagtaaataacccttcagaagaataggaaattataaaatatatatggaatgcaccataaaagtacttatgagtatatttattacttcaaatgtatttataacaatgtaaata

SEQ ID NO: 787989 - DNA, 532 bp, Homo sapiens
ctagccatttggcttgttgtctttatattattatttatttttagtaattaatatacacaaaatgattatgtcagtcacgggcctaagcactttacaaatattagcatcattttgaagtttctttctatttatttatctctaattggcaaataataattgtgtatatttatggggtaaaatgaatttttttttgagacagagtctcgctctgtcacccaggctggagtacagtggtggatctcggctgacaacctccrcctcccaggttcaagtgattctcctgcctcagcctcctctcctggattacaggtgcccaccaccatgcccagctaattttttgaatttttagtagagacagggtttcaccctgttggccaggctggtcttgaactcctgacctcaggtgatccacctgccctggcctcccaaagtgctgggattacaggcgtgagccaccatgcccggccaaaatgtgatattttgatctatgtatacattgcagaaaaatcaaactgatatatccatcacctcc

SEQ ID NO: 787990 - DNA, 587 bp, Homo sapiens
agctttcagaagattttcaatgaaacatttgcatgtgtgtgaaaaggcaaacatgaggaaagtcctcctaggtgctcatctgcagaaacgaagccaggggattcggaaacatcccatcatctcacctctctttcctgcattaacctttggccttcggcagcatataagcaattagtctcttccaaaaatttcagttcaaatgaatctttatacacctaagaaacragcagagttactgaccaatttcagtaaaggaaactatcttcacaagtgctaacacatcccagtttctgacggggcaggctgccatgacctgaacttggaggcgcctgtggccacccagccggccggctgcactgtccttcccaaaacggccgggcaggccctcctctgttctcttcctatagtgccttggggtcctattgctctaaagaacttcgccctttgtcttttgtgtgtgttgctaatattttcccccagcgtgtcatctggctttgtctctgtttatattttccatgaaaaacgtgcattttatgtagtgatattgatctatccgtgcattttatgtagtgatattgatctatctt

SEQ ID NO: 787991 - DNA, 579 bp, Homo sapiens
ctttaaaggccaggacgggccacacgtggctggcggcctcgttccagtggcggcacgtccttgggcgtctctaatgtctgcagctcaagggctggcacttttttaaatataaaaatgggtgttatttttatttttwtttgtaaagtgatttttggtcttctgttgacattcggggtgatcctgttctgcgctgtgtacaatgtgagatcggtgcgttctcctgatgttttgccgtggcttggggattgtacacgggaccagctcacgtaatgcattgcctgtaacaatgtaataaaaagcctctttctttttggggtgggccttgtccttctgtcagctaaaatgggagctcatgagagaaggacgtcagggaaacggggttgagggtggtctcggtgcagagagaagggtgtcagggaaacggggggtgagggtggtcttggtgccagacgtagggaatggtgttgggagtggcccgagtgcctggcacagttgtctggttcattcatgtaacatgataatttttaaatcattaaaaaaattacctttcatacagataccatggaatactatgcagcc

SEQ ID NO: 787992 - DNA, 489 bp, Homo sapiens
ggacagcgtggtcccgtggctctgctgctggcctttcacagggcgctcctcacgcaacgtccaccctttctcctcgggagcattcactctgccaggtgccaggcccagggctgtccaggcaggggctccacactcctccaaacgttcactcaaactgcattttctggttggtgcacgcctggctcccggctcctacaggaagtttctgggggcatcactgggactgctaggttcgaaccacccatcgcgacgatgtccttccctgtcctcctagaaacgtttaagccagccacaacccctaggagccygtgaagcacatggcctaaaatgccaggaacgcactctccaatcccggtggcagccgtgggctccaggctctcagccacggggactcacaggcagtcacgggctgtgcgcacacctggaaaccctcgtggaggccagccctgcccagatgcctgccctgccctcggcgagctcagacagact

SEQ ID NO: 787993 - DNA, 489 bp, Homo sapiens
ggacagcgtggtcccgtggctctgctgctggcctttcacagggcgctcctcacgcaacgtccaccctttctcctcgggagcattcactctgccaggtgccaggcccagggctgtccaggcaggggctccacactcctccaaacgttcactcaaactgcattttctggttggtgcacgcctggctcccggctcctacaggaagtttctgggggcatcactgggactgctaggttcgaaccacccatcgcgacgatgtccttccctgtcctcctagaaacgtttaagccagccacaacccctaggagcccgtgaagcacatggcctraaatgccaggaacgcactctccaatcccggtggcagccgtgggctccaggctctcagccacggggactcacaggcagtcacgggctgtgcgcacacctggaaaccctcgtggaggccagccctgcccagatgcctgccctgccctcggcgagctcagacagact

SEQ ID NO: 787994 - DNA, 588 bp, Homo sapiens
agcttcctcaggacctggtcctcagcctgccgatcagcagctgtctttaggttttctaaaaggaggagacaaagcttagagaacagggaactgggcagggaagcaggagggccacaacctaatcccagcctatgtgatttctataacccgggctttgtttcctaagctgccaaattaggagggttgccaacaccagtggttttctagcactactgagcagcacgattttttttgaaggagatcttatacaaaagccaactgtgcagctctgattgaactgaagtgagaaggggctttggasccccctcctctggcttcctcctgaattgtctcagaggtacacagactagagcatcatgttgcttggtcagtatctgagatcatgaggcttgcatgacacatccctgggatgtgtctgcttctccccacatttcacctaccttcccggttcatgtagcctcgtagctcctggtccagctgccactgtttctcctccagattcaattcctgcaccctgtggaggtcagggattgtagaagcagagctgtctaaggtgcccaaggggctggagcctggcccatgggccac

SEQ ID NO: 787995 - DNA, 641 bp, Homo sapiens
aaattccgttatcccattctaaaagtgcaaactatcaagtgattagaggttctccaatttgtagaggctcctgaggaaactggttataaaagtagtgcgggaggccagtgctcctagttcttgttcagtgaaattctcaagcagatgcagtaaggaaaaatcaaggaaaatgcaacaaaaaattattaatttggacttcatttgagtttgtgaagatcataatctgagctacattttaccctgtttactttttttgtttgtttttttgagacagtcttgctctgtcgccaggctggagtgcaatggcgcaatcttggcttactgcaacctcygcctccggggttcaagtgattctcctgcctcagcctcccgaattacagctgggattacaggcgtacgccaccacgcctgactaatttttgtatttttagtagacacagggtttcaccacattggccaggatggtctcgaactcctgacctcaggttatccgtccgccttggcctcccaaagtcctgggattacaggcgtgagccaccgcacacagcctaccctgtttacttttaaatgcctttctgaacaataagtttttttttttctttttttggtaagagatggggtcttgcactgttgcccagact

SEQ ID NO: 787996 - DNA, 641 bp, Homo sapiens
aaattccgttatcccattctaaaagtgcaaactatcaagtgattagaggttctccaatttgtagaggctcctgaggaaactggttataaaagtagtgcgggaggccagtgctcctagttcttgttcagtgaaattctcaagcagatgcagtaaggaaaaatcaaggaaaatgcaacaaaaaattattaatttggacttcatttgagtttgtgaagatcataatctgagctacattttaccctgtttactttttttgtttgtttttttgagacagtcttgctctgtcgccaggctggagtgcaatggcgcaatcttggcttactgcaacctccgcctccggggttcaagtgattctcctgcctcagcctcccgaattacagctgggattacaggcgtacgccaccacgcctgactaatttttgtatttttagtagacacagggtttcaccacattggccaggatggtctcgaactcctgacctcaggttatccgtcygccttggcctcccaaagtcctgggattacaggcgtgagccaccgcacacagcctaccctgtttacttttaaatgcctttctgaacaataagtttttttttttctttttttggtaagagatggggtcttgcactgttgcccagact

SEQ ID NO: 787997 - DNA, 574 bp, Homo sapiens
ttttcctgtactcctttgggctgaacgatttgtgggcccacaaactacaataaactagagacattttgaacaagaaatgtatttgcctcctgcaaatactacctgattgagaaagtgtgtgagcatgtgtgttaacataaatatgataagaagaacaagaagtttagtctgcatgaataaagtggcactttttcttgatgccttgatgttttattttaaaactcaccatgtaaggcaggaaaatgtctaaatttatattccataaaatctgagttcagctactgcgtctactttaatgtgatgtctttaggacatgaacccattatgataataatctgattggtaaagagaggtcattagatatctttctccaaaragatagctgccagaaagaaatagcgattagaggtgtaaaaaagatttctttaatgtttcctgttttgccattttatctgtagtaaaaaatttattcttccatgctcaataaattctgaagagtgctttgagttcaggggatagtagacttctttacatgcacaataactgttgaatactggttatgaatgggcttcct

SEQ ID NO: 787998 - DNA, 563 bp, Homo sapiens
ttctgttatctgtgtcatttctgggtctgtttatattgcttatttttttttcaccattatgtgttgtattttcctacttctttgcattcctgataatttttttaaaagcttttattttttatccttttaaaaattgcattgactaggatcttytttttctcttctttttttctctttttcttttcttttcttttctttttttttaagacagggtcttgctctgtcacccaggctagagtgcagtggggcgatctcagctcacagcaacctctgcgtccccatttcaagcgattctcccacctcagcctcccgagtagctgggattatggccatgagccactgtgggcccagctgcatgcctgatgatttttattagatgtcatatattgtgaattttatattatgggttctgatagtttcatatttctttaaatattttggggtttttggacttatttaagttacttgcaaggaggttttgaggtttacttttaagctttgttaatcaagacctacattttgacatgaattctttgacaccaaggggttgtcctacagttcaa

SEQ ID NO: 787999 - DNA, 563 bp, Homo sapiens
ttctgttatctgtgtcatttctgggtctgtttatattgcttatttttttttcaccattatgtgttgtattttcctacttctttgcattcctgataatttttttaaaagcttttattttttatccttttaaaaattgcattgactaggatcttctttttctcttctttttttctctttttcttttcttttcttttctttttttttaagacagggtcttgctctgtcacccaggctagagtgcagtggggcgatctcagctcacagcaacctctgcgtccccatttcaagcgattctcccacctcagcctcccgagtagctgggattatggccatgagccactgtgggcccagctgcatgcctgatratttttattagatgtcatatattgtgaattttatattatgggttctgatagtttcatatttctttaaatattttggggtttttggacttatttaagttacttgcaaggaggttttgaggtttacttttaagctttgttaatcaagacctacattttgacatgaattctttgacaccaaggggttgtcctacagttcaa

SEQ ID NO: 788000 - DNA, 607 bp, Homo sapiens
ttaacaaaggtcttatatccaaaatctgtaaggaccttaaagaaatcaacaagcaaataaccacattaaaaatgggcaaagtccatgaacagacacttctcaaaagaagacatacatgtggccaacaagcatatgaaaaaatattcaacatcactaatcttcagggaaatgcaaatcaaaaccataatgagatactgtctcacgacagtcagaatggctattattaaaaagtcaaaaaataacggatgctggtgaggttgtggagaaaaggaaacacttacatactgttggtgggaatgtgctggtgaggttgtggagaaaaggaaacacttacatactgttggtgggaatgtkctggtgaggttgtggagaaaaggggacacttaaaaactgttggcaggaatgtaaattagttcagctactgtggaaaacagtttggagagatctgaaggaacttgaaacagaagtaatattcgatccagcaataacagtactgagtatatacccaaaggaatacaaatcattctaccataaagacatatgcatatgtatgtttatcatagctctattcacaatagcaaagacatggaatcaacataggtgccca

SEQ ID NO: 788001 - DNA, 613 bp, Homo sapiens
acatattgagtattcgttacccactaaaattttataccaaagttcacgattctgagaccactggtatgtagaaaaatacttggcctctgtaaacgaacatttcaaatgtttcactgaccaagagccaacaattttgggaaaattttaaagccaattttatgataaaaattatgtgagttttagtcatgacaaatatttaaacaatgcacatttaaacaatacactctttattcacctaggaaccgttaggataatatagttaaagtgtctacatgcttttgcattgtatcttgttaaaaaaagccaagttttgcttsagatatataaacctactgtccttacatatctttcttccccaacagaatttgagtggcattcaaaactcacaatgttgcaatgagctctgcacttgggaatattcatatttataatctgtatattttagccaatatggttttttgttttatgaggcctggaatattttttcaattcaatatcaatctattcttcaagatggacatgagatataatattttatatatgctagccctactttgtgagataatacttaatggtcttctcctccatcaatctctccaaatgcaacacaacc

SEQ ID NO: 788002 - DNA, 613 bp, Homo sapiens
acatattgagtattcgttacccactaaaattttataccaaagttcacgattctgagaccactggtatgtagaaaaatacttggcctctgtaaacgaacatttcaaatgtttcactgaccaagagccaacaattttgggaaaattttaaagccaattttatgataaaaattatgtgagttttagtcatgacaaatatttaaacaatgcacatttaaacaatacactctttattcacctaggaaccgttaggataatatagttaaagtgtctacatgcttttgcattgtatcttgttaaaaaaagccaagttttgcttgagatatataaacctactgtccttacatatctttcttccccaacagaatytgagtggcattcaaaactcacaatgttgcaatgagctctgcacttgggaatattcatatttataatctgtatattttagccaatatggttttttgttttatgaggcctggaatattttttcaattcaatatcaatctattcttcaagatggacatgagatataatattttatatatgctagccctactttgtgagataatacttaatggtcttctcctccatcaatctctccaaatgcaacacaacc

SEQ ID NO: 788003 - DNA, 599 bp, Homo sapiens
cacagcaccttctgattcctggacctgcctaaagggctagcatgatttggatcctttgtttcattttgttttgttattttctttacttttctcgacaagattacctaaaaggaccctttgtttactttttggaagacaggcatgtcttcaggcagggactaaggtccagcatttctagacataagttcctttctatttttatcacacagttcagcaacactgcctgtcaccttccgctgtgctgaagaaaataaccaggtggacaagaggatcactcgattcgtgttacccgttggtgcaacaatcaacatggatgggacygcgctctatgaagcagtggcagcggtgtttattgcacagttgaatgacctggacttgggcattgggcagatcatcaccatcaggtggggcatggtgtcacattcattgtcatcactgatacagggattaccgccagtaaaaattgtccatgaagggacaccaagaatgtcgcagtgatgaattctttttcttgatctataaagtcccttcccaagattaaatacgactatatcctggtatgcaagatttctgcttcggggtctgggtagccaaagcca

SEQ ID NO: 788004 - DNA, 595 bp, Homo sapiens
gaggcccagttgcataatctgtgagatgggaaaaaatctgcctatgtcattgggttgttttaaggactgagtgagctcatgtgagtggagcatctagaacagcgtttggcagcccatacatgctcaataaatggcaagttttattgttatgattagaatgagttggaccattcaggccccaatcaacaacacttctctctctctctctctctctctctctctcwcacacacacacacacacacacacacacatatggaatacagcagaacatctgggtgagaaagtaccttcagtgaccctcaaggttaaagttagaaccagcctggctccaagctttacccttgatgcccacttctgtgcatggatcttacagcatttaggtctggctctgtcccctggcattgcaggtaagtattgctccacatggagcctttgctcagaaccagctcaggctcactggggagtccagtgctatgtactgtagtttgcaggtgacagatgagatggaaagggaagcagagacatcctattgggcttgaaaacacagattcacatttcaaatggcaaaagcccctgcacctggcttggaagctg

SEQ ID NO: 788005 - DNA, 628 bp, Homo sapiens
agctaaatctaccacatgctaaaaatatcatcgacttgacctagctctactgtttgttgctaaaagcccatcttaaatcaaccccagagtgttgtttgactacctagaaaaacattctgtatacaacagatactcattaaatgttaactgaatgaatggtttctctctccaagcaattggttgtgctaaaaaggaacataaaaagaaatattacctatgcgtaacacaaaacaaaagctaagtactagcaactagcagctacactcccatagaataaggaaagaaagagagaagagtctcaaaagttttaagtgtatcktgaagcacaagaaaaacattgtaatatctgtctagccattgccaaatctttatattttcttcttgaaacaaaagggcctgggataggattgaaataaaggtacaccctgtctttccccctaagctctaggccctaagaaaaacaaaacattttcagcagagcttgatttcaggctttaaagttctgatttaaatggtattcaaacttaaacaaaaatgaaagtgtctcatataatcaatttttgtcctactgacttggatttatcaagcaaatgtgggtaagtggggtttttttgcctaaattatttta

SEQ ID NO: 788006 - DNA, 628 bp, Homo sapiens
agctaaatctaccacatgctaaaaatatcatcgacttgacctagctctactgtttgttgctaaaagcccatcttaaatcaaccccagagtgttgtttgactacctagaaaaacattctgtatacaacagatactcattaaatgttaactgaatgaatggtttctctctccaagcaattggttgtgctaaaaaggaacataaaaagaaatattacctatgcgtaacacaaaacaaaagctaagtactagcaactagcagctacactcccatagaataaggaaagaaagagagaagagtctcaaaagttttaagtgtatcgtgaagcacaagaaaaacattgtaatatctgtctagccrttgccaaatctttatattttcttcttgaaacaaaagggcctgggataggattgaaataaaggtacaccctgtctttccccctaagctctaggccctaagaaaaacaaaacattttcagcagagcttgatttcaggctttaaagttctgatttaaatggtattcaaacttaaacaaaaatgaaagtgtctcatataatcaatttttgtcctactgacttggatttatcaagcaaatgtgggtaagtggggtttttttgcctaaattatttta

SEQ ID NO: 788007 - DNA, 542 bp, Homo sapiens
caccacgcccagctaatttttgtgtatttagtagagctgggttttgccctgttggccaggctggtcttgaatacctgacctcaagtgatctgcccccccgacttcccaaaatgctgggactactggcatgagccagtgctcctgtcctcattccattcttcaccgtggtactgaccatccatttattcagcaccaattgtgtgccagaccttgtgtcagcattatggaggacttcccttgggaggcttgttagctgtacttgcaatctgatttgggttcccaaatcagcatataacaccaggtatttytctaatagagtatgtgccacactttctgctaactgcctgtttatcagtgtccccacatcccaatatctggttccttcaagggcagggagcacagggtatggcgtcagagtggtactcagtgatgtttactggtgggtagaaggaagggttagtccctgtttttgaagactttatgttctagcaggcagaaatgaagcacaaatagttcaagaaataaacaatttaggaataaag

SEQ ID NO: 788008 - DNA, 542 bp, Homo sapiens
caccacgcccagctaatttttgtgtatttagtagagctgggttttgccctgttggccaggctggtcttgaatacctgacctcaagtgatctgcccccccgacttcccaaaatgctgggactactggcatgagccagtgctcctgtcctcattccattcttcaccgtggtactgaccatccatttattcagcaccaattgtgtgccagaccttgtgtcagcattatggaggacttcccttgggaggcttgttagctgtacttgcaatctgatttgggttcccaaatcagcatataacaccaggtatttctctaatagagtatgtgccacactttytgctaactgcctgtttatcagtgtccccacatcccaatatctggttccttcaagggcagggagcacagggtatggcgtcagagtggtactcagtgatgtttactggtgggtagaaggaagggttagtccctgtttttgaagactttatgttctagcaggcagaaatgaagcacaaatagttcaagaaataaacaatttaggaataaag

SEQ ID NO: 788009 - DNA, 577 bp, Homo sapiens
attttccaaagggttttttttttttcatgtttaaacgttaataaggacttcggggatgattttgtgagcagaaaagtgggtgatttatcaaataggaatgtgaaatgggcatgtttcaagtaggtcgtctgggcccagtgaactataattgttgctttttgaactttgggggtgggggtgggtgatgtagcaattgttttgcgtagtttggcgtatatatgttagaatttgtttttaagktttacttttgggaaacagttaaaacaacccagtgatggtagatgtgtgtgtattgaaattgagctttcgatgttaaatcttccaagagttgtattttgtgcagttttttttccgatggcattaaggctctagaagtaaaatacttcaaaatacggttatggtttattttcttttggtagctaggcatgttttttctttagtgtaggagtatagtacactgtaatcgtattttaaacaagggaataagcctactaaacataaaaacaaattgtaaacccagtcacgtggtggtggtgtgattcggatgagggtcctgagaactggatccgtaattttc

SEQ ID NO: 788010 - DNA, 549 bp, Homo sapiens
aataaataataaataaataaataaatacgtagctgtgccagaggcttagggaactgggagtgtcttagggaactggggacctaggaggggaggccacgtgggtagggctcccaccccactcacttcaactggacattctcagttcaggaagtgattttgttattgttgttgttgagcttctgagtaaaatttcctgtgraaaggggtttagcaggcgggcgcagtggctcaagcctgtaatcctaccactttgagaggtcaaggcaggaggatcgcttgaacccaggagttcaagaccagtcagggcagcatggtgaaaccttctctacaaaaaaaaaaaaaaaaaaaaaaaaaaaaaaaaaattagctgggggttgtggcgtgcacctgtagtctcagctactcgggaggctgaggtgggaggatcacttgagcccacgaggttgaggctgcagtgaatggcaatcacaccattggactacaacctgggtgagagagtgagacactgtctcaaaaaaacaaaaattaaaaaaagaaagaaaaaggagt

SEQ ID NO: 788011 - DNA, 549 bp, Homo sapiens
aataaataataaataaataaataaatacgtagctgtgccagaggcttagggaactgggagtgtcttagggaactggggacctaggaggggaggccacgtgggtagggctcccaccccactcacttcaactggacattctcagttcaggaagtgattttgttattgttgttgttgagcttctgagtaaaatttcctgtgaaaaggggtttagcagscgggcgcagtggctcaagcctgtaatcctaccactttgagaggtcaaggcaggaggatcgcttgaacccaggagttcaagaccagtcagggcagcatggtgaaaccttctctacaaaaaaaaaaaaaaaaaaaaaaaaaaaaaaaaaattagctgggggttgtggcgtgcacctgtagtctcagctactcgggaggctgaggtgggaggatcacttgagcccacgaggttgaggctgcagtgaatggcaatcacaccattggactacaacctgggtgagagagtgagacactgtctcaaaaaaacaaaaattaaaaaaagaaagaaaaaggagt

SEQ ID NO: 788012 - DNA, 621 bp, Homo sapiens
ggcccagggctcagatcccctcctccaggcctggccccagctgctattggggcccactgaggcctactggatcctaactggatgcaattaggacatcacctgatgcccctgtcagggtggctcctcccaaccgctagaggactcaggccaaaggcatttggggtgcagcccccaccctggccctggtgggccggagtcatgctctatgtgccccccagctgtccaagcaggggtgtacagagactctggggtggggtgagggtgagagcctgagaaggctgttgcggaggacacaccggaaactgtcaccaggccctgccctcagccgacccgggccagggccaggagggcctcctgggggccgccatctttctgttctgggaaggccaggytgggggtgagctccatggggctcctgtgtcctcatccattggtgggatgcggctccctcccggggacctctcagggcactgataagagccaccaggactaggttcagcccacagcaggtgggatgcacccgccccttggcgggccgggggtggagaccgggagtttctggagaaggcctttcagattctgaaggcaggcactccatgccccatccctggagcgcgagtg

SEQ ID NO: 788013 - DNA, 554 bp, Homo sapiens
acttagaatatagttggagttttttttagaagagccatttattttgatggtgtgactgaaggctatacatacagtcatgtattgcaaaacaaatgtcattttggtcaaggacagtggtcccataagattataatggaactaawaaatttctgtcgcctagtaacttcaccttgtctatagtgcaacagcgtgtagcattacttaggtgtttgtgtggtgttggtgtaaacaaacctactgcactgccagtcttacaaaatctagcacatggagttatgtatagtacatagtacttggtaatgacaataactgtattactggtttgtggatttactatgctatactttgtatggttattttagagtgtattcctacttataaaaattatcagtttgctgtaaaacagcctcaggcaggtccttcaggaggtattccagaaggaaggcattgttactctagaatatgacacctccatgggtcttattgcctctgaagaccttccagtgggacaaggaaggtatggagttggaagatggtgatattgatgatcctga

SEQ ID NO: 788014 - DNA, 554 bp, Homo sapiens
acttagaatatagttggagttttttttagaagagccatttattttgatggtgtgactgaaggctatacatacagtcatgtattgcaaaacaaatgtcattttggtcaaggacagtggtcccataagattataatggaactaaaaaatttctktcgcctagtaacttcaccttgtctatagtgcaacagcgtgtagcattacttaggtgtttgtgtggtgttggtgtaaacaaacctactgcactgccagtcttacaaaatctagcacatggagttatgtatagtacatagtacttggtaatgacaataactgtattactggtttgtggatttactatgctatactttgtatggttattttagagtgtattcctacttataaaaattatcagtttgctgtaaaacagcctcaggcaggtccttcaggaggtattccagaaggaaggcattgttactctagaatatgacacctccatgggtcttattgcctctgaagaccttccagtgggacaaggaaggtatggagttggaagatggtgatattgatgatcctga

SEQ ID NO: 788015 - DNA, 554 bp, Homo sapiens
acttagaatatagttggagttttttttagaagagccatttattttgatggtgtgactgaaggctatacatacagtcatgtattgcaaaacaaatgtcattttggtcaaggacagtggtcccataagattataatggaactaaaaaatttctgtcgcctagtaacttcaccttgtctatagtgcaacarcgtgtagcattacttaggtgtttgtgtggtgttggtgtaaacaaacctactgcactgccagtcttacaaaatctagcacatggagttatgtatagtacatagtacttggtaatgacaataactgtattactggtttgtggatttactatgctatactttgtatggttattttagagtgtattcctacttataaaaattatcagtttgctgtaaaacagcctcaggcaggtccttcaggaggtattccagaaggaaggcattgttactctagaatatgacacctccatgggtcttattgcctctgaagaccttccagtgggacaaggaaggtatggagttggaagatggtgatattgatgatcctga

SEQ ID NO: 788016 - DNA, 629 bp, Homo sapiens
acaaatttatgcacatggcacttcacagaatagaagaggccaacttctggcctcttatacccacatgcaacaaatacagctcgtgtccttcccccaggactcaatttgtaagcctctttattgcattgtgctgtagtaaaaaattctcagttttgtgggcaacctgtgaaaccagccttcytttatttcaactttgttgttttgcctttatactgtgaattaaatgaatccttgggggttctaattatattatggaaaaaagaacttgatattctgagaagctgaagaacaatttgttttcctcagctaggtatttaggacttttaggatttagttaccattttcaaaaaacttgaagaagattaattatctccattgcctcaaatgacaaagatagtatgttcaattctctcctgagttatcatcataataaccctatattcttaatatggccttttatattttacaaagtttctcaatagggaatgagaagaaagtgattttttaatctcttagacaccaatggcgtctactctcccttatcatataactatcttaatatttgaaggttgttttcatcttcctcttcagtttttctcttttctcttttaccacaataatcatcacaa

SEQ ID NO: 788017 - DNA, 596 bp, Homo sapiens
ctgtatttacttattcttaaatattttccttcatgctttctttctcaagtggatgaccagctggttgccacctttttcttctctctttgcctctgttcctaatttctttcttatccttaaccactccactttccttcctccaatcttgttttctctctaaatctttcctccaaccttattgaatctctccccttctttttgttatctggtcatttgatctataatttcgattccttttcctgaaattccctcctttttccttttcccctaaaccatcattctagtcctccccacacccaagcttcttatctctttgctgttaatctccaatgtgtttattgacttgtgtgccaaaaggcaaaatccccagccccctcccaaccatgccagtkcattgaaaagcagcagctgttattgctcaacaagttccttgtgatctacaaatcaatggataagaattctcacagtgaaggtttacatgtatatatttgtatgtatatatgagacatgtgaccatgtttaatgaatggagaaggacttggatcttttctagtagagaagagaagcagaaagctttgcctaaccctatttcttta

SEQ ID NO: 788018 - DNA, 631 bp, Homo sapiens
agagagaagagtgtttagcaaaattataacattattcgtacaaggttggcacatagttacagccatttgataggttaaacgcagtgtttctttttgggaaggatacatttaacatgttttttagagggtgtagtaattgtgggtttttgtcatctggtctaagcaaagcaggacaacaataggaaattaatatacaataagggtcattaattaagaaggccagaggtttttttccatgatgtcatttaattctctctagtcattgtacagaagaagaaaaataagaaagctagttaatctataatttgagaacagaagttataaccacatacgactcagatcmcagtcacgtctcaaggcttaaagtgattttgggggttcccacagcttttaaattttatttattttcacagatttaagcagttttgatgaatttttccccctaaagtgaatttacctgctgctgtactcccttatgcatagtatatagaatggcttaaactttggtggtggcttaagctcagtggtaaaatggtaccacactttaggtcgcagtggccaacttgcagaactgcaacttgcagatctgaggcacacccagttccactcatgtttgtcattgagaatgctg

SEQ ID NO: 788019 - DNA, 574 bp, Homo sapiens
attatgtttattgatttgagtatgttgaaccagccttgcatcccagggatgaagccgactcgatcatagtggataagctctttgatgtgctgctggactcagtttgttaatcttttcaataaactagttcctggattcattgatttttttggaagggtttttcgtgtctctgcctcctttggttctgatctcattttagttatttcttgtcttctgctagcttttaaatttatttgtccttgcttctctagttcttttaaccgtcatgttagggtatagattttagatctttcctgctttctcctgtggacatttagtgctataaatttccctgtaaacactgctttagctgtrtcccagagatcctagtatgttgtgtctttgttctcattagtttcgaagaacttatttatttctgccttcatttcattatttacccagtagtcattcaggagcaggttattgagtttccatgtaattgtgcagttttgagtgagtttcttaatcctgagttctaatttgattgcagtgttgtttgagagactctttgttattatttccattcttttgcata

SEQ ID NO: 788020 - DNA, 587 bp, Homo sapiens
atggtaggaaaagctttaaatttttagtttatcttattgaaactataagtaatatgttctcatttcatacattttctttgatatattttactttgttttctcattatatggaaaaaaactttcatagtcctggtgataaatttccccatagtgtttctttactctcattttttactaaaatagtgtctagagctgggaggtaacctgatgaattttgtattatagataacaaaactgagacccagtgaggaaagtgacttttgcaaggccatacagttgattagcatagttgagactggaactatttagttcttctgacagccagtccagaactgtttttattcggattgcatcagatgtattacatacatgcagatggcactttgctttctctgttttactccattcytaccttccttttttcctttactgacttaaagacctagatgctcaggtatccagaattctttgtcccttgacttctctttcagatctctgctttggtgggaggaccattacactttcctgtgctttgatggtcccatagcctccgctggtagcttctcagcctagcacacctgggcctg

SEQ ID NO: 788021 - DNA, 612 bp, Homo sapiens
agccaagaaagggcctggtgtctctgggggactgaatatcctaatgtgaatggtgtgaacaatctacaaagaaaaatgaaaagcttatttgttggctttatgaattgaaaattatttaatacactattattaagtagatttctttcaaagatgataatgtagtaaaatagtattttaataaaaaatcaagttaaagtagagaggaagagcagagtggttgcttaattcttaggcctaaattctaaatgaaattaattttggaggaagatgccaatttatcttgtttttcaaacaacctggtatgaaacagagtgataaaatcagcatagcccatgtaactctattacataaaggagagagtttgattttttttgtatgtaccaaccsttaaaaacatttttgtctgaccttgcaggatgaaaaattcattcctttggttcattttagagatgcatttgttccaaagagaggtacttttttattatttgtcatttacatcaaggatggccagactttttctgtaaagagctaaatagtaaatagtttaagctttgttgaaccaggagacaaaatcaaggatagtatttaggcacttatataacaagagagaaa

SEQ ID NO: 788022 - DNA, 584 bp, Homo sapiens
aaaattcattcctttggttcattttagagatgcatttgttccaaagagaggtacttttttattatttgtcatttacatcaaggatggccagactttttctgtaaagagctaaatagtaaatagtttaagctttgttgaaccaggagacaaaatcaaggatagtatttaggcacttatataacaagagagaaaataatttccacaaatttttaattgatgaaattcaaaacattattaatggatayggaaatttaaatttcatgtaattattctcacttatgaaatattcttctttttaaaaaacaccattaaaatataaaagaactgttcttagcttataggccaaacaaaaacaggtggtgagccagatttggtctgtgggcccttcctttgccaacacttatttacattacactgtgaaagaaagagtctgttagtcattttatgggatcagggttttctctttggaacaaaggagagaccatgaggacattggccactgttacttgaaagtgtgtgtgaggtggtgggggcctggtgtgggcattttgggtttgtctgatcttttggttttctacttttag

SEQ ID NO: 788023 - DNA, 671 bp, Homo sapiens
gaaatcagtatattgaagagatatttgcatttctatgtttgttgcagcactgtttacagtagctaaaatttggaagcaacctaagtgtccaacagcagatgaatggataaagaaaatgtggtacatatacacagtggagtactattcagccataaaaaagaatgagatccagtcatttacaacaacagggatggaactggagattatgttaagtgaaataagccaggcatggaaagacaaacatcacatgttctcacttayttgtgggatctaaaaatcaaaacaattaaactcacggacctagaaagtagaaggatggctaccagaggctgggaagggtagcagggggttggtgggcgggggggggggaggtgggaatggttaatgggttaaaaataaataaataaaaagaatgaataagtcctactatttatttgatagcacagtagagtgactatagtcaataataacttaattgtacattttaaaataacttaaagagtgtaactagattgtttgtaactcaaaggataaatgcttgaggggatggataccctgttctctgtgatgtgtttatttcacattgcatgcctgcatcaaaacatctcatgtaccccttaaatatatacacctatgtacccacaacaattttaaaaaataaataataaaag

SEQ ID NO: 788024 - DNA, 568 bp, Homo sapiens
aaacaacctcagagtatatgaacaagtagtaaatcatgataaaaagcattattgctttaggaattcagagaacgttatgaccacagagagctagagaaaaggcaaaggttgtaagaagaaactggggttttaatggggtgtgaagcatgggccaagcagagatactgctagtctccccagttctttacagttgatacagttgttcctaatttcttttttttttttttttttttttttttgagacggaatcttgctctgttgctcaggctggagtgcatggcacaatctcggctcactgsaagctcctccttccgggttcacgccattctcctgcctcagcctcccgagtagctgggactacaggcgcctgccatcatgcctggctaattttttgtatttttagtagagatggggtttcacggtgttagccaggatggtctcgatctcctgacctcgtgatccacccacctcggcctcccaaagtgctggggttcctgtctaatttaaggaggaagcagggcagctggagtagattatggtacaagacttacttgaccaccgatatgcc

SEQ ID NO: 788025 - DNA, 631 bp, Homo sapiens
cttattagctgcctttgcctgtgttcttattcagtggtcgctcatctttgaatgaggccgagctgtttgccgcaaaaactggtgtggggtatgctgaggactggaaggcaggggtggggagtgttgtgaaacctgctcatactcgctgcctccactgtcctccaaacaattgttatttcttttaccttgagaatgatcctccttcggtttttggcttttaggaggcttgtgtgtctctctcacagccagtccccttagcgccctggctctctgaggcttgacatatggtggkcatggcggttgttcccccaggccctttcttcaccctcactttccttgttaatccaggccaggtcataggtattaaaaatgacatccacatggtttctccttcagttccaccttcccagttagattttaacttttaaaatacttgagaagggagagcagtgtcagactcaaaaagccagcaagcattgttttttgtttgtttttttttgagatggagttttcactcttgttgcccaggccggagagtggtggtgagatctcggctcactgcaacctctgccttctgggttcaagcgattctcctgcctcagcctcccaagaagctgggattgtaggcgcc

SEQ ID NO: 788026 - DNA, 565 bp, Homo sapiens
tgggccacaatttctttccttagggatcccgtatcctgactcctgtgtcatttaaggataatgctgcaaatgaagtatcctttgttttctttttctgagatagtctcactctgaagctgaagataggctggagtgtggtggtgcaacctcagctcactgcaacctacgcctcccgggttcaagcgattccagtgcctcagactctcaagtagctgggaccacaggcgtgtgacaccacattcagctaatttttgttatttttagtagagatgggatttcaycatgtgggccaggctggtcttaaactcctggcctcaagtgatttccccacctcggcctcccaaagtgctgggattacaggtgtgagtcaccgtgccaggctccaaaaatcatatcccttaaaggacattaaaaaaatcatatgagaaaaatagctgtgtttttaacaaataagtactccccagtccacttactttgcaacactttatttttaccagccaattttttatttttagcagagccatagggtgaaatccataccacttccttgctctggcctgagaac

SEQ ID NO: 788027 - DNA, 565 bp, Homo sapiens
tgggccacaatttctttccttagggatcccgtatcctgactcctgtgtcatttaaggataatgctgcaaatgaagtatcctttgttttctttttctgagatagtctcactctgaagctgaagataggctggagtgtggtggtgcaacctcagctcactgcaacctacgcctcccgggttcaagcgattccagtgcctcagactctcaagtagctgggaccacaggcgtgtgacaccacattcagctaatttttgttatttttagtagagatgggatttcaccatgtgggccaggctggtcttaaactcctggcctcaagtgatttccccacctcggcctcccaaagtgctgggattacaggtgtgagtcaccgtgccaggctccaaaaatcatatcccttaaaggacattaaaaaaatcatatgagamaaatagctgtgtttttaacaaataagtactccccagtccacttactttgcaacactttatttttaccagccaattttttatttttagcagagccatagggtgaaatccataccacttccttgctctggcctgagaac

SEQ ID NO: 788028 - DNA, 559 bp, Homo sapiens
taatcagaaatgaaggtgaaaattatcagaagggctgggcacggtggcttacgtctgtaatcccagcactttgggaggccgaggcgggcggatcatgaggtcaggagatcgagaccatcctggctaacacagtgaaaccccatctctactaaaaatacaaaaattagccgggcatggtggcgggcrcctgtagtcccagctactcgggaggctgaggcaggagaatggcatgaacccgggaggtggagcttgcggtgagccgagattgcgccattgcactccagcctgggtgacagagcgagactctgtctcaaaaaaaaaaaaaaaaaaaaaaaaaaagaaaattatcagaaggaagtgacaataaaggcacttagattttaaattcatataataaagactcctcaaataagaaaaccgaagcaatgaaatagagcaaatacttaaaactataaatcaaaaaaaacttcctgaaattagaagacttgaactgaaatactgaaagtacacccaagtacctggggaatccatccagaaaaaccaacactgagaaatatac

SEQ ID NO: 788029 - DNA, 482 bp, Homo sapiens
ttgtttttgagacagagtttcactctgtcgcccagacttgagtgcagtggcatgaccacagctcattgtaacctctgcctccccggttcaagtgattctctcgcctcagcctcccttgtagctgggattacaggcatgagccaccaggaccggctaatttttgtattttttttttttttttgagacggagtttcgctctgtcgcccaggctggagtgcagtggtgcgatctygactcactgcaagctccgcctcccgggttcacgccattctcctgcctcagcctcccgtgtagctgggactacaggcacgcgccaccatgcccggctaatttttgtatttttagtagagacggggtttcaccatgttggccaggctggtctcgaactcctgacctcgggtgatccacctgcctcggcctcccaaagtgctgggattacaggcgttagccattgcgcccagccgcttagcataaagctttga

SEQ ID NO: 788030 - DNA, 695 bp, Homo sapiens
agtcaggagtgttggcattctcattcggaaacagtgtaggtcctagtcagagccctgttatgtcgggaaatccactctataggttatttggggtttggacggagtggaagagtgagtttgagggaaaatccttctgtgaatagttcttctgtggatcgcctcttgccctctgagtttttggtttgcttttgctttttaaccctactgcaaagacttckgaaacagccaggttatttctccctctgttcactgttaccaggttgcccatagtttataactaatttcggcctcactgggtgatgcttacctgatctgaggagaaccagaaaccaaaaaacaatccaaccaggtgggcatgaggacatgagaaatgaacattaggagagacacctggctttattacatttaaatctcatcagtccactaagtgtcttggggaaagtacaaatctaatgtccacatagaaaggtctgagtgtagcctgcagagctggtggacacctccattttaggacatcagtgctgacgtgtgggattggcaggttctgccacaagatccagaccctgggtacccctgggcaccacccagtgggccccagacacggcccctcataatgtataatttgaaaaatcaggaatgtgggaagaacagtggaggcctggctctggccagcctcagtgtggggcttccaccag

SEQ ID NO: 788031 - DNA, 695 bp, Homo sapiens
agtcaggagtgttggcattctcattcggaaacagtgtaggtcctagtcagagccctgttatgtcgggaaatccactctataggttatttggggtttggacggagtggaagagtgagtttgagggaaaatccttctgtgaatagttcttctgtggatcgcctcttgccctctgagtttttggtttgcttttgctttttaaccctactgcaaagacttctgaaacagccaggttatttctccctctgttcactgttaccaggttgcccatagtttataactaatttcggcctcactgggtgatgcttacctgatctgaggagaaccagaaaccaaaaaacaatccaaccaggtgggcatgaggacatgagaaatgaacattaggagagacacctggctttattacatttaaatctcatcagtccactaagtgtcttggggaaagtacaaatctaatgtccacatagaaaggtctgagtgtagcctgcagagctggtggacacctccattttaggacatcagtgctgacgtgtgggattggcargttctgccacaagatccagaccctgggtacccctgggcaccacccagtgggccccagacacggcccctcataatgtataatttgaaaaatcaggaatgtgggaagaacagtggaggcctggctctggccagcctcagtgtggggcttccaccag

SEQ ID NO: 788032 - DNA, 538 bp, Homo sapiens
ttctcatttttgtccgagatgtcccactgtgttcacggacagacagtgtggcatcgtgccgagatgggggcttggggcacaggtgccggtctacctgttctctacccaggcgtgatggaacagacaccgctttgcagagtmcccaggtgctgaggataaaacccttggtagggccccactcggtaacagtggccgcaataggtgcaggatggtaaagtggccaccgctcagaaacactgtggagacctccgtgcctccggccctttatgggcctggatatgacacaaacagctgaagtgcaagccccggcgtgtgggagcctccaaggccctgcctactgttggacacaggaaaggggatgtgaagagagagaggaagaggagagagaggaaaaagaaagagcttcctggtgttggcgtctcgacctgtgtgtgcgcagtggtgataatccagtgtgaaatccaatcagacaaacaagcctcagctctctcagaagcagacgcccaccggagctggtggacaggcatcccaaacacag

SEQ ID NO: 788033 - DNA, 565 bp, Homo sapiens
gtggagagccaggtggggcgttctctgaggagggtgaatagagttcccgcccccagccctcccgttcctgcttcctttagggtcaccgtgcgttcctgcttcctttagggtcaccgcgcgttccctgcagagaacacgctgggaaggctttgttgggacaacagcttctgcagccgccggcgccctcctggccgggctgcccccacgtcttttccctctgtgtgctgggtgcgcactctgttcccttggcttctgtatccgttccctgaagcttcagtggcttagacaagactctattccaaatagggccacattcagaggcacgggagtgaggaccccaaaacakgaattcggaagcacagtttgaccacagcagcctttagcctgtgttcctggtcctggcttccctagacctggcatctccaggctttaaccgtcttcgtttatgagcccctaatacttctgtaaaactgtgtaccagctcacacatccttaggatgacatttaaagttttgtagcatacttttctacagttgcactggatgtgttttctaatatatgttga

SEQ ID NO: 788034 - DNA, 619 bp, Homo sapiens
actcggaggagtcttagccctgaatttggccttgaatgactaattttatcttctccttgtgaacatttggcatcacgtgacaggtcagcagccaagctcatgcagcgaaaggtttctcagtggctcttggcttcccttgacaccttggtactgaagatggtgtctgagtcctcccctgtgtctcgtgtggaaagatcaggaaaaaccaaaaccaccgatgtcttgaatgctaacgatggaagagtggagggagaggcagcatgcctggagatgagagagggcagaccttcccgtccagcagcctgaaagcaggtttcaccctgggrccagctgctcacaggaggcctggaatgacctcttcggttctgattggggtcactctccaaacaaacaaagcaaaacacaaatcgctcttcctgaaggaggggatgggggtagagttgtggtgcccaaccttagctgtgcatcagaattacccagcaggctttgtgaaaacccagattgctgggccatttccccagagctgctgattcaggaggtctaggtgggcctgagaacttgcatgtctcacaagctcccagggaagctgctgctgctggcccaggaaccacacttcgtg

SEQ ID NO: 788035 - DNA, 668 bp, Homo sapiens
taccagtgtccccaaaaccagcaggaggtatacacgcccaggagtcccactgtgtttgagacaaggcagccctggccttgaggccactgtggatcagtgagcagtcagcgaagtccctgacaggcaagagaggatgatgtggtgagaactcccagctgccctacactgctgcatcagaactccagttgctatgcacaggggagctggtggagagggcagcacagtcctggaaagcagcatagaaagctgcctgcagagcttcctggctttttaggaattctgacaggcaggtctgacaccttggtggaggccccagggaagagtggtgtttagacagaacacaactctttgcatatagtgtgctttaatccatttatatgaaatttaattaaatatctggttaggctgaagttggtgatctctagttatctgtcttcaactttgrgacaaagctttgaaccaacatgcttctgaaaatacaaattcaaatgtataaagtagtcttatcgagattgtgttctggtagctaatcccaacgtttaaagtattttccaaaataaaattagccagattctacattttctgttctttgtaactattgaaagatagttacaacaaataatctcaagttcattcaacaaccttttattttatacttgaaataaaat

SEQ ID NO: 788036 - DNA, 536 bp, Homo sapiens
tgggagtgagcacgtcccatgtggtttcaggccaatccagaagtgcctttgtgttacccactgccttcttctggctgcctgtctgccctctggcgtctcagagaggtgatgctgccacttctgcggctggatacttgattcctgaaatccgtggttccygacattgattgcatattagaatcatctggggaactcttaaaattcccaatacccagaactttctatacaccaattaaaccagctttcttggcatcagtgtttgtgaaagctcgattgaggattccaaggtgcagccaaggttgagaaccacagctttaaatccacagtcataaggagcacccaactaggcattcaggatacaaagccctgtgcaagttcactgctgccctcgggcagctcacaacccccgtggtggggacagaaaaaggtttgaatgacaaagcacactctgaatgttataaaagggagtaatcataaataaataagtatataaacatatatatttataattaaatagtacatatatttataaaaag

SEQ ID NO: 788037 - DNA, 597 bp, Homo sapiens
aatgggaattctcagtaccagtatagaaaagtgagaaaaggaggcaagctttgggcataaagagattaaaaacaaatagttcccccttcctctggccaagggatacctggagattcgttttttcatgttcctttgagctgccagtcaggagtcatatatgggcctgtgttattgttctaatctttgtcttttgtttttttctattttcttaaagaggtcctagattgtatcttttatctcctatactaaatttcttattttagatatcgtatttttaattcacaaagttttctttttgtaattttcctttttatgctttttttaatgaatgctctattttctcttacctttctaaggatagtatatacaattgctttgacttacattttctttkttttccctaagtattttctctgtttacttattatgtggctattttggtgttaaagaatttcctcatttgactggtgattgatttttgactgtgtggatatatttaagatcgagacaccaaactgaattggtagctctgtcagtgggtatcgctcctggactagaaagcttccctgcaggatgacagggtgaacagctaccttt

SEQ ID NO: 788038 - DNA, 644 bp, Homo sapiens
atgcctgaaatcctagctatttggttggctgtggcaggagaattgcttgaacctgggaggcagaggttgcagtgagccgaaatcgtgccattgcactccagcctgggcaacaagaaccaaactccatctcaaaaaagaaaaaaaaaaaagacaaagagggacattatataataataaaagccttgtccaacaggaaaatatcacaatcctaaatatatatgcacctaacactggagctctcaaatttataaaaacaattactactgcctaagaaatgagatggacgcagcacaataatagtggggggcttgaatactccactgacagcactagacaggtcatcaagacagaaagtcaacaaagaaacaataaacaatggatttaaactatatcctggaacaaaagggcttaacagatatttacagaatattcgacccaacaaacgcagaatatatattcatcagtgaacatggaagtttttccgagatagaccatatgatargccacaaaaaagtctcaataaatttaggaaaatttaaattatatcaggtagtctctcagacaacagtagaataaactggaaattaactccaaaaggaactttcaaaaccatgcaaatacctggaaattaaataatctgttcc

SEQ ID NO: 788039 - DNA, 683 bp, Homo sapiens
ctattatacagatgaggaaactgatgctaccagaggctaaataacttgccaaactttctaagttaatatgtaataggagccgggcacagtggctaatgcctgtaatcccagcactttgggaggctgaggcaggtggatcacttgaggtcaggagttcaagaccaacctagccaatatggtgagaccccgtctctactaaaaatacaaaaattaggcaggcatggtggcatgcgcctgtagtcccggctacttgggaggctgaggtaggagagtcacttgaacctaggaagcggaggttgcagtgagctgagatcgtgccattgcactccagcctgggcatagtagcaagaytctgtctcaaaatatatatattagaaactgtactgtacagcaaaccctgtgacatgtaacaaactctcacatgtatccctaaacctaaaagttgaaaaaagaaaaagaaaacaagaaaaataaattgtacttgaaagcagacctgtctaacccaaacaccaggctcttaaccattatctgtattgttaaagactctcagcaacaaattatagtctactctgtatattactgtccaccacttcacacatttcacctgttaccaacagtctctctgagctttgcttttgtatatttcacaggtttttcctatagatagcattgtaatatttcca

SEQ ID NO: 788040 - DNA, 683 bp, Homo sapiens
ctattatacagatgaggaaactgatgctaccagaggctaaataacttgccaaactttctaagttaatatgtaataggagccgggcacagtggctaatgcctgtaatcccagcactttgggaggctgaggcaggtggatcacttgaggtcaggagttcaagaccaacctagccaatatggtgagaccccgtctctactaaaaatacaaaaattaggcaggcatggtggcatgcgcctgtagtcccggctacttgggaggctgaggtaggagagtcacttgaacctaggaagcggaggttgcagtgagctgagatcgtgccattgcactccagcctgggcatagtagcaagactctgtctcaaaatatatatattagaaactgtactgtacagcaaaccctgtgacatgtaacaaactctcacatgtatccctaaacctaaaagttraaaaaagaaaaagaaaacaagaaaaataaattgtacttgaaagcagacctgtctaacccaaacaccaggctcttaaccattatctgtattgttaaagactctcagcaacaaattatagtctactctgtatattactgtccaccacttcacacatttcacctgttaccaacagtctctctgagctttgcttttgtatatttcacaggtttttcctatagatagcattgtaatatttcca

SEQ ID NO: 788041 - DNA, 600 bp, Homo sapiens
gttgatatataaatatttcttattataaaatactgtatgattaattattcttgtggaaactcttaattttatgtactaaaacaattattaaagagctttccaattaaccaagctgatgtatctggagagtgtaagtattttttaatggatactcgctgcaaatatscccccatcagctgttcgagattaaaggagactaaagaggcatgacagctacgtgcaatgcatgacactattttggatcctggctcagggagaaaaagttctatgagagacattattgggacactttgcaaaattggtttctctcttgtgttgagtctcttaacctgagattgttggctgtttctttgcagagacctgcaaggaaactatgatccctaattagagactcacgaatcatgcaaaggtttatcacagagaaaaaactagggctaaattactgcccacaggagaggagtttagaactacaggatgatagtaatgcttgacactaataaatcactctggaaaagaagtttataaaatctggcagctcttaaaaatcaacatgctatttatagaaaagaataggaaagagaactgtgcaacaaagacttt

SEQ ID NO: 788042 - DNA, 588 bp, Homo sapiens
atcactctggaaaagaagtttataaaatctggcagctcttaaaaatcaacatgctatttatagaaaagaataggaaagagaactgtgcaacaaagacttttttttgcctcctttgagccatttgaatcatcacactcgccatattactaacttacactacttgtagcattcatcctttgatggcagagggccaaaacattcttagaaaatagttaggaagggagaggagtcatcacttccttrgcttaggttcagagttctgctgaaaaccactgtctctagcactcaatctgtactcttcacctgactcccggggagaaagttctacagagaggaagctggagcgtagaacaaggcccttaaactcaccatgcattctgaaatatcctctgtagtagcatgcatgcttactaattttttcacagtggacataggaatattagtactgtttgcctgttcatttatatattaattaactcatttattcattcacacgccttgattcatggtttcagagatcagttgttgagttttctgtatatataaaaatctgcgctagctgctatagatatagacacatacacgaga

SEQ ID NO: 788043 - DNA, 508 bp, Homo sapiens
ctttggttttgactgagaacccgggttttgactgagacctccgtcgggaggaggggactgggtgggagttagcgggcgaaacgattccccggagtggccccgagcggcgcgtgcgtgaacgcgcggccgtaatatatgctgccattaagaatccgtgcagcttccagcgctccgggcgcagggacgcatgtgttgctggaattcaatccgtggggggaatgcagattgggctgcgactcactgggtttgatttatgaactgttacactagcaattgtttacacattgcatttcagagcccgggcccaccctccccgcagcgggcggcgggcttcgtgcgggaacytgctgcagcccccttggtctctctccatcctcctcccttcccccgtcccccccccccggggcccccgcagcttcctcccacagccaccttctccaagaaatcagatttcgatttctctgaacccagagacctgcatgcagttctttctcccccgcctactcca

SEQ ID NO: 788044 - DNA, 579 bp, Homo sapiens
tcctcttcctccttcccacaacctgcctggatcctccttgctctccacagttcccggctcagattcggcctggagactcctgcctgcctctcttctccccggggtcggtgagtgttagtggccgagcacctggggccggcctcgtagccttcatctgctcttgcgaatccaagtgtcccaggcctgcgcgttgggtccctcctgtttctccctccccagtcttttccgtgggcttgggccccatggggcttcctccccacagctttcaggatgtagcgccagcctccaaggccggaactgcggggaaggcgtggtgcccacctctgccaaccttcgaggactccccaccctctgtcctcctcttgcggtcagttcacggagcctggcgcctaactcaaccacttcctcctcccaggctcagctcctagacccrcccccacaaccttcatccaacctgtcccttttgactgtccccctttcttctgaaaacccaaaatagatcctgagactaaatataatcccaacccgtgatcgattcctggggcgctgtctcctttcagagctgggtcggtctgcgcc

SEQ ID NO: 788045 - DNA, 533 bp, Homo sapiens
gggttgctgccaaacaagtcatgaactgggctgggtttttacatttgatgaaaaagagcctaaacgcttctgatttgggataaagaaaaaggagcgttaaccctgactatgcctttggctccagccacctttttaagaataaattgctgggcaggtgtgggagggytagtcacagaatgaaactgtaagcccgaccaggtgtgaggaggggaggcgataaaaagattatagggtggaggagcggaggctgagggagaattgggacctagctcagcctggcaaggagcagcctggggaggaagggagaggtcagatgggtctgtagaaaaggaagattagaaagactcagcgacgcttggggttgggactgaggggacaggcgggagggaaagaaggaagatttgggatgagttgcactgggcacagagactaggaagggactgatgtgtaaaagaatgcctggacatcaggcacctcagaccatttgcccattttatgacaagaattatttagatcctgtaggatggaaaaat

SEQ ID NO: 788046 - DNA, 533 bp, Homo sapiens
gggttgctgccaaacaagtcatgaactgggctgggtttttacatttgatgaaaaagagcctaaacgcttctgatttgggataaagaaaaaggagcgttaaccctgactatgcctttggctccagccacctttttaagaataaattgctgggcaggtgtgggagggctagtcacagaaygaaactgtaagcccgaccaggtgtgaggaggggaggcgataaaaagattatagggtggaggagcggaggctgagggagaattgggacctagctcagcctggcaaggagcagcctggggaggaagggagaggtcagatgggtctgtagaaaaggaagattagaaagactcagcgacgcttggggttgggactgaggggacaggcgggagggaaagaaggaagatttgggatgagttgcactgggcacagagactaggaagggactgatgtgtaaaagaatgcctggacatcaggcacctcagaccatttgcccattttatgacaagaattatttagatcctgtaggatggaaaaat

SEQ ID NO: 788047 - DNA, 533 bp, Homo sapiens
gggttgctgccaaacaagtcatgaactgggctgggtttttacatttgatgaaaaagagcctaaacgcttctgatttgggataaagaaaaaggagcgttaaccctgactatgcctttggctccagccacctttttaagaataaattgctgggcaggtgtgggagggctagtcacagaatgaaactgtaagcccgaccaggtgtgaggaggggaggcgataaaaagattatagggtggaggagcggaggctgaggragaattgggacctagctcagcctggcaaggagcagcctggggaggaagggagaggtcagatgggtctgtagaaaaggaagattagaaagactcagcgacgcttggggttgggactgaggggacaggcgggagggaaagaaggaagatttgggatgagttgcactgggcacagagactaggaagggactgatgtgtaaaagaatgcctggacatcaggcacctcagaccatttgcccattttatgacaagaattatttagatcctgtaggatggaaaaat

SEQ ID NO: 788048 - DNA, 598 bp, Homo sapiens
tttggaaggtggcgaaggtgaagcatccaaactgacaaacaaagttgttctgagtgggctggaagtgggaggagggaggctgggtactctcattgatgagtaaatctttgtcacaagttatctgagaagggagctacaagtcctacatctcagtgtacagcacagtgcttggcacaaagaggaacttgaaaatctgagtaaaggaggcaaattagggaggccctcgacctagcttagaagaggaggatttgagtgggtgtagaggcagttggagggcattccagggatagaaggatcagggtgtctgggtttatttttctgtggtggaatgtacatgaggatggggggcagtgaaaagacttggcatagggcattggaacccctcaatggggagaaatggagaatctatttttcacttaatagtggtttaatagtgggagccatctattkgcttccaaaaatggagaccctcaggaagggcttgaaaaacctgaaaaaagactgtatggcagagagccagggtagattcatgaagcaggcagtgacttgatggcagtgctttatcagatagattaattcaccagttttgtttggtgta

SEQ ID NO: 788049 - DNA, 623 bp, Homo sapiens
cctaaaatcttcaccaatatggcaggactttgatactgtaaatgatttatgtttcactttcatatgttttactatgacatccagagtaccggccacttcctgttcaccaagtccaattaacataatgtcagcaatatagtataccagcatggtgtgtcaaggtgacagagagaaagagaatatatatagccttggggaaagacagtgaatgtgtactcatatcctttcttagtaaagcagaactgatcttgaccagccttcctgaggaggcttgaagatgacttgtttgccagatggatagccacaacccaggtacaaaaggctgtgctgatctgttccagtgaagrtaccacatccaattcggcagctacatgcaattgggactacaacttagataatgtttcagtagtctgctgttattcatgaaaatccatctattttttgcagagacggtgtagatggattgaatggggatatgatggggacgaccacccctgcatttgctaagttcttgagcatggcatcgatctcagccattccactggaatagggtattgctttgatttgctatcttaggtgggaatgggcactttctgggtttccatttgtttcttccttcctgg

SEQ ID NO: 788050 - DNA, 623 bp, Homo sapiens
cctaaaatcttcaccaatatggcaggactttgatactgtaaatgatttatgtttcactttcatatgttttactatgacatccagagtaccggccacttcctgttcaccaagtccaattaacataatgtcagcaatatagtataccagcatggtgtgtcaaggtgacagagagaaagagaatatatatagccttggggaaagacagtgaatgtgtactcatatcctttcttagtaaagcagaactgatcttgaccagccttcctgaggaggcttgaagatgacttgtttgccagatggatagccacaacccaggtacaaaaggctgtgctgatctgttccagtgaagataccacatccaattcggcagctacatgcaattgggactacaacttasataatgtttcagtagtctgctgttattcatgaaaatccatctattttttgcagagacggtgtagatggattgaatggggatatgatggggacgaccacccctgcatttgctaagttcttgagcatggcatcgatctcagccattccactggaatagggtattgctttgatttgctatcttaggtgggaatgggcactttctgggtttccatttgtttcttccttcctgg

SEQ ID NO: 788051 - DNA, 618 bp, Homo sapiens
tcaaagagactgaaacatagccctgaaactctaaaactcccagaagaaaacataggtgaaaagcttcatgacattggtcttggcaatgatggtttggatatgaaaccaaaagcacaaaggaacaagtgagactacatcaaactaaaagtttctgcacagcaaaagaaacaatcaacaacaacaaaaagcaacctacagaatgggagaaaatatttgcaagccatacatctgataaggggttaatatccacaatatatgagcaactcrtacaactcaacagaaaaaaacgaaacttgattaaaaagcagagagaggagttgagtagacattgttcccaagaagacatacaaatgactaacgggtatatgaaaagatgttcaacatcactaaccatcagggaagtgataatcaaaaccactatgagatgtcacttcacgcctgttaggatggctattatcagaatgacaagagataacaaatgttggtgaggatgtggagcaaataaaacccttgtccacgatcgatgggaatgtaaattggtacaggcatcatggaaaacaatagggaagtttctcaaaaaaggaaaaatagaaccaccatgtgatcagcaatcccatt

SEQ ID NO: 788052 - DNA, 618 bp, Homo sapiens
tcaaagagactgaaacatagccctgaaactctaaaactcccagaagaaaacataggtgaaaagcttcatgacattggtcttggcaatgatggtttggatatgaaaccaaaagcacaaaggaacaagtgagactacatcaaactaaaagtttctgcacagcaaaagaaacaatcaacaacaacaaaaagcaacctacagaatgggagaaaatatttgcaagccatacatctgataaggggttaatatccacaatatatgagcaactcatacaactcaacagaaaaaaacgaaacttgattaaaaagcagagagaggagttgagtagacattgttcccaagaagacatacaaatgactaacgggtatatgaaaagatgttcaacatcactaaccatcagggaagtgataatcaaaaccactatgagatgtcacttcacgcctgttaggatggctattatcagaatgacaagagataacaaatkttggtgaggatgtggagcaaataaaacccttgtccacgatcgatgggaatgtaaattggtacaggcatcatggaaaacaatagggaagtttctcaaaaaaggaaaaatagaaccaccatgtgatcagcaatcccatt

SEQ ID NO: 788053 - DNA, 619 bp, Homo sapiens; identical to SEQ ID NO: 730831

SEQ ID NO: 788054 - DNA, 619 bp, Homo sapiens; identical to SEQ ID NO: 730832

SEQ ID NO: 788055 - DNA, 619 bp, Homo sapiens; identical to SEQ ID NO: 730833

SEQ ID NO: 788056 - DNA, 538 bp, Homo sapiens
taaatctgtaggttatatcctttgccaaacttgggaagtcttcggccattgttttttcagactttttttcagcactgcactctttctcttgtcctctaaaactccagagacacaaacattagaacttttattattgtcttatatgtacctgaagctctactagatttttttcaaccttttttccctctttttttgatgtatcttcaagttcactgtttcctctgtcacatcctttgtggtactgaacccagctaatgtgtttgtttttttttaatattggttattgtgctttcaactctaaaatttctratttttgtcctgtatatcttctatttctttaatgataccttgtatttttgctttttcttcaagagtgttcaagattgctcatacaagcattttaaaagctttgtcagatacttccaacattggtgtcatcatggcactggcatctgttgattgacttttcccatacatgttgaggttttcatggttctttatatgctgaatactatttgagtgtaccctgaacattttg

SEQ ID NO: 788057 - DNA, 425 bp, Homo sapiens
gtaaacttgtaacacatctatggcattccatcttaaattgtggctcctactgaatagtacgcacatctcaagtagacttggaggctctgctcacatggcctctgcaccccctctcatagcttgttttctgatgtaccaaggagattcttgtatctttgaagactgctagctctaaggcagtttcttgytttttctcatgaaggcggtgaggaatagccttattttgaatcactgtgaccccttgtgggcatgtgtggggactgcaccccaacctctgttctaagtagtaggccccatgccttgcttggggccaccttggctcactctccactgacaatctcagtatagtctcctctcctcctaccgccccccgccccccgcctcacccactgaagactgagtgacctggaataggagtattctaa

SEQ ID NO: 788058 - DNA, 592 bp, Homo sapiens
tttttttttttaagagtaagacatggtcctggactccagtattatgtaattgaccaataaactgtaagtttcttgacattaggaatcatattctacatttccttttttcttttaagacagggtcttgctttgttgcccaggctggagtgcggtggtgcaatcacacttcactgcagccttgacctcctgggcctaagcgatcctctcacctcagcctcctaagtaaccggggccacagacgtgcgctactgctcctggcgaatttttttttttttttttttttttttttttttttttgagaatgattcttgctctgtcacccaggctggagtgcagtggtgcgatcttggctcactgcaagctctgcctcccgggttcacaccattctcctgcctcagcctcctgagtagctgggactaygggctcctgccaccagtttttttatttttgtagagatggagtctcccaatgttgcccaggctggtcttaaactcctaggctcaagggatcctcccagctgggcctcccaaagtgctgggatgataggcatgaaccaccattcccagcccatttcctttttccctttgcacag

SEQ ID NO: 788059 - DNA, 630 bp, Homo sapiens
gtcaaggtgatcagggaaggaatggcagaagacaaggtgggaatggctggagaaatgcagaggatgagggcttcatggcatttcatttgttagcaatctggaatcaaaagagcaaagcaagggcttcaccactgggagcaaactgagacctttccattttctgattgcactggtaacgaagccaaagcaagaagagaagtttagagaaaaaagggtgaaaagaaatgaacaaagcctccaagaaatatgggactatgtgaaaagaccaaatctacatttgattagtgtacctgaaagtgatggggagaatggaaccaagttgrgaacactctttaggatattatccaggagaacttccccaacctagcaaggcaggccaagattcaaattcaggaaacacagagaacactacaaagctactactcgagaagggcaacgccaagacacataattgtcagattcaccaaagttgaaatgaaggaaaaaatgttaagggcagccagagagaaaggtcgggttaaccacaaagggaagcccatcagactaacagctgatcactctgcagaaaccctacaagccagaagagtgggggccaatattcggcattcttaaagaaaagaattttcaacc

SEQ ID NO: 788060 - DNA, 630 bp, Homo sapiens
gtcaaggtgatcagggaaggaatggcagaagacaaggtgggaatggctggagaaatgcagaggatgagggcttcatggcatttcatttgttagcaatctggaatcaaaagagcaaagcaagggcttcaccactgggagcaaactgagacctttccattttctgattgcactggtaacgaagccaaagcaagaagagaagtttagagaaaaaagggtgaaaagaaatgaacaaagcctccaagaaatatgggactatgtgaaaagaccaaatctacatttgattagtgtacctgaaagtgatggggagaatggaaccaagttgggaacactctttaggatatyatccaggagaacttccccaacctagcaaggcaggccaagattcaaattcaggaaacacagagaacactacaaagctactactcgagaagggcaacgccaagacacataattgtcagattcaccaaagttgaaatgaaggaaaaaatgttaagggcagccagagagaaaggtcgggttaaccacaaagggaagcccatcagactaacagctgatcactctgcagaaaccctacaagccagaagagtgggggccaatattcggcattcttaaagaaaagaattttcaacc

SEQ ID NO: 788061 - DNA, 637 bp, Homo sapiens
tgcgctcatagctcactgcagcctcaaattccctggttcaagcaatcttcctgcctccgtctcctgagtagctgggactacaggcacacacccccatacccagctaatttttttgatatctagtaaagacaggatcttgctatgttgcctaggctggtctkgagctcctggggtcaaaggatccttctgtctcggcctcgcaaagagctgggattacaggtatgagccaccacgcccggtacttctagtttttgacatcatcaactatggttgagttatgcagaatcagataatagactaatttagcaaataatctttttaaaaattacttttagagaactctaaaaatgtaggtactttaaaatattttactctagtcaaaattttctcttttggcacaaacactataatttccaaaatcaaggttttggaaaaccttgattgttttgtaccttggttttcaactccagaagaaaaagtctagtccctgctaaaacaagaatcagcaagttgatgagctgggtgtctttgtaaacaactccacactttcaggattaagaaaacaagtctcatatgctgggcatagcttgggatcgtggactagataggaaactgtggctttagccttgccacactg

SEQ ID NO: 788062 - DNA, 626 bp, Homo sapiens
tgtattatctaattagtagtttatgaaagtgaggcacttttataatcaaagaaataaaaccttccagagagatacagaattactctgacctgaattattttaatgggaaagagttgtttttgtttaaaaatttcaggtgaagtttgataattttatcttaagtccacttggcttcattttgttgggcagcattggacaggacagtgcagccttatacagatgactctcagttctttaaaaaaaaattaaaatgggtccatkagaaaataaaaatttaatgtatcttaagtagaggatcttgagaaagctaaaaactgcttacctaaactgagacattaccacggatttgtagctaagtcatttagaatagactttatttgtaaatgtaaaatgatactggcaccaagatatggttgtgaaataggaagtctccagaaaataatgaaaaattataaaccgtgcccatagacaatagtcagcaaaaacagattgtggaaagacaggaagacagagcttatcctagtcatggtactgagtggagaaaatctcagaattgtgtgcactcaaaaactgtgcagccctgttgaaaacatttcttgtaatattatcttataatagttacatct

SEQ ID NO: 788063 - DNA, 633 bp, Homo sapiens
tcctttgctataaagtaggtttagtgttctgatacaatgttacatgggatcctgaaccagtgtagcaacacttcgataaaccttaaatagtggttccacctgagatcctgtgagcagaaaaaggcaaagccacaatatgaacacatatttatttctgtgagacataaccacgggcccttgaagaatgaaagggatttgatgtggtcaccttgccaccagatagagagctggtctccttgaagaatggcaccatatcggggctcaccattggtctctcttsctcacaggttgaacattcagtgacaacagttactagataagtccataagagtccaggccattgggcccatgcatagtctccatctctgccactgtgaccaatatatccatgtgctcatcatgccataggagcagtcaatgataaaggttggctgatgtcaactggcccattaattttgtctacttgttgaattagtactccttcaatgtggataatttcgggcaggtatttacatgtgatgcaaatatctttacattgtggacccactcccaaatatccatatgcctctatcccagacctctttgaaccccgccttccaatttttttcccatttcaagtccctgatcaattaa

SEQ ID NO: 788064 - DNA, 673 bp, Homo sapiens
gcccatgcatagtctccatctctgccactgtgaccaatatatccatgtgctcatcatgccataggagcagtcaatgataaaggttggctgatgtcaactggcccattaattttgtctacttgttgaattagtactccttcaatgtggataatttcgggcaggtatttacatgtgatgcaaatatctttacattgtggacccactcccaaatatccatatgcctctatcccagacctctttgaaccccgccttccaatttttttcccatttcaagtccctgatcaattaaccagtccatttgcagctgcccatragtgtatttatagttgaacctcaggtcatttctcttgcctcccagaatgaatgatcaggtgcattgcccaaagctctgcccactaagggggttttccctcaacactatctttcaaagatacctctcatgattgttacacatctacatacttagctgatttcatcaataagcccagctctggctttttcttcctcctggttagacagaattactccctataggggtaggcataaactgagggataggtgctggtgtaacagtgctggatgccgttgaggtctgggctatctgctcattgcttgtgctctcggtcctgctcttgttggaacccagatgaaccatcttacaatgaagtgttgc

SEQ ID NO: 788065 - DNA, 488 bp, Homo sapiens
aattctcaaccattatctcttcaaatattctgtctcattgtattatctcctttagaaacttcaattagatatatggtaggccatctcactctattactgtgtttctcaattccttgttaatatttttcctctttacatctctgcgatacattctggaatattccttcaaatttatttttcacttcactaattctctcttcagagatgtctaattttctgttttaacccaacctttgcattcctaactttattatattaaatttattttgtgtgtttattttattttccaccttttccaattttagaagatatggttttttcatgattattaattttgcatcatgagtttygtatcttctttaatttcttcaaacatactagatatgtgtattttatatatatatattttgataattctcaattctacttctttgtgggtttgcttgtttatagtagcttttatccttgtatgcattgctcgactttga

SEQ ID NO: 788066 - DNA, 595 bp, Homo sapiens
tacaggatatactatgtttttatttactgaatctggcaactctaattcagccttttggccttgaacctgattgaatttgtttctcttcttttctcaaaatacgattaaactattttaatagtgtttatgccctattaaatgaagactgtataatcatgatcctcttgaccttctttgaagacatacagaaaaagaaactccagagcatatgtaattctggatcaatgtgtagaatggcattatccacagggcctagtraagcccagtatgttgaattttgctaaaaaagaagaaaaaaaataaaggaatagggtttcagcattttctaatgacatggccagatgatgccacaaaatcttggcattactgataagcacacgctgtgctggaaaatcaatagtttctgaaggggatcctgaagggaactttccattattgaagttagaaataacttagccccacactcataaattcctggagttcagggtgctcagtgttcctaagcaagaaagcacgggacttgtcctaacttcataacctgctgagctggaattattgcttttacaaattacagagtacctacttttttaaaact

SEQ ID NO: 788067 - DNA, 583 bp, Homo sapiens; identical to SEQ ID NO: 784743

SEQ ID NO: 788068 - DNA, 500 bp, Homo sapiens
caaaggccctacctcctaatgccatcaccttggggattaggatttcaatatataaattttggggagtacaagttgtgacaccatagcaggtatcttgaatatatcttgtagtcccagattttctaattcttaagaatcatcaaatctgataaatttcacactttacatgtcttatgaatgccctacaagtagatgcaggggctatactcagattaaaaaaaaagggtggatgtctgcatttgctygtgagactaatctcagctgcaggcagactatttcggaaaattgttagaatttcatggggtaacttttactccttcccaagctaattatttttaatttctctttccttctactttttgtttgttttccatgagtttttttgttttattttattttaatctgcagacaatttgcagtgattagatttgttcaaagtagacccagattctttaagactggtgaatcctctcaaattgaaacaaaacaaaattacagac

SEQ ID NO: 788069 - DNA, 627 bp, Homo sapiens
aagtgtgtaagaggtgaagctggagagtaagacaaatgtgcgttggactgagttgcaaattggtcactttttagttgtgtgatcttgattaaggtatttcattccttcaagtccacttaccacacctttaaaatagtgttgataataatacctcatcagtagaatttgtgtttataaagacttaagttttttagagaaattttaggttcacagcaaaattgaaaggaagatacagagatttcccgtatacacccagcctccacacatgcacagcctcctctactatcaacatcccccacctcagtggtatgtttgttataactgatgaaccttcattgatacatcattactcaaagtctatactttatgttagagttcgctcttgatattgtacattctatggctttggacaaatatataatsacatacatacatcattacagtatcatacagaatattttcactaccctaaaaatcctctctgttctgcctgttcatgcctccctcacttcaactcctggcaatcactgatctttttactatctgtgtagtttttcctcttccagaaagtcatgtacatggaattatgcagtatgtagccttttcagatttgcttatttcatttag

SEQ ID NO: 788070 - DNA, 623 bp, Homo sapiens
ccactttttttttttttttttttttttttgagacggagtcttgctctgtcgcccaggctggagtgcagtggcgcgatctccgcttactgcaagctctgcctcccgcgttcacgccattctcctgcctcagcctccagagtagctgggattacaggtgcccgccaccaggcctggctatttttttgtatttttagtagagccggggtttcaccatgttagccacgatggtctcaatctcctgacctcgtgatccgcccgcctcggcctcccaaaattctgggattacaggcgtgagccaccgcgcctggcctctttttttttgttttgttttgtttaaccatttctgatttactgaaacccagtctgtatttaataaggcttaaacatttgtatgtttaatataacaatatgtcctcagtggcagcttgattagatttggattttwaaagtcactgtagaagggaggaaaaatatcaaagaagggatacatactggtgacaaatacttttaaaatagcataactcaagtaacgcaagtcagtctcgccagccaaatgaaaattataggtggaaatctcacactgaacctggagaatttcccgttcctgttaaagtattttctta

SEQ ID NO: 788071 - DNA, 574 bp, Homo sapiens
tagatttccatgagtcctttaaaaatgtttccaaaaataatgtctaagaaaactattagtgaagatgtttgatctattgtatagaaaccaaaaccaacaaatgaaagaaaaggcctctgggaaaaaaaaattattttaaagttttaggctacagggagataatttatttccctttgactattgtattagctttctagggctgccataataaagtatcacaatataggtggcttaaaaaaaaaaaaaaaacatttgttgtctcacagctctgtaagctagaagcctgaaatcaaggtgttggcaagattgkttccttctgaaaagttctgacttaaagtccgttccacatgtgtcttctagtttctggtggttgccagcaatttttggtgttccttgacttgtgcatgcatcaccccactgtctgcctctgtcattacatggccttcttccttatatttctttatgtctctctgtgtccatattttctttctttataaagaaaccagtcattgaattagggcccatcccatttcaatatgaccctgtttcaaaataacatctgcaataacctatt

SEQ ID NO: 788072 - DNA, 574 bp, Homo sapiens
tagatttccatgagtcctttaaaaatgtttccaaaaataatgtctaagaaaactattagtgaagatgtttgatctattgtatagaaaccaaaaccaacaaatgaaagaaaaggcctctgggaaaaaaaaattattttaaagttttaggctacagggagataatttatttccctttgactattgtattagctttctagggctgccataataaagtatcacaatataggtggcttaaaaaaaaaaaaaaaacatttgttgtctcacagctctgtaagctagaagcctgaaatcaaggtgttggcaagattgtttccttctgaaaagttctgacttaaagtccgttccacrtgtgtcttctagtttctggtggttgccagcaatttttggtgttccttgacttgtgcatgcatcaccccactgtctgcctctgtcattacatggccttcttccttatatttctttatgtctctctgtgtccatattttctttctttataaagaaaccagtcattgaattagggcccatcccatttcaatatgaccctgtttcaaaataacatctgcaataacctatt

SEQ ID NO: 788073 - DNA, 537 bp, Homo sapiens
gtctggtaaattctgatttcccctctgcttttgaagtataattttgctagatgtagaattctaagttggtgcatttattcctaaacatttcccgcaactctcttctttcttgcctggtttcttactggaagtgggctgaaatccttgctcttttttctctacaaggaatgtagttttcattccagattctgtcaagattttctctttgtctatttattgatttattttattttattttattctacatataggaaatgctatgtctggtgctgtatttttgttgtttgtcatgaattgtattctctgagcttcctggaccggttgtttgtttcatgtcattatgytttaaaatttcttgaccattactcatttagatagattctcctcatttctctctttcttgtctttctgctattccagtttcccattttgtacaactttagaaactgcccagcgggtctttgatgtccttcactttttttttccgtttattttttcttggcactttgttttaaaatgtatttttgacctatcttt

SEQ ID NO: 788074 - DNA, 570 bp, Homo sapiens
gtttaaattttatggtatgagcagagaaatatgttctacagtgctctgattgaatatccgcctttcagtgggcctatgtcttaggttatgacttttacgagtgttttgccagtagtttatcttttgtccctattacaggactgccagattcatatgcccactgagcagcaatagaccaatacactgagacatcataatttgcagcagaaaaagagtttaataatcacaatgccattgggcaaagagatgaaggaatcctcaagcttcacatctgtctgcttgaggggttctgggccagggtttttaaggggattgtggcgggtgaggttctggagaattggggttgtcaattgctcaggtcaaggaagattaaatcatcatgatgtgaaaactkcattcttctgtgagtcggctccttgctgggaccttcagatcaactggcatcaacaattttatcagtatgcgtaacataaaggagaaactcaaacagaaagcatatcatctcatgtgccttagatcttatctatagaaaagaaaaggaacacattcttgtgacaagggctacactat

SEQ ID NO: 788075 - DNA, 509 bp, Homo sapiens
tgtgttcattgcagcactattcacaatagctaatacatgaaatcaacccaaatgcccatcaatgatagactgggtaaataaaatgtggtacatatacaacatggaatactatgcagccataaaaggaaatgagatcaagtcctttgcagggacatggatggagctgaaagccwttatcctcagcaaactaatgcaggaacagaaaaccttgaaatatgagctataatgaggggcactagaggtacttggctttaaaaagacataggtgcagtgacatgatgttagttacatagcctttgaagtcatgttgtgtgaaagagcagttggatattgatgttggctaccaaaaccaatgggtaggcatttagattttggttcactagaaaacctgaactatctatcgattaagctctcaaaaactaaatagactgctgtctcctaaataaaatatgtctcccactgtggaaatgtcattgattttcaatttgtatagcttttattattattat

SEQ ID NO: 788076 - DNA, 612 bp, Homo sapiens
aggctttaaaattgagaagaaaacagaaagagtaagtcttaaattcctttcttcctcaccttcctccttcacctagtttgcctgcggacctacactgttacattcccacatacctcctgtgtgtatttctttgcagatcatttaccttacatttctacatttccccttaattttttcctcatcaatagatgagaaaaaaaatttgttaaatcatggtagatgaatatggaccagatcatcycatgaactacgttcaatcattggttttacctttcaaaaaattctgaatgaaatatgtaataatttaatattctaaaactttattttttcaggaatatttacatatattcacccttccttctaaaacagtggccagagcagttagaaaacaaaagcatgagaaacagtaactcttacagttgtattatgcctgtatgccttcccagttctgcaaagattatgaggatttttttaggtctgtacatagttttaaaatatcctaaaacaatccacataaataaactcattaccataataatctgcaagatagacattgtcatcctcaagtaatatcaaataaatcttatttgcctgcaagatctgaatctgaaa

SEQ ID NO: 788077 - DNA, 613 bp, Homo sapiens
agaccaggtagatgatgccacctagagaggcacccagaagtggtgccaccactggcacccaccacaagttctccccatcgctgcaggcaagaggcagaggccggctgagggggctgatgcccaggacagcaccctcatccacctcgggccaagactggttgagcagaggagtcatcctcaggctaacccaggaaacacccccaacccggggccctggtcagcctcagcccgattcagggacagggttgacactcagtgcaggtgcaggatctgtatctstactggcctggggaaatgttgggactcactcctgctccccaggccacctgggggctctgcaggaccctcctgtgctgcccctcacatcaccccccacacctcaacacacaggggccccacagaaaatctcaaaggaatgggcctgggcaggggcagtacctgaagaccagtttgccccaaccagcaatgaaggtgaagatgcgggggggcaggtcccgggacggattgatggcatatcctgtgttcatgccatggtacaccctgatgatgaccacgaggatgcctatcaccagtgcgtgtgttcctggcagtgctgggttgttctcctggtcca

SEQ ID NO: 788078 - DNA, 612 bp, Homo sapiens
agcaggagagctgcctcccctgtggaggccaggatggaggaagtggagtggaggcagggtgagcatcagcttctccacagatgggtggagaagtggtggcagtctgagccacaaggatggcagtgccaatggccacaagarcacagtcaagctgacaggcttggtgttcggttagagagggaagggagcggggcagctcagcgatgccctcaggtcctggctagggcagcggaatgactagcgtggggcacagcagagaagctgtggaagaatggacaaggaggccctttctggacatgttgagtgtgaggagcctgctagacacttgggtgggatggccagtgaggaggcagctggtcatgtggtctcacttacagacacatttggaggacagcaaatcacagatggtcatctgagccatgggcatagatgagagagctcaaggagagggtacagactaagaagaggggcccaagaaagccagcctacaaagcaagaaactgacagccaaccagatcccctaagtaatctgttaaccaaggaactaaatagctaacaactcactaacgcctgtttcttttctttttctttttctttttttttttgagacag

SEQ ID NO: 788079 - DNA, 612 bp, Homo sapiens
agcaggagagctgcctcccctgtggaggccaggatggaggaagtggagtggaggcagggtgagcatcagcttctccacagatgggtggagaagtggtggcagtctgagccacaaggatggcagtgccaatggccacaagaacacagtcaagctgacaggcttggtgttcggttagagagggaagggagcggggcagctcagcgatgccctcaggtcctggctagggcagcggaatgactagcgtggggcacagcagagaagctgtggaagaatggacaagkaggccctttctggacatgttgagtgtgaggagcctgctagacacttgggtgggatggccagtgaggaggcagctggtcatgtggtctcacttacagacacatttggaggacagcaaatcacagatggtcatctgagccatgggcatagatgagagagctcaaggagagggtacagactaagaagaggggcccaagaaagccagcctacaaagcaagaaactgacagccaaccagatcccctaagtaatctgttaaccaaggaactaaatagctaacaactcactaacgcctgtttcttttctttttctttttctttttttttttgagacag

SEQ ID NO: 788080 - DNA, 599 bp, Homo sapiens
atggcaagtgtttccaagcattcagaagtggagagtgtaggaaatccactgcagaatgaggtctgctcgtcatcctctcagtctcaactgctctccctccttcatctctctctgtttcattggtgagtatagaagatcaggcatttttatatgaaatgaaaattgatggaactaaggtgttgatttgaatatccaaccgaccttttattgagtgtcyattacaagttaaattgtgttgtagagaacagctcaggaaacgaatgcttgacattgatgtacataacagaaatacaaacatgccattaaaaaatcagacctcttatgagcatccagattctcacgtaagttttgtgaagctctttcaaaatgagaatgtaaaatttcaaaaaaaacatcattttcacaagtcattcttgagacagaaaagtggaaatagaagttcatatatggttgtttcactagctctaatcttatgtacagtttttagtcagttgacagccatataattcttagttttatatactgatagtcattagaaattacaaattttaaaaaatattcatgtctcattctacgaatcaatgtaaaaatttcattca

SEQ ID NO: 788081 - DNA, 514 bp, Homo sapiens
aaagagaatttatttccaagaaatgcaagagttttatgtattttgcatttaaaaattaagtacagttcaatgagtgttttgatttaaaaaaataaaaatgaacagaattytaaactacacttatgatgtagccatgtggccaaaatactaacaatctgacttaaaatatatcttcatctaattattccttctgtgcaaaagatgaattggatttgttgggaaggatgctttgaaagcatgaatttaattttccttcttccagggtatctatttcttccatcattgtaagtaggaattgcttgctcacatgcaaaaatgcaaacactggtttttaagtgctatctggaagaaatactagaatacatatattctacatacatataatatttacaatacatattcaagatatctatagatacataaaaataaacatttaatgaaaattgaaaatattagaaaggcctaaggtacttcaggtaggtaatctcatttatttttacaggaaaaggatatt

SEQ ID NO: 788082 - DNA, 515 bp, Homo sapiens
tctgtcttcatatatcccaaagcttgagttaaaatgaagataaatcataaaacactcaatgattttgtatgttatattcaaaataaggccacattgatccaaaatcactctgtagtattcagttacttagaggagcatgttaaagttttcatacccatataggataatcaattgtaagaatttctgtcatttgcctcaatggtggtaacaatgtttatttattagtagaataaagagaatttatttccaagaaatgcaagagttttatgtattttgcatttaaaaattaagtacagttcaatgagtgttttgatttaaaaaaataaaaatgaacagaattttaaactacacttmtgatgtagccatgtggccaaaatactaacaatctgacttaaaatatatcttcatctaattattccttctgtgcaaaagatgaattggatttgttgggaaggatgctttgaaagcatgaatttaattttccttcttccagggtatctatttcttccatcatt

SEQ ID NO: 788083 - DNA, 652 bp, Homo sapiens
agatctagagctggatcctagtccaagtgttcctggaagggatggggtaagggtgaatggagtgtgggaatgcagtcctgctgagtatgggcagctgttctggagccaagcaattcacagtttcactttgccaaaataaatccacttgaatgatttttttytcagggatgaaactgagaaattggtggtgagtagttctgcttaggaaaatttttgacatttcaggataaatgacaaatattacactttttctgagactatcttaaaaattcatttacatatctaattctcattattttgctaaactttctatacttgctattcacttattcacatttaaatttttattgtgacaattatataaatggaaatagctgtatcttttaagtatagaatccctatatttttcttcttgctagccatatctatcttatttatagtgagtatccaactttcatgaattctgaaagtgttcagtgacctcagaaagcaatacaattgtgtggtatacagaatattagatggtcatgaccttagcctcccagtgttactttgatgattatattgtattacatggcaaaatggattgcgcagatgtaattaatgttaataatcagttgatgtgaagacaggaagattatccaagtgtacc

SEQ ID NO: 788084 - DNA, 668 bp, Homo sapiens
aatgttttgaaagtcagtgtaggctcctctcccacttgagtgctcactgcagatcttggcttggtgcatccaggctgcacaccatagttctgaaatgatcataggctttatgttacttccccagcttggaagcagcagaggagaccctgtggctcaacgtcttttcttgtcacttggggctccattgcagaaagatgcagaactgcaatcaattagcatgatcagcctgacatggggcagctgcactgtgagcccacgctggggggatcctgtctggtgactagcagagaatgtgggtaggacccgtgggagacagactggcctcctctcmttagagcaactacaacttgcgggataaagcactcggagtctttgctccttccctagttcaagggtaaacagggaagttaaactggagaggcagtggcagagggacttttggttgcccctgggagctccatctctgagaaatgtggagctgctgctactgggagtgttcagccagagggtgaagcagctgcactgcttgcctgagctagaggctctgcttgttggggaacagggggtcaagggcccatagcagcaagaaatggggcttttctctaaatggtggctgtggtgtgctgtacgcatggggagaaagcaaccaacttagaaaacatatttca

SEQ ID NO: 788085 - DNA, 586 bp, Homo sapiens
tacttgcacatgcgtgtttatagcagcgcaattcgcaattacaaaaacctggaacctacccaaatgaccataaatcaacaagtggataaagacactgtggtgtgtgtgtgtgtgtatacacacacgatagaatattactcagccataaaaaggaatgaattcatggcatttgcagcaacctggatgagattggagactattattytaagtgaagtaactcaggaatggaaaatcaaacattgtatgttttcactgataaatgggagctaagctatgaggatgaaaatgcataagaattatacaatggactttagggactcaaggggaaaaggtgggaagggggtgagggataaaagactacaaatagggtgcagtgtatactgctcgggtgatgggtgcaccaaaatctcacaaatcaccactaaagaacttactcatgtaaccaaacaccatctgttccccaataacctatggaaatatattttataaaaaaattatagaaggaaaacagctataatgtagaattttatatccaaatgaaatgctgttgaacattgagagcattttaaaaaatattcccagactc

SEQ ID NO: 788086 - DNA, 553 bp, Homo sapiens
ggctttgtcactcatagactttggagtttttttttttagttatagagaatgtcatatgatttttggcttttattctgttaagaaaaacacactgcagttttaaaattttgaatattaaaacacgttcattcctgtaacaagcccaacctatgtttgtggtttacatattgcggagttttatgtataatatttaaattatttttagctaggttgtaagagagactggactgttactgtcttttcttctratgtccttgtcacatttctatgttaaaattatcggtaaccttataaaacaagctgagaaatttttcaataggggaaatatgtaagtaatgttagttttctttcctgttaatatgttttggagaattctctagtgaaacatctggacctagaacttttgtacatatatgagaaaaagttatttattatggattttaaaaatagttacaggaatattccgatttttatgtcttctcatgtcagttttggtaagtgactttttcaagttttttacaaattttattgaaactgtcaaatatgtactgca

SEQ ID NO: 788087 - DNA, 553 bp, Homo sapiens
ggctttgtcactcatagactttggagtttttttttttagttatagagaatgtcatatgatttttggcttttattctgttaagaaaaacacactgcagttttaaaattttgaatattaaaacacgttcattcctgtaacaagcccaacctatgtttgtggtttacatattgcggagttttatgtataatatttaaattatttttagctaggttgtaagagagactggactgttactgtcttttcttctaatgtccttgtcacatttctatgttaaaattatcggtaaccttataaaacaagctgagaaatttttcaataggggaaatatgtaagtaatgttarttttctttcctgttaatatgttttggagaattctctagtgaaacatctggacctagaacttttgtacatatatgagaaaaagttatttattatggattttaaaaatagttacaggaatattccgatttttatgtcttctcatgtcagttttggtaagtgactttttcaagttttttacaaattttattgaaactgtcaaatatgtactgca

SEQ ID NO: 788088 - DNA, 597 bp, Homo sapiens
ctataagtttaagtatcttttgattttgccctagatattatttcatgattccttgacttattagtgtctgagtataaagtaaaattttcattacttttcttagactatgaagatcttataatacttttgatattttgttaggtagttttgttgatatttattttaaattttatatgatggattttatttatatagtcactatttatttagatttatccagatgttttgtccttycttttcttgatttcatttctaaatttctacatttacatgtaaaataatttttcttctgcttgaaagacattattatttcatttggtgtaatgtataaatgatatagatagttcccttattttttgttttcctgaacatgaatttatttttttctcatattccataatattttattaggaataaaattctagttaccagttggcttccatttgagaagtcatccctaagtcatattgccactttttgaaggtaatatgctttttcctagaactatttttgagatagtctctttgtcgttaattctctaatatgagctatgtagttgtctccatatttatcatgcttcactctggcacttcctga
